United States Patent Application Publication US 2014/0325702 A1 - sequence listing, part 3

SEQ ID NO: 1478 - DNA, 1831 bp, Heterodera glycines
  unsure (1)..(1831): unsure at all n locations
tttctccatatacaataaaaacaaacaaaattttgtaatattttttatttattttttattttttttcaaatttaccaaaaataaaaaaagacattaaacttttaaaaacagaaaacaaaattttaaaaaatgaattgagttcactcattgggttttaaagcctctgctgcacttcattcaaaatcttagaagaaattcaaattgcgttgaagaattttattgttgattttggagtttatccgtagtaaaaattgataggaaattgaaaaattatcgttgcggtggcaaaaggccgagaattgccgcttctgcatcttcagctgtaaaatcacagggcgacgaccgtgtcattattatggactaattaaaaaccggaatttattattattaaaaaaaatgatttttgactggctttttatacatttttcctgagccaaattagtcagcaccaattaaagcccttactcagtcacaaaattctccaaattccccagaaagttttggtgttagtaagcaaatctttttataatccacctaattttggattcaaaaaataaataaataattaaatcgtaaaaatttattaaaaatatccaatagatttttaaaatatatataaatatttcttaccttcaaaaagatcatggtcaaatttcggctctgcgtccaatcagagactatcctcagtttcttagatcataacttttttcttactttgtcaatccatacatttttggtatcaatcgaaagcttgaagtctacagaagtttttgtatagcagaattctgggataaatgcaacagacaaaaaattattctgcatatacgcgaaaaataatgaatatgaaatcattgattggacgcataaactggaatagagcccaaatttatctcacattttaatgtcaccgtcgaaatttttttttttatgttatccaagcgttcatgaattccatttgatgacaataaatgcatgttaattttcatttgaaaaaaattgtttcaaaatgaaaatcgttttgaaattttcaaattatttctttctcgggcatcgtcttctcggcacgcatctgtttgtgttcaagttgcgcaccaacccattggcacattcgcaagtgcatggcgggcacagccgcagtgtacaaaatcccgggttcggattggcacagctcggctcacatccgttgcattttctgttgcctggcctctcattgaacgggcactataatttaaaaataaaatactctatttatgacagtgagttttattttgttttataatggattaaaaaggtgattttatttaagaaatattacccgacagcgaacattgtcattagcctgagcagttagtccaattacacaagaggacaacacaattaaaaataagaaaaagcaaggactttggaacattttctctcaaaattattaatttattttttaattaattataaattatattaataattgtctgattttaaaattaaataagtcaactttaggctaattgtaagttcacttaaatataactaacttaatagatttggtcccatttttatgcaaaaatatttttggttattatcccattagcctactctcgccattgccataaattaaaaactcggccttgcgtgaaattcattaattttgaaaaattaaaaaataatgtgtgctcatcgagaaattgaaatttcgccttttgacaaaaactttgcaaaccanncgggctcggttccctctccnnntataattnggtttttaataattttaaaatttactgttttgcgataagcaccgaaaatttttttttttttacaaaattcaatttgcacg

SEQ ID NO: 1479 - DNA, 8451 bp, Heterodera glycines
  unsure (1)..(8451): unsure at all n locations
aaatgaaatgctacaagcaaaaggctaaagattagtcgacaattaagcaaagttctaaaatttcaaaaaatcacatgggcgtaaaattagcaaataatattaaaaaaataattattccaacaaaaaatttgagagaaaaagggttctcaaaatatgatatattatttaattgtataaaaagcattaaatttaaaattgctgttgctcttccggactaggtcgttttggcgccaacgtttgggcgccagcgcccgagtttttgtgtcctaacttttttaattttcgcccaaatctaacaatcttggtatcattcgacagcccttcacaagctctattagccttacaaaaagcgaaaagattttcaagcctgtgaaaaatatattaagaaaaaactccaaaaattttggcttttttgcatttttcatgtataacttttttggtaattgtctaattgccaagcaatagtttagaaacagcttctaaacatgtaaaaaaaatgcatttcaattatatcttcttttaccccatatatttgaaattttcaattattaaactacatattaaaccaaaaatatgtgctgcttctatcccattagtgtactttgggccgttcaaaatatcaacaaattacgttttgttttcgatttcttccaaatattctgccgctacacaaatatttttcttcataatacaataaaaacaaaaaacaaatattttatgcaaaatttatttttgattcaatttaatttaaaattagggtcatgaattgattttatgtctttattggcaaaaaaataatattgaaaatgaattatgaaagtcatcatagccaagaatctccgctttgcctcttcagctatagtaggtatgccaattgtttctcattgggcatagtttttccaatcccatttaacaaaaattaaaatattaaaataataattattatttcaaaaaacgaaaccaatgactatggttaatagaaaaaattttataaaaatttcatttcttaagaaaaagaaaaagtaaaatcattgaaaatataagatatttaattactgaaggattttgcacaccctttaattaattagcaattaatatttctgcggaagtttcacattagaaaatgtctttctcatttctaataagtccaatgtttttattcatcatgccaatcaacaccaccatcattatcatcaccataattactcattaccatcactaatatcattcatttcatttaaaacccaataaaaacacaaaaaaaaatgtctacaaaactttcattgatgcgtaggcgagaaaaataatacaaaataacaaaacaattcgctgctccatgactgatgccgctgctgcctgtgacattggcctttcatcacatgaaaaaaggcattttctcgatcgccacaaattcttaggggagccggggggaaagagatcaaagttcagcggcaaaagaaaaattgtggtgcgcgaaaatatcgtcggtcactgctgctgacacacacataccaaatgatgacgatttgcacacacattagcaaaattaattaaacaattatttaatagtgatgggccattaagtgttgaatgaagaaggtggcgaagtgaaatgcgcaaggaaaagtgatggattgtccacatcccccgggggnggggggggggagagaacgacagcaaaatgacatgagtgcttgccggtgacatttttttgatcagttttattccagtttttggagcacaaatcggcgactcaaattgagcgcgtagcagcgaaattcgccggatggtttcgattacgtaatgatcaaggttaaaaaatcttgatcgtccaaaaaaggtatgtattatgctcgaatatttgatgatgaagatgatgacggtgatgatgatgatgcccggagaaacgccctcacgctcccaaccggaccgtccgctataaaatgggcagatggacgagcatttgacaccacaaattacccacccaattagttgaaaaccaaaaattaattggccgtgacgaaaacaatatcatcaaccacagaaaaatgaactgctccagcgctgcaatgttgatgctgttgatgaccatcttcactgtgctgtccaatgtcaacgaggtagcagccgaggaacacgagctggtcaggtaatgatggaggatttgtgagattttcgtaccgattaatttacgggatttgcggaaatcccaaagcttttcatttcttcggttttgattcccggagactttttccattctgaatctcagggaaaaatcacatccaatggcatgaaaatatattttctccgctttagccgcattaagcgcaacggctacggatacagcagcggttatggtggtggctgttcagcctggtaagaaagaaaaaagcattttgaacattttaataaaaaaaatattaaattaagccaaagcagctgcaccacctgtggttacacatcctaccatgtaaattcaaaaattttaaaattttaaaattaaatattaaattttcttaaagaccgtgcctgcggctcccgctcccccgccaccaccgccgcctccgcacctgcgcccgtctacagccaggtgaggaattttcaaaatttctaatattaattttgaataaaatattttgaatccactaatttctggattatgaactaattacttgagagaatgtggtgggattaagtttttgatgggggatttcagtcttctgagtactaaaaaatgatttttgttttttggctttcatttctttttttgattaataacatccatgatccctaagattgctgaactacatcaaatttttagccaaaaaaaggcataatttttgtcatatttcattcgttcagtcttcctactcctcctgctccacctgcgggggcagctcctactcctcttacccgtcttcctcttactcctcttatcccgcttcttcctcttcctattcgtcctaccccgcttcttcctcttcctactcctcttaccccgcttcttcctcctcctactcgtcctacccgtcctactcctcctcttcctcctgctccacgtgcggcttgagcggctacagcaacagctggaacaacggtggcagctcgtccaacacgtggagcagcggcggctcgtccatgtcggcgggcaacggcggtggctacggctacggcggtggcagctgctcggtgtgcggaaagcgcaagtgagcgatgcgcagcgcgcgcagcgctgtttccgcacggacgcaacagcggcgagggcgcgcggacacggagaatgaactgacggaagaccattgaaattctcccaaaaatcttgaacccatccccaaccacaatacccatccaatccgtcccacattttgttaggctcagaaagcacacattttaaatggcataattattttaaaaattttaatttaccaattggcacccaaaacagcaccagcacactttgtttatttaattgtttaaattaatttttgtttcaataatgttattttttgtttgtgtgatcacaattctccaccaccccaataaatgataaagattcgaagttgattaattaattttaaatggttttttttatcaggcgccgctgggaaattttatcaggttttggcacgaatgcataatgagcgaattgaaaaagaagtttaattgaaaaattcgtcctgaatttcaataaagaaaaaatttgactctcatcagacttgatcaaattcctaccctatgacattcattttatctatggacctattaaggagtattaaataggcttaattaaaaatgaaactttatattttataaatgaaatagaaagcaaaacagacacaaacttatttgttataatttgaaataataatgctttacaaaacatttaaataaattaaaaatttcctaccttttttttagtcactagttttttcccaactccgccgatttttttcccgggtttgcaagcatatgagataattaaacagccaacctaaaatttctatcaaaaaaaaattggtcattagtgaacaaaggaaagctgatgaggaagacatcattttttttataaaatttgcaaaaatttaaatattttgtattaattttggtattttttaataaaaaattgaaatgtacctaaacaattgatatgcatttggcattttccggctttttcatcaatttttatgcccgtatttgtcaattaaaaaaatcttaaatcttttaaacttaatttgatttttattcatatgattttcttggggtctccctcatcccattgaatcgcatcaaaattttgttttgactattgaagctttgccacgtttattcataataaaattcgccatgaattcataaaaaataagtaattttcattatttatttcttttataaattatatatttttattttcaagaaatatatgaaaatataaatatttatgtttagcttacttctcaattaaatgaagctaattaatgcatttgagtttgctgtttgctccattttattaattgctgctcaattatttcaagtttccttttcgtgtgaaattggtaaattggaaatgaaattaatttattaatttttattcataattattcaatttttttagaaaaaattaacaaagcaattgacaatttgtacataaatttatttgagcttcaaaaaatggataaaagtcagcaaaattattttgaaaatgatcacaaaaattgggaaaacattttgttgaaaattgaatcaaaattattgtacagttcaatttgtacgattttgaagtctgcagaaatgccaaaaaatgcgcataaagaaaaggacagattgaaggaatttttagagaaatacaaaaaactttcatcagaattttcagattctatgctaaaaaattgcgaattttggaaagtttggagattagtggccaaaaacttcggtttgttgactaattttaaagaaaataaaaataaaatttaggaaaaaatataaaagtggcaaatggtgaaataaatttcgaatgccaaaacagaaaaattatccgacgcctcgaaggtgccgtagaagatccatttgctggagacattttaacgggtcatttaaatgcactttcgcaattattgacgccaaaaaagggcgacgaaaagccaattcaaattggaaaaatgagggaaaaagaaaataataattggtgaaataataaattttgacaaattaaaataaattttcgatttttcagggattttaacggattttttaaaaaagcaaaaatgaaaagtgagtcaaatattgcttatttattacgcaaaaaccgcgttgaaaaaaacataaaggggataattgaaataaagcaaagaattgagcatcattttggcactcaatttttggagaaaatggaacagttgcgaccaattgaaatgacattcggtgattatgatagtaaatatattctctaattatatccccaaatctccattaatccctcagtctccaattatcccccagtctacgaggaggatgaaaaataatcccccatgggggataaaaagagcatatacggtaacaagatcttttaaactatcaacaaaagtcgcatagaatttcaaaaactaaattctcggaggcataaatgccatagctgggctcagaaaagttcattcaattttcaaaaaattgttaccaaaaatgttcaaaaaatacgaaaactttttgaaaagctgagtgaaaaatgacgagtttttcactgatattaggtacaaatttaaagcaattttttggggagggtgcggctgtgaatttttgtaaattattgtataaacaaatcattaaaataattgtttcatggctatcccaacatacataagaaaataggaattttggcaacaaatttcaacttttacaattatcgattttaaattatgtagatataattgacgaccaaagattggccaattcatatgtaaaatttctgcaaaaagaggaggcggcgaaattggcacaacaaaatgaagcgcatttattattatcaacacgaatgttttttggccaaattattagcattttttcaatgaccaattcatatggaaaaatgaaaacaaaaaagcgaaaggatgtcgaaaatatgaagagaatttgtgcggaaattgaaacaatttggaacaaaaatttttacgaaatttgtacacaaattgaaacaaattcggcatattccgtcgagagcatttccaaattttggcacaaattggcgaaattattcaacaaaattccatttttgaaaaaatgcgaaaagtttttgattatttacgaagaattaacccttgagaaaaccaacggacttgaagaatttttgtggagggcaaaagaccaactgatgtcagagcatgccaaaaatgtgatcagactgaccgttggccaatcagccgagtgccaaaatgcactcagtcgcttcttggcaaattcacttggccaaatgaagggtgccaaacatcggctatataaatttttcacctcccaattcattggcatcacatatttcgataaattattgcaagaaaatgcgaattttgcgcaagtgttccgttctggtgatttttttatattttcggatgaatattaccgtaattcaaaaataataatcatttaattgcctttccaataaaatcagatttaacaccaagcgaaataaaccaattacaactcaaatattatctaaattatatggacagtgacagtgaaactgatgtccacacgagagcactttttatggtcgattatttggcattttatcaatggtaaatagccaattaaccaagacataatgggctaaattaatgaggaatttttttaggaaaatttaattaaaacactaatcgttcaatgagtttttttttaaatttaattttaggctcaaaaattggcaagaaaaattgtcaaagagaacacagccttctcttgaacagcttctgttccaaattgaactgtacttggattttcttgccagcacaacagaatcggcgacgggcgaagcggcaaaaatggaacacaaacagaaaatgttggcactgaaaacagcgaaagacgcatttttccccgatgaagccgaagtaattgtaattgacggaagaggagagaatacggcaaatctattagcaattaaaatggaattgttgctaatgcataacgaaatcatcaaaggattgatcgaaaatgaagaacactttttggacaaagttaaaagtgagtgctgacgcgtaatgaataattaaataattaattaattcatcattaatgattggttaattgttttaaatgtttcttagcaatctttattgaccaaaaacgactgcgtataatgattccacgtatgtcacaggaataccaaattttaatagacaatgctaagggggaaaagcagcatgggaatgaaaataaaaacaatggaaaagaggatgaagaagaaaagggggaaggaggagaaataggagacaaaaaaagaagtgagaaagaagacgaaaggggaatagagaaagaaaatgaaaagggaatagagaaagaaaatgaaacggaaaaagaagtcaaaaaaagaagtgagaaagaagatgaaagcataggagaaaaaggcgaaaatggaagagacgaaaaagaaaaagaagaaaaaaaaggaaaagaaaaggtggaacaaaaaggagaaagtgaagaagacgaaaaggaaaaaggagacaaaaaaggaggagagaaagaagacgaaaaaggaagggaaaaagttgaacaaaaaagaggaagtggaggaaacaaaaaggaaaaagaagacaaaacagaaaaagggggagaagaagacggaaagagaagagacgaggaaaacgaagacacaaaaggaagagacggaaaggcaaaaggagacaaaaaagaaaaaggaggaggagaagacgtaaaggaaagagacgaaaaggaaaaagaagacaaaaaaggaagagaaaatgtggaacaaaagggaggaagtgaagaagaggaaaaagaaaaagaagacaaaaaaggaaggaaacaagttgaacaaaaaggaggaagtggaggagacaaaaaggaaaaacaagacaaaaaagaaaaagtaggagacggaaagagaagagacgaggaaaacgaagacaaaaaaggaagagacggaaaggcaaaaggagacaaaaaagaaaaagtaggagaagaagatggaaagggaagagacgaaaaggaaaaagaagacaaaaaaggaagagaaaatgtggaacagaaaggaggaggagatgaaaaaggaggcgaaggaggtggagcagaaaacaaaggatgcgttgattcagatggtgaaattagcctttaataataataataataataataataatattaatgtgtttaataatttgtttatacttttagcaaaatccaatatgcataagataagcttatgtatcaaaatactctttagct

SEQ ID NO: 1480 - DNA, 11414 bp, Heterodera glycines
actacatggtaagactacttgaattatcgattgattttctccactgaagggagagaggatcagctgggcgggtccgtgcctattgggtggttgtgtgtgcgtctctgacgggaatggggtggggggtgcgtcgggaaaggtgggttcgggataggggctggtgcgcgggacggagtggggtcgggatttgggggtgtgggatgggggttgcgcgagattttgggctgtgggcattaaatgcgcgggagtttcgccgcgcgggattgaacccgagagtgtggttggcccgacgcgttaaccagtcggccaccgatgcagttggcggggccgtgatattttgcgttaaatagcgcggccccctccccgctggacaccgccgccctttcgccgggcagcgcggacctcctctcttccacggaccccctccctccactgccgcggaccccttctcttccacggacccctccccaccattccgccgtccgtcggcgcggacccctctctctactgccacggacccctccccaccattccgtcgtcagtcggcgcggaccccctctcttccaaggaccccctctctccactgccgcggaccccctctctccgacggcgcgaaccccctcaccccgccgttcggcttaaggagtggtggaatgattgcctgttaaatttgaagtcaatcgtacaaggggtgagcgagttttggtgcgcgagtctcggtgtgcgcgagggggcggggcgtcgggacagtactgcttgaaatggtgcctgaggcgaaattctttcgccgttcagcttaggtggtggtgctatgacggcctgtgaaatttgaagtcaataggacaagggctatgcgagttttagcgctcagaccccccccccccccagttctgtacttttctaaacgttaaaatttttttatcataatttaaattgcaaaaatgaaaaaaaaaacatacgaaaatgataactgattggtcctcccttttcattgctgattctctgcgtattggcgcaaaatttcggcctcgcgttcggcgcgctgaagaagcgcggcttcgattcgacggtgtccaaaaagaaacgaatctgaaaaaatgtgatgaaatttaaaaaatgctaaattgaaaaaaaacaagcttacaattgtcgggtcttcacgccaccaattcaagagcaaatcctcttgagtctttttcgattttgtcatactgaagaaagatttcattgtcagttttctctaattttgcatcattttgttgcgaaaaatattggtggttgtcgagggatatttttcatctcttccattactgtctcggcctcgctgggcgagaggtgaccatgacttttaagccaccgaattaaaacgaaccaaaaaagcaaaaacacaggaaatgcaagaagataatgagaaaaaagcagtacatgcaaaagagtttcattaggctcttctggggaattcaaaatttgtatgtcaggttttgttgtgttggtgttattcattttaacattacataataatatttttatttatttatattttatccaagctttgagtcggtcacaatgtgccggttataatcaaccataatcatttggtcgaattcacccaagacaatcatctctacaccaccaagcggaattggtgaattgaatgttgctcgtacgtttgtcgtaccgtttctcaacagctcaaatccacagctgtcgtcaagcgtggaagtcaatggaatgacaaaaaaggtccacccttttttgaactgggccattgaaatgtcaaatgaacgttccgagttagccattccgagtgcctcatacatgtcaacaaaggcgctgacaaagtgatcatttgaaaaatttagtttataaggaacagctgggtaaactacgccaccagcatgtaccgaaatctcacgcaaatcaaacggctcaaacatgaagggactcagtttgtagtcaccatgaaatgctgaatttccaactaacgctattgtcacacgtcgaggaatggttgcactgaatacattgtactcaaattcgtatcgaccaacactgatgaatgacgacttgatttcggtcttgcgtactgcgtatgtggcgggttgtttttcaagggttttgtaaaggctcatgtttagtgaaggttgtacctcaaccattttggcataaatcttgacatcgtgaactgtcaaacgatatttggtggaatcatttgcttttaatgtttgcaaaagaaagacatctttggccttgtaaattgtgaagagcaagtccaaattatttaagagataaagctcttggtttcccaaatcaaagtcgagacgggagaggaattgcgcatttttaccacccttaaaaattttacaacgctctttatacccatcgtctgatgaatcatcttgatttacggtgtgataataccctgttgaaccaagaaaatttttcttggcatttattggaaagcttaactcattggtgatataggccttgaatgggtataaatttccgctatcgtatacttccgtattgccaaccgtaacttttagttgctggacaaatgtttgaccaatcccttgaatggcagagacactagtatccgcatcatctatcgcaacccatttatcgtttgctcccggtttttcaatggacagttcgagataaagatagacccgcgataaatcggtccacaaattgtcactgtaaagccgaaataggtaaggcgattcttgcgtgattgttgctagcggaagcacctgacgaaagaaagaacgcacaacagacacattggtcggtggaactgagaaaatgtttagaccactgttaattgctaggggactgctgtcgctgattttttgtgggcaagtcattttttaataggttcctaatgagtcaacacgcagacgtttatttttggtctttacaaccattggtggcccgactgacgattgaagtttatttatattttttcgccttatttttccaattttgggagccgagtcttttttgtatcgcttaaaatcaaaaccttgacccttctgagtgtttatgttgttggctgctttttcgagaagattctttagtcctgccttactctcactaacgagagactctttgaggtcttttccctctagcacattggtgagtactcgatttccgctttccattccctgacgtccaattgcggagccaatttgctttccaatcggcagcaaatatctcataagacttctgaacactgcgccaactcccgctccacgctgatagggcaacccccgataaatgttgtatccaccaaattgcacatactcggacgagaatgtggaccaatccacttgtagaggatcaaaatcaacatgcatttttttaaatttgacgtttttacattatttatattctttgaaaattatgctttttacaaagttgtttacgagcttatccggttgcatctttccaaagtgcaaaaagctgacaattttttcaaaggtcattccaagacatcgacaatacaaaaagaaaatgacatgtcgaccacacgcacttgagttggcagactgaaggggaagagaattatattgaatttgtttgtagcgtgacaaatgattcacaatgtgaacactgggcggtggccacaaccccaatgagtcataatactccaaatgcaaaggagaagcgcaatatatgcccacccaatgagaaccatgtgatgtgctggggtcaagattaaccaccatacagtggggaaatttgacaattgcaccggcgggtatttgatctgctgcaaaacaaccaagatagtagtggcgagtcacgttgtttcttgtcaatgttttgttaatttccaacgtgttcatcatttaaaaataggacatttttctaaagtgtaatgttaatgtacatgttccgtattggaatggcatcaagatgccgctattggtacgtatctcaatcagaatttcagaaaactcctttaataaaagtttatgatactgtatggcaaaaaattgttcttcaactacttggtcggggtttccgcgtatggtcactatgcgcaacactggggccgtcacatctccaatcatcattggttcaataagatccggcgtgtaaacgtggaatgatgacacaccacgctcatgtccggcatgaatcttgcctcgttttcagattgaataaactccgtgttgttgaaaccgagaatgtaagcgagttgaggcgagactttgacctttttaacgtaccgtgggtcgatgttcaggacaaaacgattcctattgacgtcgtagttgaattggcaaacaagacgtatctcacggtacgcctgaatccatgcttccgttcccatttcctttgtggcttcaaggatcacgcgttcctcttcggtcaaatttttgatttcggcgttcaattttgtcatgcccaattcatcaagaatgttcaatttttgtcacttaatttcgaaaagtactcatccaatttttcttggtacgaattggtatcatcagctggtattctcaacggtacattactcgttgcagcactcttttcgcgtgtcagaaagccttgggccacgctgttgaggtcaaccaatgttccagtatctgtcaacatggcctgtaggagcagctcttcgtcacggacgccccgtttttctttagtctttcgcttaatgtactcttctctagcccatcgccgagccttgtttatcaaaagcatgaaagaattctgtgttgatcgtaccttttttgccaacggatcacttccctcacccaggagcctatataaatttttgctaagctcattggggtttgtgacatttgatggtggaacttcgatacgtaccgtattccccgtctgccactcaatctgaacaaattgttgctccacggtgcctatggaaggccaagagtgggggtatacaataacggcaagacccacctcccattccgaattgaattgcaatttgcgcggtaaacgcactcggaaagaatttgtcctatttccttcaatattggtgtttgacggaagaacaacataaaaagaatttgaaggcatttttttttataaattttattaaataatgctttttatatatttttctcgctaattgaatttgcgggaatccaactattggagcgagcgctgtaccctttccatttcacaagtacatattccacaccgttctgcctctttttcttcaaaatcttttcaatttcatacattttttgttgtttgtcttctagtgatttgcataaatcatttgcgtaaaaccagccactaataatttcattattgtcatcacgtaaccgataaacaactggcgaacgctcagagtgtacctctgccaccgtgaaaagttcattggtgaagcgtgggaggtaacccttttggaacacgtgcttgtacttttcaatgcgcacgcgatctcccacacggtattttggcttgcgtcgtacaacattttcaacggcatcatgtaatttttgtcgcaatgcttctgcgtttttaaagttcacgtctgctgggcacattccaatgctcgaatttgtcgagtggttaattgcgcaaacaatgtcttgcacaacatcaatccacttgtacgtgttacgctccgtaaagtagcggtaaaggcgctctttgatgctacgattcgcacgttctgccattccggcatgaaattggggagaagtgagcatacaaaagtgttcaacgtcttttgtgcggaagaactgctgtactgcgcgggcagtgaattcctttccctgatctgttaacaccttccacgggatatattttgatcttttgaatatacgatcaaaggcaatgaccatgttagcgctcgtcttggtctttacgggctcaacaaacacctgtcgactaagggtatcaatacagactaataagtacttgaagccacgattttgtttaccaagtcggtcaaaaatagccaaatcggcctgccattcagtatgcaagccgggcgccaatgttggcaatcggcggtagcgccgcttcgcctggcgatgcagtgtgtatgtagcggttcaacgctcgtgaatgcgacaggcgaacttaggtccttgtacaaaaactcgagcaaacgaagctttttcaaatccataatgatggcttaaacttaattggggtgtttttataatttcctttaccggattggccttcgggaaataaatgcctactcaagagcggattctgctttgccctttcaacaaattctttgaatgcagttggctctttgttttgagcacgcttgtccttgttaaacaggtgactaacaatgtcatcaacactgctggttataaatggacgcccacccgctctcaagacctgtccttcctccgacacccctagagattgggcgtttttataaattaattttaagatttccgtttgtgtgggttgtcgtttatttgaactcgacgaccgtgggttttgataatcatcatcatcagtagcttctaattgtttaacattttcttttcgcgcacgcccaattttaagatggcgacgcgtagaaacaacaattggccttgtaacgttgactggttttggcatggcgtcaaccacatcactcaaattttctaatttaacacccacgggacgttcatcttcgtcctttgtgagcttgttgagacgcttaacttcctgctcatatttgactgccctttccgcctcatttatggcgtcatcattttttatttgtttaattcgggtacggaccagcccaattggtgttccgtcagacggtggcggtgctgccaaactctgataaatctcttcggggacgagcagatatcgctttgtatgctgcattttttcttgtttttaattttttggaaactatttatatttttcaatgacatcagcaataagcgggagagcaattgacgcaatgagccccacaatagcgggaaggccatctccgtgttgtagcaaaacctttttggcagagcgcgagcagcgtgtgcgggcgagacggcgaagcacctgtgcatgagctttcagcttattcaaatgccggggacgcaaagggactcggccctttagaatgttgagacatatttcgacaaggcacaaaagctgctgatcagatgcgtctcgaataagggcattcgcctttttggcattacacaatgtctccaaaaaggattcgtttcttgaaactaattgtgaccctttcattttggtaggtaaactatttgtttttgttcatatatatttgttctaaggcggatctcttccggactctctgggtccatgtccacgagaaggtagccaacattttttgcgcatgcgtcacgataggtctcaataaaatgggcagtccttgacgggaagatgtgggtggcgatggtgcgaatctgcaacgcccccgcagggtttcgcattaaaactaaatagtgagaattagtgcgcgccacacgcaactcattgctgatcaggtgctgagtcaccaaaattacgctgacgccccaattgtgtgagccacgggtgaagagtgcgtccaaatattgctgactcatacccaccaccaaattatccagcaccagcaaggttttttcttttttggcgcactcccgaacttgctctgcgcgtggaacaccgctatggacagtgactggcacattgccaattttgccggcgcgctgcagattcatcacatttgtgttcagctccccatagctataaataacgcgttcaacaggggtagagatcattttatccacatttcgcaacagacgcattatccactctgacttcccactgcctgtgctcccagacacaatcattgtgggatgacgaaattgtccatcctcccttttaaattgttggaaagcttccattttacttttttatggaattttctttttatttatagtttttcattttcatagattttaaatggatttaattcttgccactgactggataaacaacgcttatcctgaaatggacctacaggacgccaacaaagagaaaaaaagagctaacgaaaaagaaagaggaggaggcggatgatcccagttggatcagcctgattgacgaggagatgatgcgcgagccgctcgctccaattggtgaggaggcgccagcaacaagttgctttttggttttcatttgacatttaaattttaaatttaggcactccaaaaaatatgcttgcgctgaacgccgtcgccccgtcccgcttgtggaccacctctgcatgcggttcaaatgcagcgcccacgagctgcatgtgcttttcaaaagcctagagaaacgccgggacattgtggagcatttgcgctccgtccaactgcgcactgcccacctgcgcccgtccgtgcgcaattttccagtgcgttgtaatgacctgtccatcctagacacccactcggccccagcttaccgaggctatcttggcataacggtatttttatttgctttatttgtctgtaccataaaattttcatggtccgcatgcactactacataaaacacggtatccgcttgcgccaccctaatttgccgtgtgtagttgaatttggaggcggagatcacaaaacttttttccctcttgaaattttgtccattgttttgtagatgtatttaatttccaattgtactgttgtttttaaaataaatgttcaacaattaactcgagagcaatttttggcaattgcgcaacgtggtgcaaacacggagtataaccccaggcgcttccacgctatcatcatgcgcatccgtacaacaacgggcaaaactgtggctgcactggtcttccaatctgcgcgtgtggtcctcaccggagtgtcccacccaagcagtgcaaataaaatggcggcacgtgttttgcgtcgcatccaacacacacagagcatcacactgggcatccaccagctgcgtgtggtcaacattgtcggtgttcaaacctttccccagcgaatcagtgtggagcgacttcaaaacacgctgggtggcatctatgacccaacaattttcccagcccttcgtagtaaattgttgaatggagtcacgtgcctagtttatatttcggggaagatcattgtcacgggggcccagtctcttgatattttgcaccagtcatttaccaatttgtctaatattataccaaactattttcgtgcgtaatttattggtcacactattttgtacaaatttaaacataatgaataaatatttaattaaaggaaatattacaaaaataaataaaatcacaataaatcataacatcagaacctttccggtgcattccacgggaggggtgtcgttggtggacggagcagcacctcgcgcgtcaggacccgtgggttgcccacagggaagcgattggctttcagcttttcatcatgaatatgcgcatgttttaaaagaaaaaaccgaccatcacgtatgggtagaggctgacaatgtcaatgcacaatatctcctcgtcgtcactgcacacgtggtgcagcttgaacggttcagtgcgccctcccctcagtgcgtcgttgcgcgggtccagcgggcaagggacgaacacggcatcgtaacggcgtttcaggtccgggtcgtgacggagccgctccgtccactggcaggcccacaccttgtggatttcgcagccgtggtcattctctagctcaaagaggcgccgctccgtccgttcgtacagatcttccgctgtccgccctgccgccaattgttgctgccgatcgggaaagcacacgggacagcctaaattttaagatattttgtatacgagaaaaatccgtttaccgtgaaaatagcatccaagccattcaatggccaggggacggagaggcgcttctcgtcgccaaagtccgtccacgcggtagccgctgtcatcaatgtgcgcctctccgaccgaccagctggcgcattgcacttgcgcctccgggtgctccagctcgaagaagcggatgtagcgctgcgattctgccgaagcacggcgtccgcgcaggtatccgccctcgggtgagtgaaccagacgattggcgggcaggaaacagcggcgaaaagttgccagcgcaagaccagcagctgttgacgcgtggaggaatgggtcgaggccttgagtgttgtcggcgatgagttggcggaatcggatgaccgactccctcaaaatggccacgtcgttgacgcagtacattatgagctgctcgcgtagctggaatccattgccgttgttgtcggcgtgccaacggtgaaattgcgcccgtttctctgccttcatcgtgtccggtgcgtagaactcttgagccggtagaccgttgaggcgctgcgacagatgttgtcgtcgaatgtagagatacgggaagaagggcttcacagtggccagatggtccggcacttggaagctcttcaccaacgcgtccaaggcacaaaaaaagtagttgatggaatccttgaaggtgattcgtctttggttacgcccggacagacgcatcgagtagatctcaatccggtggtgcacagatgcttgggtggacggtttcggcggtgtagtgcctcaagtacgagatggaaatcgtactttccaccgttgtgggcgatgcacaccgtgtgtgccttctttgggccatgctgcagcaaaaaatccaaaaattggtccactgggtcgttgccgtcgttgtcaaacgaatggaagaagaagcggcgctggttgaatgctggtgctccaactggcgaagcgctgttgtctcccggtgcattggcaaagggtggcgaagaccactggcgaaacagttgacctctcaccattcctgtcatgcagacgcagccaggagcccgtcttccaaggccatcgttcacgctgatgccagcctgcagacaacgttcgcagatgacttcggcgacgatgagcagcggcacgtgcttctggacggtgcggttgttcagctgtaatggcgtatcctgtgacgtctcagcgtcaaagaagcacagacgaagcggcaattcttcatcgtcctcgtcgtcgtcagaatcgtcgttgtcaacagcaatcgatgcacgttgtcgaactgagccgtcgtcaatgggctggatgtagcaaggctcatcgacggtgtggggcccattgcagcgccgacagattccatcgtcggctggctggtcatgtgggcactgatgtgtggccacgtaggcgatacgtccacacgcacgacacacccggcgccattgacagatgggccgacgttgtcgctgaccacgaccgtccatcggagctggagcgtggttgctgagatggtagtcgtagcacccaccatttgggaagatgaacagacattcagcgcactttcgagcactacttccaccattcggtagcttaattgggtttttttgctattgtttttgtagttttttggagcttaatctacctgttcagtttg

SEQ ID NO: 1481 - DNA, 7053 bp, Heterodera glycines
ttttggagtgaaactcgcaaagaataggaaattcgaattgagtgacgggagagagcgaagaggcgggacgttggaaagagtttacccccccccccccccccccattcattcgaatgagaaatgaaatgacatcagccgtccgctgttgctgagatgatgaactttgattgactgttcttttttttttttgcaaattagtcttttttaatttaattagcatttcgatatatatgaattatggaaggggttgaccctgacactttgctcgaatggcttcaaatgggtgtcggcgaccagcgtgatttgcaactgatggcattggaacaactttgcatggttatgcttaattctcatgtttaaagcttttagcttaagttctaattctttagactcttttaatgagtgataacatcgaccgatgttttgagatttgtcctccaagaacttttttgccagcactcggacggattttccttgacgagtcagctcctgaaaacatattggaggtgagtaacagtaacagttataagaaggattgagctcaaatagacttttttttacagtgtaattttggtaatggtaaggctggtcccctcccccccccccccttccctattcggtaattgttttttactggtcccataaaaaagagaaaattgcatttttattggtcttatgacatcattttcgtccaattttgtgtgaattttactcgagaataaaattgatgcatatctgagcaaaaaaaaagaagccaatttaaattcagggttcgagaaattaattaaaaatttataattaactgattttttcatatgtttccaagtcatttgttccttgtcatctcatttttttagtgttaatttctatcattcgaaaaggtcacggctcgtgccatcacttattatttggatgtgtccaatgagtgtacccgtcggatcacgcaagtcgatggtgctataaagtcaatttgccaccggttggtcattgttgaactgacggacagaacaagcaaagatttgggtgctgttttagtcataaacaaaagtagcaaatattgcttttgatttagcggaacaatgcgttaaactgctggaacatatttgccaacgggagaccagtgcagtgcatgacgcggggggactgcaggccatgctgcacttgataaagtgaatcttacggtaccgtttgcaattttctgcttctccgataggcaccatgttcatctgcacaaagacacaatgcattccgccatggccgttgtcaccaaactgtgcagcaaaattgagccgaccgacgccaacattggcgagtgcagcagaaaccttggtgatttgcttgaacatgacgatgagagagtggcagagtgtgcactgcgatgttttgccgcaatgaccgatcgtttcgtgcgacgtcaaatggacccaatggcgttggcctctcccagcagattggtggcgcatctcttcgaccttattggttcatcttcgacagcgcacgaaaatgctcccactgaattatcttcgaatggggaaaactgcagaattcggaagagaagttccgctttcatctctatggttttctcactctttgtcaatctgtgcaaaagttctttcgccctcactgaagaaattctttcgtgagtttccaatttatttttcttgcatttttaattctcttttagctcgtccaaattggttcctgctttgaaaatggttctcaatggaaaggatgaacgttgtatcaacgtaagtttgtcaacacttcttgttttttattttggtactttgttttaggattcgttgcgtttcattgaccttctaattgtcttactctgtgaaggacggtctgcaatttccaaaaaccgagttttattaaacgattcgggtacacaaactcctctctctctctctttctttttttttatccaaattcttttaagttgctcctcccgcttttgacaaaacgcatcgcaatttaattgacgcaattcgattgcgtgacacggacgcgttaattgatgccgtcgaaaatggaacggttgctaaaaaccgtaattctcaaagactcgtggtttcaggttgacccgaactttgtcgacgacgttggccaaactctgctcaattggtgttctgctttcggcacctccgacatggtcatttacctttgtgacaaaggagcagaccccaacaaagggcagcgttcttcttcgcttcattacgccgcgtgttttggacgagtcgaagtgagctgcatttggatttattatttgctgtaataaccaattatacttcaagattgtaaagatccttcttcgctacggagcgaaccccgacctgcaagatgtgctgcccaatggcattcattggccaataatctaaaaaacaattaaggaagagggacggactgcgctcgacaaggcccgagaacgaagcgacgaaggtcatcagcaagtgtgcgagattctccaaaaccccggtgcttacatcagcgtaataccaacgagcgcacaaatgcacaaacattccgatgcacaaggccaagtggacgcaaaagtggcaccggaccatgacaaaattgactctgaattgggagagaaattcatccaacaattgttacccctcttttgtacaatatttagggtattttcttatttcttgtctttgttttatggttttacattcagaattcgttgactgttggtgtaaggcgaacaacgttgactttgattcgcaaatgtgtgtttcatatttcggcaaaagcatttttcgaaattaccgaagcgaaaatgaatacaaatggagaagaaaatggaaactttgtggagtctttggttggagttctaatgggcgtctttgaaagtaaagaaaacaatttggatgcaaagcaacaagcactgatggttggtcctagaactgttgccttttcccaataaaacgatttagacaattaaatctgtgttggttaaaagccccgatttttggactgaacagctggtccggcttggactgtctgagaaaattgagcagttggccatggaggcggtggatgcagcgacaaacaatgcttcttcatcttccctcagtgcggcgaatgttggtccgaatttcccagaattgtccgcttctgaaaagcaattgacccaaagaaggaccatttcgactgattgtacttctctcagaaaagaaataacgaatagtacgacagacaggtgatatcattattacaataatggtaacaaatctgcaagccttggtctttgctttaagtccatcgtccccttctgtgagtctccgttccgagtcagccgcgccatcaaacgatgcttcacattactcggtaattatccatcaaatttgtttcttttaagctcaaacctcgacccacttgcccaaatggcggcaatggtcaattggtgtcccgacgaaaaaaattaaaaatttcgcagctattttttctaagcttaaaaaatgtgctgatcacgaatctgaacttagattttgaaaatcattgatttttatctatgatttttcatcaactacttgatatttcaaatttttttattgtttttaaaatttattttacaatgaatttgggttagaaaaatgcactaaacactaatttgagttctaatttttcaaaaacaatatcttgtctatcatttctcatcaaacatcagaaaaaataatccacagccaagcggattcgaaccccttattaagggccaataataaaatttcaaaaaatcgtaaaaaactaaaacttaactcctccaaacctcattcgaaagccctttttgagctctacaacagctgcgtatgagttttttacaccagattaattgtctaaaattttttgggaaaatcaagtatttaatgaaaaatcatagataaaaatcaatgttttcaaaatctgagttcagattcgtgatcagctatcttttaagtctagaaaaacaagctgctttaacatttttttttcgtcgggacaccaattcttgaccattgcccaaatggcttttgaacataactcatttcaaaattacagaatgaagaaatcgctgttcatgctgataattcaacaccatcgccgaccgttgaaatattacacagacataatgcaccaaatactgaggaagaactctcaccttcaaatcacggagacggggccaactctccacaatttgataatgaattggtggaggcagccactaccattgccaatgttcttggagtgcaaatagtgcaagacgtttctgaatcatcatgtgaactcaaccagcaacaacagaggcaacctcagaactcagccaaggacggctcggaagatgtgtggacggtggaggagaaagtgttctatcgctggaaggactggaggctgatccgctccaaagattctctgtttttgtggtgcgacgctgtcgcattggagttgaggtggtttggttttgtttgtcatccaattattttgttccatagtgatggctcgaacggatggctgcgctttctgatgaatggcaggctgagcactttgtacagcagcggtacccctgaatatggggcggacaatgccgaaaaccgcaccgaattcgtcgaaaagttacttaaagctcgggcaaccgtgccagctggatcgcagaccaaatcggtcctttccgtgccacgctctgtgacattggaaattcaatcgggaaattggaatttggcatcacccgaagtcggcacactgttattgacaaatcgagaaggcactcaacagaaaatggtcgtgaaagaggaccttccagggttcatttttgaaacgacgcgacatcaaaaacatctgttttcagccgattcaactttgggtttatacttttaatcaacatggaattcagaattattcaataataatgtaggacatgattttgtgacgggttgggccgcgcggggtggcggaagacgccttcgctactttaaactggaggttcaaaaacagaaagtgtacgaattggcgcaagagatttgggacgcttacctgaaaaaagctcgggatgagcccagagaattggtcttggaagttcagaaattttcgaatttgctttgcaaattgacgaaatcaattgcgaaaatggaagagaaagattcttgtgccaattcaacagaagaagtaagttcaactgaagaagtaatggtttcattaatttctaaacttttattttagctgcgaacaattcttgccaaaatccgtgacattttaattgacgagcgtcttctgtccgtatttgaaatatcagtgtcaggattggtgccctctttcctgggctttattgagcaggttcatctcaaccgaagtggagttctcgccaaatctttcgcagaggtcttcgacttatttattaataatagtattcccatactttagattttctctgatgcaaaaaaactttctctgttggtccgtaaaattgttctcgtattggaatttgttgagaaattgcctcaatatctctacgatgtccccggcggttctccttttggctttcaagtgacccatttgctcattttcgaagctacaactcgattttagttgcttacgcgacgtttgcgctttcgttttgaattggaaaatcagggaaaaggcaacaaagcttcgaatcaatttgcgaatatgtaatggaattcggcttgaaattttacttgtcaaatttcagaacaaatcgctttttgaagagtgaaccgcttgtgtcagttgcttcattgaagtcgtatttgtaccaacaactcacgaattccaccaagtcaccaaacagcttatcaggaggcatattatattcttattttgcctagtttttcgtttttgccgtttagtcactccaagcgatgacccgcttcaccagccgaatgtgtccagtgctctctcgaatctcagctttggtcgacctcccaccgctgcttctttgagaatggcgcgcaaactccctaaaacagcggcagataaaagcgccggcgtttcttccgtcactggacataaacacaatgtcacgtccggcggtgatcttttgtctgctcgttccgcttacgtcgctgctggctgtttagagaaagtcggcgggaccatcaaagtgaaaaaatcatttgggtccgggaaagcgacgaaaaatacgacaacgaagaaaggaggagcaaatttaccgaagagttctggcgaagcgccgtcgaaaggacagcgaaatgcaaacggacgggaacagtcgacattaaatgaagtgagccaatgtcaattgaaaaatcaaagcatgaaattcaattttaaaaaataaaattattttagaaaaactcactcgacacaattaatgtaatttctcagcaacaacaaaagtcaatgtcaacaactaatttatttgatgtttgtttcatattttatattagtcatttctcatttcctttaggctgaccagcgaaagagccgaagttcttcagtgtttaatcaggcggcaagtgccgagtctctccagcaccaaacgccgtccctagagaatttgttgtccaaggctcgtcttcatgattgcagcattccggaggaatcattgggttcgcctaattccggaagccccgagccaaagaatctaccagcatttggaaatcatgcaaattttgaaaatcggtttgacaaaagaaagggaagtgaggaaatgcacggactgtcaattggtgccaggttggaatcccctatgaagagcatttgacccgtgaaattaagctcatttgctggtggctcacagcccgttctgaactcttcttgctttgctcgtgaacggcaacaattgtcctcctcggaaagattggcaccgacccaaaatgaatcctcaatcgaaaccataaatggtttggagtctgaattgtcttatgacttagtaaaaattcattgacagaagtcagcaaaaggacggagaatgcatttgcaagtcctcagatggttcaaaagtcaaacaacgcatttgaagcacaactgacaccatttggtaattgcacttccgagaggaaataattaaatctgtaattaattcttttt

SEQ ID NO: 1482 - DNA, 4431 bp, Heterodera glycines
cggaggaaggcaaaatcgaattgtcggaatgtggtgacacaaaaagtaatgaacttttgagtgagacgagtgggacgaccatgccgaaaaaaacgtcgcacaaatatggagaacactgctcgaacaaaggggagtcttcaaattcgcaaagtatgctttataatggaaaagcatcctaattattgtggtatgcgatgaacaatggtcgagcacccgatccccccccccccctccgtaagacggacaaggaatagaaaaaattcctcaaaggattttaacaagctctattaacctgcctaatgattatcaaaacaatgtcaatcttaaaaaagtttgaaaaactacaaaagttggactattcgttgtctgatggtcaaagccttgcacaaatgtctcacgatcaaccaaactttttcagctgaaactcgtcaaaatgtgcctggatccagccacaactcatcttcgcaaattcaaaatattggttcaaatttacgcgttaaactgggaaattacgccgaagttttccgcaatatgatgcagcaagtaaaaaataacaaaaataaacataaaatcaaataaacatttaggtgttggagtccggtgaaaattccgacatttacgacgtggacgaattcgacaacgacatttacgaggacgagttacattttatcgagtgcgatggcatttcatccattttttcttctgctaatttgattcactttagcgattgtgaacatcccggaagtgatcatggaggagggatcagcatctcttccgactcttcctcaattgctgatcgttttgcagagcatgttcaaaatatcggaagcacttcggtctccacggggccactgggcacaagcggtggcggagctaacgctgcgtcatcgatgttcagcgatgccacaacggcacttcaatcccaaattgagtctttttcgtccgttgcctctgcttttcgtcgtcagttttccacctcttccacttccgccaaccaatcaataattcccaacacgggagcctctcgtgccgatgcttttgcagccatccgtgccgccattgagcgaagtgaaaacataatcccttcgttaccaatcgatgtgatcatcggatcatctcctgtcaatgaagggcgaaatcatcgatggcgacaagccctactggacgaattcaatgcttttattccgccttcaatgggcagtcaaagtgatggacgacagcgaagcaacgaagaaggaaattgtggacgagcggctcgaacaatggcaaataaaacggcgatacaacccggtggttggaatgacgattttgtgcttcgtcgtcagttcggggcactcatcccagccttcgaccctcgccccggtcgaaccaatgtcaatcaggtctaaccaagcgcttccatttcaccgtaaaaaacactgcttcagacacaagatgttaaattgccggacagtattcaattctgtacatacagacgcaaagggtcgttgattagagaggagcctaaaggagggggaacttcttccactgccaaagaaaagtccccgattcgattgtttatcaaaatgactggcaaagaccaagtgaaaaatgaggaggaagaattggtggaactgaaggacgatgactcatcactgttccgttatggtgattcccaattgttcctaagtttactcttattaaaaataatgcacttaagtgcaagacttgctggtgacgagtcagaaatgcggacaatcgccgaatgtgtttagcgctgatgcgaattctctgatttgggaaaacacttttacgctgatttattcggttaatgagaatgaggcggcagaatgcccaacggaggacacggagaaggctatgactaacaatttggacgagacaaatcctttggttgaacaggtgggcggggaagcgtatccagggagagggaagtttctatctgtattttacaatttctcaattttcaatattaaggcattgaacgtgatcaaaatattacacgaactttctcgctcaattagcaacttcgaccaaattattggtgttgaagtcacttttccgactcttcctgaagaatcatttcacagtacaaaattgtcgcaaaaactttgccaagaactgactgatccattagtggtttctgcaaaggcgttgcctaattggtgcaactatttgggtgcgttatttaaacataaacctttgaattataaacattcgaatataattttttagtacacaatttcccatgtcttttttcgatggacatacgaacaagttttatgaacacgacaggtttaaaaatatattttttctattttttaacaaaatatttagcttttgggacctcacgggcaattgcgtatttacaaagtcgacgcgatcacttacttgaccaaaatcgttctgctacttcttcagccgcttccaacatggcaggccttcgaagagaggaccattaccctgagtacagaataggacgagttaaacatgaacggataaaagtgcaccggtcggcagaactcttcctggaaaatgccgtcaaagtgctaaaatttcatgcgttgcgaaaggccattttggagattgaatatttcggcgaagagggcactggcctcggcccaacgctcgaattcttttctttggtttatcggcattaaaattcaaaacaatgtatgatgtttgaggttgctgctgagttccaacgacgggacctttgcatgtggcactgtgaggacagtgttttggaaaacgaggcgaacgatcagaaaggcggaggattcattgggtcgaaacctaccggtttttacgtgcactcaaatgtcggtcttttcccagccttttggccgtcaggctctaatgaacgagttttaaatctcttccaaatttttggaatattcattgcaaaagcaattcaggtgagcttctttttcttgcttttcatggccccaaatttcaggacaatcgtcttgtcgacttgcccctttcgaaaaccttcctcaaactgatcacttcgcctaaggttttcttgttttgtttgtgtatttctttatacccattttgcagcttgcctcaggcgatgggccatcaattgaatccgttttggatttttccgatttcgcactgattcaccccgaaaaggtcgtttatacaacaaatttactatttaagcactgcctattttagatgcgattagtaactgctctgctaaaattcattgagcaaaggaaatccatccaatcggacgaacactttgactctgccgaaagggaaaaacagttcgacgaattgcgcgttgaaatgggtgaagccaaaataacagttgaaggtggaatccagcccccacattaattgtcttatcaattattctgctcatctgttagatttgtccctaactttcgcggttaatgctcccgctcgatgtttcccctacgaatgcgttgaattaattccaaacggcgcttcggttgaggtgaatggttccaatgtcgaattgtacgtgaaaaggcttgtcgactttcatttgaatgaaggaatccgtgagcaggttcatttaacatttgcttttctggacttggcttttccttttttagcttttcatgttccgcttcggcttcgacttggtttttcctctttcatctttgacttgctactcgaccagcgaacttcaggtgtcaaatttctcagcaacagtagtaattcatcttttgctcttacatttagactttgatctcgggagaacagagtccaagatggacacgagaagatttgttacggtattcggaaccaaaacttgggtgagaactgaccacagtcacacgattccaataataacccattcttcaacagttacactcgcgactcagtcggttttctgaacttcgtcgaagtgctcatgggtttcaattcggcggagcgtaaggccttccttcagtttacgaccgggtctttttctctttccttttttcgcatttttgggtgtttttaggtgctcttctttgcctcccggtggcctcgccaacctccaccctcggtcggtcttttcacttccctttgtaaatgcggaaatctgtttttcagtctaactgtcgtacgcaaagtcggttctggagatgggtcttatccggtacgatttttcgctctcatagtcagtgtaaatttcacattcagtccgtcaacacgtgtgtgcattacttgaaactgcccgagtacagcagtgccggaatactcagagatcgtcttttggcggcaacagcagaaaagggattccatttgaattgaacgaattggcggggaaaagcggggacgagtcagaagccattcattttcatcaatattttccattattatgtgaccacatgactgtataatatgattcttgatcggtgatcaattaaacagataatttgagtcaactttggccgtttggactaa

SEQ ID NO: 1483 - DNA, 2597 bp, Heterodera glycines
  unsure (1)..(2597): unsure at all n locations
ctcaattgttcgtccacntttcttcgattcggtgnaaagatgggccgaccgcgactttggagaagatctcagtgggtgtttctcgatntattgggcaatgaatttgcaaattaaggaaattttttggaagagattagttactccgatttggcaagttacgcgcagttgatccatcacaaagtgagaatataaggcaaagcaaaataaggaatcctttgtttttttactttctttttactctatcgttttcttttcatctctcctttccctttctctctttctttttcagctctctcctcactctctccctctttctcttctctcccccttctctcttgttctccttgcactcttctacctctatctgtttgtctcactttttgcctcccttcaccattttcaggatatcattatccaatgtctcctccgtcacttggccgatcggtctctctctttgcccgctttttgcgatttttgttcggctattgcgacggatttgcgtgacgattttcacacgcatttttggcagatttttgatgcaatttcaaatttggttttggcatcgaaaggtaaagagcaatgcagtgataacgaattggagtgcacatttcgcgcgatggaacaaattgtgcgaattaattttcgattcatttcagcgcggctaaaacaattgtttaggcatggcttttatgtcaattagttccctaattaccttcccctccctcccttttagccgtcttttaccgctctttgcttttccttctgatgggcgcctccgttttatctccgcccgaactttttcctttgtttttctaaaatcgcctttcccccacaaattggccaaatttcttctcgtcaaatgtttttctgattgtggccatttgcgcgacggactttcgctgtttttcttcgacgcttttttaggagttgaagaaaatgaggcgaaattggaggaagtgggtgacgtggtggagaaaggggaatcctttcctttgcactcacttttagctgatcgatgcattcgtcgtcccaatcttcgaaatgccaactgagtccggactaaggcgcttttccgttacatttctcagcgatgtttttcgaaaaattatttccgataaaaaccatgtcgtttcaacgggaattgtcgccaaattaaacgtgtgaattaccaactgaaattttccataaacttttttcttccttttttagaaacgatttgaaagtgccgttgacccaaatgaacttcaaactctcagcgagtggcttctcctttgggtaaatgccaaaaggcattcgcatttcgtagaagaaaatgccaaaaaattgttgcctttggttgttacgaaaattgagcaagcttcagcggattgtaccgagcttttcgagcagtatttgcaactcatttccgcggtatgaaatcgttgtttcccgactttccatcgctgtgccttcagcttttgctctctctcccgcccacttctgaccatctatcgtccgtttgcgccgttctcgccaactttggcaccgactcgtgccgtcttcctgcacttctccgctgcttggcgcggcttcgtccgcttccccttttccgcttctccgtcatggatttggtcggccgcgtcgcctcttcgcttttggcgtccgttcccgcagattttggaacagtttcacaacaacagctccaacttctccgtgaattgctcattttctacaaaagtattctcactgatttgccctccgccggcgatcattcacctttctgtgagcatttcaatttgtcttttcttattctttttaccttttctcagcgtcttgccaaagcccggctttttgtgttcggcttcatcttccaattcggcgttttgtggtcgccgttttgcacaatccttcagattatccgtccgatttctttgacttcgctttgctcatttggccccatctttggctcgtcaacgaaaagcccgaaggtgagaaaggccattcttttttgaagtgaaagtcattatattttaagaatttcgattctccgggctgggttcgtactctctctctccccccccccggggggactttcccagcttcacagattttcttaataaatttttttttttactcaatttataggatcagatgcaataaatgatttggtgatacaaagcatacgaaaggggacaaaacaaaggctgacggagaaggaaacggagagactttggaacggaacttacgcaacactgctcaaaagggaatgaatgagcagagaagggatgcgatttctttacatttgttgtttttcgttgttaaattatttggcatttttaaattttgcccattttttaacatttttgggcattttatcttattttgccacaaatcttcccctttctcgtgctttttccctaatggcagtcctcacttaaattccgtcttgcttcggttccttggtaaccgcaagtgctgtccattaggtgtggacaaccctcggccattccgtgggttgctcagcgtccaatggctttttgttgggaatctgtcgccgttaagtgccgtcgggtctctttttcccctcctccttggtgccaatgccatccccccccccc

SEQ ID NO: 1484 - DNA, 2385 bp, Heterodera glycines
tccccccccccccccctatccgccgtttcgtttgtcattgccattcgttccaaattcatctcctccgcaaatgcgctccctttttcccgtgctatttctcctgcactttgctcgtcctgccgtttctctgatctgctacagttgcaccaccactctgtccgccaacattgacgagaacgcccaagttgcgctgcgtttgttcctcaattccgtctacgaattgcctccgggtatttccctgtcccttttctcactttgaccctccccaattagtccaccgtttctgcaacatggagcaggatgttgaggtcgaccagcagagactgctggccgtggtttggtgtgactttttgattagtttcagttcaaaaccattaccaccgtccaatgttcgactcccaacgaccaatgcgtgaaagttcgcgcagaaaacgacggtttggcgggggggggggggggcggccctttcgtccgtccaccgttagtccatccgttttaggcttggagttcgtcatccgcgggtgtaagtcgcgcgtgtacaaaacggacgtgggcattccgcagaatgtgcactgcagacaaggcagcccatcactgtgcttttgcaaggaaaacttatgcaattccgcaatttccgcgacggcatcgatggcgacgactatttttatgattattttttatcattttaatgccaaattataacatttggctgaccagcgaccaaaggtcaatttgtggtgaatcactttattatggtagagaagaaatatttagatgaatgataaagaggagagaaaagggagagagagagagagacaggggagagagaagagaaaagagacagaggaaaggaaaaggggagaaacaaagaggagagagacaaagaggagagagagagagagggacgggggagagaaaagaggaaagagagacaaaggagagagaagaggggaaaaggaaggaagggaaagagaaaaagaaaaagggaataaatgataaatttcgtatttcgtacatttttatcaaaagggatatgagatgtttggataggtatatgtacatatgtacaacggatgaattgcctattgcgattagaacctgttggttgttaatggattgggaatgattagccacgaaaagagacgaatgatcgacggacgacggagggggggggggggggggacaataacaatgatcggtgactgcgtcaccaattatcacaatttttggctttgtgtgcaacggccactcacaacaaaaggagcaaatttcgccatttgtcccaatgctttgccaatttcgtccgttcttttcgcttctctttgtccattttatccctttgcttttccttttttctgtgctttttgcagcgaatcccagcgaagatttggtcgaatttctcttccaacaccagcaaatttgtaattccttcctcttttattggcattttatcctttgccattttcaaaggtgggagtcctttttcggatgctcaatgggtgccggtgttggatttgtgcgagatcaaatgcgacgaggaaagggaaatttgtgtggagaatgacgaaatgaaacagcagtgctccaagtgtaagagagagggaaggggaaaaactgtcccaattacggcgagggaaggatttaatgatcgggcaaatggccatgatcagactatttttacttgatcaacaaattgggaatgatcggaatttcctgctgatcatttagacaatgaccagactattacttccgctgaaaagacaaataccaactgatcaataaagtcccttagtttggataacacttaagattatgccagtaaatatgaatttcagtgccggatgcctgcgttcgttcttggatttcaaacaaaagtgccaatcttcgctcttcaagtgttgtcgttttcacgcggccgccccctcaaaaacaaagccaaaccaacggcagtggcaaaggagcaaacgcagtaagacataccgaaaagaaggccaaataagagcaatcgaagcaggatcagcaacaacagcagaagaacaacggacgcgatagggacggaacggagaaacgaaatgcgagcgaacggcggaggtcaccggcgcaaatgtcgacgaaaagagcgacaatgacgagcacagtgacagtgccgaggacgacgatggcgaaaaggaggacggaggagaagccgaagaaggcaatggcacggcaagaaacgacggagggaaaagccaaaaaaggggcgaaagggagcggcaaagaaaggtggacattagtcccagtgaagcggaaggaggaaggaaagaagcaagtgggcaccggaagcagacggggaccgcacattctgaaaagtgtgatcgaattgctgagggaggaatgaccgacggg

SEQ ID NO: 1485 - DNA, 1442 bp, Heterodera glycines
  unsure (1)..(1442): unsure at all n locations
cttttatcaagaaagataaaataaaatttntggaatgcctctttgagataattttcaattcatagggcttttttgggtcttattgcattttaaaagacttttacaaaaattctgaaataggcacaaaaaatggcgaaaaacggcataataaaattgatcctagaagcttcaaaccaagctaaaaactcaaatttatgtttatctcaacgttcgcacaaaaattttaggaatttggcaatttcagccctattaatttttattctgtatcaacaacatttaaccatctacttaacattattgtgttattagagacgcgtgggttttaagtcaaattcttttttccaattgacatctagcagatatcgttaagccttctcaaacatcggggatgccaaagctgataccctttgattctgttgtgtagtgaatttattatatatttaaattcacgccaaatgatgatcatttattgttataccgtatcacccaattattgtccatttaatgagtggacttcgttcactcatggtcttttccttattcatttttcattttgtcaacacacacagcagcaatggcatttgctccttcacaagttattgattaattcctctgactcatcacttcgttctccactttttacttttgaataaatattgtctttactattttgttgtgccaatcgcacgacacaacaactggcgcagtcagcatttcttttcaatttcaaatcattttgagtatttgctattagcggggtgatcagacgaacaaggatttggcacttattatttttccttttctcaatcacttctctccgcttttcattaaattgcctacccttgcccgtaacacatcgttctcgtatcgataagccgtaaaaagcctctgtcgcaaaacgagacgaaaagcagggcgggaacactcacgccgtaaaaagcctctgagtgcactttcgttctgaaagtcacttgtgtggacagccaagtcacggcggtgaccgctggttgcaacgcacttgtgcgacttccaacagcaaaaggcaattatctgatcacatcacatcatcaatcactcacttatcaagccaatccgttgtggtttctgaccgaagctaagcaaaatacttattttgactcaaacaaaaacatttccaaatcaaatcactctctcctctcattcatttcacttaaaatctgagaaatttttcatcacgatcaaatgcctgccgaacaatcaacggagctcaaagacattctgcaggcgatccattcgcttttacaaaaaagcacacaaccaaatgttccatcccagaattcagaaatggacttgttttgcaaactcagcgcacagatcgccgaattcgtctacacaccggacgacaatcacacattcgagcagtggttcgaaagattcggcactttcatcgcagatgaaggaaa

SEQ ID NO: 1486 - DNA, 6836 bp, Heterodera glycines
attattcatttaaaaatgttttaccagcaatcaaaaattgtgttgctgttgtagacctcaaaacacccctcaatattgaaaaaatttatttaatattgttgtgtagtgaatttatatatttaaattcacgccaaatgatgatcatttattattatactgtatccccactttgttgtgcatttaatgagtggacttcgttcactcatggtcttttccttattcattcattttgtcaacacacacagcaacaatggcaattgctccttcaccagattgattaattcctctgactcatcacttcgttctccacttttactatttgaataaatattgtctttactattttgttgtgccaatcgcacgacacaacaactggcgcagtcagcatttcttttcaatttcaaaatcattttgagtatttgctattagcggggtgatcagacgaacaaggatttggcacttattatttgttttcaatcacttttctcatttttataaaattgcctacccttgcccgtaacacatcgttctcgtatcgataagccgtaaaaagcctttgtcgcaaaacgagacgaaaagcagggcgggaacactcacgccgtaaaaagcctctgagtgcactttcgttctgaaagtcacttgtgtggacagccaagtcacggcggtgaccgctggttgcaacgcacttgtgcgacttccaacagcaaaaggcaattatctgatcacatcacatcatcaatcactcacttatcaagccaatccgttgtggtttctgaccgaagctaagcaaaatacttattttgactcaaacaaaaacatttccaaatcaaatcactctctcctctcattcatttcacttaaaatctgaaaattttatcacgatcaaatgcctgccgaacaatcaacggatcttaaagacattctgcaggcgatccatgcgcttttacaaaaaagcacacaaccaaatgtcccatcccagaattcagaaatggacttgttttgcaaactcagcgcccagatcaccgaattcgtctacacaccggacgacaaccacacattcgagcagtagttcgaaagattcggcactttcatcgcagatgaaggaaagaatttgcccgaagcaagccgagtgcgactgatcatcaacaaattgggcgctgaggagtaccgccgctacacggagagcattcagcccactgcaccggaaaagataggttttggtgaaacaatcaacaagctcaaagcaatttttcccgaatcaaaatccctttttgtcaggcgtttcgagtgttttcagcttaagtgcgcggacaatgacgtactttcgttcggagcaactgtcaacgcaatggcagagcgcgcaaaattggatttgacgaaggaccaactaaaatccctcatttttatcacagggattggtgaccacaacgcagatctcagacagcggtgcctcaaatcactcgaagagaacgcaaccttcgaacaacttttggccgagtgtaagcagatcattgcccttcgccacagcactgcagctttggctcgtggaaaggagttcaatgctgtgcagctgcgcccgcaaattttgaaggacaaaccgagggtcagcaaatcaccaataagaacacgaacattttcgaccaacacgcggcacaacagcacttcatcacaatcacaaccaccatcagcttgtacgcgatgcggcggtaatcactggaactcggactgccgtttccaaagggaagtgatttgcaataaatgcggcagaaaagggcatattgcgaaaatttgccgtaatcagaacaacactccccaacattcaggctttaaatattcccgcacaggctcaaataagcaaaatgccaacatcatcgactgcctgcacatcatgccatccgattggaagacggaaaatgaaccgtacattgagcggcatgttcggctcaatggaaaagtgcacaaaatggtagtcgactccggctcaaaattgacaatcgtgagaaagctcatttgggtcaaattgggccaaccgtttctcacagaaacaaagctcaagggtcgttcattcacagggaacattttcacatttatggggaagttcaaggtccaagcagcattggacgatggaatgcccctcgatttggaatgttttgttatcgattcgagggacacactcgatttgatgggacttccatggataagagcatttgaacgcgcctacaaccaagtggtggcgacaactttgtcaatcgaaaatgttgccgacagtcgttggtgcaaccgatcaaacagcacgtcgacgcaattggagatggatttacagaacacatttccaaaaatttttgaggaaacattgggactttgcaccaaaatcagggcccatctcaaaattaaagaaaattcatctcccgttttttgtgcagcacgaccaattcccatcggcgttaagcaagaagtggacaaggaattggaccgtctcatcgatatgggcgtcctgaaaaagaccgactacagcagttgggcggcaccaattgttgctgttcggaaagcaaacggaaaggtacgtttgtgcttcgatttcagcacaggactaaatgccgcattggaaccacaccaccatccactgccacgacctgaacaactttttgcgcagctctccggcgcgaaagtgttttcgcaaatcgacttcaaagacgcatacttgcagatcgctgttgatgagcagtcacgcaagtttttaggcgtaaacactcaccggggtttatttgagtgcagtcgtttagccttcggaattaaaagtgccccaggcatttttcagtgggtcatggaccaattgagtaacggaattcccggagtgcttggctacatggacgacttcatcatcgcctcccgttcaatcaaagagcattatcgaacgctttatcaatttttccaacgaattcaggaatttggtttccacattcaactggggaagtgcaaattcctcgtccagcagatcaaattccttggccaaattgtgacaccaaatggaatcaaaccggactcgtagaggacaaaagcactgcaagacatgcctcaaccacacgatgtctcaactctccggtcgtttttgggtgccatcaattattatgggaaatacatcaaaaatttgcacgaaattcgtgcaccattagactcattgctcaaaaaaggagctaaatgggaatggacacgggaacatcagaaatcatttgatgaagcaaagtctgtgttgctgtcagacttagctcttacacacttcaaccccgatctcacaatcatcgtcaccgccgacgcgagcaacaaaggaatcggagcgacaatttcccaccggttcaacgacggaaaagagaaagttttccaacacgcagcacgaactctcaccaaaacggaacaggcctattcccaaattgagaaagagggacttgggctaattttcgccatccaaaaatttcatcaatttatttttggacgaaaatttattctccgtactgatcaccgaccattgttgggaatttttggctcaaagagtggcatccccatattttcagcttcacgattgcagcgttgggcactgattctgctcaactacgacttctcgattgagtttgtcagaacggactgcacaggacaagccgatgctttgagccgactgatcagcgaccaacgatcatgctcaaaagacgaagacgtcgtcattgcacaattgttggccgacacggaagcagatgtggcacatgtattcaacacgcaaacggaacaattgccactcaccgcaagggaaattgccgaggcacagctcagtgacccgctgatcagagaagttttagagtgtacaatgggacggtggccaaacaaaggccttaatcccgaaataaaaccatattttactgtccgaaacaatctgtccataatctcagattgtctcgttttcaacggacgtacgatcattccacaggcactgcgcgatcgaattttgaaggcacttcacctcgctcatcctggcatcgttcgaatgaagagcctagctagagaattggtctactggccgtcgatggacgctgacattgaatcacttgtcaaaagctgtgttccatgccaagaagccgccaaacaacccacaaaacatcctctccaaccatggccatcaacaacatccgttttcgaacgtgttcacattgatcttgccggaccatgcagtaatggtaaaacttacctggtggtaattgacacttattcaaaatggcctgaaattttccagttaaacaatacttcgtctcattcagttatttcacagctacaatggttgttcgatcgttatggtgttccaaaaacgcttgtgtctgacaatggaccccaattttcgtcatccgtttttaaggaattttgcaaaaataatggcattaaacacattttcagcccgccatatcatcctcagtcgaacggagcagctgaacgctacgttgactacttcaaacgccaactcaaaaaatgtagtggtgaccgaaattggcttagcaaatcacttctctcatatcgctcaacaccaattgctgttttaggccaacgctcaccagctgaattgtttttaggccgaaaattgcgcacaaaattgtcactcatgaggcccgaaaccattccaaagcaacaacatcacgaacacacgtccaaaatgaaattgcaatttgacaaaaagcacaatgtaaagccggtacagtttaaaattggagagcaagtccaatttctcaattaccgaaatggcaaaacactttggctttttgggcgcattgtttcaaataaagggcttatttacgaaatccgttcccctcagcttggcaatcgaattgtcacgcgtcatgccaaccaaatccgaacaacaatggcacagagaggggacgaaacatgtccggtcgccgatgacatcatctttgcgagggaggagcatggaactggaaatgaaacgacggacgatcaacagacaaacacgcagccacaacaacgggcagcgcaacaagaagaacaagggcaaaaccaacaaccacttcctttgcgtcgttccgaacgaacgaggaaacgtgttcgttttcttagtccgacgcacactggacagagttacgatcactgataaatcaccacacacattaccccaaaacaaaatcgaatttttaaccttttcatttaaggggggaggtgttgtgtagtgaatttattatatatttaaattcacgccaaatgatgatcatttattgttataccgtatcacccaattattgtccatttaatgagtggacttcgttcactcatggtcttttccttattcatttttcattttgtcaacacacacagcagcaatggcatttgctccttcaccagttattgattaattcctctgactcatcacttcgttctccactttttacttttgaataaatattgtctttactattttgttgtgccaatcgcacgacacaacagattcaatgcggcattcatccgtccctcgacgccatttgaacagtccattcagtccccagctaaataatttagcataataatcgtcgttgagtttgaggagtttactcagtgccaaaactattgacgccgaaccagtacttgaccagctcgcctttgtccgtgctttcctcgccccatccgattagtttcaatgatccttcttggtaatcacccttgtcagtctgattgacgatggtgtgctaaaaggattttgtataataaaatttttacaatttgatgggttagtgtacgcacagaagactcacaaaaaatccaccgataaatgcctaccaaaagacaaacaattttaatttaataaaatttgaatttttttttaatcaattaaattttatttaaatcatttattttaattaacaatctacatgcagtaaatagaatatcgaatattcactcaaccaaattttatactcatgtacgaatactcgcagggattcgatatccgttttcaaccaataccatttcagaatacccaacccatactcgaacaataatcgattgttgagttcgggttaggaattcggaatggaccaaaatgaatgtcaagttctgcctagcagccttgacagcgcccagaaactcgttttcacgattagacatctcttttaaaaatatgcaaaataaaagataattgaatttttaatgatttacaataagctcagttttcaagtagagccgagaaacattcttatcgtcggtcacttaggttccactacagaattttttttctgaatgcttaaaacaaatatttccaatgattttgaatgtcggaaattgaatttttgcttatcagcatttagtatttgatcattgttcaacaccaacttaccatgtaaacattgacctgtgtgctgttttggccatataaataggcatccacataccaatccacttgaacttggatgggtccgttcgtcattatctcccgcatcattttttcctcccgattttcgtccgctccctcccaatgcgtcggtgcgcctttcagttctgcggagcgtttaaaattataaacagcctaattatttctagtctcaacttgactgtatcaagctcattgtcagttcatattataagtaattgaatagacacagtatgaagagcaccagtggactaattaaattatattggttaaaatttaaatctgagcaataattaattcttgactattaccaaaaagtcaagaaaattaacattaaatcaaaaagacaccctctttggcgtattttcaaatttgatagagaatgataggtaagaataatccagctcaatatgtacaatgtata

SEQ ID NO: 1487 - DNA, 2896 bp, Heterodera glycines
  unsure (1)..(2896): unsure at all n locations
tattactgtaattaccgtaagctaattggcttgattgacctccgccgaagcaatgtgattaaatttttttttaaattttcattttgccaaaatgcccgccgcattttctcattcaaacattaacaggtggtggcaatggtggctgctgctccttcagcggtgctcaacagcaacaatgttgcgcttctgggggcggaggcccatgttgcggaggttgctgaaatttttagaaaattttcagatttttattaattttttcttcgtcctcaaggcggaggaggaggtggaggctgttgtggcatgagtggcttccagcaacaacaatgttgtgccaattatggcggcggtcaatgttgcggaggtggtggactaaagcgaatttaaaaattttgaaaatttgcacccctaatctttgggaaattttcaggattttagacgtgaaatttcatattttcaaaacagtgtgcctagttaaaataatcaatgattatatcaaagtgattaacagtataggattggacgaagctatgggttttgccagaatttttacgggaaaattttcgtaaaaatctgggccaggatcctccttctccacaaatcggattttacatagtcccggaaatcactttccgattcattttccaggaaaataggtgggccatgattcccctcttccccccgccccgataaacgcatttttatcctggaaatcccttgtcaattcttcattttccacatgtcatgctagccccgcccccattttttcaacccaacaaacatatctgtcatgatcaccccatcaagctaacgaactaattgcgcttcaggcaacaacaacggtgttcaacaacaaaactggggtggcggcgccgactgttgcgcgcaacagaaccaagtggcgtacaacggcggctgttgtgccggcaattggttcaacgagcagggaaacctgtgcttcccggtcaacttcaacccgtgcagcacacagtgcagtgagttaatttttgtccggggcgacacgagaccagagttgtcgcgagccgagaaaagtgtcgggattcaggattcgggccaggcacccaataaaaagttcgagtcaggatttagacagaaatttgtcgcgattcgggacgataaaagggtcgagtttcaggattgaggccgggcgggcacccaataataagtttgggtcaggatttaggacgagagaaatgtcgggattcgagactcgggattcgggcggcataattttcattttcgattttctttgttcacagatccctccacttgtccacctccgcccgtacattcacaacaacaacaacagcaacaagagctccagttagtgtttgaatgtcccagctcgggatgctatcgggtaagtgtaaacaaaaaaatggtatacatcatactgtaatattgaggacaccatgaaagaaatggccaatgaattttcaaaaaaaaagtgccatcaaataaatacgttgtgcctacccaaatcatcgatgccaaaaaaaaaatttacgcgaccaagactctcgagcatagtcaattgatatttctccattaaaaatcgtcaaaaataccgtacattttgatcaaaaattctaaaaaaatactgtatatttctcgctgaaaattcaaatactgtatattttttggtgaaaagcctcaaaatacactgtatgtttctcgaccaaaaattccacaaaaaatatcataaattatctatcatgccgatcgctagtgatcaatgactctgatcactcccattttgccacagtgtacgccgtccagcggttgctcaaatggtccatgtaacgcggcacatgcctcactctgtccaccccaatgtccacagcacgcgtgctgctgtccgcagaattcgatcggatgcactcggttgctgaaaagacagtgcgtcattttttcctactgtgtttttccccggtattaccgtactccgcccttcccccctccgcctaatctcgggattttcttcggtgttgggtcgttcgttactcatatgacaaaaaattattcgtaattttgctcaagacaattcttgaaatcatattcaatagcccaaagtgtctttattagcctgcaaattttaaaaaatttcgttaaatttcaaaaaagttatagccagaagaactcaaaaaaaagggtttttgagcatttttagtcataactttttgggaatttaacgaaattttgtgaaattttgtcaggataatggagaactcttagggctatcgatgataattaagcaaaaattatttgtttttatgggttttttagtattcgtcacctttactactactgtattcgatcagtacgaccgataataccaaataatttatagagatttatttttaaccatattttttaaaattctaaaaatttagtgaatttttttttggaaatttgggtgagtgagacgccttgggaagttgcgggcattttgccatttttttttcaaaattttcccaaataaaatttgaaccccttcacacagaattatgatggaaatgggcggcgtttgtgtggtggacgcaattgccgtgcgccgcaaaaaacattgattaattgaaagcaatgaaaaaagaatttgccaacaaagttcaatttcttcttcacctaatcaacaacaacaaaagcgacctcgtgccattttttaactaaattaaatttttaaattttattttattcattttgccgaaggtttcaatgacaaattttaattggttacccgaagtttttaagaatgattattataaaactgctgagattgtgacaacttaaacacaatttatggttaatcaaattttgtaaaattttctgaaaaatgggattaaaaatttttaacttccgngtaaaacaattttgtcaa

SEQ ID NO: 1488 - DNA, 1557 bp, Heterodera glycines
  unsure (1)..(1557): unsure at all n locations
gatcaatgctgatcaataggcaagctcaagaattccaatgccatccctaaataattcacttcgtgaaggtgattgatcaaaaatggatcccgaagaggcgccactgattgacgacgagggaagtccggctgcagtccaagcgctgcttggctcatcactgttggaagaagcatcctcattgaaaagcacctgtgcgttgattttaagttcaagaaccattaacgttctcggacaaattcattatttttctgatcagttttcctaattgatcaattaatgtaaccagccaattgtctgatcagctcctgtccaattaatcataatttgattcctatcgaatttcaaatccacttatgcataatttggaatacatggtgaccaatttgtatttgattagcaactattttctggcaaaatttgaatccaataagctcttgcctggcacttaattcatcctcttctgatcagtccctgatcctaattagccataatctgattttttagcagtcactgaccataagtttatcgctctctaatcaccaaagacattagtttttccatttgatcaacagtattttctgatcaatttgggatccatattgcctggcatttaattcattttcttctgatcagtccctgatcccaattaatcatattctgttcatcacttagcagtcactgaccataagttaatcgctctctgatcacctacttttgctcctctttgctgcttttccttctcctgcttccgttcacttgccactgctgtcgttgttgatgcggcagaatgcaatgatcgggaaaatggcgaaaacggggagtagaaagaattcggcgcggacaatgaggcagtcggggacactttaaataaaatggaaacaaaatgccaaaatcatcaacaaaaaaattctgaatgtgtgagcgtgcgcgttgtgccaatgcccaaaaaagaggtggagcatttgtgatacaaaaagtgccaacataagaaaacagcaaacaaatccccgccataaaattttaaatttaccctagatttcgtgttcgggcggcatttatcggcaccgcccggttaataaatttgatcagggcgacctcttcttgatcagtctaatcagggaaaagcgacaccaaattacctttgtcagccaaatttgtgccgtactgatccatcgtggtaacagtttgcgatgccggaaatggcccagcgacaaattgtgacgatgccattggcggtagcccaaaattgccgttcgacggatttccaaagccttggccagctgcactaccgtactcagcagccgggaaagcgccggtgccgccaatgccgccaccgtacggcgggctgccatattcgcttgtgccgaagccgccagcaccagtgctggctggtagaatgccaggaatgccaccgccggtagtggcgcttccaccgtaaccgttggcaccaagtggactaccgtatggtgtcccaacagtgccgctgccggcaatgccgccaccatacggcagactgccatatgcatttgtgccgaagccgccagcaccggngctggc

SEQ ID NO: 1489 - DNA, 7839 bp, Heterodera glycines
  unsure (1)..(7839): unsure at all n locations
cgacaatagttcagcatgtattcgggtgtctgctggcacatgccttgggctgcccactgctggcagccgtaaatgtgcgagtcacggcacgcaaatgacgacagtgcaccaccgtaaccggcaccattgaccggtccgataccgtaaccgccgtaaccatatccattgagattcccggctccgtaaccgtaaccggctccctcagttgaaaaactaccgtaaccggaggctgaactctggtcaatcacgggaccaccaccgtatgcagcagcaacattggctggaccaccataaccgcctgtgccataagctgtgcccggctggccatagacttgctgttctacaagtgcaaaagcattgtgtgcatgtgtgcgcggtaaaaaacagcggattatggtagtgctgctgcgtgggaatgcctaccgtagtacggtgaaagtgacggcgggtacagtaagccagcagcagctgaagagccaccaaagcacccgacaccgcaggattggggacaaagtgcgcattgggcggcactggcggtcatggcacagtcgactgatcggcacaaatcactgctcaaggtgtggagacacagaattgagagcaataatcaggtgataaaacgagaataaagaccacataggtgtgtgatcaactagtcatataatataatatgattgatcagtgtttgatcagattagaattgaataaatcggagactgagcagaaatcagagatggttaattaatcaatcaaatgatcagactgattgtaagagtgaactgatcaatcagaagaatttagagaatgaacggattagcaaatgatcaggctaaaagcgagctgctcaatcagtcaaaaatcgaattggtcggatcaaatgatcacactaaggtgaactgctgctggtcaatcagccgaaatcagagaagatcagatcagctgatcaaatacctgatcaaccaaaccaaattctgtaagtaatcccgaaaatcataatggatttatggtttcatttgccccgccggtgacctgtcctaattaaaccagaaaatagtacccgtaagcgcctcccattcctgctccgccaccgtacgggaacggaccaccagcgccggcaccgtaaccgccgatgccgccgttaccgtacccggtggcgccatacggtggaacagcgattcccggctgccagtacgtgttcgtcccgtaggacggcccttcgtaggcgctgatgccagccgcatagccaccgctgtacgggctgacatacgcgtagctgggcttcccaccgtagaagctgctggtgccgggcccggttgagtacggtgggtaaaaggaacctatgccaatcggttcgggtattatattctaagatcactgcgtacagatcaggaacgtaatcaaccgataattccatccacataacctagcaagccaacaaactaccgtagttggaacggagcgagttggggtacgatggatagtaattggatgaatagtacggtgatgctggcgatgccaatgcacaagacaggaacaagcagcacagagtggagataatggcaacgaaggggggcattgacagtcgatgaggcactaacatggaaatgtttaacattataactcaaaacccatataatggcacggtgccataaagaaaaaccgagaaatgcgccccgtcctacagtaccaagtatctacagtaaagaatacagtaataaaattacataattgcccgggaaagggtggacttattaaacacacacacgcaccatcacttatcgtccgctcattcctccttctgctgctgttcttaattttgtcactgtgatgatgaaactgtaacggtatcgtaatgatgttgtttttggccatcgcactgtcgtcgctgccgctgctgctgcacactgtcatcaatattttgggcaattaataaatgctacaatttatatcaataaaaataaagagtgttggttgtgcaactactaattattcatgaaaatgcaatggaatgcaccgatagcagcatgtccaaatataaatgctgtgtcttctgcggcgccggccgtcgccctcccccttttttgtgccagcgcgcggcccccgcggggcggtgcctatcggcctcgacaaaggggacacaatagcccacggggggtgggggggggagcgattggggtgccaccgcttcgaccgcccatccaacccgttgaaaatcgtaaatcgccgccgcttccctcccattgtgacatcaaaaatatagcaagttgcgcaacggcggttgctcgggattaaccaatgcaaatacgacgacgccggggggcacaacaggggaaagcgtcaaccggttggtctgcatcccatgggcgactacccggaatgcctgccggatcccctccttccccgctaccgttcatccctaanttccctgncctccctcctcccccggttttaaaattccccaccttcccaattcccccggtttgggccggggatatcactccccggccggccccctccccttgctctagcccttgttacaacaaattctctccgtcccgcaccccccggcggtgcggttttgggtgccgcgctcattccgtcagagtctccaaaattgtaattcctgttgctgctattgttgttgtaaatccaccaatcctcccccccccccacccccctccctccaccaaatatgatttggtgattgccgggctccgctcggtcagctcttagccccgcggcgcgtgcgcacggattgggacggtgacggatcagtgacagatgagcggacacacagcgacgaaatattacgcgctgcaaatgcggggaccaaaaattgaaaagaatgtggaccaaaaaattattaaaattttttgtgtcaatgcctacattcttagtacaaccgaaaatttaaagtctacaatttttttgtaaaaaaaaagttgtggccttggaaactaagaatagttagtcattgaaataggacttagaagtcgataaactgaactagagccgtgtttaaagtgattgataaacgtgcaaagactaaatatcgtggtacgctccagtgttagacaaaatgactcattacgccaaatagtatgtaatttgcgtaattttttgggcgctaattcaaaaattacactgataaatgcttttttgcacaatttattttggtcagccatacctcgctttatttcgaactaaatcgaacaaattttgtatctaaaaaaagttttttgaaaaggagaatctttttctaagtgaatgctaatgcaatttgacatctcagaaaaaagttatgagagtttcaaatttttatcacgttataactagggctgggatttttatgtgctaaaaatcctgaaatatgtaataaaatatgtgctaaaaaaacccaaaatatgtgctaaaaaccaaaaaaaggcctaaatatgtgttaaaaatgcaaaaatatgtgctaaaaattggaaaaaccaatggtatttacgcaaaaaaaaaacatatttaatatcagtctttatcaattttcgcccaacgccaatcaaaatgttggcgatatcaatcaatttgtaaagtcccggattaatttttccatcagttgaataagttccttccgggaactttgaaatccagtgacgatttaacacagcgttcgatttggctgctttaggcatttaaatatataaagaaattttctaaatgcttaagaaacgtaaagtagtcaatttttagggtccattttcagattttcttgtatttttcttacgatttttctcaaaaatgccaaaatatgtgctaaaaaatccaaaatagctcaaatatgtgcgatatgtttttatgtgccaaaacgccaaaatatgtgtttttatgtttttataagtcgctttaaatcaaaaattgttcggagaaaatgctatttttgggcttctctcgccataactaagccgcaaaaaaaatatgttaaaacataaaaatcccagccctagttataactcaagtcctaaactgctgatttcaatcaaaatgcgaaaactaatctttttctattggttctaaataatgttgctttttactagaacccggtaaaaaatctttccgagaacgggaatagataaagagcacgacgggaaacggaacgggatttccggctttttcccgttcccgtaaaaatcccatcaattttaacgggaatctgatatatttcaacatcatcgcttttcgtaaaatacgccaattttcgcagtcaattctcaacgattttccatcccttcgcgttgtcactttccatgacggcatttcgctcgcttttccgcccgatgacagtgccaatgcgtcggatggccaagcgttggccaaatggctgttcacggctcatcccaacaattttatgaagaaactcattgtcaaaattgagtcagaaatggagcaacaatggttgtcaacagtggaacatatcaaagcagtgattatttcaatttcattattgtttttaccatttttaaattcgttttacacattttcctctgcttcttctccggttgctttcggcatttctattgactttccgtcgtcctttccgattgactccattttgccatttgaactgaccaacgaaatgatttaggtataattgaacccaatgaccgcaaactttttcccccggaaaagcagcgcagaatttacgacaacaaaacaactaaagggtgggccgagtattatccacctgcattctggctacaccaggccaccagttagagaggaacctttttgttgcaaattcatgccatgattcagcttccgcttcaacatgcgtgccatcgctacgcataagaagccgtggaagaagcttgtggcgactgccctccacgaagggatccattgcggtgcagtttatctgcgtggtatacctaagcgagacaataactgccgaccgatggtcaaggcttacgggaaaaaactgtcgccacattttgacgcgctgagtatgatggtggagacggcgtttccttttgttaagccccctggacgtgtacgaatgtaaaaggaaatatattaaacaccaattttaaagagattgtttatagaggagctcctccggcgacaacggcagttgtgtggtggtggtaggtgttggttgtggaaattttaaagagaacaacaacaaatcagagaaaaaaaacatttctcattttggcgtactatttctttgtctctgttaataagaaaagctgaatttacttcgtgacgtttaattttttttctacatgataaatccattttaaattttgcttaccgatagagaaagaattaacggatttttaacgctcgaattttagttttttacgctcccatctaaagttattcagaaaacaaaatttcgaacgtccatatctttttgctctgtgttaaaattcttagtatttgcttagaaaaagcttctcctaatcaagagctttcgaatgatatcaagattatccagtttggatggcaaaaaccctcaaaaatgactctgaaatatggtcattttttaaattttttttctctgtaaagaaatagtacagcaaaatgagatttcgttcttgtcattgtattttgtttctcataatgctagtagtgaacttttttttcagttcgcctattttttaaaaattttgtttgaaaatgtcgcacaatccgaagaaagcggagaaagaaatggaaaaagcaatgtgaatattcaaattttaattcccatggctaatcacttcgctgtttcagcttcatctctgccgattgttggcttgaggtgttcgatttgcttccgccatctcagcttggactggaaattgcgatgattagtcaccgatttgaccgccgcgtggacgaacacttcaaaacacgaaaatggaaattgggctacatgaaaattcgaagcaaaattggacagaatagcgcaaatgaaatgataattgtcaattccaatggaaaagaattgccaattccgcaaattccgttgccgaacaaagtcatggcattcagaagcattgcgatcttgtaaaaattaaattttaaatggtttctgccattatattttctgattttcagcttcttcgacgaaaatgtgatcacttttctcggccgttttcaacgtttttacgacatttgtgaaacaatgttgtacattcgcgctgaaaatgttcgcattttggagtttattgtgctcaacactttgccaacgctcaaggacaccatcaaaaatcgattgcccagacctttgcagtgttagtttcgaaggcgccatttttcccgcttttccgcccgacgacagtgccaatgcgtcggatggccaagcggtggctaaatggctgttcacgcctcgtgccgacaatttgtggaaggtgctcagcattgtgaattcaacgatggaacagtggttgacaaatgtggaacaaatcaaagcggtgatttgcccaatttaattcattttttaaaattttttttgtcttatttttaggcattttcggatgcttcttctcctgtttctttcgtaatttactttgaatttccgccgccctttccgattgattccattgcgtcatttaaacggaccaacgaattgaccagggagcaattgacattgtcaccgtttgaagaagaagcaaatgttttgcagctcatgcgttgttcatgtgaagaaggaagtgaggaaaaatggcaaaaggcgctgaaagaattgttttgttttcatccacaaaaccaaattgacatttggatcggagacgacgaatgcgacgatgggtgaattcaattttaaaaatctaaatggtaattcttacatttttattttttaaggcttatcggtgcttcttccgccgggccgagtggtgatcagaaagagcagaaaaaatgaatcgatggttgattgattggttgatgtgattatgtgatccaaatgttggacttagccatttaaatattgttgtatttgatttttgcttacaaatccattaaaataagttaggctttaccaataattttaaataaaaaaaaccctacgggaaatagattatttaatgatttattttttgtcccccccatttttcagccgcttatttttttaaacctttaacaattaacataaatttgattttccatgttaatcattttgcttttccctttcagcttcatctctgccgattgttggttggaagtgttcgatttgcttccacgatttcagcttggccttgaaattgcgacgattagccaccgttttgattatttcgtcgacgaacacttcaaaacgcgcaaatggacattgggcaaaatgaaaatgggaaagaatggcgcaatggaaatggaaattttcaattccgccgatggaaaagctttgccaatcccgcaaaatccgttgccgaaaaaattcatcggattcggaagcattatgatcacgtaaagtgaatttataagtgatttgtgaccataagtaccacttatttccagcttcatcgaccaaaatgtgatcacttttcttggccgttttcatcgttttttcgtctcatgtgcaacactattgtccattaccactgagaatgttcggatttcgcaattcgttgtgcgcaacatttggccaatgctcaagaacaccattcgtgagatgcagtttaaagtcatcgcttttcgtcaaatccgtcaattgatcccgtccattctctgcaattgtccatccctttgccttgttttctatgacggcattttgcccgatttccgcctgaggacagtgccaatgcgtcggatggccaagcggtggccaaatggctgttctcgccacgacaatttgccgaagatgctccttgtcag

SEQ ID NO: 1490 - DNA, 1494 bp, Heterodera glycines
ttccgatttccgacatttatggggtcgctttccgatttccgaaaaaatttgggagtcggaattccgatttccgaaatttttgataaaaagtcggaaatttttttttttgaattttttttccaaaaatttaacaatttttgtacaatttctgttaataaattgcactgaaattttcaaaaaacttcaaaaagataccgagtttgaataaaaattgcaaaaaaacaaacaaaaaaccattataatttatcttcacagttttaaatactctaaaataaactttgcaggaacaacattttcctttcgttcgaatttaggtcatttcttaaaaaaacccgaaatattcgtgattttaaactaaaatttaagaatacaataaaaaaaataataattttgattttaaactcaatcgcggaacattctcatttcttttttctttgaactcgccatgtttcagaataatctgtttcataataccggtactctgtgaaaaattgggaccttactagccgactctgcgaaaaccatatcggtaccagttttttcttctttttttttggtttgtaacggtacgaattggtatttatccaaagtgaacattttttttgtttttttttaaatttttaagaattcaagttattctatttttctgcttaaaatcataacttgaatcaaatattcacaaaatcaaagaacgagacgaaataaaaaaaattttcaaaaccaccaaatgtgaaggtgtaacattgacctggaagatctttattttaaataaaattttcattttattgctgtaattaatttaattatattttgtttctttgctttttttacgtgtaacaatatgaacattcttcatttgcatgtgaatacataataggtaatttcaagggtgtttttaacaactatgttttccctcaccctccctatcccctccggcatattgcattgattttttgttgtttcttttttacggatttaaaaacttaattattttgcataaaaattattttttgagaattttttttgaagaaatttcaaatttaattaaattcagctacattatttaccgataatggatatttttgacgaatttattgttgttgacgaaaaagcattcaatggtctgaaagccgaggattgtaattcatcagcagcaggtgttaacgtttatgtgccaccagcttggcggagtcgccggtaatgcatatgctccagggatggatcggatccgactcccgaaaattatgagctccggaatcttggtttctaaaaattttgggccttgaaattacaatttctgtaattttgtacatcatactgtaattccgatttccagatgtattgaaacctagtaattcggttaggaaatttttgaggatcatatcaattcctgatatatagggctggtaattttatgtaaatacatattttttctggtttcaacggggggtaaatagtaagaaaaacactttcttttttgtgtttgcgagacct

SEQ ID NO: 1491 - DNA, 10856 bp, Heterodera glycines
gtgattgatgatttgttgtatggaaggggggggggctgctggtcagcagcgcagcagcgaggaatggcgcgtgcatggggagctagagaaagagaagagagtgaagggaaaagtgagagagcgagacagcgagagtttgtgtgttgggtggtgttgtgtggggtgagagatcgagaaatcgttatagagtgaatggaaaagtttgagaggaaaattagagtgaaaggaaaaatggaagagtgaaagagagagtgagagaaacaaagagagtgcagatggatagagaaatgtaaacgatgaccaacaagtgaacgcatagcgggcattataagcgtcatttttcagaaaataggggggcgggtgtcttaatgaattaattttaattatttttctagtgtttttcaggttcaaaaaatttttttctcaaaaatgtccggcaaattgatcgtggcagaaagtgacacgagcttggacgctacaaattcggtgagtggagggggaatttaatgaaattccaacttttaattttttttttcttgttaaagttaattattgacacgaccaaagatgtggcggtggacgatggcattgccatatcagctctacagcagcaggttaagggcggggggtcgggatttaaagataaattaaaaaaaataataataacttttttttatttttttttttgcaaggtccaaaacaatgacggaacggtggaaaaggacggcgacgtcgtcggtggtacaacaatcggtggcacaacgcacggcggaacgggccctcaaattggacaagaggtagagctggagcggcaggaaaatggcggcgtcgttgatggcccagcgcttggtggaaccgacatcggcggggcgcaaaacaatggcggcactacggaaatgaacaacggcaccaccgacacagcagctgaacccgaggtggagttttaaaattttgtaaaaccaaaaaaaaaaaaagaaaattttgtccaaattaaagatgcaaattgccagtggcagtggtgttggtggcacaacggagcgtgacgccgggtctgaccgggtgctgaggagtgcaaccaaggcagaactgatgaaattgcaggtaaaatttgaaggagttttaaacgaaaagccttttttcgggtgtaaattgtcatttttttttcaatcaggcaaaacagcgtcgtcaaatgggcaagcggacgggaggcgcgccacgcggaccaaaaattgtggcaggtgcatgcgcgtcacccgagcggaaaaaacgtcaaacgaaacattacaataaattaaaccgagcaaatgtaaataaaaaataaaaaatttttcattttttatttttttgaaattttaagatcaccgtgaccaatagtgccccgaatgttccaacaataattagaacgcttgaaggcgagaggagttaccgcgtgaaagctgtgttggcgtcctatactcatacgaacgggaaaacagcgtatttcctcgactggttgcgtaagtggttgtgatacaaattaaaaaaatttttattttcatttcttctcacatttttgtcactatttgtttggttatggacgagttgtcaccgaatagctcctccataatcaaacagtccggggtttgaatgtttgttgccgagttgtcgctgaatagctccgcgcaagcgtttaaattccgttccccctctttctctctctctctcttttaattttatatcagagtcgtaaatataatgattattaattaggcgcaaggggtcaagagtgttggattcccagcgagtcgtgtgattgtcttgaaatggcaatagacttcacaaagaaggcgaatgtccacgatgttctccgtggattacttggcgagccaattgctgaaagtttggccaaagaaataatggcgagtcccaaatttatagaaggtcattcattttttttttttttgaattttgaattttcacaattattctttaagtttgtgaattattgggccgggaccctgcgacggtgttgaaatttgatgaattgaatatttcttttgctccgtcgctcaatgtggaggatattcaatataaaaaagtttttgttgttaaaatttttaaatttcacttctttttttttccaggcagttgggcagttgggcgaatttataaaaaattgtttggaagcggcaccggcaccagagcaaagcgatagtgaagacgaatgaaaggaaaaggctaacaataacaaattcaatcatttttaacatttctcaccaatttgctcttacataacacattcctcactatatttcctctcacaacaacataaacatttctcacccatttctcactaatttcctcataaacatttctcaccaattttacaattttcaccagaaataaatttaatcgtacatatttataaatttaattaattacaaaatattgatgaaaaatttaatgttccatgtaataattagtcagagttttacaatatggacatttctgggggtgctcagaaagggtcaaatgataaattaaacaattacggcatagcccgacatgtccacactggccataaaattgggcagtgtggacagtgcacaggcagagtcccccctcagtgggataaaacaattgtgtgggaaaatggacggctcccaatgggtccccccaccgaaaaagttcccgagttttgcggccttcttgttgcgccgcctccaatgggttgcgtgccgttattgccattagcatttgctggagcgtcagcggcccaaattcgcggctgatgcgcccataagggagtcccatgcgcattctttctttgttcctctcccgcacactttcgcacgccctgcaccgggccgaatggcactcgccgcatccttcagcagaacagttttattcaaatttattttatttttaattaaaaaatacattacttgctactccaaacagcgatggtgcaattgatgaacatttacgccgggacattttattaatttttttttttttgggggcttgtgtaatacagtgaatggaccttacacccgctccattttcaatccatgtgccacccccccccttctcagtgtctttgccagattcaaattcggcaacccaattaattatcaccccagatttcatccgaagcaaacacaaaaaaaaaattgagggactgtctcaaaaaatgtttattatgcagaattaaatatcaaaattatggggattgcatcatcaaaattcatatcccaaaattatctttcggtcaaatttcattttttcttcattggcgccaaaagatcggttgcgcggcagttggcccacacgcattcctcacacatctcaaagccgaaggcaaaacggtccccctccaggcgcttcactttctgctggttgttgtacagacgattccaatcatctcaaaaattttaattaaaatttgcagaaattattagtaagtattaccatggcacaaataggtggtcagcaaaaatttgccttttgccaatttccacaactctcggtcgtccactttgcgtttctttgttgccaactcatccttcggctcaacatttttgggcgtctcttcatgtggcttgggcgactcgggaccaattattttatgttgctcagcaggagcagtagcaagggtagcaacgcgtctcttcattttgacaaaaattggtaaaatgattctgggtttttggcaggcaaaatgttttggcttttagtgggcgtgtctaaaaccgtgactgttttcaaatggtgtgtgtaggcgtggccacacttttgcgcatataaaagtaaaatttttcaacctcattccaatttcattctcctgccatggttcttgtaagcacattttgcgctcagcttctcaactgccctgtcaagtcattgcgcgaccggctcaaccacccagaggatcgggcgcttgtgcttaaacacatcattgggcgcaaagcacgcaccacatacaacgaccgtaatggattgaccaaaactttcttcgtcactggaatttcggtgcacggcgccgcctttcttcccgcatatgggcaattgcgcaacccattcaacatcaatgtggcggcgcatttttatgcacggcaccgcataaagcttcacttcccgtatgcaccgtgcataattgaacgcttttcggggggaggggaggaccggcactatccaatggaacttcttgagctgattgatgacaacatggacatggacatcaacaacaatgagcattggctgggccgtcttttcactgaaattgacgaaaaacaatcgtcgtcaaactcatccgacacaacaatgcgcctagtatttgagggagacatggatgaagacagcggacgcaatgaatgctcacagagtactgtaccgttatattagttttgtttttgctcactaattatgcatttttcttccttaaaatgaccacttccatctattaatttgaaattgcattttccattccttaatttttcaaaaatcgtgtcttctttagcttaattatgcactttttctacctaaaaatgacatcttctaatgcttaattatttcataattacatcttccattcactaataatgcacaaatttttaattaaaaactaataaaatggcataaaatgtacacaatttacaatttgaggtacaaaagaaatagtcgtgtgtgtgtgtgtgtgtgtgtgtgtgtgtgtgtgtgtgtgtgtgttgtgtgtgtgggtgtgtgtgtgtgatagataatgtacaaattacaatgtgtgtccaaaattcaacacattgaaattggccccgatgattccctttcccacaaatgggcgatagcacttttgcaaaggcacggaaaccacccgacctccctccctgatgtttgcacgaaggaagttggggtatgtgatggatatcggctcgtattcaccacttgtcgcgtaccggaccacctcctctttgaagttctcatagcgcatcccctgattgttgatcacatcataatttagcgtcagcccgcgcactttgagcacatgttccaattgggctccctcttccgcacccttgcgtcgcagacaaagaccgtactaaaaggtggtaaaattgaaaagtaaacaaaaatgaactgaaaatgcacttgttttgccccgccactgcaaaattccacaatgtcgtggtcggggtattcgtcggtgaactggcccaaatggggaccagttttcagcgggcaccgctcctccgggtggacgaggatgaggctgtcagtgtctaaaataaatgtttgtgcacaaaaattttttttggtagtttgacttaccagtgtacaacagatccgagcccggtgatctgaacaccttctgcattgccttgagtagaacgaggcgcgctgctgaggtggtccatagtgaaatgactgaaattttataaaaattaacaatttattgtgagtgtgtgtgtctcaccaatgttggagcatgagtgctcatccacccagtccttcttctgcagataggtgatgagtatgtgctgctcgtccaactcgtcgattgatgtcacttcgatggatttgttgtccaggtactccgccaaagtcgctgggtcgtcagtgatgagtgtttgagcgagtccaaagttgcgaagcgaaaatcgaccccctaattttttaaaaatatataataataatggacgacagtactcacataagttgttcaagcagagcttggccagggaccgcttccctttgttgaccgccattttggttgggtcgatggtgatgtcgaactgctctgcgcactctcggacaaactgttgttccttctccgcatcgcctctgatgctgttgtcaaatccactggcctggatcttctgggccataaactcagcgatgtacgggcggaagagcttgtcgtcactttgctcatactccaacacgcggaagacctttgtgacgaggtaaccctcgtccaacgcctcgttgagctcaatggaggtgcacgtgctcacccacccccgctgtctgtcattgtgctcgcagtggtagttgggattcacaccaccagtcggatgctctttggcacaagtgatgcacagggggaagcaaagccgctctccaactttaaccggcagaacgggcacgtcgacgcgacggggtggcacaacccacactttgagcagtgccaaagggtaggggttgtccgctgcactgcgccaatccacttcctggttcaacacatgcacgtttggctgtccgatagggtaacgggttgtgaagctgtgaaggaaacaatgttaatttgttacaactttaactgtgctcactttatgtacgggtagagcgatgtgaagtcataataggagattttctctcccggtccagccttgcgcagcagcttcagtggtccagttcgccctcccataaacgcgtcgcggatcaccagcgggccatcatcgacgtagtcgtcaaatgccttgcgcatttctttgctcctctccagcatccgatggatttcgcattcccagtagacgtccatccggttgacctttcccctcagaaattccatccgcttggaatcccgttcgcgcacttgtcccgcagtcttcccattggggagcagcatgttgtcgttggggtaacaccttttgcacccgtgacacgtacagccttaaaattgcccattttataataatggtgaaaaataattaactcaattaccattgacttcaattgcgcgcctttccgcctcaatccacccatccaaggagtagggcccaatgcgcttttcccctccagccgcgtgggctgtctgcacttgcactccatgctccttggcgtaccagtggaagaagcgtaaggcgagcaggctttggttctgcgcgttgtcatagccgcgctcgggcacaatggccaagtgctcgtcgggcaggtggtttgtgcggaagtgtcgcatgcatgcccctgcgatggtcatgcactcacgcaacacatcgatcccgtcgtggttctccttatcgtcaatcccgtcaacgtagtcttggcgccgtgaaatttcgaagaattcccggcgaaaggcgaccagagctgccatcaatatttccacatcgttggtgcaataactggaaatccaacaaaattattggtattgtaaaataatttgaacacacctagctaacgcctcatccaatttaaagggctcatggcgatgctcggcgtaccattcgtcaaatttctgcctcttgctgggcatcattccactagccaagtagtcttcgggcgtcgggtgaatctcacggccgtagttctcgggtcggttggccaaatgggggaagaagggcttgtcctcgacgtccagaccgtaggaggggatgagtgccgccagcgcgcacggcatcaaattgaaagagtcccggaagacaatgttcgggttgcgcctcttctgcttgcgtaccttcatctcatacattttgttgccctgacatttttaaaatatttttagacaaaaaaatcataattgagtgtacccgtcgaagcatctccgggttgaacccaatccggaatagctcgcgaaagaccagaaccatatcgaaccgtccgccaaagtgtgagtaggcatatgtgtcgtatttggctggtagttggaagatgagccaatccacaaatgcctgcagtgggttgtccgccacaacacgtttgtccacacgagtgtcctcaaagggccgatggcagaaagcgacagttcgatgtggaccacagattctacagcccgctgttaccctccgccaatttccgctctcaatgcactcagggcacgcgactcgggcagcgatgaagttgggctggtgctctctcttctctggctgctgggggtccactggctgatgctgcatggtttccaagtcgaaagccacaatgcggtacgggtcctgctcttttggctcaatgggctgaatgaagcacccccgctcgggattgtgaaatgtgttgcacagctgacaataggtctcgtggcatttgtgaccctaaatccagcaagaaatacaaaattttattttatttttaatgtttacttttctcccatctctgttatgtactcgtgtgtcccatataacaccgcagtccttgcattgctttgacttggcgcaaaagttggatgccaaatggtgttggaggcacccgttattgcgaaactttttattgcaacccgcacattgatggaaaaagccgcccaatggaacacacgggaatgcaggcccgacacgtgagcaaagcaaacagcgcgccttacaggaattgaggtgccttgacggacgctcataaggcttttcgcagtcgaggcagtagggttgtccaaacaagccatgcaatttctgcacaccatcaaaatgctggttgttcaaatagagcacaatgggagtgtcgtaatgatcgttgatgtatttgtacaagggcttgtattgtcccgatgatccaaagatgaacactgcaaatcgttgctgctgttgcgtgttgttccagtggtcgaccacacgcggcacacaaatctcagcatcataggtgttccgaccggtccgtacaccaatttgctgcatcagttgtaaagcatcccgcctcagacatccctgttgtcccctccgactgtgcaagtagtcgtaaaatctccaacggggccaaccgcacgttttggccaccattgtcgcctgcaaggcgtagaagaggcagtgtccgtcggggttgcaaatcttaacaaaattgttaccaaatttattttttattgtgatgttggaccttaatcaaacaagtttccgtcacccgatgatgcactggtgctagacttcgccgagcaccgcccttcagcacccttcggccgggcagtccagaacggtcaactgtggtcaccaccacagtgaatggctcgccccacagtgtgacgttttgctgctgcttgctctgtgccactttggtgaactggttgaggatggtgtttacggtgttgtcggtgatttgtcgaaccgggatggggatgtccccgccggtgagcaacggactgctgatcatgcagccgagatgcgtgggttcaattccacgtccacgactctcctccatcgctgcgtcaaggcagtactggaagatgccggccaggagtccctcaggatttgcttctggcacatcctcaatgctgaaccgcgacttgactttgctgtactggaagcggggcacatgctcaacggtgctgtccagctttttgacgtattcctttgcagactttgatgatgatgagctgctgccgccgccctcttgaagcacctctccaagcaattcattgatgagaaagccgcgacgcggctttttgcttgggaccgatagaatttggtcaatggaaaacaaaaagggatgcttgggaggctgattttgcattatctaattttacagggaaaaataatgaattgaatggataaaatgaacaatcttgacacatatttttgaggcatggaaattgtcgttgtgaatgcaaattaatggataataataataattttaaaaattttaaaccaactatgccctgaagagcagcgcactgccacccatgaagcacaagacgacagggcacctaaacggctcgggtaattagtaaaggtcacgcgcacaaccccaagccctaaaagacacacaagtgctgccaggataaacggagcccaataattggagcaaccgccctggttaacagcaataaaataaaaattttattacaattttattattaaagtgagtaaggatatgagcagatgtgaatgaaatgtgatttggactgagtatttatgaagcctaggggcggggtgtccccatccgaataccaattaattttctcgaactctccttccttattgtcggcaaattcaaatttcctttgaagttatctccttcactattgtcggcaaattcaaatgtcttttgaagtcaatattaactattgaataattaatgagcccatgagaaccgggcacaaaaatattttaattcactcttcattcattcattcaatcaaatttcatgaccaatatgatgcccaagcgattaccagccgagcttctcttcgaaattatctactcactgcccataatgtgcttatttggcggggtaacacccaagccaggtgggaaaaaaaaaattttaaatttcaaatttttcgcaaaatttaaggccgtccaccatccggtatcgcagtggtcaatcgaattatggaaatatttcgggccaagcgtcacccaaacttcacccaaattgtaataataatttaatttaattttgtatattttgttaatttgtaaactcagaaacggcttgctctcaactttgacatgatcagtgcaaaaggatggatgtcagacggacagctctacctgcatttccgtttcaacaacaatgagctgtgtgacccgggctttttcaatgagttcgcccgatatatttgcttcggcaaatctgggcgcattttctgctcccgaattttggtcgactcgcacaattcgctcgtaaaacttttgaactatttttgctttttcaattttatggtaaaaatgttaaggaaaatggtgcactttgcaatgtggtgctcaaccacatcacaaaaagtgcgaacccgttctcaatgaagaagtgcacatccatcgatcttgtgcaccgcgacaattttccggcaatcttgaaggcaacaccgagcgaaatggtagcatgcgggattgagccaactgagccttttgtcgccaatgatgatgatcaggcatacattttgaagaacccgcattttgatgatgatgaaaatggctatcttgaagtttatgctcaatcatcggggtttttattttttctttttttca

SEQ ID NO: 1492 - DNA, 1214 bp, Heterodera glycines
  unsure (1)..(1214): unsure at all n locations
aggacgtttgataactaagtttgaaaatttattacatcccctaaggaagaaaaaatttattatcaataaaatttnaatacttaataataccataaaattnattattaaaattaantaatatttaaaattaataatttaattaattgtttagtgaatttgntcgattggncgnccaattagcgcccttttcgctgttccccagccatcccttcggcactttgttccccccaccgccaccaccgtctttgtgttcgccgccggctacggtattccgtgcgcccgctaccgtaactgctgctgctgctgaacacggaccgcatactgtagaggaggaacaaagcaacggtaatcagacagacaatccaactaaacaacagcagcagcaacaacaaaatgatcagaaaaaacaggtgaaaatgataaatattttgaattaatataaaagataaaattaattttaacttttaaatgattaaaaagaaataattataaaaaagcatgttaaagaaaatataagcacaccatttatggcttttcattttttttaattctattaataacatttaaatatttaattcttttttttaaatttattttgggttttcttttttaataatcaggaaaacacttaaatattttaaaattttaagataaaataaaaaattttaaaatttatttctttattttttgtaaattgttctggtctttttaaattgtttttttttgtgttttttatttatttttattttaaatttttaaaattttgcccccccccccccgaaaattcgttcccatcccatcgcgcgacaatatattcaaattttataggggcaattgttctgctgtcccccccccctcccaaattcattcattttgggtgcgatcatagcccaattttgggttgcaacggaacgccaatggaattaagagttgacctaaaaataaaatgtgatggtgcccgatttcgcaatgtgccgtgtcgcgcggcaccacctcaattttgattttggcatccgccgtttgtgggaacccataaaatgtgcctccaaaattgggaaattctagtgaatttcataaaaaaaaagttttttttttgcttttttaatccattcaaaatttaaggaggttaaattatccgacatttgcgcctatgcccaaaatcgagttgaaacttaagttttccataattttcaaatattaactgattttcaaga

SEQ ID NO: 1493 - DNA, 5115 bp, Heterodera glycines
  unsure (1)..(5115): unsure at all n locations
tcattagctgctgggatgaggccaaaatcgggtgatcatttcgacgtcacaaccaaaatgnatactgtagcggcggcgtcatgggcgacccatttgaatttggcgccgcccgctgaaagcattggccaaatgttgtcaaaaggggagggccaaatgaagcagcagcagcaaacagtcatggcaaataataacaacaacaaaagcagaaaagtgccgaagcgacggtcgccgtcttcggacgcattgacgcgatgttcggcggcaccagcggatgccgcgggggccaacggcggcgcagggcattggacgcccggtaaggaaaaagagaaaaaatgagactttttgccattcgccgtgggaaattttgacttttttgattaacaataagtttttccagaatgatcaaaattttcaaaaaaaaaaaatttttttaaccaattatcatttaattttatttttttggtgccaataaaatgcatcgtttggtggtggcggtgccgaaagaaaccgccggaaaaagcagtagtgaacgtgttttttaatgagatgctgtaagattttatgacctatttttcagaaagccgtgccgtagggcaccgccggaggaaattttagaaaatttattcataaatttgtttgtcgcttttgcaaaaaaaatttcacattccatataaaaatttaaaaaaatatgaaatctcccttaaaaatggctgtaaataatggtgggattcaaatttttttttttaatatccttctgcctaagggctaaaaggcactgatgacaagaaaagaattgaaaatttgccaaaatttaattatgtataaaatttagaaaatttccccaaaaagaatacatttaggctaaatattaaatggccagcggatcatttactcattttttggtctctaaaatgccatcgtttgatcagttaaatttaatttctcaattcttcagtcattcaacagtataagcatggcccgtcgcaacaacagcagcaaatgggcaccgcttcttcttcttcttcttctgttggcattggcattaataataatggtctatgaaaaaagaaaatttaaagcaaaaattgttttaatttgtttttatttttagcgaaacaattaaaaaacgtgcataaaaatgtgatggaattggcagcaggtgaacaaatattatattatatgtactctaaattaaattaggaagaattattgaattttataacttggacttccaaccaaaattaagaaaatcttttaagattattaatatatttgttcaaatgccaattataatagatttttatgccaaaaataaggaaaaaaacacaaaatcttcaaaatattacaaaaatttgcaaatcttaattttgttaattagagcttaaaagaataaatattacatgaaaatgcaattttatatcctttttcaattttattgattttctaaattaaattcattatttttaataaatattttatttaaataattttgtctttgaccgaattaataattctccccaattttccccattttccctttttgatgtcacttgttcctcctcttcatcttcccattttccgcttcttccccctcctcctcctccttttcttccgcatttttcttcttcttccgtccctccgcttccgtcgttgcccaatttcaccgcccctccgcttctccaattgctaatgttacgcggccgaattggcggtgccattgacgagcatggcatcttgggtaaacgattaacatttaaattaaactaaattttttatttttattttaatattaaaatttcaggtcctccattggatctccaaattgatcagccaacaacaaaatttgccgattcaacaacaacgacaaagacaacgacggcacatgtgccaccgatcatttcacaattggtgggcactgacagcagcagcagtagcagcagcagtagcaacaacatcactgaacagcacaaattggacgcaaatggaggcaaaataaaaaaaattatttaataaataataataaaactcaaaattcatttgtccttatttctaagatttgcccttatttttgtctatcgtccttataaaatggcaagattattgaaaatttatgagtaacatattggctaaccttgattagttgaatgaaattaaaatttagatttttaatcccaaattatttttagcctatgatgtcacttattttggaaaattttcgatgcgaattctaaattaaaattttattgttgtcaattgagctattaattttttaatataaattaaacaattgtccattgataccatttcatacacaaaatactttttaaactttatttcctatttaattttttgccgaaacaattaattaattaattggttaattaattaattaatttagcaaattgcccctcctcctcctcttcttcgtcaatgctcggcactttgttagcgctaccgccaaatgattgccgaacatcgcccactgtgcctgcgtcgaggaccgaattttgtagcggattggcactgtccaatgggaacaaaaaatgtgccgaaaatgagccgcagcagcaaatgggccaaaatttggtgccaaaatcaaattaaatatttattaataattaattttttgaaggaacagacgccaaaattgttgcatttttcgagcactttgacgacgatgaacaacgacaaaacattttccaatttgaacagtgacagtgaacaatcttcatcatcgtcggggggacaaaattcgccaaattcggcgcacacttcgcattcccagtgattaaaatttgaaatttttttaaatttaaaattaaaattttgaatccgcttacagtacttccgattcgccaccgtcaacgctgcccggcgcgggcagtacggtgacgacagtgtgcggcagtgaccgtacccgccgtggcagttcatcgccgtaattttaccagcaaatagatttttattcccttttttgatcagtaaacatatgaaagctaagcaatggaatatagagaatagatataatctaatcttttttaaaagcacaggacacagagagataccatctgatcagaaagaacaattactgtaaatttttaactgttaattgacggaaatttgataaggaagataaactgatcagtgcttctagtgatcagcagagccttatcctatttgatatttcataagtgctgccgatcactttgaatagatcagaaacactgacagaaattcattgagaacaagctttttaaacctgtaatgatcagaatgttcagtacaatcgattgatcaacaaaaaaaaaaaaagcatccggcaactatagttgtccgattaagcatggaatgagtgaatgataatctgctttttgactgcttatcaatgcttggatctaatcagatattcactgacccagcattaattgttgggactgaaatttagatcggaagctgataagcattcttgcttctgattagtttaaattgctgatcagcgagtgatagcttgagtttctgatcagaaattactgatcgggagggggaagtgatcaaaaattggaggctgatcaaaaatttgcttgacattggcagcacttcgggctgttccggcgacgactcctcctcactgctcgcgtgcgacaaaacgcggggcggcggcggcagtcgcattggcgacgaagcggcggccaatcgccgcccgacgcactcacaaagttcgccgcccgcagcgaccgcgtccgcgacgacgacgccaacgcgcgcaaaactgcggaacagcgaagagttggaaagggtcagaaaaatgaaaaatgattgaaaaatgcaaaaattggcaaaaaccaatttcgaatgggttttagaaatgaaaatgacaacataaaaacaatgaatcaagaaaaaacaattaagtaatttttattgtttatggccaatagtgctgtttaagccgaaaatttcccaagactcgagaccgagctcgagattcggcccagagactcgaggccgagaccgaaaaaacccgagacttttctcgagtcgagaccgaagaccgagactctcgaacagcactaatggccaaagcttgaatgaaaaaaccaaggttgtgcatttttgtaatttttgcatccgagtgaatcaaatcatttgaaataaatttttacaaaattttgaacaaatcttttagcttttttaattaaaacaatataaaatttaaaccccaaagagaagttatgatttgaaattatgtttttattttaaataaatttttgaaattgtaaatattcccccccccccccttccattcaaattttgccatttcttttggtcctgttttaaaagtttgtttttcgcaacgaattgctgcagtacatggaccgacgaaggcgcaacaacgaagcggccaaacgctgcagggcaaaccgtcgcgcggtgttcgaataccgttcccgcaaggcacagctgctggaagcggaaaacggaggtgcgcttctaattaatggcgcgagccaattagaaagggcactcactaattgaggctaatggctaccttaaaagtctaccgttttcctaaaaattgcagtcccgaagtatccctacctaattaatggccaatcagagaaggcactaattgaggcgataccgtatttcctaaaaaaaagaagcaatcccgggaagtactgttttagagggcagtattaattgagaaaatacggtacattaattaggctcacacttattgcggctaattattctaataaaaaaaaaactcttcccacgctttaactctgtccgatttccccgaatttcttgtgccttccctgacaattccgccccaaaaatattagagaggcatcggcattctaaccgaaaatttataaatgaggataagctgaattaaattacaattaattttttgtcctttttaataaaataaataaataaatttccattttaatttagaggaagttttaatttgaatttaataataattgattcccgatgggaggcagagacgacaacaagttgtgcacctattagcgctttttactgttgaattgattttttttggaaaatgtgccaaatatattattcgacaattctatttatcccccc

SEQ ID NO: 1494 - DNA, 8875 bp, Heterodera glycines
  unsure (1)..(8875): unsure at all n locations
tttatttantttggcattaattttaaaaaattgtaattcgagcccacaaaaagccgaaaaaactcgaaagagagagccggcaaaaattggaaattcagataacttacggccgaatgtataatctaaaaaaaaattgtaattcaaattccaattaaattttgttggccttgctttccatgccattttcatcatcaattgttggcattattttttgccccggatgaaaatgtttcacaatgtgcaaatttattatttaaaatatttttaaaatacatacattaaaaatgacgttcatcaattattctcactcttttttgtccaattgtctttcttatttttatccatttcattaatccattcgctttcctttgaatatcccattttaatgtattattttttcttctccaattattattatattaattattgtttacggtttaaaataataaaaattgttcctttttatttaaatttgcgatataattattttttatttaattttttataatttactttttaatttatcccatcccttcgctgtcaaagaaaagatctgaagactgaatcgactgactgatttgatcagtcatagccacccgaattggttgaatcaatttcagcattttgaatcgaagaaataaatcaaaaattgttttcaacttgcgcatcccccgggggaatatctttccggatcccgagcactgctaagatcatcgagataagccttttcttccaacccgctgcccatctgtcacattttgtccttaagcagaccaaaaaaaaaattaagcacaaaactttatttattttgattttgttagttttttaaaattatttttannactaattttttaaagcttaaatcttctntttaattatttgccttttaattaatttcttttttaattaattggcaattaattaatcggaaagattgaaacaaatatgaaaattgaattttaaacaaattctttatttacctataactaaattaattagaattccaattgaatttcgaatttttccccccaaattttatttaattagcataaagcaattagcaaaatcaatcagaaaaattgaagaaaatatgagaattgaattaaaagaatttttttttaattttactaaaaaattaatgaatttaattcccattaaatttttaaatttaccgcacaattttaaaaatgtttttgcgacggactgtcaatgcgtggcatttcgcccactgtttgaaaaatgtgccgcgcacattgtcctgctacgttctgttgctgttgatcatccactgggacaggtacaaagtgttttggtgggcggcacagcctgccgggcagcagcagcagcagcagagccaggcgcccggcacggcgccgacgacgccgcaggcgcagaacggcgccggcgggcgcgaccacgtgttcatttacagctcattcctctacaacagaaggtcagtcaaagcgaggacacaaatttggaaatggcaaacagagctgatcagctttatccatcatgtggacgttgggcgggtagtgtgaattttcatcgaaatttttgaatttttctgtttcgagtttgggttttgcatttgccactttttaggatataagaaattctatcctaatgatccggttttttttcttctatttattaattcccgggactttaagctttcatttgataccaagtttaagcaaagtaagaacaaagttatggccaaagaaacagaagatttggactcataaagtgcgctagagcccatggcacacagctgtcagctcaccttatccattgtttttgggttttgttgatccgtatttttcgcctctgctggtttgactcagtctgatcagcatcaggatgaatgaccgaaacattggcatgactgttttgagtggagttggcacgaaaagcatttttaagttttaggcctccctcaaatttttcggagcctggcaaagtgcaattgattgtactctttttggcacataagtttcatcgaagcactgacggattggtttgtgttgtggccaaaaatgcgatttctgttcagaaaatggcactgcaaaaggtaaatttgatctatgagcatttaaaaattgaaatttcccttttttttgcattttgtcccttctttttaccattgttttggcactttgtcctttttttctattttttggcatttttccctttttcattcttttttgacaattttaccccttcttttgataatttttggcattttcgtcccttattttgccatgtttttttggcattttgtcttttattttgccatatttttttcggcattttaccccttatttttccattgttttgccctttcccataggaaattgttcattcattgggcatttgtgccttggatttgttcgtgctcagctgctctgtcgacggactgcccagggacagtacgctgtttgaggacagtaaccgctcctacgcctcgtaccgtaacatttacagtttggtgttgacggacgggccaaggtcacagagacagtccaccaaattgacagtaagtctaattcatttttaagtattgattcttgtaaaatccatgagggaaatcccctaaaaatttcgtgggcgggaggggggggttcggttgagatggcacaaaaatattataaatcggagtctgtgattaggtgctaaaactatgccagaattgtgccaaaaattgcatttaaaattccatttttcattgcttcagctttttttaattaaaaaaattttaaactatatttcggttatttaagctttacccaaaagtgcccagctacaagtcgcgtggactcgttctgtgcataagccgagtgtttctgttcgagaaatggcaattgctaatcaccgccctggagacgtatcgcctgtttaaagttaaatgaggaaaatttcattttgttttttaatgatttttaatatctgacaaaattttaaaatgcaatttaatttaacaacttttaaactaatgcatttccttttaaattgaaaagaattttatattttttattaatattaatgaatatttattaaattattttaacttattttaaattatttataatttttttatccatttttggtcgatttggtggtggcgtacgtccaaagtgccattttggccgtttacgagctgatgaaggcgtacgagcgggaaggactgctgcgggttcgacccggcattcgttttccgcaccagcgcggaatgccatgggacccaaacgcggaaacggagtccgacgcaaattaaaaaaaagatttaatactctagaattttaacaaaatattttaattgccctaaatttcaacaattatcaaattttccaattaatcggggctaaattgaatatttgaatacctctgagcctaaaaccgcgaaaatatttcattttggcatcatagcattaagcaaaattcgccattttagcatcttttcgacaaatatggataattttgcttaatataaaccaaattttgcaattttgtatcgttgatagcccaaaattttctttattatcctgcaaaatttcaaaaaatttggtaaacgtttgaaaaagtagcatgaaaataaataatacatattttggccataacttatattaatttgataattttattttaaattttggatgctaatagagaaacagctggggatatcgaatgacatcaaaaatctaaatattattaaagtaaaactatgccatattttgtcgaaaaaatagctaaaatggtgggttttacgaaagcatgagccttaggcaaaattgcagattcaacggccaaattctgcttgcccacgactgcttctacgagtaccggcacagtgcccaattcattgggctcatcgactgggacgacttgcttgtgccgtcccggcactttgccacactgccggaggcatttgcggccgcttctgccgcccacccggacaccgcctactttttggtcaacaagctcgaggcaagctttgaggagcagctgggtacggtgtttttgtgggggaagaaacggtatttgtgaaacaattttaaatttttggcatttattcaaattcacttcggatgccatcctgtggtttttgctgacaagttttggcaatttttgtggatcaacgtggcggattccgttgaccatttatggaattcatgaagatttaggccagggattcgattttcggtttctctttgcctcgaaaattttgtttttgtttttttgaaacccgtccattaaggtttttcttggcaaattgaagccgtatttttttttaccgatttcagcgcggttttaagccaaacgcataattttgtgtaaatgcaagagaatttttgggttgcctcaattaaaattggggacctcgtaaattgttgaacttggtttttctaattttatcaaaaatttactgtgcccatatttcggtttattgcttttccactcataaaaatgccataatttgcgcagtgacaaagccgagtcggttcagcctgcgcaaagtgttgcggcacggcattcgcattgcccaaatgtacaacgacgagaaaatggtggtgcggccgacgcaactgcgcggcttttggatgcacaattcgtttctgttggagagcggcaaacggccagtgaaactgtacaccaactactccattctgttgcatttggccaacgaggaggtgggaatagtgccatcagtggtgttgttcttgaagagtttcctgtctcggttctcgactcgagaaaagtctcggactgtactaattctaggaatattggcctagacccgataaaagtctcgggtttattttgaatattggcctagacccgataaaagtctcagatttttcaaggcaacctgaatctcgggctaaagtctcctcaaaaaccaaaaattcggaccaaaaagcgagccaatcaacgctaaaatggctttatttttttacaattatgttcttttgcgaatttgtttgatcactgatcgaaaaaaacattaagcgagtgcttccgggcgaatttcaaacgccgtttatggccaaacatgacattgatggcattcatttgcacgcctcgacattactcaagaacttggataagcaagcaaaagtaaataaatcatattaagtaatattttttgttttaatacaatatttaattctagtggataaatttttggaaaattttatgttctttgcgaattttaaacattcaaacaatgcattttctttggatagcaaattttataataaaaaaacgcactcaaattaattttggccaaattattttttaattttttccattaaatcgtcataaattcgctttttcgtcatggtctcgagtcctaggaatctcgaacatatgcttaaaaattagcaatgaagttatttttctttgacttctggatttcttggttctacatgtaatacatctttttttaatgtgtttttcctttcttcttctcaattcagtcccgtgccgcgcatcaattgccctccgcgcagccattttacgcggcattggtcgcgtgccatagccgaatttttgcctattacaaagcaccggggtgaacaagtcgcgctgtctgtcctacagtctgtgcgtgctgcccgaagtgccgcaggcgctctgtgccatcacgcgtaacactttcggcacgatgttgaccaaaggggcgaggacggcaattcacgtgagggaacagagcgaatttgggcacggccgatgcacggacgaaggcggaatttgagggggaaaatatggacaaatgaattgttggataaacaattttgaaatccagaaaaattaattatttgaattttaaattatttttaataacttttgaagatttaaatatcgaacgatacaaataaaattaaattggtttgatttgatttggtttcaattaatttatttgttggattaaattatcaaaatcaaatcacaaaatagagcaattccaaccaactgcaaattgacaagcaaaaatatccaaaatataaagaaaatcaaatctcggcatgaatttcattaattaattaaatattaattaattaagtatttttcagttcataaatttttgtacaaataaaatgtaataattttacatgtcaattcattacattcacttttgagaaaatataaccaaatggttgtactcctctcactaattggccaattacctaacattaattaattaattagtgttaattaccaatttcgccccattttcacttccattgactctgcgcaacgccaaaaaaaaagaaaacatttgcccgtcggcggagtttcgtcgcccattttctccgttttcatttacgcccattcggcccgtctctccgtttttctgttttcacttttttttgctgcgcattttacaatttttgagttccaccgctgcgtcctttgcccaacccaaaaaaatgaaaatgaaaatgcaattaattaatttaaatttttattttcttttttttaaattttcttttttcgcccatttgtttgcccctccggcgaatttccaacggccgaatgtttttttttgtgtcaccgccgcgtaacggcccaatttttggggcaccgaatcgttccactcccgcaacaaaatgacgacaaccaaaacgacgacgaaaacgcaaaagatgacattgccccgggcgatgggccccgggggaagaagcgtatttaagcggagagaagtgggggaagggcatcagttgcagttcaaccaacagcagcagaagcaaaagtgaggcaataaatattcaaaacaattaaaatatatttaaaataatattagttaaattatttcaattccaatttcagtttaatttttaatttaaaataataattatttaaattcaataattgaattaaatttcaaatcaattacaattttaatattttagatggccgacttcgacaaacacgctgcccagcgcgaggcggagtcgctccgcactttggccttcttcggcgtgtgcctgtccaccgtggccacggttatcgctgtgctttccgtgccgttcgcctaccagcacttccagcagatcggcgcccaaatgcagaacgaagtggacttctgcaaaatgcgctccggcaacatgtggcgcgaggtaaagccgaaaaggcggaagggaaaagccgggaagtttcaaaaaatttcaacaaatttccaggtcacccgcacccaggcctactccaaggtgtcgcacgacagccgtcacaagcgtcaggcaggcggttgctgtggctgcggagtgtcgcccccgggcccgcccggaccccctggcccatcgggacaacccggcggagacggacaacccggaggctcaggacagcccggagcaccaggtccacaagccgtacttggaattccatgaaatttaccttgaattcttttacaggccaggcagctcctcgcccgtacccgccaagcggcggatgcgtgccgcaatgtgaggccgcccagcccggactccccggcccgcccggaccccccggacccgagggacagaacggccaacccggacagtcggcaccgcccgcgtctcctggccgccccggaccacaggtcagcttttcctgaaaagcttgtccaagcttttacaaatcccactgtttttagggacctcctggacccgatggacagcccggcaaccccggagagtctggccaacccggccagcccggcaaactcacccagggcccgcccgtcgttggaccgcctggcccatcaggaccccctggccagcccggacagcccggcgagaacggacagcccggccagcctggaaaccccggcccgcaaggataccctggcgacggcggaagccccggccaacccggcaaccccggaggcagcggcgagcccggacagcccggagcacagggatccagcggccaatgctgtgagtggatttagcaaatccaaaatccatttttctaaaattgttcgactttcagaccattgcccaccgccccgcaccgcccccggctactgagtgtgatcagtcgaccatcgacaattggagaagaacccccactgatgatccacgaggctgctgtcctttcgtctctcaccattttcccgatcattttggcatttccaaaacgctgatcggacaattctcaatgttatttttgtatttgtgcaaaatttcgttggattgttctgtcgcacaaaaaaatcaaagaataaattgatcggagctcaacaattctttctgaattcaagcttaaattttatttaaaatttgcaaactttttattttgttacttttaaagcctttttcatttacattttatggattaaaaaaaatattaaaattatttttttatttccagctaaaagatgattattaatattacataattttaaaatgtgattcattaaaatgaaattactaattaaaaatttgttggaagttgctaccaatggtcttttcataaaactgccaaaaaatgggggggggggggaaacgtatttgattgtgccaaatggttttgcaaatgtgtaagaaagtgatgatcgttttcttacaaaagtctgtattagttcatattttaaagatttattataattagtgtacaatttaggcatttgcaaatcagttcatattttgtttactatttttttatagaataatgaaagcttaaaaaaacattaaacagatgtaaatttgtatttgattattaaatgttttcatatttatcgaaatcaaaaataataaaaaaatttcttcgatttctttcggctttcgatccaaattaaaataagtatttggaacaaaattaatgaataagactcattaaattaacacgagaagggcgacagatgaaccacttaaatgccactgatgcaaca

SEQ ID NO: 1495 - DNA, 4911 bp, Heterodera glycines
  unsure (1)..(4911): unsure at all n locations
ccagattggacgttatggcgtgttttcaacgaggtacttacaatggttcaagtgnnttatttgaaagtaattaaatagtccttttaagatgnatggnananngaggganaaaaaataaanaattaaaagaaggagagagaaaaaagagagaaagaaataaaagaagggaaaaaaaaagaaaaanaagagagaangaanagaaaggaaagagaaaaaaggnggagagnagaanagaanaaaaaaataatttatgaagtgcaaatcggctaaaattaaaaatgatttatataaattttgaaatcatcgcaaattctctttaaaagcacatataaagcctttccctaggaacaatttaattgttttgattagaaaaacctcgaaaagcaaaatttcttaagaaaaattgggtttggtggtgattttaagaaagtcatccacccacatttttagtggttaaagtcatcttttgatgctccaatattaaatgttattgtattccgttaagaaatttaaaaatccatttcggcacaaatgccaaaaaaggcaaaatggggatacaaaagtcatactaatggttttaaaccaacctaaaaatgctttttagccttatcctggtaaaatcagagagtgaatgacattcattaaatctgaagatattcggagaaaaaataatatacaaaaaatgaaaaatttaatatgattttaagaaaactgaaattacaaaattgatcatcacttttatagctgctcttttgaattcaaaaagattttcttgaccctttggataaaacaaattttatttaacaaaattttttttcatctttcattttttgttgagcaaattttacctttttcgcaaaattatttaattattttttctcactttctgaaacaacaaataaatgttaataaatgaagaaaaatagattttatacagaataaaaacatataatgctgagcagataaattcaacaaaaaataagttattttctttaaatatgaaaattaaaaaagaaaaaagcttacaacaccttcgattcccaggacgtctccgttccaagtactaagaaggcccaacgttgcttaacttgccagatcggacggaatggcgtgttttcaacgtggtatggtcgtaagcgaaagtgctccatttgaaagcaattaaatagtcaatttttaatgcattttttctctttggttaacttatcattaatcaaaacaaggatcgataaaaaatttagaattcacttaaataaggtaaaaaaaaaagaaaaattcgatagtttttttcgaaatgaaagagcaaaaattcggagttttgaattctttttttaactaatttcccaactgcaaatcggctaaaattaaaaatgatttatataaattttgaaatcatcgcaaattctctttaaaagcacatataaagcctttccctaggaacaatttaattgttttgattagaaaaacctcgaaaagcaaaatttcttaagaaaaattgggtttggtggtgattttaagaaagtcatccacccatcatttttagtgcttaaagtcatcttttgaggctccaatattaaatgttattgtattccgttaagaaatttaaaaatccatttcggcacaaataccaaaaaaggcaaatggggatacaaaagtcatactaatggttttaaaccaacctaaaaatgctttttaagccttatcctggtaaaatcagagagtgaatgacattcattaaatctgaagatattcggagaaaaaataatatacaaaaaatgaaaaatttaatatgattttaagaaaactgaaattacaaaattgatcatcacttttatagctgctcttttgaattcaaaaagattttcttgaccctttggataaaacaaattttatttaacaaaattttttttcatctttcattttttgttgagcaaattttacctttttcgcaaaattatttaattattttttctcactttctgaaacaacaaataaatgttaataaatgaagaaaaatagattttatacagaataaaaacatataatgctgagcagataaattcaacaaaaaataagttattttctttaaatatgaaaattaaaaaagaaaaaagcttacaacaccttcgattcccaggacgtctccgttccaagtactaagaaggcccaacgttgcttaacttgccagatcggacgggatggcgtgttttcaacgtggtatggtcgtaagcgaaagtgctccatttgaaagcaattaaatagtcaatttttaatgcattttttctctttggttaacttatcattaatcaaaacaaggatcgataaaaaatttagaattcacttaaataaggtaaaaaaaaagaaaaattcgatagtttttttcgaaatgaaagagcaaaaattcggagttttgaattctttttttaactaatttcccaactgcaaatcggctaaaattaaaaatgatttatataaattttgaaatcatcgcaaattctctttaaaagcacatataaagcctttccctaggaacaatttaattgttttgattagaaaaacctcgaaaagcaaaatttcttaagaaaaattggttttggtggttattttagaatgtcatccacccatcatttttagtggttaaagtcatcttttgatgctccaatattaaatgttattgtattccgttaagaaatttaaaaatccatttcggcacaaatgccaaaaaaggcaaatggggatacaaaagtcatactaatggttttaaaccaacctaaaaatgctttttaagccttatcctggtaaaatcagagagtgaatgacattcattaaatctgaagatattcggagaaaaaataatatacaaaaaatgaaaaatttaatatgattttaagaaaactgaaattacaaaattgatcatcacttttatagctgctcttttgaattcaaaaagattttcttgaccctttggataaaacaaattttatttaacaaaattttttttcatctttcattttttgttgagcaaattttacctttttcgcaaaattatttaattattttttctcactttctgaaacaacaaataaatgttaataaatgaagaaaaatagattttatacagaataaaaacatataatgctgagcagataaattcaacaaaaaataagttattttctttaaatatgaaaattaaaaaagaaaaaagcttacaaaaccttcgattcccaggacgtctccgttccaagtactaagaaggcccaacgttgcttaacttgccagatcggacgggatggcgtgttttcaacgtggtatggtcgtaagcgaaagtgctccatttgaaagcaattaaatagtcaatttttaatgcatttattctctttggttaacttatcattaatcaaaacaaggatcgataaaaaatttagaattcacttaaataaggtaaaaataaaagaaaaattcgatagtttttttcgaaatgaaagagcaaaaattcggagttttgaattctttttttaactaatttcccaactgcaaatcggctaaaattaaaaatgatttatataaattttgaaatcatcgcaaatgctctttaaaagcacatataaagcctttccctaggaacaatttaattgttttgattagaaaaacctcgaaaagcaaaatttcttaagaaaaattggttttggtggttattttagaatgtcatccacccatcatttttagtggttaaagtcatcttttgatgctccaatattaaatgttattgtattccgttaagaaatttaaaaatccatttcggcacaaatgccaaaaaaggcaaaatggggatacaaaagtcatactaatggttttaaaccaacctaaaaatgctttttaagccttatcctggtaaaatcagagagtgaatgacattcattaaatctgaagatattcggagaaaaaataatatacaaaaaatgaaaaatttaatatgattttaagaaaactgaaattacaaaattgatcatcacttttatagctgctcttttgaattcaaaaagattttcttgaccctttggataaaacaaattttatttaacaaaattttttttcatctttcattttttgttgagcaaattttacctttttcgcaaaattatttaattattttttctcactttctgaaacaacaaataaatgttaataaatgaagaaaaatagattttatacagaataaaaacatataatgctgagcagataaattcaacaaaaaataagttattttctttaaatatgaaaattaaaaaagaaaaaagcttacaacaccttcgattcccaggacgtctccgttccaagtactaagaaggcccaacgttgcttaacttgccagatcggacgggatggcgtgttttcaacgtggtatggtcgtaagcgaaagtgctccatttgaaagcaattaaatagtcaatttttaatgcatttattctctttggttaacttatcattaaccaaaacaaggattgttaaagaatttagaattcacttaaataaggtaaaaataaaagaaaaattcgatagtttttatcaaaattaaagtgcaaaaattcggagttttgaattctttttttaactaatttcccaactgcaaatcggctgaaattaaaaatgatttatataaattttgaaatcatcgcaatttctctttaaaagcacatataaagcctttccctaggaacaatttaattgttttgattagaaaaacctcgaaaagcaaaatttcttaagaaaaattggttttggtggtgattttaagaaagtcatccacccatcatttttagtggttaaagtcatcttttgaggctccaattttanattttattgtattccgttaagaaatttaaaaattcatttcggcacaaatgccaaaaa

SEQ ID NO: 1496 - DNA, 6343 bp, Heterodera glycines
  unsure (1)..(6343): unsure at all n locations
agggctaggagttttcttggatattcagaaaaaacagccatgccagggctaggagttttcttggattttcagaaaaaaaaataggtccagccagggctaggagttttcttggatattcagaaaaaacagtcaagccagggctaggagttttattggattttcagaaaaaaaaataggtccagccagggctaggagttttcttggatattcagaaaaaacaggtccagccatgggtaggagttttattggattttaggaaaaaaattaggtccagccagggctaggagttttaattaatattattttaattaattttaatttaaaatattatgtgttgaccaaaatgtagcataagagcccaattgacatgagaacactcacagaaattgtcaacttttttacatgttccgtaactaaaaatgcattaattatttttcatagattaattaattcgctaattcaaaatagggttctataaatggaaatcaaatttaaaaaattccaaatttaatataatcgtttctctaatcctaattaaacggaatgactttgtgctgttcttctccaaatgatcagccaaatcagcgcatagcacacaaattcggcacaatatgaaattaaggcattgatgtcagtgtaataagcagtttcgggctgatgggctgggtcaccgagatggcacatcaccggtctaaatgatccgaaaacaaaatttaaattcaaatttaattgcccattttgtgtccacttttcccaatgggctgcgcttccactgtaagtgacaaaacagaaaaatgccaatttaatacaacaaaatgcgatgatccctttgaaggatgtgtattttccacgtgatttatacctaaaagtaaaaaataaattaattaaaaatggaatgatttattaatagatatctaattacgttaattttagttaaaaaggtgggaaaattgaaaaaatatttttaaagtaaattttggaagacaaaaaccaattacttttggataaatgcctgaaatccttctaaaaactcataaaaatcattatttaagatgtatctttcgattttagtgtgttttatttgaattttgtaagtgcctaaatacgactaaaaatgccgtgccacttagcaaaaacatacaaaaaaatggaaatccatacacaaccgttctatttctccaattattactagggataatatttttaggtttttacctatttttttcatgagctccctagggtctgaaatgcacgaaaaacatgttttttaggggttgttaagctacttttcgagttattagtgcctattttctaggtttttatttttagcgcctaaaaaactaaaaaaaatttttaaaaacttattttcacctattttggcgttttgcccaaaatttgttaacaaaaatgcaataaaaaagaaaaatacaacacccctatgaattgacccgaaaatttctcaaaaattcacctccaaaatttatttattttattttcttgacgataatttttgattttgaaaattatgtatattcttaatgacttggcaaaatatttttgctttttgatgaaaattttcaattttacacccctaaatttggaactttttggcacctattttctcatttttagcacctattttggggttttttaggacctaaaacctacctattgaaaaacaagcactggtaagaatgggggtctgagtgcaaaaattagtgagaaaattggagtaaaaggaaaaaatttagaaataattattaaatatattcgataaagtaactgtgcaaatgacctagtggctagtctccttcactttccgtgcttctttcccctggttcaatccctctacagaaattaaagtattttgaattttctttttttatactcatggctttcctatcgacaaaatatgattcttaattttttaaattgtattttatcattttttaaagaaaatccatacaaattgagcctagtaatctcaaaaaccagcctttttttgttgaaatttgttaacaaatcacactcaaattttcaaaattttccccagcggcgcctatcggcaccgccggacccccttcttccccaaaagttttctggaaaaagcgcgccgaaaaaagtgatccgaaaagtatgtaaatctgaatttctattaatattcgatcatttaaagtacaagaaaattagtttgaaaatttttattaatttaaatagctttaacttttggattttataaaataaaaacctaaataaaaatttaattatttaatattttcacttgaaataaattaaaatttgaattttttttaaattttttgaattttttttaatttttaaaaattcccggttggtcccggttcccggtcccgaacaaaaatcgaggtcccggtcccgacttctcaggtcccggcaagtcccggtcccggttttgcccaaaattcccggtcccgctctactctagtttttagcacctataaatattagcccctaattattaccatagtgggaacataacgccaaacagacgatcaattccaatgccaagttgcaaactgacagcaattgatgagccaattagaggcagtaattgaatgaagaagcaatgcttaagcaaaatgtaattgatgccaaacagaaaaacgaagaatttgatggaagttccaaaaaggagaaaggaagagcaaaaggcgaacaaagcgatcagagttttacacggagaatggagcgatctatgcgaaattggttttaaaataattaaataaaaaatgaattatttcagtccaggggtagagcacgaacgtgatctgcaacatttttttgcgcagttcgcaacctttgggtttttagcagattttaaaaaatgaaaatttatcgacgcgattgtttcaaatagggttaagccccaaccccgagcccccccccccacccgagacctttttgggacctattccccgacccgacccccgactcgtcgctaccccaaactcagaacattcttataaataacgcactcttgctggcgctaacgaaatcagatgattaaagctaaaaaaaggaagatttacgagcatttaaaaataaaaatttagtttttcgttaaaaaaattttgttgatcactacccgatcggggtccccgacccccgaaaattgagcccccccccccccccgacccgacccccgacatgtcgcccccgaggtccccggcccccgatattttgccccccgagggctcggggcttaaccctagtttcaaatgaaatattcttgaaagaagaaaatttctaaaattcattttatttttaaaaattgttttttaatgcgcaattcggggccatgatttttcgagtgcgcatttctgctcctctgttacggattatttaaaacaattcacttcgttttaattgttacgtagacgagacaaaagtttaagcaaatgcccgtcagacaaatcaccgaaatgattccgtttatcaatatttcgctggcaatcaagcctttgttggcgtactgctcgtaaaactaaaattgtttatttaatttcataaattaattttttttcattttttagtcttatttccgctgaaggtttttgttgcttatttctttgaaatttttcttccaatttcgatagtatttgcgaatttcgtgcttaaaaatttaaccctatttgtcaattcaaaattaaaattcaccggatcaatcgctgcaaccatttattttgcaataaattgatacagaacaatgtaaaattgagaaggtgagatttatgctaaaatgttatttaaccaaaaaaaagctacagatcgccaactgaaaaattaataaaaatttcatacatacagagaaaagaagcaaaaaatctaattattttttaaaaatttactagaataaaattataatacagtcatggtcatatgtttaacacaccccaaaattttttttataaatttagccgtaatttttttactaatagcatatgttagatgctttataccgatcgatagcttatttaattcttggcattgttcaaattttaaaataatccaaaacatagtgttgttaaaaataatttaatttttaaaattactttatggaaactaaagtgatgaaaacaattaataaataataagcagtaaaagggcgaaatgataaaatgcaatttttgaggaaagtggcacaaattgattctttcttttgattggccatcatcgtttagctagtttatgcaatttgagtgtaactttcctcctttgatgttcccgatgggactcactgaccaacttaattagttgggtgctatgtcgtcgctatttaaaaacatcataatacgctttatttaagaaaccatcaaaataaaaaattgctactttatagcaaccaaatttttaattcttctatcatttgatagccctaaatgttctctatttgcctgcaaaatttcagaaacattgttaacattcaaaaatggccaaaatgttcaaaaggtttttgagttcctcaagtcataacgtttttgaaacttcatgaaattttttgaatttttgcagactgatagagaacagttagggctatcaaataataggggatgttcaagctcatcattataaaatgtacaaaaatatggacacaaatgcataggtaaagatgaggtattatacaaatagataagaggtaaaaaatagaaacaaattacagctaatntaaagggcaaactaatttgaaaggcactttcactaattgcttttttgaacaataaaagtgctcaaaaatgcaaaaagcgagtgtttttgtaaatggattggctgctgttaattttgccgggtttgtttcgatntgctccattgactttggccttgtttgccgccgtgggactttntgagcggttgaagcttttcgatgctccaattgaaatggattttgagggacttttgtgaatatgaccagcggttggttgatctgataaatctgctgacgaagaatcactgataattttggatttgccatttttggaagtgtcatctttgggtgtgccattcttggaggtgccgcttttgggtttgccctttttggaagtgtcatctttgggtgtgccattcttggaggtgccgcttttggatttgccatttttggaagtgtcatctttgggtgtgccattcttggaggtgccgcttttgggtttgccctttttggaagtgtcatctttgggtgtgtcattcttagaggtgccacttttggatttgccatttttggaagtgtcatctttgggtgtgccattcttggagctgccacttttggatttgccgtttttggaagtcctatttttggatgatgaagatgaagaagtgacaacataaatttgcggctgtttaaattccgttaaatttaatttgtggttttcttttttcttttttctattgtgagcttctaatgtttgtgatgccgttgcggacatgaaatgtgccaatgttggtgactttaggtcttgctcttgcacagttttgcttgcatttagctcatcccataatttggccgcgtttcggttgtttatctcttaattatgcttccaaagttaatttaaaaaaattttattaattaatttatgtttaaatttttttaatcaaattttatgttattaaaaactattctatatgagtttaaatatattatcagactttaaattctattttgtttattttcgagaatcaaaagataataaaaaaatattaaaattttattttagctcactcataaattcggtgttcaatgtcggcttttgtttgacactttctgaattgttcactttgcttttaaatttgggcaaacagccggtggcaaaagtttgatgcaccaaaaagtgaagaaaaatgatagaaataatgaatttcattttcacttttatcaaaatgaataaatagttgtttgttaaaataaataaataaataaatattcaaatattcttattttgtttaaattaaattttttgcaaaattcactaaaaaatgctcagaagaattcgctactgattttttacttattctttctgtaaaataatacaatgaatttattaatatttttttataaatattaaattgccaatttattgattttaataaatataaaattattctaatttattttatttttgattgaattgcattagattgttctttttgttaggaaaaattgatattttcatttgaataaataaaatattaaattaaatgttttaagataataaaatatgtttaattgataaatatgatataataagtttcgatttacagatcgccaactgaaagaagaataaaaatttcatacaaacagagaaaagaagcaaaa

SEQ ID NO: 1497 - DNA, 1260 bp, Heterodera glycines
caaatttttattcttctatcatttgatagccctaaatgttctctatttgcctgcaaaattcaaaaacattgttaacattcaaaaatggccaaaaatgtttaaaaggtttttgagttcctcaagtcataacgtttttgaaacttcatgaaattttttgaatttttgcagactgatagagaacagttagggctatcaaataataaaaacaactccgccccattagtagcatttaatctcaccaatttttttgttacaccatgttttactaatgttcgggtggtcaaccccgagagatgaaagttcacaattgcatttattttccctttgcatttgtctctttcttttcctcttattttccccactctctaattgttgtgtcttcctttatttatgtaagacactattgatttattatgtccattgcatgtcctttcccctcattcattcagttgctttttatgcacttattttcacttcgcctaaatatttgttctcctccaatttatttattccgcttccgacttcgcctatttatttaaattgtttaatttatttgttttacaaataaacattttattgagtcggcttgaagaccgaacaattggcgacgcctgtcttaaaaaaagaagctcaacgtcggaatattttggcaatttcggacagattccgatttgctattcatcaattcttcaaaaaagcaatagacccaataagggtgagcttccgccaggcgcggttgattcatcataaaaaaaccaagatacccaggtggttgcggtttccgccaggtgcggtttactcaacaaagacaaggaaattcaccgaattgccggacatttcaccattcgagccaacggacgacaagagccgaatttcgtaatggattgagcgattcaaattcgcgttggattgcacagcaccaacagcggacgacgaagtcaaggtaaaatgtttgatgaataagctgagcgaatcggctttcagcgaatacagcagatcagttctgccgtcgtcggtcacagatttcagttttaaagtgacgaccgaaaagcttgagaagctatttgccaaggctcagtccatattcatcgaccgctacgagtgtttaaaagcggtgagaggagaaggcgaaacattcaggcagttcataaatcggcacagaaaattgctgaccgaattttaaattcgatgagctgacaaaagagcattttaattgcctcatggtattgatggcactcaaagcgcccaaacaaagctgca

SEQ ID NO: 1498 - DNA, 2752 bp, Heterodera glycines
aggaaagtccaaagccaaaataattgccgaacaaattcaaagaaagaccaacactgaggcaactacaatatgttggcgatgtggctttggcgtgcatcggcctgacgaatgccgttacaaaacgagcaaatgccgcaagtgtgagtttgtcggccatttggacaaacaatgcgagcgtgtccaagagtggcgcaaacgccaaaatgccaaaaagaaaggcaacaaccgcgttggccaccttcgtattggaatgaccacgcatgccgtcaattctatttcgctgctaaaaacagcggttctgttcaacaagaagccagttgaattccatctcgacacggggtcggacattgtcgtcattgatcaattgacgcacgaatatgttggacgaccaccgatcgaaaaatgtaacgaaatcggaaaggctttcgacggcacaaaaatttcctttattggaaaaggattcggtacattcaaatttggcaaaattgaagtcgagcaaacattttatgttgcaaaagcaggctcactaaatttgctgagctgcaaaatgatggatttatttgggctgttagatgaattaaagctgaaaatcagcaatcctgcagtaaatgcatgccacgcgaatggcaaaaaggctgaaaatttaatcccgaatgaagcaacgcagattgctgggacagaagtcaaaattcaaggcctggaaaaggcatttcacgaaattttcagtgaggaattgggccattgcctaaaggagaaggctcatcttgccctaaaagatgacgcaaggccagtctatcgcaaagcccgaccagtaccctacaattcgttagaggtggttgagagcgaactgagccggttggaaaagatgaacgtcatcaaaaaagtcgaacatttggagtgggccgcacctattttgattgttaaaaaggctgacggatccgcccgactttgcattgattactctacgggcctaaacgatgctcttctcgactgtcaatacccacttccaataccggaagacatttttgcgacgctaaatggaggcaaaattttctcacaaattgatttgcgagacgcctatttccaagtcgaattggacgaaaattctaaaaatttgtgtgggctggcaacccacaagggcaattaccggatggaaagattaccgttcggtgtaaaatcagcccccgccatatttcaatcaattatggataaaatgttggcaggattggaatttgccatcgcctatttggacgacattataatcgtcagcaaaagcattccggaacacaccaatcacttaaaagaagtttttggtagaattcaggcatacggattccgcgtcaaattggcaaaatgcaaatttttccgggatcaaatcaaatatctcggacagattatcgataaaaacggacgccgaccggatccagcaaaaatttatgcaattagtcaaatgcctgcaccaaacgacattccatctctgcgatcatttcttggtatggtaaaccattaccaacaatacgtcaaaaacatgcggttcattcgaaaaccgctcgacgatttgcttaaaaaggaaattgattggagttggagtgaaggatgcgaaaatgcattccgaaaaattaaggaaattttggcatccgatttgctgctaacgcattatgatccaaaaatggacatcattgttgcagcggacgcttccgaattgggcatcggagcagtcatttatcacaaatttccggacggaaacatcaaagcaattgcccatgcttcaaaatcactcgcccctgcggaaaaaaattattcgcagattgaaaaagagggcttggcgttggtttttgccgtacaaaaattccataaaatgatttatggacggcatttcacattgcagactgaccataagccccttgtcagcatttttggcagcaaaaagggaattaggcagtgcagtgccaatcgtcttcttcgctggtcattaatccttttggcctacgattttaccatcgaatacataaacaccaaggattttggccaggcagatgcgctctcgcgcctcatcgccaaaggaaatgagcccgaagacgagaaaatcatcgccatgatcaatgcggaaacagattttgagacgaatttcgacaacacaatttcaaaattgccattaaaattttcggacctaatcgctgcttctgagcgcgatgaaaacatttttcaagtccaaaaatttgtcaaaaatggctggccaaatgaaaaggccatggacaaagaaaatcaaattgtccgcgatttatgtcgaagaaaggaagaactttcaaccgaaaagggatgccttatgtatggagaaagagtggtaatcccgaaagtcttccactccaaaattctgaaattgctgcacaaaggacatcccggcatgaaaaggatgaagcagctggcacgtcaatatgtgttctggccaaaaatcgatcaggacattgaagattttgtccgtgaatgtgtgccatgtcaggctgctgcaaaagcgccaattaagacaaatttacagtcatggccaaaaacaacaggcccttggcaacgcgtacatatggattttgccggaccgtttttcggaaaatattttctgattgtggtcgactctttttcgaaataccccgaggtattcgaaatgtcaacaatttcaacggcaatgacaattgaaaagctaagatatttggcttcacggcacggaattccagaaacattggtttctgacaacggcaca

SEQ ID NO: 1499 - DNA, 1200 bp, Heterodera glycines
  unsure (1)..(1200): unsure at all n locations
taaatagagtttcgttaagtttaattgattatttaagcataattatctatatttatttacgaagtttattttctttattttggttaacgattttcaaaattcagctgtctgttgatgttctgctgctgattgttgttaaattgtacaacagttgtaccaatattattcgcttgaaggagagcaaattgtgagcgaaatgcgcaacgatattgggcactgaaatattaattatataattcttaatgggttgattaaacagcgacccaacattattttaagtattttatctttatttttggttcgtctttgctctggcttgaagacttttcgttatattaatgaatattttttaaaccaattaaaaaatccagacccaggcctaaaagcataggcatgtctggtgtttttctggattttgtccagaaaaaaaaggtccagccagggctaggagttttcttggattttcaggggaaacagtccagccagggctaggagttttattggattttcagaaaaaataggcccagccagggctaggagttttcttggattttcagaaaaacaggcccagccattgctagtggttttattggatattcagaaaaaaataggtccagacaggactatgagttttcttggatttgcagaaaaaaaggtccagccagggctaggagttttcttagattttcagaaaaaacaggtccagccacggctaggagttttattggattttaggaaaaaaataggtccagccagggctaggagttttcttggatattcagaaaaaacaggtccagacatgggtaggagttttattggattttaggaaaaaaattaggtccagccagggctaggagttttattggattttaggaaaaaaataggtccagccagggctaggagttttcttgtattttcaggggaaaaacaggtccagccagggctaggagttttattggattttcagaacaaaaaggcccagccagggctaggagttttcttggattttcaggggaaaaaacaggtccagccatgggtaggcatgaatttctgatccanacttntttgaaaacttttattttcgtgtgtttgcacttgcaaagtnaagcattggtgcgctgcttccgtatgcccaacgtttggaaaaagcactgatcgggacgacacaaaatcaattgcaaatgggtccaaactgagcag

SEQ ID NO: 1500 - DNA, 5648 bp, Heterodera glycines
gttatgactagagctgggatttttatgtgctaaaaatcctgaaatatgtaataaaatatatgctaaaacccaaaaaaatgcaaaatatttgttaaaatatgcattaaaaattggaaaaaccaagtgtatttatgcataaaaattccataaaaatctcattcgttatcattttcgtccgcctaattgaaaaaccaatacatttggaagtgttttggggtaaaaatggtctttttctgttaaaattatttttataaatttaaagttccagcagagaacttcgaaatccatgataaattaagaattcgatttggctttttcggaataaataaagaaattttgaaaatttttaggctagctgttttaaattccataaaatattttcttactttaacaaaaattaattttactaataattagttttgaatttaaactattttgatattttctaaacatttgatagccctaaatgattgctattaaactgcagaatttcaaaaagttccgtcaagtttcaaggaagttatggccaaaaatgttcagaaaaacttagttttctgagtttctcaggtcataacttttttgaatcttaacgattttttttgaaatgttgcaagagaataaaaaacactttgagcgatggaaatatatcaagatcttaaaacttggtttattttgggtgaagttatgaataattttctgtcatggtttcttgactgacgcccattttgatggttttgactaacgtcccagtaccgtataaatcggttgaatctatgactgaagaactaaacgtgcaagtgataaaattaatagcaaaaattaatatttaaaattaaatgcaaaataattattttgcttttatttgattcacttgcacttttcatacttcgtctcagcacgaaacgaccaaataattcaaactaacaattgcaacggcgccggcattttggcgtcaaacacttctttttaacttggcaccctaattaattggaatgattgaaaactgatctccaaaaaagaatatgtttttttcttgccatacaaaaaagtttggctcaaaattcccttttccggacattttttggcatcaatgctgaacaaaaaaaaaaaatggaagaaagtctttcaataaaatttgtaaaatatgcagatgacagaaatttttttgtcatcttgaagccatcaaattgattggcaagtaagcttactagaggatttttcatttaaaaaaaacaaaaatttcatccaatattttcgtaaatttaagacttcattcgtttctccaaaaatttcatgcatttttttccataaattttccttcatccctatttttccctaatgttacaattttcaaaaattatgtattgtgcattcattattatttgtattaaatctagcatttattttgagcaaaatattttaagaaaaaaatatcgaagaaaagttgatcctcgaaattacattattagttatttgaaaaggtttaaaatttttattaatattcaattaaaaaaacattgctttaaaataattaaatttaaatatttttattgacactgagattatttttcggttcgcccctactgagaccattttcggttagacctagcacccatttaacatcttggaaaaacctgaattttcttaaattaaagcatttaatagagaattttataatttcgtttccgggttccagaattatttttgttattggaaccactcgagcttgtacatattaatgaatattatttaaattcaaacttacaaatgggttgaaaacccaaaaaatttatgtttatttttgaaaaatataaaaacttcttaactttttttggatcatttttaggaatattttatactagctttttttcaaagaatatacagtcatggtcatatgtttaacaaaccccaaaatttttttataaatttagccgtaatttttttactaatagcatatgttagatactttataaaatcacgtggaaaatacacatccttcaaagggatcatcgcattttgttgtattaaattggcatttttctgttttgtcacttacagtggaagcgcagcccattgggaaaagtggacacaaaatgggcaattaaatttgaatttaaattttgttttcggatcatttagaccggtgatgtgccatctcggtgacccagcccatcagcccgaaactgcttattacactgacatcaatgccttaatttcatattgtgccgaatttgtgtgctatgcgctgatttggctgatcatttggagaagaacagcacaaagtcattccgtttaattaggattagagaaacgattatattaaatttggaattttttaaatttgatttccatttatagaaccctatttttgaattagcgaattaattaatctatgaaaaataattaatgcatttttagttacggaacatgtaaaaaagttgacaatttctgtgagtgttctcatgtcaattgggctcttctgctacattttggtcaactcataataattttaaattaaaattaattaaaataatattaattaaaactcctagccctggctgggcctttttgttctgaaaatccaataaaactcctagccctggctggactgttttttctgaaaatccaagaaaactcctagccctggctgggccttttttctgaaaatcaaagaaaactcctagccctggctggactgttttttctgaaaatccaataaaactcttagccctggctggacctgttttttctgaaaatccaagaaaactcctagccctggctggacctgttttttctgaaaatccaagaaaactcctagccctggctgggccttttttctgaaatccaagaaaactcctagccctggctggacctgttttttctgaaaatccaagaaaactcctagccctggctgggcctattttttctgaatatccaataaaactcctagccctggctggacctgttttttctgaaaatccaagaaaactcctagccctggctgggccttttttctgaaaatccaagaaaactcctagccctggctggacctatttttttctgaaaatccaagaaaactcctagccctggctggactgttttttctgaaaatccaataaaactcatagccttggctggactgttttttctgaatatccaagaaaactcctagccctggctggacctatttttttcctaaaatccaataaaactcctagccctggctggactgttttttctgaaaatccaataaaactcctagccctggctggactgttttttctgaaaatccaagaaaactcctacccatggctggacctgttatttctgaaaatccaagaaaactcctagcccttgctggacctgttttttctggacaaaatgcaggaaaaccccagacatgcctatgcttttaggcctgggtctggattttttaattggtttaaaaaatattcattaatataacgaaaagtcttcaagccagagctaagatgaaccaaaaataaagataaaatacttaaaataatgttgggtcgctgtttaatcaacccattaagaattatataattaatatttcagtgcccaatatcgttgcgcatttcgctcacaatttgctttccttcaagcgaataatattggtacaactgttgtacaatttaacaacaatcagcagcagaacatcaacagacagctgaattttgaaaatcgttaacaaaaataaagaaattaaacttcgtaaataaatatagataattatgcttaattaatcaattaaacttagcgaaactctaattatggcaacttatagaagaaaaaattttaaacttttgtaactgtcaatttatgcataagtgaaaaacaaatatttgtataatacctcatctttatctatgcatttgtgtccatatttttgtacattttataaatgatgagcttgaacatcccctaaacatgtaaccttttcaatttcactttttgtccaatttagtaaaacatggtgtaacaaaaaaattggtgagattaaatgctactaatggggcggagttgtttttattatttgatagccctaactgttctctatcagtctgcaaaaattcaaaaaatttcatgaagtttcaaaaacgttatgacttgaggaactcaaaaaccttttaaacatttttggccatttttgaatgttaacaaatttttttgaaattttgcaggcaaatagagaacatttagggctatcaaatgatagaagaattaaaaatttggttgctttaaagtagcaattttttattttgatggtttcttaaataaagcgtattatgatgtttttagatagcgacgacatagcacccaactaattaagttggccagtgagtcccatcaggaacatcaaaggaggaaagttacactcaattttgcataaactagctaaacgatgatggccaatcaaaagaaagaatcaaatttgtgccactttcctcaaaaattgcattttatcatttcgcccttttactgcttattatttattaattgttttcatcactttagtttccataaagtaattttaaaaattaaattatttttaacaacactggttgggtattttatttttattttttattttatttatttatttgtcaataaagaaaaagtccacaaaagggaaaaatccgcttacagtgaggacaaaacattaaaatgtcctcaagaaagcgcataaacaattaaaaacgagatcgccgccaaaaaataaaatataatgtgagatcaataaaaaaataaaaataattaccaaatcactttttgtttaatgaattaataattcgacttttatttttccggtcaatcttacagaaatgaaatagttttaattttatttttaaattgatttaatgagtttatttcaataagctttttatcgagttggttccaaatttttgttacccgccccgcaaaaggtataaattttttgcctaatttatatttcgagttaagtctataaaagggaatgttaaagcgtttagaaggtttaagtatttcaaagggattcagatctgttcggccataaattattttatgagccatgaacagatcagacagctttcgcctgctttcaagtgttggcagttgaagtattctaatctttgttggtatggaatgggtggaaggctgcatttgaaaagaactcttttggtgaaatatttttgacatttttaaattttttaaatattttttagaagagatggattccaaacctcaggagcatattccaataacggtctaacataagttttgtacaaaataatccaaatcctagaagattttgatttaataacccgataaagagcgcatacgtaaatatgcattctttattatttgtgtgacatgattggaaaattgcaatttattatcaatatttatgcccaaatccctaattgtatccacaacatttattatatttccaccaattttatatatttctttggggtttttattccccaaatgaagtacaaaagtttttttaattgagattctgatctgccatttatttgcccattctgataaattatgcaatgctttatgcataatttctgtttcggttcttgctttataacaaatatacaatttaacatcatcagcatataatttaattctta

SEQ ID NO: 1501 - DNA, 3937 bp, Heterodera glycines
tgtaaattttgaagttgaataactaaaatttcagaattaaattttgaatccgaaaattttgtaaaaaatccaatttcttttctgattagaataccacaaccacctccactagttttcgatttccttgatgaaaaaatatagttgtaattctcttttacccaagggcaaaaattgatttcttccccgtcttcggtccaagtctcggtaattaaaagaatgtctattttttcggtttctaaaataagtgctatttcatcgattttattcattagtgacctaatgtttattaggcagcatttaacattccctttattttttattaaaaagtttggatgggtaattttttggtataaattttttaccgaccggaaaaatttttgtacttttgtataataattatgggtaatttgtagtgatttggttggataatttaaaatttttttcgaatatggtcaatgtcctgcctcagaaaatcgtgcgccgtgaaatttgcgcctcgacacttatcgatagacatttacttttttgtttttgtttttttcaaaaaaggcaaatttaatgccaaggaaaacaaaaatattgaagatttaataagccacattaatatatgtagatatagtttaaaaatgttttggattattttaaaatttgaacaatgccaagaatgtttaatttggttttgcctaggaaaaaaattttgataataggttgggctagtcaattaaaataagattttgaggaatttggaagcttttggcaagaacaattaccaactcatttgtcagacaaaaaatttctcgaaatcgtcaattgggttgttaggagatttcataaacccgtcaaaatgaaagtttattagagaaaacaaaagtttcatacatttctaaatttttcattcttgatggtacacaattggcacaccaaaagttttaaatttaaaatattagtccgaattttgcagaaaatcttacttttttcatgataaggcctaccagtatgcaaaattttagttttcaatttttaaaattaaaaattcaaattctattcatcatctattcccttatggactcccttatgttttctgttttaccatttttgcattagcgccaaaattattgtgcaaaaatataattattttattatatgtataagacaccaaaaaacattttttggaggtaacaaaattaattaaataatcaattgaagcaattttttttttttgcaaaatttgcaaaagtaagcttttttgtttgagtaaattcatctcatacatatgtaaataaacgaatctgatattttatgcatcatttgaaacaaagaattttacatctttacattgagattttatggtgatgatagctcaaaaaaattctaatcaaattcttattttattattagaaaattatgcttagtttaaaattgaaataattaagcctaattaaaagcagaaatcatacttatattatattcaatcaaatttctttaattccgattatttttttatcattattgctttgaccaattttcagctctgattatttgaacttagaatgaaaaaattctttgtaatttggctcattttccaatgcgatttttttggcgaagtgttcggcaacgcttgtaaatcaaaagaggaagaaccaattcaacctattcgcctgctgaggatgagaagtggcgtatccgagaagcttgtatcgggtaaaaaattaaaataatttttttttgttgttatttaaaacgcaccaatttgaattggtttaaaaattaaatttcataaaatgtttaaaacattccagcaatacactcaaaaacgcttttaagataccattggatttattaaagaaaaccaacaaaagcattcaacaccaaaaaaaccagttacaataacaaagcccaaaatggaacctgttacggtatccaaatccaatgctgaacctgtcactgtatcgaaatccaaagctgaacctgttacggtaccgaaatccaaagctgaacctgttacggtatcgaaatccaaagctgaacaagaaacggtatcgaaatccaaagctgaacctgttacggtatcgaaatccaaagctgaacctgttacggtatcgaaatccaaagctgagcaagaaactgtatcgaaatccaaagcgaaacgatccgttgggcctccaaattctgtagcgagaccaaatgtgctaacaagaaagatcaaaagtgcagcagcagtaccgcaattcaacgtggaatcagacagcgcatggattacgatatccccgaaaaaatcggggagaaaaagtacggtagtggaggcggtcgaacaattgaatccaccttctccaatgaaaaatgaggagccaaagcagaaagtcatagaaaagcagcagaagaagagcagaaaaagcgcaaaaattcgcactgatagtatctatgttggcactgttatagaaaataccatgggcactgataaacaaaacgaaaagaaagccatcgatgtgcaaaatgacaaagctagtactgataaacagattcacaaagttggcacatatagacaaaatgacaaaatttctgatggaaaagatgccaaggttgacactgatacacaaagtgccaaatcgggaattaatggactaaatgccaaggtgggaactgatggacgaagtgacaaagctgtcattgttgcaaaaaatgccaaatttggcactaatggagaaagtgacaaattgggaattggtggactaaatgccaaagtgggagctgatggacaaaactacaaaattggcactgatgcaaaaagtgccaaagttggcactaatggagaaagggacaaattgggaattggtgcactaaatgccaaagtgggagctgatagacaaagtgacaaagttggcactgataaacaaaatgcaaaaaatgccttcgatgaaacttgggaagagagtattgcaatgaaggacaaaggaaaagcagaaaaagtacaagaaattgactttgactactttatttggatgtagcaagaagtttgtaaggtcgatgagcatcagatttatattctatgaaaccttttctacaaatttctattccaaagtttaaccaaaactaataaagaaattaaattttcatgaaatggactcatttttaaataatatctatttttttaaatattaattttcaattgaaaattttattgtaatttttgattataaatttttctaaaatccgaaaatatttacaaaaaatgctaaaataccgaaatattacgcgcgttttttaaatattaaattaaattgaatattgttataattgttgaattcttcgaaaaaatcagcccgacgtttggaaaagggagaatcatcgatgagcaaatattttgacgattctcttaggcgatcaagatcaagctcatcatcattagcaagtgaatttttggtttaaaattttgggaaatcaagcaaatagcttgctgaataaggtgtttttcattagttcgtcgacacttgcggaccaatatttccggatgaaaatgccaacaaaaaaaatagaatttttaaaaaggtatttttaaaaatttctaaacaaaaattaaacaatgaccgacaatcaagtactgattgagattctcgctttcgaacagggcgctggttttttcgggacaaaatcttagcgaaagttttaacgaaatctgttggacaaataaatttttcgtttacttttcacccccccccccccccctcttttaacgaggagggagccaaaacagttaatttaatttatttcatttttaatgaaatatttatcccatttaaatcagttattccaagatttatattctatgaaaccttttaatatctatttttttaaatattaattttcaattgaaaattttattgtaatttttgattataaatttttctaaaatccgaaaatatttacaaaaaatgctaaa

SEQ ID NO: 1502 - DNA, 1351 bp, Heterodera glycines
aaaaataaataaacaaaaattttagtttgactaaaaggatttgttttagtctgcacatgcttatgttttttataagcgtaataaaacggaaataaataatgttttattttatcacattgaccaatcatcgacctttttcgtgtattttttggcacattgatcaatcatcgtgcccgttgaatgcctgatctactctaagtgccttaattcattatccatttacgctacacaaatttatttttcaacctaattcttgggtatattttaggaatttggtttccagttttctggtgtccaaaattctggcggtgtccaatttaccggttcgctcctgccctctccagatccccactttgctcgatcatataggatcaattgtcgcctcatttgatctattaatattcctctcggggaagcttcttctctatctcacaacaaattaatgtccaaaatttgcatgacaggcacaaatttcattcgcaataatttggtgcttcatcgtcgcgtaaattcatgccaaagttcaactgctggtgatgaacagaagaagacaattgagcagaagaacaacggaacaagtgatggagaaggtaaaattaaattttaaaaatataaaaattagttttttaatatatttatttagggaataaaaaattttatagaatttatgtgggtcccaattctgaccaaaacccaccaaaaattggctgaatttttatttttcgttttatcacattagaaaaaggccaaaatagggcaaattgaaataggaaaattattcataaattcgcccaaaattaaccaaattttaaaatgttgatatcattcgattgacctaagtgtttttattatccttcaaaatttcaaaagtttcgttacatgaaaaattaactttttaaattttagggccatcccaaagagaaagcacaagacgtcccagtttgggagatctgttgaatgctcgtcgtaaatctgaagcggaccgagaatctatggacacactttgggagccaatgaatgaaggaattttccgattttaaaaattaaaaaaaatcaattaagaaatttttaaattagcaattaacttctaatacttggcagtcattaattaatgctcattaaataattagttttagaaattgatgagagcataaatatgtgttaaattgcacaaaaagaccaaaactatgaataaaatgtatggaaaaaatgttaaaaagttgtccgatgtaattgcatcgaaataaaaaataataataagtgatagaaaatatattgggagtcaaccgcaatctgcgacatttttatccagatccgcggaatgtgtcaaaacctttttcgatcaacaata

SEQ ID NO: 1503 - DNA, 9795 bp, Heterodera glycines
ataaaatttgaagtgaatcggacaaggggtgcgcgagttttggtgcacaagtcttggggtgtgcgagggggcggggcgtcgggaaaactccgtttaaaatggtgcctgaggcgaaattctttcgccgttcagcttaggggatagtggaatggaggcctataaaatttgaagtcaatcggacaaggggtgcgcgagttttggtgcgcgagtctcgggggtgcgcgaggggggcggggcgtcgggaaaactccgctcaaaatggcgctagagacgaaattctttggccgttcagcttatgggggtggtggaatgatggcgtgtgaaatttgaagtgaatcggacaaagggtgcgcgagttttgctgcgcgagtctcgggggtgcgctagggggcggggcgtcgggaaaactccgcttaaaatggtgcctgaggcgaaattctttcgccattcagcttagggggtgctgcacagacgacccaatgcgccgtctgaacttcttcaacaattcaaatgtttcacccctccccgctcttttctcatttcagtctgcatagcgacgcggacccctcccatcccatagattcttatctattcatctgcaacggcccgttctccaccaacccatcattttcattccatttctcccctttatattgatttcttgtccgttttctttatttgttctgtccaatatttttatatttgtgcttttattatgcttattttaacttactaactaacaaattaataattaattaattaatctaacaaagaaaagcaaagaaaagcaaacgaatcgtaaagacaattaatgaaacgaaaaagccatgaaaaaactttaagctaagaaaagaaaagcaggcaaaaaaaaaaaaaaagaaagaaagtaaaccaaaagccaggcccttaaacgaaaagccatgaaaaagtaaattttaatagctaagaaaagaaaagcctgcaaaaagaaaagccaacgaaaagccatgaaaaaaaaaataaattttaaagctaagaaaagaaaatcctgcgaaaaataaaagccaacaaaaagccatgaaaaataaaaacaattttaatagctaagaaaagaaaagcctgcgaaaaagaaaagccaacaaaaagcatgaaaaagaaaaacattttaatagctaagaaaataaaagcctgcgaaaaagaaaagccaacaaaaagcatgaaaaaaaaaataaattttaaagctaagaaaagaaaatcctgcgaaaaataaaagtcaacaaaaagccatgaaaaataaaaacaattttaatagctaagaaaagaaaagcctgcgaaaaagaaaagccaacaaaaagcatgaaaaagaaaataaaagcctgcgaaaaagaaaagccaacaaaaagcatgaaaaagaaaaacattttaatagctaagaaaataaaagcctgcgaaaaagaaaagccaacgaaaagccatgaaaaatttaaaaaaattttatagctaagtaaagaaaagcttgagcgtattaaaaggaaaagcaaacgaaaatgaaaaaaccatgaaaaacatttttaaagctaagaaaaaaaaagcaggcgaaaatgaaaaagaatcgaaaaagctaagaaacgaaaagccatgataaataaaaataaattttaaagataaggaaataaaagctggcgattatattaaataaagaagcaaataaaaagccaagcaatgaaacggaaaaaaaacgttcaattttttctattataatgcttttattttttttttatagcgaacaattttgaattgtactttattcctatggctcaacaacaacaacaaaatgtcttgggggaaatgccaccctttggccaagtcaaaattgaaaaataaataaaaataataatttcaattcttttaaggttgcccagttagtacaaccgatactcgtcaacgcggcacatcagcaattggcggtgctttcttctattttacatattaaattgttgtcgaacttccatttcaggagcctttctgtgtggacggcacgcacaaccttcaatttttgaatggttgcgtttctgcgtttgggcagccattgccgtatgtttaatttacaaatgccatttcgtaatgtgttgagtttttagcccgctgtgcctgatcgtcgtttcggttgatcaccgagcagctcagcaaacgccagcgggtccgctcgcggtctccaactgtgtcctgcgcaccggcgaagggcaccgcgttgaagcctccgggtggcagcaacatgcgggtgtgctggcttccctgtccgtcggcaccacatattggttcttcaactgtgttgcgcggacccgctacaggcagctggactgctggttccgcattggggttggaggccccaatgcgcttgtggtaccacatgtggccccacaggtaagtttttttcattttaattttaaaatgattttttttttaaatttatgtttaagcttccggcaaacattccgccaacggtgcttgttcagactggtgctggtcgtgatgcgactcacgtaccgccaaacgtgaccaccgctggtgctgaacgacgcgcggacctggacaacaacaacaacaacaatgtgaggaattgatcttttactatgatttgtaattttgttatttaatattgaataaataattttgtctaggacaatgttggtattgagccgcgttcaagttgtagtccgagtcgtacagctggtgcgcgacgaacacaaaggcgtgttgccgaaccggtgcgtttgagggttcgattcgatttgtccccagaagtagaggaaatttggggggtggaaagacaacggccatatcccgcccgtaaaattagtgtactgccctccttcgccatttcaccaatacacaccaataaatcgggtgcttgtccaatttgcatttgtccgtttgtaattggggagactgccacctcactccactgttttcacattttccaccattgttgtattgtcccctggctaaaaatcagccgtatatgtcccatttgtaaattttatttgccatgaataaatttttgattgtaataatttaaaggccggttgtccaattggtgagggcttcgtcattgagcgctcaacagcgatgaggaatgtgccacgcaacacgcggggcgagatttgtgaactgcgctttctgccgctggagaacgcgcaacggcctgaccttttgatggaagtcatcatccagcaactcctcgaccgtgtgctcgagggccacccatgcccttcgatggtcggactgcagcttcatccgccaggcttcgatcggccatacgtcatcggacttcgcccgccagagcaaaacaacgcagcggcattggcggcagctattgagcggcttaatgagcagtcggcggccggcattgatctgcttgccggaacaacagtcaccaaagtcttggcggtgtggccccttgacgtcattcgtgctgaaccccaacggggaggtgagacatcggagtttttatatttaatagtggtaaaaaaataggtgcatgtgaccgtgacgtggagcatcacgtttccaacagcgtccagtcactggtcaggattaacaaccccaacgaccggcactgcctcgcgcgtgccgttgtcttggggatgcgtgactgtgagacgcgagtggccggcggcggcggcaaagcggcatttaacctgttcgccagtcgtcaagaccaacacgggccggcagcagctcagttgttgactcgtgccggcattgatgtcaatagggatctgtacacgctcgacgatgttcaacatctacagcaatggatcaacatcgaacacggtgtgggccaaattcggctggtcgttttcgaaaaagagcaggaataccgcatagtgttcaaaggggaggggtgagtttttccttttgttttcattttcgggctaattgatttgattgaagattggcggcgaaatttaacctttgccttgtgttggagcgcagccacttcaactacattggccgtgttgagcagcttttcgatgtgcccaactactgcattgactgtgagcgcagggcggacgcgcgctaccacgcctccggatgcaaagttgtgtgccgcctttgtctgcggtacgggcctggttatccatgccaaactgaacaggtagattaggattagaaaatattcaaacaaaaaataataattaagctaccgaatggtggaagtactgctcgaaagtgcggtgattgtctgttcatcttcccaaacgatggatgctacaactaccatttggccaattatgctccagctccaatggacggccgtgggcagcgacaacgtcaacccatctgtcaatggcgccgagtgtgccgtgcgtgttggtgcatcgcctacgagggcaaacaccaatgcccgcgagaccaagcagccgacgacgatggaaactgccgacgctgcaatgggccacactccgtcgatgagccttgctacatacagccggttgatgcggattcagttcggcagcgtgcatcgattgctgttgacaacgacgactctaacgacgacgatgacgacgaagatgagctgccgcttcgtttgtgcttcttcgacgcagaaacatcacaggacaggccattgcagctgaacaaccgcactgccaagaagcacgtgccgctgctcatcgtcgctgaagtcatctgtgagcgttgtcttcaggctggtatcggcgtcaacgatggtcttggaagaagggctcctggctgcgtttgcatgacaggattggtgagaggtcagcttttgcgccaatggtcgtcgccgccatttgtcaacgcagcgggagacaacagtcctgcgccatttggagcaccagcattcaaccagcgccgcttcttcttccactcctttgacaacgaaggcgccgacccagtggatcaatttttggattttttgctccatcatgggccaaagaaagcacacacggtgtgcatcgcgcacaacggtggcaagtacgatttccatctcgtacttgaagcgctacaccgccgtaatcatccgcccaaacacctgtgcaccaccgggttgaagatctactcaatgcgtctgtgtggtcgtcaccaacggcgagtcacatttaaggactcaatcaactactttttttgtgccttggacgcgttggtgaagagcttcgaagtgccggaccatttggcgacggtgaagccattcttcccgtatctctacatacgacgacaacatctgctgcagcgtctaattggtctaccggctcaagagttctactcccccggcacgatgaagtccgacaaacgagcgcagtttctccaatggcatgccaacaacaacaacaaccccggcagcagatttcagctacgcgagcagctggtcatgtactgtgtcaacgacgtggccatcttgagggagtccgtcatccgattccgccaactcatcgccgacaacacgcaaggcctcgacccattcctccacgcgtcgacagctgctggccttgcgcttgccacttttcgccgctgtttcctgcccgccaatcgtctggtccactcacccgagggcggctacttgcgcgggcgccgtgcttcggcagaatcgcagcgctacatccgattcttcgaactggagcacccggaggcccaagtgcagtgcgctagctggtccgtcggagaggcgcacatagaagacagtggctaccgcgtggacggactttggcgacgagaagcgcctctgcgtcccctggccattgaatggcttggatgctacttccatggtaactttgctgtttgtttgttttttctttttaaatcaacaaaattaggctgtcctgtgtgctttcccgaccgacagcaacagctggcggccgggcgaacagcagaggacctctacgaacggacggagcggcgcctctttgagctagagcacgaccatggctgtgaaatccacaaggtgtgggcctgtcagtggatggagcggctccgtcacgacccggacctgaaacgccgttacgatgccgtgttcgtcccgttcccacttgacccgcgcaacgacgcactgcggggagggcgcactgaaccgttcaagctccaccacgtgtgcagtgacgacgaggagattgtgtgcatcgacattgtcagcctgtacccatacgtcatggtgggttttctgcgaaggtgttcatttcttacggataaaaaaaaaaaatcagaaggccaaccgcttccccgtgggcaacccacgggtcctgacgcgcgaggtgctgctccatccgccaacggcacccctcccgtggactgcacctgaaaccaacatcttccgcggtttgctgctcgtgcgggtgcttgccccacgcaacatccgggtgccgctgctcggctaccgcacaaaggatgggcgcttcaccttccctttgtgtgcgtggtgcgccgaccgtcggcagcagcggccgtgccgtcacggtgacgacaagcgctcgtgggtgaccgcctacacccacgtggagctcaacaaggcactgcagctcggctacgtggtcaccgatctttttgaggttggccactgcttaaaaactttgtcatagaaaatacaaattaggtctgggactacgacgagtgggacggcacgctgttcagcagctacgtcaacacgttcgtcgggctcaaggtgcaggcgactggatggccggaggcgtgcgagacagatgagcagcgtcaggcatttatggacgagttcgaacggacggaaggcatccgcctggactcgaccaaaatggagttcaaccccggcctgcgcctcatcgccaaaacattggccaactcgttgtggtaaatattttagggggtgaaaattaaaaaaaaaaatgacatccacagggggaagcttgcgcagcgcgtgggccagacggagattcgctacacacggactccggctgaattctttgcgctcctcgatgacccaacggtggacaagttggactttgtccacgtgtccgagcacatggaccgatgcgttgtgcggaagcgacccgagttcgccagggcgccaccgaccaactgccttccggtagcagccttcgtcacctcgtacggccgcctccatctttacgactacatggagcaggtgttggccattgatggcgcggagctgctctactgcggtacgtttgtttgtcacatttttcgtggacaagcccatcttttagacaccgactccatctactacgtcaacaagatgggtggtccgtgcgttgctgagggcgaggcgctggggcagatgaagcgcgagcacatcgatcgccgaattgtcgagttcgttgcgggtggccccaagaactacggcatccggcacaccgctcgggacgggacggacgagcgtgccaacctgaagatccgcagcttccgcctgtcctacgcggcccagcagctcctcaactttgacgcgatgaaggagctcacgctctccacatacaacattgacggccaaatgtgagttttcataaatgattaagttatttaataatatgaaattcatttttttttttagcgacgatgcgttggacaacgaagacctctacgtgtatggcggcggcgaacatcgtgcaattagggtgaacttcccgcaaattgaccgcaacgtgtacgccgacctctacacgcacgaagcgcacaaagactacaggcccttctacgccaagggacgcgttcgcccggggatgcagacacgcccctttggctatgtggaggatgaaggaccgccgaacgatggacaacggacgcagcgacgaaagaggaattttgttgaccaggatcccacccagccggggcactctgggtggttttgattgtgattttttaaaattgttttgtttatttaaatttgtacaaatcatgttatcaaaataaatcatttacggaaatattcgggtacaatattagataaattggtaaatgactggtgtacaatatcaagagactttgccccagtgacaatgaccttccccgaaatatagactaggcacgtgactccattcaacaatttacaacgaagggctgggaaaatggtagggtaatagatgccacccagcgtgttttggagtcgctctacactgattcgctgggggtaggtttgaacaccaacaatgttgaccacacgcagctggtggatgtccagtgtgatgctctgtgtgtgttggatgcgccgcaaaacgcgtgccgccattttactcgcactgcttgggtggggcactccggtgaggaccacacgcgccgattggaagaccagcgcagccacagttttacccgctattgtacgaatgcgcattatgatagcgtggaagcgcctggggttgtactcggtgtttgcgccacgttgcgcaattgtcaaaaattgctctcgagttaagggttgaacatttattttaaaaacaacagtacaattggaaattgagtacatctacaaaacaatggacaaaatttcaagcgggaaaaaagttttgtggtccccgcctccaaattcaacgacacacggcaaattagggtggcgcaagcggatgccatgctttatgtaatagtgcatccggacctttaatttgcgtggtaacaaaaaaataataataataaaaaaccgtaatgccgaggtagcctcggtaagctggggcagagtgggtgtccaggatggataggtcgttgcaacggaccggaaaattgcgcacggacgggcggagatgtgcagtgcgtaactgaacggagcgcaaatgctccacaatgtcccggcgtttctctaggcttttgaaaagcacaagcagctcatgggcactgcatttgaaccgcttgcagaggtagtccacgagcggaacagggcgacggcgttcggcgcaaccacactttttcggagtgcctaatttaaaatttaaatgccaaataaaaaccaaaagcaacttgatcgggtcaactccgcaccaattggagctaacggctcacgcttcatctcctcgtcaatgaggctgatccagctgggatcctccgcctcctcctcttgctttttcgttggctctttgttcactttgttggcgtcctctaaatccatttcgggataagcgttatttatccaatcagtggcaagaattaaatccatttcaaatctatgaaaatgaaaagatataaataaaatgagcattccataaaaaataaataaaatggacgccttccaacaattcaaaagggaggatggacaattacgtcaccccttcacaatgattgtgtctgggagcacaggcagtgggaagtcagagtggataatgcgtctgttgcgtaatgtggatcaaatgatctctacccccattgaacgcgttatttatagctatggggagctgaacactaatgtgatgaatctgcagcgcgtcggcaaagttggcaatgtgccagtcactgtacacagcggcgttccacgcgcggaacaagtgcgggagtgcgctaaaaaagaaaaaaccttgctggtgctggatgatttgttggtggggatgagtcaacaatatttggacacactcttcacccgtggctcacacaattggggcgtcagcgtaattttggtgactcaacacctgttcaacaaagagctgcaagtggcgcgcaccaattcgcattatttattgttaatgcgaaacccagcgggagcgttgcagatacgcataatcgccacccacctcttcccgtcaaggactgcacattttattgaggcctatcgggacgcatgcgcgaggggagattggctaccttctggttgacatgcacccgagactc

SEQ ID NO: 1504 - DNA, 2840 bp, Heterodera glycines
atttcaagagggaaaaaagttttgtgatctccgcctccaaattcaactacgcaaggcaaattggggtgccgcaaacggatgccgtgttttatgtagtagtgcatgcggaccttgaaaattttgtggtacagacaaataaaacaattttaaaaaaccgttatgccgaggtagcctcggtaagctggggcggagtggtgtccgggatggacagatcgttgcaacggaccggaaaattgcgcacggacgggcgcaggtgggcggtgcgcagttggacggagcgcaaatgctccacaatgtcccggcgtttctctaggcttttgaaaagcacatgcagttcatgggcactgcatttgaaccgcttgcagagatggtccacgagcgggacggggcgacggcgttcagcgcaaccacactttttggagtgcctaatttaaaatttaaaatgccaaatgaaaaccaaaagcaaaacttgttgctggcgcctcctcaccaattggagcgagcggctcgcgcttcatctcctcgtcaatcaggctgatccaactgggatcatccgcctcctcctcttgctttttcgttagctcctttttctctttgttggcgtcctctaaatccatttcgggataagcgttgtttatccaatcggtggcaagaattaaatccatttaaaatctatgaaaatgaaaaactataaataaaaagaaaattccattaaaaaaaagtaaaatggacgccttccaacaatttaaaagggaggatgtgcaatttcgtcatccattcacaatgattgtgtctgggagcacaggaagtgggaagtcagagtggataatgcgtctgttgcgaaatgtggacaaaatgatctctacccctgttgaacgcgttatttatagctatggtgagttgaacacaaatgtgatgaatctgcagcgcgccggcaaagttggcaatgtgccagtcactgtacacagcggcgtcccacgcgcggaacaagtgcgggagtgtgccaaaaaagaaaaaaccttgctggtgctggatgatttggtggtgggtatgagtcaacaatatttggacgcactcttcacccgtggctcacacaattggggcgtcagtgtcattttggtaactcagcacctgttcaacaaagagctgcgtgtggcgcgcactaattcacactatttagtattaatgcgaaaccctgcgggggcgttgcagatacggaccatcgccacccacctcttcccgtcaaggactgcccattttattgaggcctaccgggacgcatgcgcgaaaaattttggctaccttctggtggacatgcacccagagagtccggaagagatccgccttcgaacaaatatatatgaacaaaaacaaatagtttacctaccaaaatgaaagggtcacaaataataacaataaataaatgctttttggagacactgtgtaatgccaaaaaggcgaaagcccttattcgaggcgcatccgatgagcaacttttgtgccttgtcgaaatctgcctaaacattctaaagggacgggtccctttgcgtcctcggcatttgaataagctgaaagctcatgcacaggtgcttcgccgtctcgcccgcacacgctgctctcgctcagccaaaaaggttttgctacagcacggagatggcctcccagctattgtggggctcattgcgtcaattgctctcccgcttattgctgatgtcattgaaaaatataaatagttttccaaaaaattaaaaaacaagaaaaaatgcagcatacaaagcgctatttgctagtccccgaagagatttatcatagtttggcatcaccgccaccgtctgacggaacaccaattgggctggtccgtacccgaattaaacaaataaaaaatgatgacgccataaatgaggcggaaagggcagtcaaatatgagcaggaagttaagcgtctcaacaagctcacaaaggacgaagatgaacgtcccgtgggtgttaaattagaaaatttgagtgacgtggttgacgccatgccaaaaccagtcaacgttacaaggccaattgttgtttctacgcgtcgccatcttaaagtggggcgtgcgcgaaaagaaaatgttgaacaattagaagatactgatgatgatgattatcaaaacccacggtcgtcaagttcaaataaacgacaacccacacaaacggaaatcttaaaattaatttataaaaacgcccaatctctaggggtgtcggaggaagggcaagttttgagagctggtgggcgtccatttataaccagcagtgttgatgacattgttagtcacctgttgaacaaggacaagcgtggccaaaataaagagccaacggcattcaaagaatttgttgaaagggcaaggcagaatccgctcttgagtaggcatttatttcccgaaggtcaatccggcaaaggaatttataaaaacaccccacttaagtttaagccatcattatggatttgaaaaagcttcgtttgctcgagtttttgtacaaggacctaagttcgcctgtcgcattcacgagcgttgaaccgctgctgagagaggcgcggaaaagtcaaccaaaaatcaatcgaaacgatgtccaaaattatttgaccagccaacgtacatacacactgcatcgccaggccaagcggcgctaccgccgattgccaacattggcacccggcttgcatactgaatggcaggccgatttggctatttttgaccgacttgataacaaaatcatggctttcagtactttgtagtctgtattgatacccttagtcgacagggtgtttgtcgagcccgtaaagaccagacgagcgctaacatgatc

SEQ ID NO: 1505 - DNA, 9236 bp, Heterodera glycines
  unsure (1)..(9236): unsure at all n locations
aataaaccaaaaaaaagaaataaaagcaattcagacagactactgaataaaataattataaaaatgaagaaaaacacagatttttttttttttttttttttggtcgttttcgagagtgagaaatagggcgtcggaaatttttttgttttcgtttttgtgtttgttttcgtatttggttttttttctctcttcactatcggcagtaattatatggctgtaagtttttcgtaagtttggcattcgacaaaaaaaaaacgaagggtcaaaatcgattcatttctaattgattcccattcccatctcagtgccgttgaccaacaaaaatagaggaaatgaggcgaaatgtggacaatgacagtggtgcaaacaatggcgcgaacatcagcagcaacccgaaaattgcccgggatgcggaaattgctcatgttgtggacactggaaatggcgcaaatgacgcgcttggcgacggaatggacattgggcactgcccaaactgctcgtggcattgtaatgtgtgcagtaagcgaatttttctgttctgcattcgatttcgttcaaacatttctttgattcagtctgtcattaccgcctaatttgtttaatttactatcaaaaaccacaaaacggtcaaatttttatttttttttccctgttatcaatttaatcaatgtttttgggctgattttccactaactaattcaatttgctaccaaacaacaaaataatggtcaatttttttttcttctctacttttttcgtcaaaaaaaaaaacattgccgccaaaagttcaattccctattaaactaatacagtacaacaatgcgcggtgcggagaacattgcactttgaacgctaatatcatacttatcttttactgtaatcgccgatgagcctggacaattccatttttcgatttccacgatagggatgggctcttaaatgttacaacagctaatgggaaaagcgtcgctattaacaatctccacttttcactaaaaagcatttcccactcattcatcaattcattcttcatccaaagcacatagtgctctcatctcaatcgtcaaacgctccgcaattcacagccttaagcttaagcaagcaaccgcgcgaaccctaccgcctattccctcatttgtttccaaatttaattgttacatctaattattctaattttgttttcccgtttcattttgcttattatttgcgctcatatttgaattgttttaactcgcgctctcatttcaatcaatagaatagtcgtaagactaagagcagaccaaattttttttttttctcttttcaaattgtccaccccaattttcaattgaactatcctttggatagaaagaaacgaaacaatggaagaccaacaagttacaataacgagtgtagacaggacattatttcaaaatctcagtcaccctcctaattccggtgctcccttttcattggtagaaaaagtataccaaggcactgtacgtctagaggatgccgctaaccgaagtctaagagtaattaatcgcagagctgtacaaaatacagatgccattaaccaagtatctgtaacggttaatgctaacatggacactctctccacaagacttgaccaagttgtagagaaagttgaatctctggaaagccaagtggagaattgggatgaccctaatgctgataaattatcacaaaacgggaatgccactgtggtactaaggggccgcgtggggttacttgaagaagaggacgatgaagacgaatttctaaacgttttgacaactgtggacccatttgctagtcaacttccggcatgcagagatgaaaatcttacctctttcgataactgggcccaaaaatttagagaccttttggattatgcgggcacaacatggtcagaaaaagaaaaattaggccgactcaaattttctcttgaagggcaaatcagaaagctctttgataagcttccggacaataaaaaggacactgtagataaggcattaaatgccattagggacaaattagattcccctgaacgctgggaaatgtcaaaaagggcactgtgacatgcaaacagcgagaaaccgaaacagtccgggaatttttgtcaagactttcgccattggttactactgtgtgtgccggtcaaagtgaggcacaaatacagtcacgactaagggatgaatttttggaaagggtcaagcccaatttaacctttcttatccgactgactggtgtcactaagaaccaagattttgaggctgtgttttcccaggcacaagaattagaacttcttttgactaataccaatgaaaataacgttttggacccgctcaaattcactgtccaagctataacccaatctccggtaaaccaatcgggttatcgtactaaccaattttcttcctccaatgtgaattcatgggcacccgctggacaaagatatacgaataaccgtcaggttaatcagcaaacacaaaataatcaaccaaatggttcaggaagaggctattttcggggtaaccacggtgaatccaacaggcctcaatttcaaagaaatagggctaatcaataccggtcgaaccgaggccgaggggaccgcaattggactggccgtccaaaatgccatcactaaggaagtaaagagaataatagggatggcatcattttatagaagacatatacctaatttttccacaatcgttgagccgttaacccgtttaactcgtaaaaatatgaccttcctttgggaagatgagcaaaaggcagcgttttccaaaattaaggaaattctttctcaagaaccctcactttcctttccaaattattccaaaccatttcatatctttaccgatgcttctattgttggccaagctggtattttaatgcagaaaaatgaatttggcactttttctgctatttcttattgcagtaggactcttagcgcttccgaaaggaagtggccacccgttcaaattgaactgggagctataatttattcactaagagaattcaaaccatatatttttatgtcagatgtggaattacatactgatcataaaccattagcctatctcttaaaaaaggcagaagctcatccaaatttagcacggtggctaattgaactacaaagttaccaaattaaaatagtgcacataagtgggaaacaaaatagtttagcagacgctctgtcaagagcacaggaaaatattacggtcaaagaagtacaggacttagatgaacttgaggacattgctgagtttccaatttgtttaaacctatcaattgaccagcggttagtttttgatccattcgttaatacattaattcttagaggcaaagatggtaattcgtacaatattgatttaaagaaagagcaaagggccgaccctcaaatctctcaatttattaactttttacaaactggcaaattttcgaatgaaatataccaacagaccatggaatctcttactgatcaagccaaaaacctcgttattgactctggaattttgtattttaggtaccaggatcagtcaccacgaatttatataccaatctcattaagatcccttatttttgactcatttcactcttctcctcttggtggagggcacatggatttaaaaaagacattgaagaaatgtcgaaaatattattggcctttcctatattctgatattttaacatggtacaaacaatgtattacttgtcagctaagacattcaccgacgcctgcattcagggcagaaatgcaaatggtccccgccaatactttatttgccagagttggtttagatctagccggtccttttcctattactgaacgtggcaataaatacattttaaatatcatttgttggttctgtaaatatgtaatatccgttcccttacccgatgccaaatcgcatacaattgccaaagcttttcttagtaattgttatcttaagtttggtggttgcaccgaattagtgagtgacgatgcgacagcatttacttctgagttctttcgtgaattttgctcgttattatatattaataagaaatatgcagttccacattggtcgcaaggaaatgcggccacagagcgcacttttagaacatttaacaatattttgtcaaaatatgtcactaaagagcaaccagattttgatgaatttttagactatgccaatttttgttataatacatctgttcattccacgactcacgaaaccccatattttttaatgtttgggcgtgatccgattttctgtattgatcaaataatagatcctaggattagagaaccaattgcatttactgatgagacagaatttaaacagaaattagtgacctctcttcggagagcatggaagataaccgcagaattacatgctgaggcacaggagaaaatgaaaattcaatacgataagactatgagaactcctaatttaaagattggggacagggttttattaagaaattatgatggtaaacgtaacacatccaaaaaatttcattttccatnggaagggtgcctttagaattatagaaattgagggaatatatgccacaatcactagctgtaattcgcctcaagcaaatccacgccgtgtccatataaatcagcttaagaagtgttatgaaaatttaggggggcctgcctgcacttcacctaggcttagttcagaagagagaaattctctcgcagagttagaagcggatgaaattcacaatttgccgggtcactcacatcctactgatataccaaaacattctttttctcttatcgtgattctgatgatgaaatacccgctaatgagcccaatattgataataatgaggttaaaacatcactaacaccgcaaaatatggtctaagacagcgcgaaaaattaaaccgaccagcacgctttttagaataatttttttttctctcttctaatttttcacttgcactttattttctttatttattatttttctccttcatctattgaccattagtttgcttgtttcgatttaatttttttttattcaataatttcctaaaacaatttaagcaacattcgtgctaatccaagcaattctaattctaatggtcaaaaaacgttcagcccatcgtccgaacgaaaacatggccgcctttttcttttctttaaaatgatataaaatttcaaaattgcattgtttttctaaaagcttttaatagaaaacgcgagcattgagtagactcttcagagattctaatttaaaaaataaaagtcaaaaaacattttaatcaataagataagtttatgtgtattaaacagaaagagcaccacaaaaatttagaaaagacgcttctaccaaatgctaagacaaatttgtcatttttataaaaaaaaattgtttttatttaataactcataataactcttcatacactaattgtgacccagctggtactgcgtgatggaaagagcagaaaaagttttacaaaagctcgaagacataattataaaattacaaatttatagcttaagtctgagcctagatagtgccaatagcctgagctagagcttttataactagataggtcatttattgacgcctaaattaaaccagagttaaaatttaacactttctagatttttaattaaattttttggttaaaataaatgtgagaattttaatttttaccaaaccggtttttaatgcttacacatgcagtcatttttttccctttggttttacattttgcttaaatcgctattttaaaatactaaaatattttaaacattatgttttggagctaacttttattttgtattagcttaaaattttttgttattaaaaaatttcttttaaacctaatgaagcactagtcttgctcgctataactttgttttataaattatttaataaatgaatttggaaataattttaagttttcaattgtcaatacaaatattttttaactttatgattatccttttacttaaatttcttcaaaaacttatataaatcaatgaattataattatgatggcgctttattctcggcgacggcccaatgtatcggcgttgccgccagtgagtttcggcgaaatcattaacaatcaaatggctttgtttttgatttcaaattaataaaaattaaaaaataatttcatattttattattacattttacttaagtatatactaatgttagtgcttcataaaaaatttatagaattttgataaatcaattttatttatttttttctaccgctctaacttgtcttaattctattaaaattagtaacacaatttttttgatgataattttaaacaatttcatagaaatatttttatattttttccataaaacattaccaaaaatttaatacgcttacttacttaattacttaaatttttgttttagcatttcataaaaacagccatttttgatatttttatataaaacattaacttttgagtattttccataaaacacattcattaatttgttttttaattaaaataatctaaaaaaaagaaaacaacacaaaagcgcattcaataaggattttaaaaaatacattaaaatatatattttttaattgaaaatgatattcataagacataataaaaaatttaattgtttctataaaataaaaaaataaattttcataataattatttattctacttattttgacggaccttattaaatattaatgacctaatgaaaaacgaaccaagtcgatgcgtgaaagcttgttaattaacatttatgaatataaatagtagctataattaaaattatacaaatttaatagaagtaaatttatgccagtaatttatatgtaaaatacaattaatggtatcatgagaatcaaatgaaaaacatatttaaatagaagaaaatatttaaaaaattaacaattatttgaaacaaagagtataaacaaaaaactaataaatattcatttttcattataaattttaatatgttcatttaatgattttgtttttgtattattattacattttaagaatttcaatatagataaatatattttatattataattaaattttataaattatttctcatattattaaaaattgttacattaatgtaaaagaacccgacacagtacagcaattattttaaaggttctatccgatttttatttatggataaaattataaagaactcgttcttttaaatatatcatttaaatttataatacttatgttattaattcagtttttaaggattaccaaaaaaatattaagcggcaaattaaaaattatcaatgtaactacaataaaatttaacttaatgcgaaaaatttaaaatttcaaaatatgaaatttatttttatagtagttttgcaagaaaaatttaagacaaaaaaattaactaaaatgcaaaagtttataaaattctttttttgagaaaaattttggtgagaaattgtaagtactggaataatgtatttttttaaggaaatttttggaggtctgacagaactatttattgaaaagatgaaggtgttgtttttcgagcgattaatttggtgaacaattttgttggttggtgcaatgattttaatgcttcataacatacggattgtttggtcaaaaactcccgggggtttggaaatgtcttcactggcctccttctggtttggtccttttgcaacaacgggaacctggtcatttgccgtttttgagatctccgtcgcaaaagccaatgaagctggagtcttttgacgttttcggagacgttcttcgaatttcttcatgagctgttctttgataagcgccggtcggacgaacagacgggccaaattttgttgagaacggagtcgagcacgctcgcgcttccatcctccgagtgccatgtgttggtgtgtgggtgttggcatgactaccttgagtgggcgtggtgttgttcgctgcgggtcgtaccggccgagtagaaagacggcggttggttcggccttaacttcaagatggtccaagattttggtggtggcttccctgtcttcctgaacacgctccgatgagcgaccggcattactttccgggaggccaatgaacaccaatgtgcgttggcgttattgctctgcgagtgcggcagtgattgggtccaggtccagttcgggtgtcattgaacgtttggcgggaggcagagtgatgtttgttgcgttggctcgcttcatgtcgaataatagaaaagaataattgttttttgagatcttaaggactacagaagagtcaaaaatgaataaccacttctatgaaaccatccaataaattcttagcaataataatattattagtatataaataaaacattattcaaaagcaaaattaataatcgataaaagcatctttattttaatataggtttaattatttgtaaattgaatatcatgtaaaactaattaaaaatctttaaacgttataattaagtgagagacgaagaaggtcatcttttttgaaagatcagaaatataataaaagaaaaataacttttcatcaatatttgatttaaaatttttaaatacgaaaatttaatttaaaccttaattttataattttgagatttcttaaattctcccaggagagtacaaatgcggtgcctccagttcgtcaatgataatatctaattaatttattaaaaatttttcttgttatctaaattaataattaaaaaattataacaaaaacaaatatatcaatacttttgtaataaacatgcattttttgtagtttagtagatggataaaaattcaataaaactatgtatttaaaattaatttatttttatctgtctccctttaaaatttatacaatacttttaataagccctcatatattcgtaaatttattttaaggaatcatatatataaagaataaaatttaaataatcctcagtatagcattattttatttttatttgtaaaaagttcattgttcagttgtggtatacgatgaatcgttaatacttttctaaatttatacgatttaaaaatacatcttcaatttctacaagattagaaaaagacgcctaagaatgtgttgtgttcttccacttagaacacacaaagaaaaagaaataaataaataattttattgattcggtaggagggcaaattggaaatataaataaatgaatgatganagggaagaacaaaaagtgggaggaggtgtccacttttatggacgagggaaggggcggatggacatagaaataacaantaaagtncataagtcagatcgcc

SEQ ID NO: 1506 - DNA, 1076 bp, Heterodera glycines
  unsure (1)..(1076): unsure at all n locations
tataggtttaattattgtaaatgnnaatatcatgtaaaactaattaaaaatctttaaacgttataattaagtgagagacgaagaaggtcatctttttgaaagatcagaaatataataaaagaaaaataacttttcatcaatattgatttaaaatttttaaatacgaaaatttaatttaaaccttaattttataatttgagatttcttaaattctccctggagagtacaaatgcggtgcctccagttcgtcaatgaaatatctaattaatttattaaaaatttttcttgttatctaaattaataattaaaaattataacaaaaacaaatatatcaatacttttgtaataaacatgcattttttgtagtttagtagatggataaaaattcaataaaactatgtattcaaaattaactgaacctttcgtcactaaacttttcgtcactgaacctttcgtcactgaaataaaataaagaattatttattagtgaaaactatttttttttaaataaagttatgtatttgaaaaattctaaaaattgttagttttgtgtcaatttaacatagtattttaaacacataaatattattaaaatatcagtctttctaacaatttgtttacattcaaagcaattactttgccatggaaatcggttcggtgatgagaataacctttaaccctctcggccctccaattgtggtgtgggtcatttctgataaaaatatttggcaaacaaataaaaaggaatgaagagaaggcaaccagcggtcattcttatgattactcccttcattttcctaataaaatgcaagaaaataactcatcatccgacgaagagggtcaattgctttcatcttcatctgggaatgaagaagcggctaaccaagaattaattcaattcatcgaatttaagtcaaagcgtggtgcctcacttcttgcacgtaatgggtttgagtaccaatttgaacgcaattcggccttagttgataatgttgaatattggaagtgtgttaaagtgagtaacaaaataaaatcaaagggatttttctttggtcagaggccaccctactgcgcgg

SEQ ID NO: 1507 - DNA, 1222 bp, Heterodera glycines
catccaaggcatcaccaagccggccatccgccgtttggcccgtcgtggaggcgtcaagcgcatctccggcctgatctacgaggagactcgctcagtgctgaaggtgttcttggagaatgagatccgtgacgtggtaatttgcatttctcattaatgctatttggggaccaaatttagggtgcgtttttcgaattttaaaactaaaaacggaaaatttgcgtgaagtgctgaccagttaaaatcatttatgtgcctcaggtgacctattgcgagcacgcaaagaggaagactgtcaccgccatggacgttgtctacgcgctgaaacgccaaggacgcacgctgtacggatttggcggttgagcgggacggaaagaacggaggagagaagagaagcatcaaaaactatcccaaaaggccctctttagtgccacaaccattcaaatggacgaattgacatgctttttcaatttttccatcaacagtaaatttgactttttctgtttttgttttgttaatttgggttgggccgggacctcggatgaccgggaattcccggcccggtcccggtcccgtggcactctaatttaaagttgtcatcggattgggcctgcttcaactgatatttttgtgctcgtctgttttatgaacacggtcagtttaactcattaatgctaattggttttcaatttggtgccaatttcagctgcacggttctcgcaaatcgatgtgcgaaaaactgatggccaaaggcgagcgaatttcgatcagaatttatccgtttgcttgttggttgatctgcttcgaggattttctgccgacagagtgcgttttatatggacattggaatggattactgatcagagaatagaccaaatattttgaaagtgatcggaactgttcagagaatgtttgtaattgatcggaaaagtgctcccaacattctctgatctaagaagccctcggaaatgaaaaaataattttttttttttttgcaaattcaggcaaaatttccaccgctttgaaatgctcgtgttccaatcgccgattgtacgaattatgctcgaaattttgaacatcaccgtgttcatggtgaacaaccatttcacgatcattttatctgtttaaatgtttcctaatttggcattctgtcactcaggaactgagcagtcgtaaacacatgtacttccaaatatccaattttgctgggatgatttcccatgtt

SEQ ID NO: 1508 - DNA, 4453 bp, Heterodera glycines
atcagagaaagaccaaatattttgaaagtgatcggaacgtttagagaatgtttgaaattgatcggaaaagtgctcccaacattctctgatctaagaagccctcggaaatgaaaaaataattaatttttttttgcaaattcaggcaaaatttccaccgctttgaagtgctcgtgttccaatcgccgattgtacgaattatgctcgaaattttgaacatcaccgtgtttatggtgaacatcaactatttcacaattacattttttaaatgtttcctaatttggcattctgtcactcaggagctgagcagtcgcaaacacatgtacttccaaatatccaattttgctgggatgatttccatgttcattggctcctacagctcttatgtaattgtgccgcttggtgcttcgatgttgcacgaatatcggcacgtcacatttttcaacaattttatttcaaaaaacgaaatttttcagttttttgctgctcttccgtatcgtcgacttctgccaactcttttggtccgtgcaaaagttcgtcgccgacatcttcggcattctcgacatggtgccgagcatatcgcacaattccgccccattgccaccttcggcggtggcacaatgtgagcagaacaccagcgaaaaagtggcacaattatcttttggcactttgtgaaaaagtggcacaattatcttctggcacttttactagaattttcgagagaattttttaattaaaaaataattcaaataattcccattcattgtcctttcagtttacatttgctttgtgctctgtgtcgagatgcttttcgtctctttgttggcaaccttttgcttccaaccctcgcgctgtgccttttttgacaattattggaaacggaatgccaaggacaatgccaacggggaatgtgccgaggacggatatgaacccttgaatgacgacggcattgatcaaaagcagcagcagcaaacattgacgagcaccatttgagaagtgaagaatagagtgataagcaaaatgtgatcgggaaaaagtgatcgaaatttcgttttgtttattttttcgccaaattcactcataattacataacaaggccatcattaggtaaactaaagttggtcactgattgagtaatactgcagaattgcggtcaacaggcaaattttttgaaaaattagaacattttcttaccatacatcattaaaatttaaattattttttcttttttgaaaatgtgactccaaaatcggtctacgaaagttgggcccccacgtttgggccccagcaaatttttccactataactttctataacttttttcttggtcatccaaagccaaaaacttggtatcattcgaaagcttaacatgtttagaagctttttctaagctatttcttcgcgattagacaattaccaaaaaagtcatacatgaaaattacaaaaaaagtcaaaatttttgaaattttttcttaataaattttttccaggcttgaaaatcatttcggtttttgtaaggctaatagagcatgtgaagggctttcgaatgataccaagattattagatttggatgccaaagaaaaaagctatagtggaaaaacatgctggggccgaaccgtggggccgaactggcgggttccgacatttagggaaagggaaaattttataaaaatagaaacatttcgccaatgctacacaaattttttgtataaaaatgcttattttttcttcccctctcctcattccattctctcattattcttcctatatcccccggtcactttgttgctgcaaatgtcttcagaaattctgtacgtttattatatttcttttaatgacatttcgcatttaattttgtcaaattttggccaaaaattgtgagatgaaaaatttcaaaaccaattttgaaagattagctttttggaggctaaaacttcacattttacttcctattcattgcttttcctttccctttgattcattaatttcgccaattcatttttcagttggtctactgtttttcttctattggtcgattgtgccaccattcttttttggttcttttttggccatgtcaaaaaacgacaacgcccacataaaaacgaaatgtaaaataaattaaacgagatatcgaaaaattcgtcaattttcagctttatctgcggcgactgttggcttttggtgttcgattttcttgcgccttctcaactcggcctcgaaattgcactgatcaaccgccgctttaactgcatcgtcgacgaacacttcaagacacgcaaatggaaattgggctgcatgcgaatttgccacaaaattggagaaaatggcactaagcaattgcaaattgtcaattccaatgcaaagccattgccaattccgcaaaatccgttgcccaacaaagtcatcggattcagacacattcagatccagtatgattgattaaatttgatttgctttgtgaccattatacatatttttcggcttttcagttacatcgatcaaaatgtcatcgcatttctccgccgttttcaccgtcgtattttcgatgtttgttcaatggttttgtacattcacacagacaatgaccgcattttggactactttttgctcaacatttggccaatgtttcgtcattcaatgcgtctgatgaatttgaattccatctctttacgccgtctgcgccaattggccggcccgtcactgctcagcgattgtccatcacttcgctttgtctcttttaatgaagccattctgcccgcttttccgcctgatgaaagtgtcaatgcttcggatggccaagcgctggccaaatggctgttcacgccccgtccggatggtcagttcaagtggttcagaggctttgtcaattcaccggatcaatggtctccaacgatggaacagctgaaaacggtggagcattccccatatttaattggttttttttgtcacatttttaggcattttccaatgcttcttctccaattacttaccgcatttccttggcgttttcgtccacttcaattgattccgttgtgccatttgatgatctgatcaacgaagtgactggggagaaattgacactggaacaaaatgacacaaatgattgttggctcagccgttgtccaattgcatgggattaccgaaagtggaaaaatctgtcagatggaatttttgatcaaatgaacccaattgacattctgatcagtgatggcggattcgacgacgggtgaacaattttaaaaattctaattaaagggtaatagtgcagaattgtggtctcgattttttctaaagtacttgatttttcagaaattttttttaatataaatttccttttcaagaatttggggtaaaaaatgcatgataatgaatctgaattatggtttcgagaatcaatatttttgtctatgattttcaacaagtatcataaaaaaataaagttaaaagcataataaaatttgtaacattattttcgccaaaaacaaattggaagttttgtgttatttgagtgtaatcgaatcatcgtttttcagtcttcttctcgacgccgcttctcccgggccaagtgatcagtagaagaaaggacttaaccaattgattggtgacgaaattgtctgaccgaaatgattttggcattttgccatttaattttgcctaattgtttgtctgtttgtatttgacctttgcttgctcgcaaatgcgtccatttccaatgtattttatgtgtatgtaattcaataattgtgagtaattattcgttgataaaatggttaacaataaaaacggtaaaagctgtgcaaattcgcgatccaacacaataaatgccttggcacaacaaatccctgctgaccttttaaaaccagtggctaccatttgtgttctttattgctaaggtttttgcttatttatttaaatttcgcgcaaaaaatggtaattagcctgaaaatgtattaaattaaaaatctatcaacaagtaatcgtataaattttcaaaaatctccggttgcccaaaattcgattattggtagggagtccaatcatatggaaatccatatttttttcctggattgtgtgaggcctgaaacgcacaaaaaacatgtttttagcttggtttgaagcttctaggatgactttccatatccattttttccatattgcgcgtcgatgtgcgaaaaactgctgatggcaaagggcgagcgaatttcgatcagaatttatccgtttgcttgttggttgatctgcttcgaggattttctgccgacagagtgcgttttatcaatgaacattgagagggcctactgatcagagcatagacaaaactttttgcttagacaagtgatcggagctgatcactgatcagagaatgtttgaaaaattactattacgtttgaaataattgcatttattcaactgaaaaattatgaatcaaacaataaacacttcatccctttgctc

SEQ ID NO: 1509 - DNA, 1273 bp, Heterodera glycines
atcagaaatttccggattcattactctaaaaaagttcaaaattaaggtctacaactaaaatatgtgtgtgacgaataaaatattgcatctttattttaaattggcataatgtcaatatttttccataaaaattctcattcataagctcattttcttattatgaaaagccaaatcattaggggtgtaaaaaagtctcggtctcggtctcgaaaatcgagaccgagacttgaaaacccgagaccgagaccaaaaaaacccgagacttttctcgagtcgagaccgagagtctcgaacagcactaattggctcctacagctcttatgtaattgtgccccttggtgcttcgatgttgcacgaatatcggcacgtctcacatttttcaaattaaattaaaggaaaaaaattctttttttttcattttcagttttttgctgctcttccgtatcgtcgacttctgccaactcttttggtccgtgcaaaagttcgtcgccgacatcttcggcattctcgacatggtgccgagcatatcgcatgatcccgccaaattgccctcttcggcggtggcacaatgtgagtagaacaccagcgaaaaagtggcacaattatcttttggcactttgggaaaaagtggcacaattatcttttggcacttttacagaattttcgagagaatttttttaattaaaaaaataattcaaataattcccattcatttgtggtcctttcagtttacatttgctttgtgctctgtgtcgagatgcttttcgtctctttgttggccaccttttgcttccaaccctcgcgctgtgccttttttgacaagcagcggaaacggaatgccaaggacaatgccaacggggaatgtgccgaggacggatatgaacccttgaatgacgaccatacatgatcaaggggtggtaccggccgagggccatacgatgtatgattgtaccagggggggtggtacgaggccaaatttttttacgatggggtccaaaaattcaaaataaatttgacgacctttttttttttttgctttttaaaatcttttttgcggcgcggttttctcaaaaatttcgcgaacgcgggagccggcggtgccgataggcgccgccgggaaatttttaaaatttacgtggattttgtaacgaattttcatccaaaattgggagaattttcggaattttaacccagggaccaactttttttcttctttaaaaaacctttttttgcgatgggttttttttaaaaaactttttttcggggggggggg

SEQ ID NO: 1510 - DNA, 2971 bp, Heterodera glycines
  unsure (1)..(2971): unsure at all n locations
cccccccccccccccccttacgacgaacgatggggggggggggggtggtaatagaccaccccttgatcatgtatgatgacgacggcattgatcaaaagcagcagcagcaaacattgacgagcaccatttgagaagtgaagaatagagtgataagcaaaatgtgatcgggaaaaagtgatcgaaatttcgttttgtttatttttttcgccaaatttactatcaaaatttaaaaagctgtgttgctttgtcttagttgtataactgttgatttgaataataggtattcatttcgttttagtcttccgccaaaatttgctcacatccgaattaacaatgcctattatcacattagatgttgtggccattttttctttaattggtacaactcatgctattgccaataagtttcagtttgtgccgttttcattggctctcgcaaaatgacgtcagtaggaaatatacggaaaaaaaatgatccaagtagagatcaggcacgggcttttgttgttggactgacaggggtttcacagccacactggatttacaggtttttagaccataacccatgctcatatatgtggaaaattccgtaattcatactacaataagattcctggatactgtaaaatttaaaatttattatttggcattatttgaaaaaattaatggaattttaaaggccggaaattgcccacccaattctttaacaaacaaattgttgaaggaatgacagcgacagaaaagagcagcttttgcatatgcacacattgttcactcacatcaatgactccaaaattgatcggaactggggaaatgaaaaattaacccataaaaaatcggggaacagcctgacacagaaaacactggaacaaaaattgtgttcattcacttcaaatatttcgcaagatttccgaccaaagttggatttggcatttacaaatcctttaatccctctgaaatacaaaatatgaaaaattggaaaccttacacatttccaaagacttcgtttatcattttttcctaattacatttttgtgtgacatttttaatccatttaaggcatttttactggatgtgactatgcaaaatgtgattttcttccagggatcgggtgggagaatgcgttgtggagcacgattttcgtcaattcttttatcattgagtctcctgctcgtctgcttcgatttgggtataaatagatcaatcaggtttattgttagccatttaactcgaacagacaattcatgattcgaattagtcaaaatgggatttttaagccataaaagatgattttaggggtttgcctgagcaaatatgtggaccactacgagacgctcagctatcaaccggtggttgaccgtcaaaaacggtcattggagacggaccacgaggacacccatgggactgacgtcgatttgcacttccgatcgcacaataggtttcatttgtcaatttaaattggtggcaattacgtgccaaaaattctactcttcgcccgcatttgtgttgttgttaatgtgtttgaagctaacgctaagctggccttagtgtccccgtaactttattccaaaaaccgtttaaatgtcaaaatttttttgtgttagaatttatttgaatttcggcattggagaagcttaaacaagctagtccctttttgaacgcaaaaattgattaagtacggcactattgcggtttagcgggcccaatgaaagaccataagggggaccctgaattaagacagtaatgaaaataaatcaaaggggaccctgatatggtctttcataaggcccactaaattgcaaaaatgctgatttgtgcaaaccgatatttataaatttgcacagaaaatccctttgaatataaaaatccaaaataagagcaaaaacacaacattttagtattagacgcttataccaagttatgtttaacaaaaatgtaatatttgtgtaaaacaaagtgataattcatttatatacatcaatatttctaggactttccatctcaaacttcgaccgttggactttacaaattcgctgtttaccgacgaccacattatcgacgtggacggcgttcatcacacgcatttgatcagaccaaatcgctttttgtacgagggacaaattgtcggtatgccattgcatttaattacaaaacacccatctaaattagtaagttacggtttcttttttctggtccactcggttttaaagggttattaccagtaaaatggttacacagataactcgagaaatccaaatccactggtttaaaatccacagttttcgtggtacaagaagaccatttcttatgagtagtttcgaaaagtacgtcgaaaattgctgtgttgtcaaagaaagggttcactttcccactgtttttcatttattttccaaaaaaaacaactttggtctttaggtgactcaacttcgtttgtccatggcactttgttggacggcatttttgacggatttattttcacgggcgacggccgcacattcaccgtggagaaggcggctcgctatttcgacattggccaacgtccggcccatttccattcattcatttacgcggacgaagagatcaatcacaagcgattccgacggacgaaaagggaagcggacgaggacggacgagacaatgatcagcagcaccacgaacgtattcaattttttggcgagaattttggaaatttgaatttaaaattgggaatttatgtcacatgacggtttttcattccatcatgcatcacaaattgaaagtaatcctggtaacggttntgattttaagaccatgtactcatttagtaattcagcaaaattgctagtaatatgacgaagtatgcatttgtttagtagtagatcataactagggctggcaaaatatgcacatgcatatttttttctggactatgggaggccttaacgcacaaaaacatgttttttagcttggttttaagcttctaggatgactt

SEQ ID NO: 1511 - DNA, 3260 bp, Heterodera glycines
  unsure (1)..(3260): unsure at all n locations
aagaatcttaggtaggaataaaatgccaaaaaaccagtaaatctttgatttttctcaattgtcgtaactttgctttttacagcaacccacggccgcgggccgaccaaacagcgggcagagcaaatcgttggatttccaacagtcagccgaccaccggcaccacaacagtagacagtcacctttctcctcctatatgaagcaccaccaaacgcagcagcaccattcgttgcggcacggggacaacgacgtcgaggacgccattgagttgctgtccttcccgcaaaggtttgtggctgggtgtatttcagtaaaaacctaggtaactcaatggtctcatcattcggccaaatttttgtaaaactccgtgaatcatggcgtttttggtttgtgaccaggggtgatacacttttaaaaagacctccgtgatcactgattgtaaaattgtccgtgattgaaatttaatccaaattacgtccagccctttacccataaataaataaactcgtgtcatgggatattgatgcttttggcggggattcttttctatacctcgtactaaaccgcactttgttgctcttccagttacttgggcaagaatcggacaaggcgtgagcagtcgctgaagccggaatggcgggagattcgcggcaagcgcatctacgaggtgcgcacctgcaccatctatttgcaggcggaccacaagctgtacatgcacatctacaacaaggagggcaaccgggaccacgccaggcaataatcaacgaatttttgattacgaaataggttgtatatgagaacaactgttgagcgaaaagttggtattagcctattattacgcatttttggcacaaatttaaaaaatctcttaaaatatatatatataaaaaaagagttcaaaaccttgtaaaacattaattttaggacacgtgaggagattgtttcgctgctgtacaatcacatcaaggcggtgaacagcatctacgaaaacaccgactttcacggaatcaacggcatcaattttgccattcaacggacaacggtttgtttttgaggtgtgggttgtaggctttttggaatttacaaaaattttataaaaatttcccaccctcagatttacacgccggacacatgcgcaggtgcgtcgtcggcgaattccgctgcgactgtcggcaacaacccgttctgtgaggagaacgtggacgtgtctcactacctgaactccaactcgcagaaggaccacagcgcattctgtttggcctattcgctcacctaccgcgactttcttggcggcacattgggcctggcatgggtggccagtcccagtcaaagtcggtgatacagtgttaaattattcatttggtctattattgcttttatatattttttatactgttttaggcactgccggcggcatttgccaacgtttccagcgctacaatgagcagcaacgcggtggggtcaaccggtcactgaacacgggcatcatcacgttggtcaactacgggaacagagtgccaccgcgcgtgtcacaactaacgttggcacacgaaattgggcacaattttggctcaccagtgagtaactttttttcgcaaattctaggaaggcttcaagactttgtctcaaaactaaatttatttccattttagcacgattttcccgccgattgccagcctgnngtgcccgacggcaacttcatcatgttcgcctcccgcacctccggggacaagccgaacaactccaagagtctccaaatgctctgtggctaacatcagcgaagtgttgtacgaagtgctcggacaggttttttgaaaaattattattttttacaattaaattttagagtcccaaaaaccagcagtttggacggaagaaaaactgcttcactgaccgtgagtttctcatgcattttaacatcttttgggtttacgagagatctgggtttcgggttcttttttcgggattttctggttacatccctacaaatcttggtacgctttctggcttcgggattttctttttttcaataaaaatcagagaaatggaatgcccaattcatttttatatatttaatcaatcgttaaatacaaacctccttttaactgtttccttggtttcacagagctcaagtcgttctgtggcaaccaaattcgggaggacggcgaggagtgcgactgcggcttcaccaagcaggactgtcacgagaaccaggaccagtgctgtgcaccacgggagaacaatgacgagcgcacaatgtgccgacggttggccggcaaaaagtgttcgccgtccgagggcatttgttgccgagcggcggactgctcatttgtgcagcgcaacgggcgcgtgtgccgggaggagtcggagtgccaacacgagcagaagtgtgacggaacgcaggccaaatgcccggacagcaggaacaagccggacggaaaggcgtgccaggagagcaccaaggcaagtcgggcgagggtgggcgttcattctgtaatgttatcagttcatggcttggcccaggcctgtcgctgtgttttttgtttataaaatagtcaatggatgtgtgccctccccccctcaaaaactaaaaaagtcatattttttgggtaccgatttttgttaattttcgttcggaatagaaatgttttatttttgaaatattttttaacaaatcgcaaaaaaacatgctagagatgccctttacaatacaaacttaattttgttttattttgtccacaggtttgtcagaacggcagttgcagtggctcaatttgtgcgcaccatggcatgcgcgactgtttcctgaccgagggcaagccggaggacttgtgccagttggcctgccaaacggaagcgggtatggacaggcatgggtgcttggcatagtatcttattataacgtcacatcgggtaacgggtgcatcccaaaatttctccgtccaaattttgccgggacaaaataccattgccaccttttgaggatgccaagcagcggccgacatcccgcggttgaccgtatacacgcaggaggggcgcaagtcgggccatttgctgttgccgcccggctcaccgtgcaacgactaccagggctactgtgacatcttccgcaagtgccgttccgtggactccaacggcccattgtcacgactgcgcacgctgctgttcaactcggaaaagatccaagagttcaaggaatgggttaaggtgtgtattttaaatttttctatttttaatcgtaatttttaaatgattcccttcca

SEQ ID NO: 1512 - DNA, 7717 bp, Heterodera glycines
ttgaatttttttttaaatcaacagcgggcgcgtagaatttcgatagctacgcgccaaaattttttgtaggcataaatgctatgccacaatttcagctaagatttcttcttcgaatgggtctgcaattctactcgcccgctgttgattttaaaacaaaattcaaactttgacgcaaagcattttaaaaataaaaaatgatttcatcgattttaaaaattaaagaaaaaatttaaatttatttattgaaacagaaaaagatattatgagttaatgaaagaataaaatgaattttattgaaatagctaatcaagatgcctattggttttttaataaataaaaattctttcaaagaaagtttaaaaaaatagattgattgatttttatccaacaacggacagataaaagggcaataaaatttaatcaaaagcaattgcaaattaattttaaaaaatcaaatgatgtaattactgtaattactataaaaatacacgaattaatttatctactaaaatctaaatccatttattgctttattaaagggattcttaaaaattagcaataagaaaaataatcacaaattaaatgaaaattattatttatttagtcaatatttacactaaaagaaaattttatcataaattgatcatggtttgaacagaccgagtaaattgccatgcaagataaaagcgaatgtaaaactgaaaaaaagaaatctaatcttaatccataatgaattaaacggaatgtcaaaaggcgttcatggtgcacgataggaaaatatttatagaattaataaagaaaaactacagtttttgtttatctacgtcaattaaaatattaaaactaataataaaaagatagcatttgggaaaaaagaattataattaatttttatgtgattttgaaacataatttactaaatttacatttctatgagaataaagaggtgaacgtaatattaaaaattaaacattcactactgacaaggcaccgataattgaaaaaaataatttattaacaaaacaaaaaatgagagagaaaaaagaacataacattattcagtacaagaatcgcaaaagtattaacaataattgaatatttaaaaatatttttcttaattgttaaatccaaacgatatacagaatgtaaaaataaaattatcgtaaaaaatattaaaaaatgtttattcaataatttataactttaataaagaacaaaaaaaatagaattgttattatgctaataaaaaaatcaatttattaattaatcaatttgaatttgtaaaaatttaaacacagcgatatattttgaaaccaatataatcggagaagggtacacttgataaataaaattgaatataattataagtatacaaaataatttttaagaggcaaataaaagggaccttttaaaataattgaaaatattagttaaaaattattaaaaattgttacattaaaatatattatgaatgcttattaaatggatatcgggttgttactattattttagtaatttttaatttaaaaatttggcaattagagatggtggcttccgctggtttaccaaaaagatataactaaatttaaaaaaatcaataaataataatatatatagtttcagaattcagtcaaatttggaaacagtaaaatttcttggacgcgaatctgtaaattaaaatgtctcaaacaaataaaactaatttattcataacaaaatccgtaaataaaaccagaaaatttctaaatttagaaaaaactaaagcataagagattgtcttgaaatatgatgaaaagaactagggttgctccccgtccccgactccccgacactaattcggggaattggggactccgagagccgggaaaaattgatatttgaatacattacattgtcagattttgtccaaaaatgaccaatttttgcagttgtttgagccagtttttttagaaaattaagattttaagggtccggcggagccgataggcgccgccgggaaaatttttgaaattttggctatatatttaacagattttgaataaaaaattattaattttgccaaaaaaactcaattcataccagtgcatgtttactcccgtttttttagtatcaagaaatgaacattttgcaacatttttcaaacatttgggaccaaaagatcaaaaaaaaatttgcgtcagactttaaaatttcttgataaaatagtgatattatgcaataaaattttaaaattataaatatatttaagaaatcagaacaattttagtcgctaccccaaaattagaaattcttataaataagaacaatgtaagccctggtttaaaggccagcttctaacgaaatcagattattaaactgacaaaaaggaagatttacgagaatttaaaaagaagtcgcccccccccccccccccccgaggtccccggcccccgaaagttcgcaacaagaggaccccgagacgcaaccgctaaaaagaactgaaaacaaatggtcgcgttccgctcaaaacgacgttttcaaagccgtgggaatgtcacgactgaacgtcagccgcgaatgtccgtcgagcggacaaatggggaggacggggaggaatgaaagaagtagcgaacgaggagtgattgatggatgaaatgatgagaaaattagggcaaacgggaaatgatgaaagaaagaaaggggtgaagggagggctcggctgacgtagggcacgtgaattatgggaaagaaagcgataaaaagcggatgtggcgccttccccgcgtgaaggacgccggaggcagcgcaaaaacgccgatcggaccatcgacggagcgacggacgaaacaacacatccccaaagcggacagccgacgaaaatcggcgatcatttgatggaaagaggcgaatttgcgggagagcgaaattcgcccggaccctccgccccccttttctcctgtgattagccccctccccgcaattcacccccctccattgtgccattttcccaatgcatttttgtcccctttttcacacatttccccccccccctttttgtatttctcgcacatttattgtaagtgtagggtttaattacccaagtttgagataaacttgcggagtatttttggtgcgatttcttgggataataatctattttcaagtcttatttaccatcccaatggccgttttcgttataaaatacacaccaaatatttcctagaaccatctcctttaaaaattggtttcagaccacaatccttaatagaactttcgataaattatgattaaaacataccttagaaaaagaaattgttaaaatttgccggaaactcttcatcatacaattcctggatttttttgatttcttcgatatcataatttgtttggtttggttttattttgaccttcaaatttaattcattaactttttccctttgcagtttttcattttggtaaaatcttcgaaattgcatatgtgaaattttaaacggttcctccgcatttatttgcaggtagaatttgctcaaaattatgctataaaaaggcaatacgtatcggcattattttttacactaagccttccatttctttgggtggaaaataatccgtaattcaaaatttatttgctaaattaaattaaataaaatattttatttttaattttttacctcaacctacgggcaccgaataagtagtgattatcatcgatatttcctggtttaataaattgatttctgcatagctttgttgcagtttaaaaaacgactcaaaaatcacatcaaaattgttttgtttaagtgatcttggtgggataatgacgggatctgttatgctttcacattaaatctcaaatgaaattagtttaatgtgccaattttttttttaattgcttgctcgatcaaatattctaatatttttctaaaacttttttcaccgttttttctgattctttgaatatgaatctcgttatgttttctttaatcccgaatttttattttgtttggttgtttttgatatttctatgtaattttctttttcggatattttattttgtttttaaaataattttttatgtttctttttttttctcttttcggaatcaatgtcaagaaatttttttgcctccattacttcttcctaaaattttaaacttatgtatattagtattttaaataaaattgcttttaaaactttgaaaattcaaaattatttaaagtttttttattcaacaaaaataattatgcaagataacatcgcaatattgccgtccaaactcaagcaaaataagaattttttatggcgtgaaaagactatagcgagccaaaaatgcaaaattttgacctccaaataatgcagccatttaatgattaattacttttgaaagctgtcacatttcctcacaaactttttgatttttttttttgcaatatttcagctcaaatattttaaactcaaattaacatataaatgccatcgacttcatggaaaaaaatcctatggacaaaggaaattgtctcttatttataactcaaaaattttttaattgattttcactattaaaaaatttaatttgtcttttgtatgttatttttgataagcaagttattttcttcagccaaatatatgtaatttattttgaatactcctttcaattgttaaaaataatgttttattaattgtttatagttatacgttagtagtatatgacccattaatccggtgtaaaatcccccccccccttcccttaccaaaatctcccccccgccttttcttttcctcccatcgcccttcatttccaagccagccgattcacaactcccttcctttgcgcaaatgtcctttacgcttcgactgcccttcctattccacccaaaagttgcgtaagaatcgattcgttcataaggaaaactccccaattcagcaacaatttgatttaaaaataaacccttaaaattggcattgattaattatatttttttgtagtttgaaatcaattttcaattacaaataatattaaattttttcattaaatattagacttttcactaatttttttcgtttatttttaatttaataatttctttgtttagcggcggttttttctattctttccaatttcgcttccggcactcttttctcgtaaattaaaaaaaatttttaaaatataaattaagaaaaatttcagaaattttccaaaaataaattttgtttttttagcatcatttgctgcttactttcgctcaagtgcgccgatcaattcccggatttccgtcgccggtaattcaaattttcaggggtatttttggcaatttttgataagatatctaattaataatgttccaaaaatttttaagcataatcttttggttttttgagcatatattttacaccccgtttcagttttggcctctcagttccaaaaagatttgcattgtttatagaatattcgatgcagaatatttttctgtgtcggtgtgcaaaatttagtgggaaaaaagttctatagagtgaagtaaattcggttttttgtcgaaaaacagagatagtacgccaaagtgagagctgttttttctctgcactctctttattggtagacatttcgttttttgaaacggttttggtaaatttttacaagaaaaacgtaaatattttataacgatcaatttttagtatttagccgttgttttcatttttcgttttttacataattcttgcaatttttaggaaaaactattattgccgctttcttgcatagtgtatatattttttggattttaccgggttttttcactttcagcacactaaaaataaatatgaagaattttgcaaccttttttgtttttgttcagtgatcttttgccttctttttagctcacccattgtcattttcccaatgaaaaaacaattagcctaccgaacagggccaagtgctgttaaatcgcataaaacaaaaaaggtagaattttttgtttttttttgttttttcaaagttcctatattaaagccgccttgtgagcataggcattggacccaaatcaaattagaaagtgaagatcatcttctgtatgatctgatgtacgatgggaaaacttgcgaattcacccacattgaacgcacttcctattcacacacttgcaaacgatgccgatcctatcataaattttgccttgttcgatactccgttctttctgatctgatcaccccctggcagccacgcctataaaagcacaaaaaaatgaaaggctgggtgttattggatatttgtgagctggtattaaagcctagaaagcagggatggtaccaggattttggaagggggtggggtgattagccttccgggatgaaggccttttttcataccatttttgaaggtgttctcgaaattgttgttttggtattttttaatttaccctattttattttaagttttaaaaaataaaatccaaaatccagaccgtattttttcaaaaattttcattaaattatgtcttggggctgaatatctttgttactgtgaccatccctgaacaaagtgaaaaaccagacaaatcatgttttcctcattgcacagtccaagtccgccatctatagctatgatcgagcttggtgcgaaagtctaggcaagaaaaaagaaaaagatcgacaagaagaagaagcagaagaacaaggggaagaagaagaagaagaagaagaagaacaccgaccagaagaagagcgacaagaacaagagcgacaagaacaagagcgaccagaagaagagcgacaagaacaagagcggccagaagaagagcgaccagaacaagagcgacaagaacaagagcggccagaaaaagagcgaccagaacaagagcgacaagaacaagagcggccagaagaagagcgacaagaacaagagcggccagaagaagagcgaccagaagaagagcgacaagaacaagagcggccagaagaagagcgaccagaacaagagcgaccagaagaacaagagcgaccagaagaagagcgaccagaaggagagcgaccagaagaagaagatcgaccagaaggagagctaccagaaggagagcgacccgaaggagagcgacaagaaaaacagagacaagaggatggggaagaagaagacggggacgatgatgatgatgatgatgatgatgataatgaggatggcgccgtccggtgcaaagtgattttgcgaagaggaggcgaaggagacgatgatgacagtgctggagggaattcgggagggaatggtgcaaaggatggcggagggggagatggagaaaaaaagggaaatgatgggaaaaagcaggaagaaagaggagggggaggagagaaagcaaacgagcaatacaaaaatggttcaaccgaaacagccggaaaagcgagcgaaccgtacgaggaagcgaaggtacaaaccattctgagcggcaaaaaataagtgcatgaaaaaataaagttttggcggtcgatgccgagttaggctgttaacagggccaagtgctgttaaatcgcataaaacaaaaaaggtagaattttttgttttttttgttttttcaaagttcctatattaaagccgccttgtgagcataggcattggacccaaatcaaattagaaagtgaagatcatcttctgtatgatctgatgtacgatgggaaaacttgcgaattcacccacattgaacgcacttcctattcacacacttgcaaacgatgccgatcctatcataaattttgc

SEQ ID NO: 1513 - DNA, 5549 bp, Heterodera glycines
atatcaatgaaagcggacgggtaaattaaagtaaataggtattctatgaggtgtagataaaattttcagaaaaaataaaccctcttaaggcaaagaagcagaataaaccaacgatagagtgcagaaactgaagagattttgctggaaaagaaacgagaataattttaaatgaaatgctctctagagagagagaaaggggaggagagagcaagagagagagagcaagagtgaaatagagacaaagaaatagtagagagagagagagagagagagaagatagagagtagagagatctggagagggggacaagaaagtagaaagagatagtaaagagggagaaagtgagagagaaagtgagagcaagaatgcaaaagagagagaaagagagggagagaaagagagagggaaatggagagagggagaaaggaagagagatagagagaaaggaaaagagagagaagaaattgagaaagagatagaaaggagggagagggagagaaaaaaaatagagagagagagaaagagagcgagagagattgagaagagagagagtgttgagccggttaattgctcaaacaattatttgtgaatgtcgaacaccaaaatatttatttaacacaaatggaaaaataatacaaaaatatttgtcggagggacggagcaaattggggagcaccaaataagaaggaaatataacagaatgaatgtgtgctggacgaagggaagggcaggaataaatggggaaaatcaatatggggtcaaagagcccaagagagggaattgcaaatatttgaattatttgcctctctaacacctccccttttaagtccaactgatcagtgccatgatcagtcacacataggacgatcggctggggtcgatttgaaggcggtcaacaggccggcgatttcgaatcggataacggcggactggcggtgattgattggatggcgggacttctgccaaattttggtcccttaatggaattgggaggccaaaagtgccattgatcacatcgagcgggtcttcgatgtcctcatccggaatttgacgtgcgcggatttggttggcatgaaatcggccgcgagaattgtttggcaattcgacggtgtaaattacaccctttttgtcgatgattttgccgtgtcgccattccgctgaattgtgccgacgtgtgaaaaccaattgtccaatttcaaatgatcggaattttgcgccgtgtttgcgattgaattggtcctccattttatcgtccttgacaattggaattgacagcggaggccggaggagttcgaggcctattcgaggctttcggccaagaaataattcggccgggcattttccatccagtgtgtctgatggcgttgtgcgatatgtgagaagaaaagtgtcgagcacattgccgtcgactccctccccttttattttcgcaaatgccctcttaaaggtgtcaaccatccgctcggcttgtccgtttgattgtggcatgtacggcgccgtaaaaatgtgatcaattccattcgatttgacgaaaccttcgaattggtgactttggaattgagtgccgttgtcggaaacaattgtttccgggatgccgtagtgcgcgatcaatgagcgcattttggagattgtggccgatgcatttgtagaattcatttcaaatatctccggatattttgaaaatgagtcgacgacaatcaaatacatttttccatgaaatggtccggcgtaatcgatgtgaatgcgtttccatgggccatcagattttggccatgactgcagtgtcgtcttgattggatttttggcgacagctgcgcatgaagtgcatttttggacgaacgcctcgatttcggcgtccatcagtggccagtagacatacattcttgccaacgatttcatccgtttgactcccggatgtccctgatgaagcattttgagaatttgcttctgcagagatttggggatgaccgtccggtcgccgaacatcaggcagtccttgacgattgaaatttcgtcgcggcgccgataaaattgaatgaatttggcttcgtccagcccttcaattggctgaaaatttttaggttctggccaaatatttttgacaaattgacgaatttgttggagtgcctgatcatttgccgtttcttgggccaaatttttgaaggtgatcggcaaatggttgacattgttgatcaaatttctgtccaatgccgattccacttcgaatgaggcaataatgacttcgtcgtcgtcggattttgacttttggacggaaattaggcgagataatgcatctgcctgtccaaatttgtctgttttgacgtattgtatttcgaagtcgtaagccgtcaaaatgagtggccaacggacgagacggttgtgggagtgctttgggacaccatctttattgccaaaaattttcttgagtggctggtgatccgtcagcaatgtgaatttcctgccgaagatcattttatgaaagcgtttgacggcttccaccaatgccagggcttctttttctatttgcccgtaattttgctcagccggtgtgagtgatcgtgagaaatgcgacactgcttttattgagccattggcaaatttgtgtgatatgacgccgccgatgccatgttgtgaagcgtcggctgcgacgatgatcggcagatttggatcaaaatgcgtcaatgccagctcagattgtagcattgaaataattttggtgaatgcattttgacatttgggtgaccaatcccatttggcgtccttcttcagcagttcgtccaggggctgtcggataaaccggaaatttcggacaaactcctggtagtaattgaccatgcccaaatatgaacgcaattcgctgacgtttgaaggaattcgcatttccgcaattgctgtgattttgcttgggtccggccgacgtccattttgatcaatgatcacgcccaaatatttgatttcatttttgaaaaatgaacatttgtccattcggactttgaacccccattctgaaattcgggtgaaaatttggttcaaatgttggcagtgttgatcaaatgtcgcactgacgatgatgacgtcgtccaaataagccaatgcgaatgggaaatcggagagcatattgtccatcaccgattgaaaaatcccgggggcggatttcactccaaatggtagtcgctcatattggtagtgtccccggtgtgtagcaattgtacacaatttctttgaagtgccgtccagttcgatttgcagatatgcatccgacaaatccaattttgtgaagaattttccaccattcagtgtggcgaaaatgtcggctggcaatggcagaggatgctggtttaattggagagagtcgttgagcccggtggagaaatcagcgcacagacgagcagttccgttcgctttcttgaccaccaaaattggggctggccagtcagtgtgttcgactggtgtgatgacgttcattttctccaaccgatccaattctgcattgattattggcagcgtggaatatggcactggacgggcgcgcttgaacgttggatttgcgccttccttgagcaccagattggctttcattttggagcagtagccaaggccatctgagaatatttgctcatatttttgcggcaatatttcgacgaattgttggattttgtccgcatcatttgacgaaatttgattgatttgggcgggattgatcattcgccgtatttcttccagaaatccaaacgcttccattgccggtgtgcccaaaagattcaatgatcccgatttggcaacataaaacggctgaattgtctgatcagttgcttggcggggctttggcctttgatttgcccgtgaatttttgatttgggcgaccatttccgttggcgatgatttgccatgctgaattgcgttgattttgggctttggctactcaaaaatttttgcttccgcctccgtttttagctgtgtatttaagtcctcgacgactttgtcgaataatttggacgtttttgtcgtctttgtgccctctgctgtgagacgcgcgaggatatgttggcgtaattttgctttgctcagaaaaatttagtgcttcagaatttgttcgcatattttgatttaaatgaaatactttaaaatgaatccataaatcacttttttgcaaacacaaaatctaaaatttcttctttcgttgctttattttttataggtaagcattggcgaagtctccacttaaaatcaaaatttttcctccaaaaataatatcattattatgtaattctcttaattttttgtcaattatttcaataacatatttaggtgccataggggcttcatcaaaaatgaacacatcagtatttcgaatttcaattgcttcattagaaccattttcaattgatgaagaagaattgctatttaaatctaatggtaatttaaaacggttatgcacagttcgtccattttttaatagtgttgctgcaattccactaaaagccatgttcgtaacttttttaccaaaaccacgggctaagtgaaataaagcaatttgaacaaaagattttcccgtcccaccttgtccatcaatgtaaaaacaatttcctttatttttttcaggatgttcaaaaacatttttaacgcaatcaaaaatttctttttgttcctcattcattaaggaatatttgtttaatgcaaaagtgagttcctttttagggttaattatttgttcttctgaaatatttcctattttttctgttatttttggcatatccgtaaagtcaagtaaacattttccatgatttaaaaggtttttatcaataagtgacaaagccatttgataagcagtattttcagaatgtaattttttaaggtcataacttaatgcgtctttatatttatcccataataagcctggtttttttggttcacagttaatgagaatatttgcaaaaagtgagcgaaggcctcttggaaatttaaattggctcgcttcgtttaaacatttatcccattctaagtcatctctagttaagcccaaagccaagcaggcatctgaatatgatgtatatttaactccatttacagtttttaaatcttcaaagcctgtcgcatgtttatgaattaataaataacgtaaataatataattctttgttttttggatttatcgtatagattctcccaatcactttgtgtggaccttttcttggccacttccattttctattttttttgtcaaaagtgcaatatgttggcatttcaatgtatttgaattttggagcagttggattttctttaaaaaaaaataaaataagcagttaatttactatctttttccatcgcttcttctatattatcgttgtttgcatcatggtcaaaataaattgtttgttcgttttctaaatgaacctcaagcctttctattgaatgagatttaccctgtaattcaagttttaacaaccgaaaacatgcttcaacagggcttaaataacgggcttccaagtattgaccaactgcatcatattttcaaaaatgtttttttcaccgtttggctctttctttaca

SEQ ID NO: 1514 - DNA, 6545 bp, Heterodera glycines
caaatatttgatttcatttttgaaaaatgaacatttgtccattcggactttgaacccccattctgaaattcgggtgaaaatttggttcaaatgttggcagtgttgatcgaatgtcgcgctgacgatgatgacgtcgtccaaataagccaatgcgaatgggaaatcggagagcatattgtccatcaccgattgaaaaattccgggggctgatttcactccaaatggcagccgctcatattggaagtgaccccgatgtgtagcgattgtacacaatttctttgattcgacgtccagttcgatttgcagatatgcatccgacaaatccaattttgtgaaaaattttccaccattcagtgtggcgaaaatgtcggctggcaatggcagaggatgttgatttaattggagagagtcgttgagcccggtcgagaaatcagcgcacagacgagcagttccgttcgctttcttgacgaccaaaattggggcagaccagtcagtgtgttcgactggtgtgatgaccttcaatttctccaatcgatccaattctgcattgattattggcagcgttgaatatggcactggacgggcgcgcttgaacgttggatttgcgccttctttgagcatcagattggctttcattttggaacagaagcccaggccacctgagaatatttgctcatatttttgcggcaatatttcgacaaattgttggattttggccgcgtcatttgacgaaatttgattgattttggcgggattgatcattcgccgtatttcttccagatatccaaacgcttccattgccggtgtgcccaaaagattcaatgatcccgatttggcaacataaaacggctgaattgtctgaattcgttgaattggaaggtggcggtcccgcgtccgatgaatttgcaccgctttccgtcgaaaaagcgtgcttcctctgaacatatttgaattggtggtcggcccattgcgttgtaatcatcttcattgatgatgatgatttccgcacctctgtccaggatgaaaccaattgttgtgccgttcacattgatcggtgctttaagcagatttgatgaatggacggaattgatgtaagcccgcggggagcatcaccgtatttgtgttgaaatttctgcccatattttggtgaaatgctcgaattttgtcgcattgccgatcgatgtggcctctgcgattgcatttgctgcatatattttccttctttgggcaatcctgtgcccaatgcaattctccgcaacgatagcagttgctcggcggtattttggcctttgatttgcccgtgaatttttgatttgggcgaccgtttccgcgattttggtgcttatttggcgatgatttgccatgctgaattgcgtttattttgggctttggctgttccaaaatttttgcttccgcctcaaatttggtgatttcctccggcaggcagtagcgcttgtattcgccgaaggcggacgggttgagcttagtcaccagcaatttgactttggcttcgtccgccatatttgccaccgcgcaatccaatgcaaattggaagcgctccaaccactcctcaaattcttcggcattttctgttgaaaatgggtgaatgtccggcaaagtgatgttttgtgccggctgagttgcggtggatgtcggtgcgctctgctgcttgatcgcttgcgtcaatttttccaaaatatcggcgagcgttttgtccattgttgatttggaggatggacttagacgaagaaactgcacatagcagaaccgcacacaagattagtgattggttttttgaagatttctgcgaaatccaaaaatcaacacgagatttttgaatttccactttcgaacaatttcaacacgagaaaatgttcgaattgttgaggttctgtagaacgggcgtcgccaatgttgagccggttaattgctcaaacaattatttgtgaatgtcgaacaccaaaatatttatttaacacaaatggaaaaataatacaaaaaatatttgtcggagggacggagcaaattggggagcaccaaataagaaggaaatataacagaatgaatgtgtgctggacgaagggaagggcaggaataaatggggaaaatcaatatggggtcaaagagcccaagagagggaattgcaaatatttgaattatttgcctctctaacagagagaggtgaaagataagatatagaggagaaagacaagagagagagtagagagagatagagagaggtgagagggacaagagaggagaaagataggaaagagggagaaagtgagagagaaaagaaagagaaagagagagagtgattaaattttagaaccgagagacaagagagagattgagcagagagagaggagagagacagagatagagaagatatatagaggagaaagacaagagggagagaaaggagagagggacaaaaaagtgagagcgagagagagaaaggggaggagagagcaagagtgaaatagagacagagaaatagtagagagagagagagaagatatagagtagagagataggagagagggacaagaaagtagaaagagatagtaaagagggagaaagtgagagagaaagtgagagcaagaatgagagagagagaaagagagggagagagaaagggagagggaaatggagagagggagaaaggaagagagatagagagaaaggaaaagagagagaagaaattgagaaagagatagaaaggagggagagggagagaaaaaaatagagagagagagaaagagagcgagagagattgagaagagagagagaggtgaaagataagatatagaggagaaagacaagagagagagtagagagagatagagagaggagagagggacaagagaggagaaagataggaaagagggagaaagtgagagagaaaagaaagagaaagagagagagtgattaaattttagaaccgagagacaagagagagattgagcagagagagaggagagagacagagatagagaagatatatagaggagaaagacaagagggagagagagaggagagactgacaagagagtgagagaaagagaggaaagtgaggaaagagagagagaagaaagagaggagagagaggagagggacaaaaaagtgagagagaaagagaaatggagaggggagagcaagagagagagagagcaagagtgaaagagagcaagagagagagagaaagtagataaattatagaaccgagagaggcaagcgggatagagaagagagagagacagaaagagagagaatatatagaggagaaagacgagagagggtagagagagatagagagaggagagagagacaagattggagaaagaaataggaaagagggcgaaagtgagagagaaaagaaagagaaagagtgaaagagagagaaagagagagagcgattaattttagaaccgagagacaagagagacagatagagaagagaagaggagagagacagagatggcttatgctttcttttgtaaaaaatttttcgagttactattgaccatgcttgagaaaataattctaacccaaactcaatcggggagaacaatttgagtgagaagcatccatatacctcatattctgggaccgagatccttcagcgataacatttggctaaggtttacagtctcctttacgataagagctccaatgattaataattacaaaaaatttagagccaatctctttggtatagattaaaatttcttctaggttgtgcagattggcccattcactcatttccactgcccaatggttaattaaatgcagtggcaagtcaaaatctcaggaacaatcgagcggtcattaactcattctcgatagttcaaaaattgcctgcccctgtcccactctgcctccactaaatcacccacctccctgtcccactctgtatccattaattaattatctcaattaatatttaatagccccccgcccttcccccagtggaaagccaagattcaattcgtgacgacggtcccgaggggttaactactaatttttattctattttaactgaataactaaaattgtatttatttattttttgttaaatttttaatatttctctcattttttctatcatttatcattcaatgaactttttttcatctcaaaatttaaatttaaaaacgaatcattttatatactatccattgtttcaatttagataccattaatcaattttaatgggattttatggaactgtaactgcaaaaaggtggaatttatactgttttttttaagttttaggtagattcagtattttcggtttttattacattattctaaggaatttcctgcaaaaataaaaaaattcgctttaatttagtttattttttgttgaaatattttttaattttaatgtatttattttttaatttaattttttggtttctttatttttgataggccatattttttaaaagaattcgattttgaatgaagaaaacataattatttcggttttaaaatgttttcattttataatttggaatttcgctacttttattatataattaaattcttggttagtctcctacacaaatccgcaataagagatttttaaaaaatatggctaattttgaaaattttttcaaataaatgatttgttaaatattgctattttttcttgttcatatattttgcaatgaaaaaaaaattaaattattgttaattaatagagaccggacttttaggcacgaaaacttctcaaataggcacctaaaataggcacgaaaaatgtgaaaaaaggcataaaaaatgaacagaaacgtcaaaaaagcacaaaaaattgcaaaaaggtagcaaaaatcaacatttttctagcaaaaaattttccaaaagaccttttttcaactttttttttctcctatgttatattaactatttcagaaccggagaaaagggaataaatttttggttttcaaatttcaaaaaccaaggtataactgtgagtccggcggtgccgatatgcgccgctgggaaaattttttggaaattgtaagaaaaatgatgagaaaaattgctaaaaattaaaaaattttccattttttttcaaaaaatactgaaaaaggcaaaaaaaaggcaccaaaaagttcaagctataagcttcaaaccaagttaaaaactcgttttacgtgcatattaggcctctaattataaccatttgtgcgctttaattccattcttattaatgtttgtaatttttaatttaatttctattgaaataaatgacaaaattgtcttttttgcggaaatattaattttttagttattgacttttgtaaaattaattaatttttttaattattaaattatgaattgttgtttactttcatgctcactcaatcgcaaatatcttcttcttgccccgatataatatgtaaataaattttgtttatgtacataaaatagcacatttataaacttaatttattatttttttaagctacaaaaataataaatataatgtcattttgtatatttctttttgctaatattatgtctattttataaattcttattttctttttgcattaatttacttttccactaaatgttggttttcattttcaaaagaatattttaattgaaatttgatttctaataatttacatattaataattccaatatcatatatataatgtacaaattatatttttgtgtttgtaaatattttttattgattgattcatttttaaaaaaaggtgttatattcactttcccaaaaatgttctaaaacatgaaaaattttttgatgaaaatcattgataaatttttcaagcaaatttttgttgtatttttattttctgaaaaatttccgatttccgacctttttagggtcggaattccgagttccgacttccgaaaaaattttgacccccggaatttagatttccgaaattttttgcggtttcggaatgccatccctgataggcacataagaaatgaagattattggaaaatatattttttatttaatagattatatttgtcaaaaattattaagcaccaactcaataatgtgcaaaaagttttaaggtcgttttattttttaattaagtgatcattaatgtattagtgcaatatgagttaaggaaatcaaatatttaaatcaaaattttatgaatctaaaggatattaattattttttatttaaaataaaagttgttatttttgagatattataattagcttataaattaatttatgcatttatacatttaatttatttcattctataattacattttaaattatctgacaattttccaattattttttcattagcctaattcatttggatttaattaatattttttatttatatttgacggggagtttgagtttatgcgagcatcggtaaacattggaatttcgggagcatatttatttagtcatcatttttaccaaaatataaaatagtttttcactaaaattttataagaaatgatgaatttttctttcattaaaatatgtttttttttattaatttgattttttatatgataatttt

SEQ ID NO: 1515 - DNA, 2310 bp, Heterodera glycines
ttagaagcatctaaaaatatctaattaataataataatgtgtttttaaatttatttaatctgtttttgaaaatataaaaaaacatcggtcacttgaaaaaataaattctaaaattttgtccaggaaaatccagggtttttcctggtttgcctggacatggacctggattccaggaaaatccaggcctggatccaggtccaggtcgatctctaatttctacctattaaaaaatgttcagccattacgctgggccgattcggcattcactgctctgccgaggtgtcgccctttctcgccgactttgtccgcccctggtgcatgtcgttgcgcaatgtgcgcgacaatgaggagaaggagtcggcattccgtggcatttgtctgatggtcaattgcaacccgcagggcgtcgccgccgcgttcattttcctctgcgacgcgatcgcctcgtggcagacgcccagcgaagagctgcgcttcatgttcggcagggtgagccccactttctcccacccccacccaattagtgttcttaattgggtaattatagcataggttacctcaaatttttcttagttttcaaccaatttttaataatttgtctcaatgtgtagcctaactacatggagacgggcattttattgtagtttttgtaaaaaatttgaattttttttatttgaaaatttaaacaaatttagtttttggaatgaaaagattggaatgcgaaaatcaaagaattctaatgcatttcctaacaatcttttctgcaaaattattgtctcccgtccaaaatgtaaacatttttcgacggaaagggagaaaaacgtatcaattcgcattttttacgaattttgatgaaaattcactaaattaaatgatagcaacaatacatcatattaaataattatttgccacatttttattttattttcagattatttacgccttcaagtcacaagtgggagaggagaattggaacaattttgtcgctcaaattccggaaccgttgaagcaaaggctgggcacacagtaccaattgtgatcgtcgacgagccccgctgcccacgactcacagacacagaaccattctcaaaattcattccaaatttcacggggacggacgaaattcggaatttaatcccccgccatatcggaaagtcaaagttcggaaaaacatggacctttctcaaaacggagtcaatcaaaaagcacactctaattttgataacggaaaatgcaaatttgcaattggaattttgaaatgcgaattttacggcaacaaaatatgagaaagttgacggaaaagtgccgaaactgcttttggcacattattcgagaaacgtatcccaaattcaaatttcgtgaattgttggaatgggtcctaattatttcgtccgtctcccctcacctccccagccacacacataccatcacattttgtgttactgttattttgttgttgttgttgctgatcagcttggatcattttgcatccgttgtcgttctgtccgtcgctcgccatttttactttgttttttgtcctttccgttttcatttgttttttgtttatttattattttttttacttttttgttttgtttttgtcccttgtcctttctcagactttttatgttaactcattcatttttgtactttgtttgttcctttgttttgttatgtgttgtatttttttgttgtcaattttggcgagcgacaaaattatttctgtaaaaaagaaatactgttgaatctcactaatttcgagaatggtctttccgacagtataattaagattttttgggtttgaacgactaaatggcaaagctggtgctttaccaaacgttttttaaataatcctattgttacaggagtagggtcccaattatccggggaaggccttcctgcaaaattgtcatttttcaaatccacaacaaattttattccatcattaattttacaaaattaataattaaaatttgatcaatgtttcctccgaaaaaacatttcacatcacaagtacccttgttctttgtcttcgtattcctttgatgctctcgctgaataagccaaagctggtgcgcacggcggagttaaagatccgcatcggaagtgatgaagggcgacacggctgatccagcttctgcgagcgacgtccaacgggatgatgttgcgctcgcccggctcattcaagcggagtccactcttgtcgcagcattgcgcgcctgcgcgtagaaccccaacgaggactctgtcccctgttggctcactaaataattaatttatggtatttacgggtaatgtaaccaatttttg

SEQ ID NO: 1516 - DNA, 2459 bp, Heterodera glycines
atgggtaaataccaatcggcttacggcatcgttgcagcatgacaaagacgtcaaaatgcccgtcatgtaaagccggcgcttcgtgttttcgcatctgtccccgctttttgtgaacgattgaccgcttccttagaaaaataaataaatttagtctccgattcaaaattccttttccatttttaattaatttaattcttaaagataatttttgttgaaaggtgccaatattaaaatttataaaaaatccagttttttaaacaaaatcgattgatttggacctttcttttctatttgacttttaaaatataggcaaagatagttcattattaattacttccttaccagcaatttggcagtcgacccattggctcgatgtgtaaaccggctcgaagcgtgggaaaccaattgttcccaattttccgggcaccaattcaaaggggagcactgcgacgactgccaagtcaaatgctgcgccatttagtaaacggaaggcggggtggagcacaaagcctagcacctttgaaaataactagattaagattaacgctttcaaaattttataattaagtttttcgcccctattatcggatttagacagagtaatggctaattaaatttaaaacaaaaaaccgaaaaatcatagatttgaatgtgaataaatgatttttcaaattaaatagctggcttagcagaaaggttaggggtacaatgaatcattcagcagtaaataagacaaatttttggggattttgccataattataattgggtaataaatgtgttattgtaaaactgcaccttcttggaaacgctctcctccacactttgcccgtcctcgattcctgcataagcgattgatccgtcaccgtctttcgctgcttcatcccagcaatgggcacacgtgaggacaagagaagggttgaacagcactccgctgcatctgctcattaggccattcttaatggatacataaattaatagttaatccatattctgggagttttttccaataaatccatgaaagtttaagtttttagaaaaaggcataaaatgtcaaaaaaaaacaaaaattgcaaattgtttgataaagttttaaacgggtttaatgttttcttctgttttttttaaatttatactgaatttttttttattgactcacttggtttttgatgagaaaatgaacaaagtacgtcgcgttgtcataagggccagtttccaaaccaaacatgacgcgactcgttggcattgcgcatcgacgagattcccgaactttccgctgttgctgaagcgatcggaaattcagccttggactaaaacaagtgattaaaattgtttacaaatatttcattcatcatacaagttgttgcatttgtcagcagcgatcaatccgatgacgatgaccaaaattgggaagagcagaagaattttgtccatcttgcaatttttaaatgtggcaaaatgtgccaaagtcagaatcttgcaaaagttttaaaaattttaaaaaatggaaattaaataatggaaaaatggcagtcatgggtagggagtccaaaaatatgcacataaaatcgcaaaatatgcgcataaaatatgcaccaaaaatggcaaaatatgcacataaaaagtgaaaaatatgcatataaattttccaaattaagggtgtaatgtctctaaatttcttcaaatttgttaaatattaagtaaaatcttcaaaaaatggctaaatgtggtattaaaaatcattttagaagaaaaaaacatgataaagcaaaaatttactcattttttgcgaaaaaccaacccaaaaagcgaaattttgctttttttgcttatttttgacataaattaaccatttttgagaaaatttatttattcaatatttttcgtgaaaattttgctaaaaaattatttttttggaaaattttccggtttttgaggtcaaaaaggccaatttgtctgttggggggccgttctattagaggttttttggaaaaatgcccaaatatgcacataaaatatgcaaatatgcacataaatcgcgaaatatgcacaaatatgcaaaacatgcatatggaaagtcatcctagaagcttcaaaacacgctaaaaacatgtttttcgtgcgtttcaggcctcccacagttcaggaaaaaaatatgcatgtgcatataattggactccctagtcatgggtccatttttgtacttttcgtaaaatggcctagcaccgtggacggcgggaggggggggctatgccgcacaaacaacgctcactcatcacccattgatcgatgggtcaaggtcatttcgcagcggagccaagccgtggtcatttcggcgcaccttattttatggcactatcgcacaaagggacggtcctctgaccagaagggggaagaggggggctcgagtggaaataagcaatgagagagcggcgagatggcccaaaagagagagagaga

SEQ ID NO: 1517 - DNA, 1195 bp, Heterodera glycines
cgctgagttgggacaccacaaaaatcctcaaattttctcaaaagaccacaaaaatccgcaaattctcatttttcataaaaccctcttttaccctctaaaatagggttaagccccgaccccgagcccccgacattttcgggcctattccccgacccgacccccgacatgtcgccccccgaggtccccggccatttgtctcaatgtgtagcctaactacatggagacgggcattttattgtagtttttgtaaaaaatttgaattttttttatttgaaaatttaaacaaatttagtttttggaatgaaaagattggaatgcgaaaatcaaagaattctaatgcatttcctaacaatcttttctgcaaaattattgtctcccgtccaaaatgtaaacatttttcgacggaaagggagaaaaacgtatcaattcgcattttttacgaattttgatgaaaattcactaaattaaatgatagcaacaatacatcatattaaataattatttgccacatttttattttattttcagattatttacgccttcaagtcacaagtgggagaggagaattggaacaattttgtcgctcaaattccggaaccgttgaagcaaaggctgggcacacagtaccaattgtgatcgtcgacgagccccgctgcccacgactcacagacacagaaccattctcaaaattcattccaaatttccaggggacggacggaattcaatcccccgccataccggaaattaaaatccggaaaacagggggtttcgacctttcttgaaaacggagtcagtcaaaaagcacacaccaattttggtaacggaatgttaagtggaatttggaaatgcaaaatcattaatgaaataccgcaatttgacggcaaaaaatatgaggaaagttgacgacaaagtgccgaaactgcttttggcacattattcgagaaacgtatcccaaattcaaatttcgtgaattgttggaatgggtcctaattatttcgtccgtctcccctcacctccccagccacacacataccatcacattttgtgttactgttattttgttgttgttgctgatcagcttggatcattttgcatccgttgtcgttctgtccgtcgctcgccatttttactttgtttttgtcctttcccgtttcatttgtttttttggttatttattatttttttttactttttt

SEQ ID NO: 1518 - DNA, 5553 bp, Heterodera glycines
  unsure (1)..(5553): unsure at all n locations
ttcctttgttttgttatgtgttgtatttttttgttgtcaattttggcgagcgacaaaattatttctgtaaaaaagaaatattgttgaatctctttaatttcaagagtagtgttttccaacagaaaattaataatgaatagatttttaattttttttggttttgaactactaaatggcaaagcttgtgtgacaaattttattccaccattaatttttcaaaattaataattaaaatttgatcattacttcctcgcccaatacattaaaatcggcttaaggttggaaattcaacaataaatagcgatggaatggccaaatggatgtaaatttgaataattgaacaaaatccaacaaattttgacagaagagtcggacaaagatgaagaaatgatttaataggcttaattgacaacagatcaatgctgcctcccccaaacatgaaaatcggtttattgtcttattacatcacaagtacgcatgttctgggtcgtcgtattgtattgacgccctcgctgcgaaagccattgccggtgcgcaaggaggtgttaaagaaccgcatcggaagtggtggagggcgacacggctgatccaacttctgcgagcgacgtccaacgggacgatgttgctctcgcccggctcattcaaacggagtccgtttttggcgcagcaatgcgagcctgcgcgtagaaccccaacgaggactctgtcccctgttggctcactaaataattaatttatggtatttacggttaatgtaaccaatttttgaaaaaaacccactatttgcacacaacgcctgagccactgtcgccggcgcatgctgcatcggagtgtcctcgaaagcaaattgtgcccatcggaaatttgtggcccaggggcttcccctataaatttatctttttgtcattagaaaatcttgtgtaaattatgggtaaattaccaatcggcttacggcatcgttgcagcatgacaaagacgtcaaaatgcccgtcatgtaaagccggcgcttcgtgttttcgcatctgtccccgctttttgtgaacgattgaccgcttccttagaaaaataaataaatttagtctccgattcaaaattccttcccatttttaattagtgtaatttttagacacttttgttgaaaggtgccaatattaatacttataacaaaagccaattttttaaacaaaatcgattgatttggacctttcttttctatttgacttttaaaatgtaggcaaagatagttcattattaattacttccttaccagcaatttggcagtcgacccattggctcgatgtgtaaaccggctcgaagcgtgggaaaccaatcgttcccaattttccgggcaccaattcaaaggggagcactgcgacgactgccaagtcaaatgctgcgccatttagtaaacggaaagcgggatggagcgcaaagcctagcacctttgaaaataactagattaagattaacgctttcaaaattttataattaagtttttcgcccctattatcggatttagacagagtaatggctaattaaatttaaaacaaaaaaccgaaaaatcatagatttgaatgtgaataaatgatttttcaaattaaatagctggctaagcagaaaggttaggggtacaatgaatcattcagcagtaaataagacaaatttttggggattttgccataattataattgggtaaaaatgtgttattgtaaaactgcaccttcttggaaacgccctcctccacactttgcccgtcctcgattcctgcataagcgattgatccgtcaccgtctttcgctgcttcatcccagcaatgagcacacgtgaggacaagagaagggttgaacagcactccgctgcatctgctcattaggccattcttaatggatacataaattaatagttaatccatattctgggagttttttccaataaatccatgaaagtttaagtttttagaaaaaggcataaaatgtcaaaaaaaaaacaaaaattgcaaattgtttgataaagtttaaacgggtttaatgttctggttttttttaaatttatgctgaatttttttttattgactcacttggtttttgatgagaaaatgaacaaagtacgtcgcgttgtcataagggccagtttccgaacgaacatgacgcgactcgttggcattgcgcatcgacgagattcccgaactttccgctgctgctgaagcgaccggaaattcagccttggactaaaacaagtgattaaaattgtttacaaatatttcattaatcatacaagttgttgcatttgtcagcagcgatcaatccggtgaagatgaccaaaattgggaagagcagaagaattttgtccatcttgcaatttttaaatgtggcaaaatgcgccaaagtcagaatcttgcaaaagttttaaaaatttaaaaaaatggaaattaaataatggaaaaatggcagtcatgggtccatttttgtacttttcgcaaaatggcctagcaccgtgtacggcgggaggggtgggctatgccgcacaaacaacgctcactcatcacccattgatcgatgggtcaaggtcatttcgcagcggagccaagccgtggtcatttcggcgcaccttattttatggcactatcgcacaaagggacggtcctctgaccagaagggggaagaggggggctcgagtgaaataagcaatgagagagcggcgagatggccaaaggagagagagagaggaggcaggagacggcattggagcggcagtgactgtgagtggtaaggcgaaagcgttcagaaatgctttactttattcatgtccagcaggcctttgcgctccgaacatttgcgccccggacatttgcgcctatgcacaaaatcggattccaacttgttttttcaagccctgatagccgaaacagaattgaaatgaaaaactcagtcttttagtttattaggagcagtaacatgtattgaaaaaacttcggctctacttcagtttatgcgtccaatcattttttatgtatcaaattatgtttttttgccaaaataaaggttttatgctttcgtgagtcaaaaagtttgccatactttttatgggcagccactgcctttttccattagtcggcattgagtcacgagacggccgccgccactttttctctccaattttcgacaataacacagacagccaccactttttcgacaaaaaattggaatgttgctattagctttattgacagaggaaaattagtcacccaatatttcagcaattggcttaaaaactgaaagagcaaattgacaattcattaaagcaagcaaaccgtccgataacatttaaaattattttgattttttgcccttcgtctttttctccgtttttcatcatatttggtgacatggcagactttaccatgaattcgagtttttggttgttttctaattttattagaaataaaataattttttttaaattatgttagcccagagctgcgatctcaaaattttgaaaatcttcatttcagccataaaaaatcctcatttgcaactaaaatacctcaaaaaatcctcatttggaatgaaaaatcctcatttttttaaacatcataaaattgcgaacaaatcagttaactgtcatattttcgtttgaaacaatcacggcgcctatcagcgccgccggacccattttttcttaaaaaattggcgtaaaaatcacaaaattggtgattttggtaaaaatttataacaatctcatttaaactagagtgcagcgggaccaggaccgggccgggaattcccggtcatccaaggtcccggtcccggttcccggattttgaaaagctcaggtcccggtcccggtagggcaaccgggaaccgggaaaaacaagcactggtaagaatggaggtctgagtgaaaaattagtgaagaaaattggagttaaaaggaaaaaatttaaaaaatatattaataccgtatatactctttttatatgccagtctccattaatctgccggtctccagttatatacccccttctgagaaggttgaaaaataatctaccagtctccatttatgtgccaggggggaaaatagaattttttaataatttatttggcacattttccaaaaaaaaattaaactcaattcaacagtaagaggggctaataaatgaacaattcgttgtcatctccgactccatccagccctgcttcatcatcagagtagggtcgctacttttagtgccggaaaatctcgaaatagttaactaaaatagtggcaaaaagtccgaaatagtgacgaatagtgacgtaattttcagccaaaaattaagccaaaataatttttattcactagttggagttgcaaataaggtacttttcctttgaactattcccttatcaaatactgaacatttttaatcaaaatttgtaaagaaaaaaaattgtggaaagaatttttaagaaaattttccaattcttactggtattttttaaaaaattttaacccgtttcttaggggtgtattttttggttttattgcatttttgttaaggaattttcctaaaaatgtcgaaatactgacaaaacgccaaaataatgaattttcactattttagtgacgaagcgccaaaatagtgatttctagtgaccgatagtgacatcagaattgaaaaatgtcaacgcagaaatacgttttttgagctcctttcttcaaaacaattgagtaaaaaaattagtaaatcactaaatgtagcgaccctaatcatcagacaagccaaaaaaaaactaaaaattttaaattaaaattaatataaaaaaattaaaaaaaggcttcttcgtgatcgtttcttcgtccatctttcaccattaaaaattccaatttttatgcataccggaagcaagaaaatgatagatttttgtcattttggagtcattttcagaagttctttaacataaatgcaataaaaatgtttttttttgacgcgatgacattttttggcgacatgttcaaaataaatttcaaaaaaattttccactaaataaatcatcgaaaaataatctcccagtctccattagtctaccaatctccaattatctacccccttctgaggaggttgaaaaataatataccatggcatataaaaagagcaaatacggtaggtaggcttcaggctctaaaagacccccaaaataggcactaaaaagtctcaactttaggagtgtaatgacaaaatttttcaaaaaagtaaaaaaattctacaaaatcagtattgagttaaataatgttttaaacacaaattcttgttaagaaataaataaataattttggaaatgaatttttgagaaaattttttatttctcatgggtgtattttttttaattttcggttgtcgattcttaggagtgtatttttgaaaaatttttagaccgatccttaggggtctatttttgctttttattgcatttttgttaacaaattttgggcaaaacaccaaaatagttcaaaataaatttttttaaatttttttttggctttttaggctctanaaataaaaacctagaaaa

SEQ ID NO: 1519 - DNA, 7684 bp, Heterodera glycines
ctgatcagaaaatgtgtaaaacattcaaatgattcggatttacattccaatattcggggctttcccccaaaactcaagagactccaaaatctcgagatttttccgaaaaattccggtaataaatttgtccttccattttctgtccccatttttgcttctctgtcccacccaccattattaccataatttgtgtctcccgttgttgttgttgttgtttgttggtggtggttcagtgccaattggtccggatactccgtgccctcgttgatcgcctcgtcgtgcggtttccccccgttgctgctgtgccctttcgcgcacttgccattgtgctggtgatggtggaggccattgcagttgtttttgttgcgcatattctggcaaaaaatgggcgataatttttagggttttaattatttgtaattttttaattaaaaaatattaaatttcattttagattttaaattttcttaatttaaattaaattctaccgaaaatgcttcaagccgtgtctgcacttgctcgtccaaagtgtccgccgaaagtgccgcacgagtggccattgtccagcagactgaacacttttttcaaaatcattttcgttttgaaaaattcgaaaatgaaatactaaaaaatttaatacataaattctaacaattaaaatttattttatttaaaaaagtgaaattttaaaacagaatggcaccaataaaaactgctcgagattcgcagtctcgaggtctaaaaatttctctggcttttttgggagtgggttcggtcgcgactctcgagaaactttcgtccatcgaaaacagatccatagcttaatagcattgaataatgagaaaatgcttaataatcactgctaattatctaatacactcattagaaagtaagaatttgtcggttcaaaagtcaagaattggtctcgagactttacaaccgaaaaagtctttaaaaattgaattttctcgactaataatgatgaaatttggtccttggtttcccagtggtgcatcataatttggtgctatttattattggaaaagccaaaaattgtttggcgcttttgctcatcagcggtggcggcggtgctccgtcgcccctcgggcgctatcacatttcaaaaattcccccggggcacacaaatttcggcgctgccgccccgcccccctaaaaaattcggccaataaaatttaaaagaggggcttaatatataaatatgtaataattcataataatcgaaataataaatgatttttggcacagctgacacccgtcagcggctggcagcagacaaattgctgccgcctcatctgtcacaaaatgtgcagcagaagcagcagtcaatcaaaagtcacaaaagaaaacaccgggcgaatgtttcgagggcaaaaattgtttaaaatggaaaaattattttaaaatgtttgaaaattatttttggaaagaataccaagaatttgctaatgccaaggaaagttcaaaatcaaagcatttaaaatatagacataatgttgtgtagtattcgaaaggaaaataataattttgaaattcttttggaaattattaaatttcaataataaagaatgattaaattaaattaattaaatttaaattaaaataaacaaaataatatagaaagaaaaagaaaatgcgggcattcgaattttataaatttttaaaaaagaacatttaaccttaaaatcagattttggggctgacaaaagaattagccaaaatagggtaaagaattaattaattttatataatttaaattccaaccaaaaaagttattttattgtttccacataccaaacgattttaaattgaatttaaaacaattaaccataaaattgaactaattataacatacgcggtgtgtcctgttcactgtcctgcagctgaatgggccgtacaacaaccaactgaacaacggcttcttgctggcgcaacagagcggcaacttgttgactgatggaaaataatgaatcattaattattaatttaaaaatgcaattttaaaattaattttaaatcggcgaattccaacaaaatgcccacctgttcagtccctgcgtggaaatgtgcccaatttgcagaatgcgatcgcccggacgaaggcgcatgtcctaaacggagtttggcttatgatcagcagctcgaattttaggccggacaaaatttgtcacaccattttagtttcagaatcagcaaattgtggcggttcaaatcatttgccaattagcaatgtttttggcatttttccgtttcccttcccttccttctctgtgatttttcgattttttaaatttttgaaaatccctaaagttttgattgatcggcgaacagaaaattccccggctttccccgaattttttaaattagtttttcgcatttttaaattgttttactcccccatccgctatgaatttattttaatgttaatgcgtttatttatttttttgactttgtccgccacactgccgcggatgatcgatttgaccacaacgccggtgctgtgccctccgacgatgccaaagccgagtccctccgcttcgttgggcaaatgcacaatttgcacttggacccaatcgccggttaactgtaaaaaattgaaaaagcattggcaaattgatttttattcattatcatacatatttaaaaaagtgataaataacttaaatttaaaaatttaattggactctgagttggatctgaggtccagcataattttctgtggaattctgtttatcatcatcgtccaagtggatttgaacttttattgccaaatccgaaggaaacggcaactctaccaactgaaccacccaaaaaacaaaatacgtatgagtgttattttatttatcaatataaaaaggcgcaaatttttattttcagtgggccttatttttatgtgcttttccttctttctttgttggctcttgaaatgaacttttaataatttaaccaatggaacttttatttttaaatatttttcatttttctctttggaagatttatttaaaaaattatttctcaatttaattttttaaaatttaactcaatatttttcagttttttcatttaaaaactctgattactactgatcaaaaatgccaaggtagcccattatcgctaattgccctattttctcgcctccacaatgcgttgccgttcccgttccttgcgtttccgtctccgttcaatccaccgctcgtcctgtgccgtgttgacaaccgcccgtgccagccgttcagctgccagccgattgtattcactccgatcattagtcgatgtctccgccgtcttggtcagttttcgtcttagcaacaagcgaatgaccgacaaaagcagcaaattgcgttgatggaattcactcgatggcatcagcagtggttgttctgcttgaacttgatgataatgatgatcagcatcatgttgttcagtttctgttgctttttcgtccgtgccgtcggctgacgtcacggattcatcgctttcatatgagtcgtgatgaaccgcttcgtcgcgatcatgatgcccttgctggccatcatcaactgcatagtcatcgtgttgtatgaccaaaacccggtcgggtactgctttaggtccctctgctggcatagcgatcacaccgccagcatatccatccgctgcggctttttcttcggatgacaatccgacgatcagttgctgcttttgctgctgtgccggcttgcgcaccgcgctgttgctgctgatgaacggcctcgccaccacgctgtgcagctgttgctgccactggttgatcagcggccaccagcggcggctgtcactagcgcaaccgcgacagaaacggcggctgggacaacaccaagtactgctgccgcagctgtcacagcagccgccaccggcggtgccatgccgcttgttcagcagattgaagcgcttgcgctccaccagcggtggcggtgcccaccgctcgcagctgccaaaccgttccatttgcggcggttccagccgtaagcatttggaggcggtcggtgccggaggcggcaactccagccgatcggggatggtcatgcggcgccatccaatcagcgcgctgccggtgcaaagcagcgcgcgggcggacgagcgccgcgaggacggcgtggtgttgcaaagtcgtcgacaccgctcctcgtcgactcgcggttccaccgcggagcggacactcgcggatttttggcacccctttctgctggtagtgacagaatgcgtatcagttggaagtgccaattttgactgctgctgttgatgttggccaatgtttttgctgctgctgttcaaattgtttggcgtgtcgacggaattggcccaccgcaccgatagacgccccgaactatgcgcggacgacaacggcgtatgcctgtgtgattgttgttgttgttgtcatcggtctcgagacaatatcttggggatgggccatggcctattggaccaatcaccaaaattctcgggccctagaatcccgtggaacaggatgggtgatcaggctcaaataaatccctaggccaatgccagaacttcaagttcgagatcaattctcgcctatccagtcgattcctaagttcgagattaagcttcaagaattagtctcgcaacaattaatattatcctagtcccggaagacccaaatcttgaaataaagtctcggcagtaaatcccagtctcgagaccaaaaaattttggccttttctcggtctcgagctcagtgtgggtgcccacgtgtgcatgcctgcttttggtgccgcttagcagaacatggtccgcaaacagtacagcgccttttttggcatattgtgccttcatgtgctcggccatccgttgctgcaactccgtcgcaaagttcagcatcactgcattcttcggcggcaccgcatcaaatgccgattttatacgactttgattcccattctcggccttttcctctgtcccatcatgttgtaatagccccgttttttggcattcgtcttgcctttctgttggattcgtgccaatttggcgctcatttgccatttgaattattgccaactttcttggcgccgtgttgtcctcacgccattttgccggctgattcaaccggtcagttttgtgccgtaatacgtcgtccatgccgactgttgttctttccgcattatgccgttctccgccgtcctgctgttgctgccagccaaacgcggaaaactgtgcgaagccgctgcgacgacgacgacgcgagagtcgcaagtcgcgtacgctgcgtcttagtgcgcgaggcgactcggtacggcgacgttgcgttgcggcgaagtcgacaccaacgcgttggcccgtacgaggcgcgaccggtgcggggtcgcgcaaaagccagattggcgtgccgccacggtctccgccaccgccgaacgggtcctcgctgaacgatgacgaatgggacgcggtttcggatgccttgcgcgacaggcgaagcggcacggcacgcagcaaccgtttggccgcttcccatggacggcggctggtgttgttggacggcgaaacggtgccaaacagtggcggcatttgtgaccgcgtgtgcggcatccatggtatggacgacgaaatgccgaaggggtgacacaaagtgccatccggtcgtatggtcgagaatggcatcaccccggcaaagcacttgttgttaccgccgttgctgtgcaatgccgtgccattgtattgatggtgatgataaccgttgttgctaattgaattgccgtttttatgtttggtccggttgtgccacggatttgtcacgaatttgttgttaagccaatcgatcaggcgcattttgcaaatcgaaaatcaaatttgaaaatggcaatttctggctgcgtcggcaaaagtgtaaaacttgttgattgaagtggcaccgccgcaggggcaaaccccaaaattaaaagtggcacttatgggagaaataatgtttagtaaaatggacaatgggagcagaaaagagaggggatattgtgagaaaatgcaaaattagtttaagggattcaattaaaaaataatcaatttaattttgacaaaaatatttttaaaatccaattaagaaaaaaagtcgaacattttttgaaattaaaattttctgtccaaaaccattaaatacgctgtttatttggtgtaaatttatttggctgatggcccacggcacaacgaacgatgttttggcctattgacttggccaagttgcccgaggcgatgacagcatcatcaacagcatcagcccttttgcctgcacagagcgactttgccaaagccgaacgccccaggggaatttggggatttgaggggaccgaccgccggggggggggggagcaaaagacgcaaatcgaaaaattagagacggagaaaattgtggaaatttggagggcttaaaatttgcaaattaccatcaaacagcagaattttggcattctgtacaacatttatacggaaaaaatgttaaaaaagctgcaagtattttgatttgagttgcaattggaaaatggaaactgtgaaatgtttagatttatctttggcattttgttgtctttttatctattgaaattttcaatttccattttggcattttttaatccttcgatggcatttttaaatttccgttttggcattttattaattcctccgatggcattttaaattcccatttttgcctcagtgttaattcttttttaatctttgctcttcaaaattaattattgttaaaactaatattttaagctttcccgaacttcctctttcatccaattctcttgacttatttctccaaatgttttttttaaatttgtgcatttaccgccataactttggcgtcccgtctgagcacgccgaagacgacgagtggcggcttctgctgctccgccgccgcacgttccaacgcgcgttccacgcgattccgcgcccgctccgccgctgcctgcgcggatgagcactaaaaaactgacaaaaataataaattttgaaatggcaccataatgccaaccctcgggtgattcatacagtatttttcaaaaaattaattaatatatatttggaaaataatttttttgctgattatggattttttaaatttaactttctttctttgtttttatttttattttttatttaaaaaggataattttttcttcgatggccccttaaatttttcgaccacgtgggttttccctggagaattttaaaaagaaattccgggtcaaactggaaacctagatccagatttttttaaagtcgagctctaatttatagtttacttatgccccaaaatcaattaagatttaacttaattataataataaaattctaaaaaaaaaaaaaaaattcgcttcgaaaaataatttgtgccaatgaaatcgacaggtcttattttaatgtaattataaaattgcttttttttcttcaccttttgtgactgatttttgtggttgcacgacggacggggcgaactttctgaaaaattaaaaaataaatttaaattttaaaatgctaaaatgctaaaataataattatgatattcaaaatcactcacttttcgatgagtttttcctctgctgctgctcgtcgtcagcgttgatcaaatcgctgatcagagaacggtccacttagaagcttcgtcagcgacgcgaagggcgccggaggagctgaa

SEQ ID NO: 1520 - DNA, 1630 bp, Heterodera glycines
  unsure (1)..(1630): unsure at all n locations
aaattgaaaaaataatttaaaaacaanatcaaaaaaatatgcaatatggtttataattttaaagtgatcagagcagcagaagtaaaggtttaaaattaaaaaatgattataacaattggtaaagagaaganaattagaaaaattatttgtaaattaaaaaataaatttgaattttactgtaaatttaaacatgtggcatttataaaaatatactaaattacatataaaaaaaaattaaacatttgaaattttatttagcaatttcacctcaatttttgggaaaatttattcagaaaatgcaaatttccattttttcgagtggtttttcaattgaaactgtcacatttttaacataatatttttgttgaataatttttatgggagattctgaaattttcaattgcattaattgctaaagttatagcaacaaaaaacaaataaatgccgatgccgtgcatcggttcgattattgaaattccaagaatttgaactttaaaaattaattaacaaaaaggaaatttgtagcccaggggcgagcggcttttccttcccacgccatatttaaatattgctaaatgaataaagctcataaaattattgacaaaaataatttgggtggccggaggcagcttttcctttccgctgccaaatttaaattactaaattaaaactcataaaaataattaacaaaaaattaataaatttgggccagtgaggcgagcggctttccttcccttccaccatatttaaatattgctaaatgaataaaactcatataattaattaacagaacataaatttgggtgcccgggggggcttttccccgccttcgcttcgctttgtgttgtcccaccctccgccgtccgtccgcttcttcttctgctctgcttctcatccgcctcattttttcctcccgctgctcctcaaaaatgcttgacggcccgtggaaaatcaattatggcacttgcattggcttcccccccccggcgcttttcccactcattttgcccccgggggccttttctcggcttttctgtcccctgcagcaggggatagaaaagccaaaaaaaaaatgagtggcgtttattactctccgcttttttcgtccgctgttggacagagtccgccgccgtccccgcaaattgggcgctgtttttgtttcttttccccccttttttgttttagtttttttaccaatttttttcattcaaaatttttgttccgataattacaaaagggtgtaaaaaatttttaaatgtaaaataatttgtttggtggcattttcggtttatttataataaatattatatttaattttaaattgttgtgcctttttgtttgtgtaaagttttccctttattttatttgtaaaaatatctaaaattattttaaaaaactaatattatataggtttttattcagagaattggaaaaaattaatttatttaaatttttgtataaataattaattttgaactcaattcaatacattattattaacaaaaatattattcttcaaaaattaattaatgaacgaaaattgaaaataaaatttacaaattctgagaaattaaatattaaaataataattatgaattaaaatgtttacaaaataccgttttttgatgtc

SEQ ID NO: 1521 - DNA, 1785 bp, Heterodera glycines
aagtggttgctctttttgcagcatgtgtcgcctcatttttgggcatatcttttcaactagaccaaaaataacgaataataattattattagtattattgttagtaataatttatttaatgctaaaattatcataagaatatattaagattaattacaaataaaaagaatgttatcttcaatcaatggtaaaaaattaaaactaatttgagctattaaatttgaaatgggaaaattttcattaaattttagttttatttttaattagtcgaacaaattaagagctgaaataatttaattttttcaaaaacaaagaaacaaataccatttaaaaattgcgtttccaactttattgaaacaaaatcattttaatttttaaaatttcatttttttccgacaaattgtggccatgtgaattgagagaattgccaaaaatataattattttttttgtttttgataaattttgccgcttcattcatttcatgtcacagaattgaagctgctgtcagtcactcaaaagaacgaagagaaaaaagaaaagaatgctctgcaaaattgtcacttttgttaaacaatcaattgattcgtggccaaaggaaaattaaaaattaaaaattattaacgcaataattaattatataaatgaaacaaaaatttaaatttatttacttttgaaaatatttttatgaaatctttttaaaaaattaaaaatatgttaagcgatattcaccgacaaacaggtgaaattaaaatttaaaaataatctatccaaaaattataaaataaatttttgcaaaatttaaaaagtaaataaaagcaatttaaaaagatagagtttaatggaaataatataaaaaataaacaaaataaattaaatttgaagggctggcaaaaagttgacgatgaaaaaacaaattatgcaaatatcagaggcgcaagcataagcaaaacacacagaaaaagtggggcggcgttcaattggccctctaacgccctccccccacgaggggagagggtgttgtgccagaaaaagatgccgcaaaaagagatgaggaaaagccaaggaaaagccagaggcaaagggtgggcgtttcggtttgagacggatgccaccccgccgcccctccagcagtggcgggggagggggcggcgccggctgtcaacagcgccgccggacggaggggcgaagaagcggcgccgcggctgcgaggggaaataaagggcggctaagagaagcggcggatggcaaaaagcggggggagggagaagaagcaacagcagcagcagcagcaggcaaagcaaaggaggaagatgaacaaagcgatattggcaaaagagggaggagagacaaagggagggggagagagtagggcaaacacagagaaaaaggcaggaaaatagtgggggaatgggagagaaaagttggaaaagaagtgggaaagattgcaggtcaaccagaggaatgaatatttgaaaaacaactgtggaaaagattcttcaaaaaaaagaaaatcacaaatttaatcagtaaagggagagagaatgagagagatgctagagaaagaaatagcgaacaaatcggagagagaaggcagagaaattagggtaaaaaatggcataaataaataaacaaaattcaaataaaaattaataaataacgcatggtaatttaatgaatttagagagaaaaataaattaagtaaaatagattaaaaagaaattcaaataaatgaaaaaataattttaaaaaaaattggtaaatattatatttttttataattgtgt

SEQ ID NO: 1522 - DNA, 2672 bp, Heterodera glycines
  unsure (1)..(2672): unsure at all n locations
ttaccgtatttgctctttttatatgccagtctccattaatctgccggtctccaattatataccccctttgaactaggttgaaaaataatctcccagtctccatttatgtgtcggggggggataaatagaattttttaataatttatttggccggcttcttcgtgatcgtttcgtccatctttaaccgtttcagttgccctaaactcgcgcaaaaaagcccagaaggctgtttctatgcctcaaaacataaaaaattacaaaaaaaaacttcattttgatcacgttaacaatttcgacattttgaccgacttgtcgacactttgtcccactactcccaaacattgttagacctgtcaaaacattgtttaacccatttaaaaacaaatatcaagctctacgcactcaattacccccaaaatcccccactcactgcgaaaagccgacttttttgaccaaatttttagacaaatgaccaactcaactttgggctagggactcaaattttttaaaagaaccgcctcaaaatgctctaaccaaaaaccacctcgcccattacccacggcaacttaaaagccgctacgggcgcaaaaaaaaagatgcaactctaaaaaaattcggaaaaattccctttttgaccagtttttcggacaaatgacctacttaactttgagctaggggtccaaaatttttttttaaatgtgactaggtgagctctacaataatatacaatagcgcctgagctaacatttcgctaaagcacacccgcccgagtctaactttttgagaccccttcctggccaggggctaaaggggggtcaccccttcaacttagtgctggcgcacaattttttttttaaagaccaaaacgattccatattttcttaacttttcattaaaaattccaattttttatgcataccggaagcaagaaaattacatatttttgccattttggggtcattttcagaagttctttaacaaaaaattcaatagaaaaaaaatttttttgacgagatgacattttttggcgacatgttcaacatattcaaaaaattttccactaaataaatcaaccgaaaaataatctcccagtctccattagtctgccagtctccaattatatacccccttctgagaaggttgaaaaataatataccatggtatataaaaagagcaaatacggtattaaacttttaatatccgtatgcgttttcttattcatatttatataaaactgatgaaaattttaatgaaaacttcaccattaaaaatcagtccaaaaaacagttaatttgtttaaaatcaaattattattaaaaattttaaatattcaaaaaaaaaaatttttttttaaatattttaaatttaaaatacaaattaattatgtaaatgatcaattaaagagttggatacgcgagaaagcctatgtcgttacccaatcggtacggtccaagcaggcatccaacgaaatgtggcgaaccgtgtgggagttgggctccaacacaatggtcatgctcacaaaggtggacgaaaaatttatttttaaattgaaattcttcacaccttaggcgctgccgtgggaaaattttagaatttttttcacgaattctctgaaaaattccaaatatggtaatagaaatttcaaaaatttaggcaaattcaaaagggtgtttgttaggtcgtttcgtaagaattgtcaacatgggcatttcgtaaaattgccaatttacagaccgttcgagaaaaacttgccacaaatttttttaaccaaataatttttacaattcgttgaaaatataaacttccagaaaagcgcattttctggaattgaaaaacaattataaaaagcattgttttctggtaattaattagaaagtgaaataacaaatgaaaatgtgcattcccagcaattaaattgcaattataaaacacaaaatgtttacgggctaaaaacccttaacccgtaaaaaccgtatcagcccgagaaagtacgggttatgggcaatggtcccgtaaaatctgtattcatgtccgaacgtatccgatctctattaaaaagtgtataatttgaaaaaaaaaatcagattttcgactttatgcgggtgatgtgtctccaatattggcctcagacacacttccaatttggcgaaatccatgttgaaacattggaaactcgcacttatgcacattttgtgagttttttttacaaataattttaaatatatttaattttggtatgaaatttacaatggttggctatttattttatttgaaatgccattctaaaaaggtaatccgaacattccgactgcgcaaaacgggtggtcccggcggtctgaacggaccggcggcaaatgccaccggcgacggcaccgccgactcagcagaagaggagcgtattgtcaagcatttccatttcacggaatgggaactggttggtgccgttggaattttgcgctttttggcactcatttaaagtgccactttcacacagaactctttcccctacatatcggcgtttgtcgaactgcgcaggcgcgtccggcatggatggaaaagtgagtgatgagtgagtggcagatgccaaaaatgtaactntttttcataaatctccagtacgaacccgaccctgcatnacgtcgtagaggctcatattttaaaaacttgctaca

SEQ ID NO: 1523 - DNA, 5218 bp, Heterodera glycines
ctgcgcgatagatatatcatgtcaatagacaacaaattcccacataggctggctatttgtgatcgctaattggcttagtcacgagaccgagagccactcgaacagcactgctaattgggggtctctgccagggacgtagctagggaggctgaaggggtccaaaaacagtaaaaagaaattcaacgaaaaatatttttttttaaagagttgatataataagtaaataattgtttaaacatagataattattaagattttttattaaaaattaaaaacaatgaaacgcatcttgttttgagttttgattaaatgaaataattacgagttactctaattaatcaaaaacctttctcctaatcagggatttctaaaaaagaacaatacacccttaaaaatcgaatttttttaattcagcccttctcacattctgatcactgctgatcatgaccgatcaacgctaatttaaggcattatgtaaaagtttttcttgtagaatttaagtgattttgaatttgaccgagttttggtccctttggtttcatggatcgatcgctttccttacttggatttgtgaataggtgatcaaatactgtagcgcgggacgcccgccctcacgacacgcggcattctgcgcaagtcgcgtgcgtatgcactgcgtgtcgcacagcagcgagcgacagcgttggctgacgcccagcaaactgtgctccaattgctggtagggaccgcattgcgcgaccccacactggcgtcgcagctgcggcgccgcgcttttgtagcagttcaagtgcgagatcagctgatttaacaaaataactggaggtgatgatatcagaaagaaaaaaagtgatcaaaaacaaattagagattgatcaacaaatcttctgacatgattggagaagggaatgaatgaccagcgtataagaaaagccatgagattgatcagagcatcaacaggaggttgatcaaaagatagtaaaaaagcaaggaaaaaagcaagaaagaattctgatcagtgatcagtataacgatcaaaaattgtgcaaaaattaatgatcattgtattctgatagctctcaattaatcttatattttacctctttgcgcttcgtcttgcacacaaagtcgcgcatgttgaactgcacttggtagccgcaccgaaaaaggaattacctatataattttaatcccattttgctctgatctaatttggcggaatgccaaaaaaagatatataataaatgtgggacattttttggtagaaacaccatatatttattgtatatagctaacccagcaaggcatgcatcatgttccgcgtccactcggcagaacatttgcaggtcgagcacatcgatcactgatgggacaccaatgctgccgaaggcggaatgtgcctgaggcacaagggtcattaattcgagagtgtcttaattgccatcattaattacagagtgttttaattgccatagtcccaaaatttgatgtaacttcctcctgaatcacaactgctggccgcttattgagtccagtgagaatgctaattgacctaattagccacgcgttttaattggacccctgctgctgccatttacatactaattaattaccttaaccatgtccagccccatgcgcaattgttcgtcacattgttgacgacagccatccaccggaaccatttctgcatccgccgatgtgccgtcgtcggtcattccactgcgcgatgggttccgatcgtttggctcatcctcttaaagcattggctcttttcaatctgttttctctcgctctctctttctcccctctctctctctctccccctcactgagtgattgacgcgaatcggctggcaaatgtcctgttcgcacttccagtgccatttgctgctcaagccggacaagatcaaatgcggcacgttgcccgtgccgtctgggccggccagcggttggcactaaccgttgatgctgatccgtgctgatcacttttcccgcaccaacaatctcagcagaaatgagcaccattactagtgatagtagaagaagcagtggcgtatcaaaaaactgtgaaggtgccaaattaaaaaatgtgccaaagacagcaaatgtttgtttgtctttgacgggcactaacgactacctcaaaaatctcagctttaatactgattagttgataaccccgattggaagatgagaaaaattctgaaaatgttgaccaatttcatcagaaattcttgttaaaattcctatttcccccctgcggctttaacggctcccggaaaatgggttagtgaaaattaccaaattaaactttttgtttaattagatgccaaaaaatttctctgatttgtgagttaaagttttcaaaaattatacttcattgtgtcaaaccaaaacattaaaaaattgatgaccccttacctcaacagctgtcccttctctaccgttaatggcaaccgatcgcggcactccgggcccccacaatagcatttttttgatatttttttgttgtttgtgctttaccaatttaaaaattcaaacaattgttttgttgctgctgctgttgggtgtcgtcgtcgtcggctggcagcaacaaaaataaattgtgacaatgttttgctttgcgcatggctttcggggcgatgacattgtcctcctcctccgcctcggtccgtctcgccgtgtccttggccctcgctcgaccctctctctttctctctctagcaaattgcttttccccctcctcctcctccttcccttttttccgcctcaggtttcctctcttttcttcttcctttttcctccttttctccttctccttctctttttcctcttttcctccttttcctcttactcttttcccgcactcttttcctcctccttctcttctgttttttctcttactattcctaatcctttattctacttttcctcttactcttttcccccactcttttcctcctcctctccttttttcttccttctcttcctcttttcctcctttccctcttactttttcctcttccgctttttctctgcttctttttttcctctctccgtctgtcggttccgttttcttcttgacttgacactaaatggagcactcactcactgactgatcagaacaaaaagggcgccagcgggcgttagcgtaataatgggttttacagggagcgaaaattgggacaatgaatggggctgttggctgggacgattttcgcagcatcaaaagtgtaaccagcagaagcccccccccccgccccgataataataataataataataattctaatggaggtgattaaatgctgataatgagtgtcgcgagaaagttttcgcgcaaaacgcgggaggcgacgacatttgcaggaaaacaaagcataaaacattaaggaaaggtgttgatggaaaaaaaaaagaattttataaactaaaaagatgaaaatttaaatttttaaaataatcgtttttatcagtaaataaatcaacggaacaataaatccattttaaaaaacaacgcaaccaaaagcccgttaattttttctcttcccattaattatattagtaaatatgcgcgtcattaagagtaattaatgaatatataaaggattaattagcacagatattttttgccacttgaatgattatttccagttctgatgataataccactgtgcaaattatcacgtgtttgatcagtcccattaatctttatcaaaagagagtgtaaaatcctaacagaaaaaccacttaggtttatttatattcgagtgcaattagcggaactaaaattacacacaatcaatcattaaaaaaagcaataaaatttgatttcatggttaattttgttttctgaatgaatgcgaatcatactttagctcaatttgcgcaaattatgcctctggcaaggcttttgttatgcgcaaaattttaattcggcaaaatttgattattataaaaataaatttttaattaaaattcattaattatagtttttgaaaaaaattatctttaggtttgtgaaacaggagtgatttcgcaaaaattaaaaattgcaggatattaaattttacatttttaaaacaaaaattttaaataaattatttaggtattttgagtggaggctaatagaagcagacggggaaatctttatgatttcgattatttcttatagtaatggtggaggtcgcagcggtgcctttctggcgctggatgccaatttggaactattgcagcgaacaggacagttggacgtgtacgagtacggcaggacgttggccaactcacggcaacatttgatcgacacggtggaccagtacatattcatctacgacggtgggcactgaatatgggctcagatcagttcaactgatccggaaagacgaattggttcctaaactcaattagtttgatcggattagtttctaaattcaatcagtccattatcatatttaatcacaaattttggtcgtcaaaaataagaccaaagaaaatcagcgatgagcttgatggaaattctatcgctaaaatcgaaatttaagaaataatattttttttccttttattatatttttattttaggtttaaaagaattttttaggtttctttctttttatttatttatttttttaagaatttaataaataaaagaaaatttaagtaaaatttatttactaagtttttttatttaaataaaacaaaaatttaaataaatcggtcagtccattatcatttaatcagaagagatcttggtcgccaaaaaaagaccaaagataatcagcgatgaatttgatggaaatttctatcgctaaatcgatcatgatgaagcctgttcaagaaatagtaaatcagaatggataccatctgctgagcttaatccaacagaaaagaccaattaaactgtttttttcagttttatgcgaggccgtcctctgcaacattcagcccattggcatgcatcagctgaagaaccgcagcggaatgtacaaagcgcgcaaagaccgcgagctgatggaggtgcaggacagccacgagaacaaggcgaacaccatgaaatattaaaaatatttttatgccaaattacgattcataaaaataaattaaaattccaagagacattagttttaaaacaaggctcatcgagacccaagatttagtgttagaccccgaaagcccgagagtcttctctagtcgagaaaccaggccttgactctcgacgaccg

SEQ ID NO: 1524 - DNA, 7010 bp, Heterodera glycines
aaatcgtagccatattactcactcctcattaacattcaatctctcaattcctaagcatttgaatctactaaattgcagaaaatccaaaaaattccatcaatttaaatttctcaaatttcctcatactcaacccactttcaaatcattcattctcatgttttcccattctcttcagctgttgctcatgttgaccgccccgctaagaatcggcgactgcgccggcggccatcggctcgaaaaccgtggcaaaaaccgtgacgtgatggtggtgccgccggaccattctcggccatatctgcagacattgcacggcgagtcaaaggtgagagaaacgccggcccggcgaattggcaaagtgccaaactttcgagtcataacccggcacatagttcagacaagtcaattttattggcaaatctggcacagtttataaattagtgtcttctgttggcgttattcactgcacgagagacaggaaatctcaaatttgcgtatcccgctgcgggaatgggactcaaattttttgcggacgggatcccgtgggattaatccagcaaatcacgcaatttgtaataaatgccgggttacggactgggatatcccgcaatttccgcgccgatgctctacggtgaacccatattcgtattttgatgcgcatatgcgaagagcagcgaattacgattaaaataaaatcgtggggttgtgaagaatcaaataatgtaaaagaaatggcaaaatttcttgatttgtggcaaaaagttgcatgaaaattgtgcagttgatttgtcaaattacaattcatcttttcgcttttcaaagtgcaaaaccccgtgccaaatttcggattaatgaaatttaaaatttgacttttatttcgaaatataaataaactaccaaatggcaatttaaaaattaaaaatcgggcaggcccttatttaaatttcaactttttgaggactacacgtacatcaacgcggtcgaagtggacggattcacacgaaaaagcgaggtgagtggcttaattgggccaaatttggcaaaattggcattttgattggcatttattattaatcaaaaattggattcattttatgtattagttcatcgtgacggaatggccaaaagtgccaactctggacagtttttggacactgatctttgaccataatgtgcacacggtgatcagcttaaccaatcagcccagcgacgtcaagcagttcccgcagtttgtgcacaacaaaggcaaacgcaactacggaccatttactgtagaggtacggtaaagaggaagacaattgaattattatattattctaataataattagtggcaaattaattccggttttttgaaattttcggaatactaaattccctcataaaaattttatgaaataaaaattatgaagtacccgaaaattgtaagatttcaaaaatttgtacgaaattccttattaaattttctgccatcccggattcccggcttaagtccataaaagcacaaaatcaaaatttattaaaattaatttgatttacattttttcatttaattaatataccctaatataaaattatttttacaggtagtaaattaccaacaatatccgggtctccaatcccacatggtgaagatctccaaacgggtaagttcacatgccaaaattttaacgaattcattttcttttaattaaatgttttttctttttctttccttctgtctaactttgatttttctccctgtcatttactctttttccctttctcttatcctttagcgttttcttttccctttctttccctctctctttcctttctctgactttctcttttatctttccatttttaatatactatttctcagaattgccctcgccctctgtctgtctcatgcctctcccatttcccatactatttctccatctctcgttgatctctttctctctgtctctctccgtctgctcacactattttcccgcttaactgatcaaaaaatgtttgcttgctgtaaagcccatggaagaagtgattgaacggcgcaaatggttgtggagccgccgtaaaaggggcgatcgcgcttccgtcgatggcgcaagcggctcgcaaagcaccggcggcggactccatcgccgggtccgtcgtcgcccgaccctgtccaacttcttggccgagtgcgagcgttaccggcgtcgccactcgtcgctagcgaccgcgacaggtggcttcggcggcgcctcctgcagtggaaccggcgcttccgccgggccgcctatcagcgacatcagcttccgcctgcagcagcgctattggggcaaaatccatcggcggacgcccacaccaaagacgtcgtccgcttcgtcctcctccgtttcctcctcgtcgtccggctcgttgtcatgttccggaagcggccggtccgcttcatcgtcgcgctcgtgctgctccaccccgcgcgacgggatgcgttcacgctctcgctccgtctcctcctcctccgcatgttcaagctgtacacgggtgagcagtcggcgtcaccggcggcggcgccgacatggtccgtcactgaagttactggtgccgacggaagacgaagcgccggacgcgaccgctgatcggctgatcactgcagccggacgccttggtcagcagcagtcgcagatcagaaccaaaactgaccagcaggaaatgcttgttgttgatgaggaggaaaatgaactgctcggcgtccgtcggaaaacatcgcgtccgttgccggccctccgcccgctgtccaccagcgcgttgccggacccgccgcgaacgccgctgacgccgaacgcgccgggcagtccatcagcgacggcacttagtgggaggaaaaacccaggcgacgatggacaagctgctggaggggtgggttaattaagaaaagtaattagctaatatgaagctaaaccgcgtttcaaatgacaacggactttttaaaattttatttttctatataaaaatcttctttcttaattttccaaattttagatattcatttaaattttaaaatttttagtctcctcatttaatacagtaatttgtgtttttaaatcttcaaaatttaaaatttcattgtaaatgaatttaaaattgtgcacatgacgatctctattttcaaaaattctaaaaaatttttaattattttttatttttgttccccggttagagcttcactttatttattgtttattttttaatttttatttttctaaaagtggaccaacccttgtttaggtccaaatgttgttgcgcggcggctccgacctgcgcacaaagcgcgacgcgcgcggccgacgcctgggcggtgagtgggacaagcgattggagcgacgcggtgacgcggttgttgcactgtttggcgaccgcggtgacaccgccgctacggctggtggtggttctggacgccgcgaacgtcttccactgccgagagacgacgacgacgcggtaacgatggcacgtgccgaaaccggcaccacaaccaccggctacaccagcaccaccaagcgacgcagcaacatcacgacaagcgcccggcgacggatgagtcgccgtcgcaagcgccgggagcagcggcgcgcggaacgcgccttctcacagccaaaccttggcacgcttgaacgcttcgagaaggtttcctccatccacccagccgcttcaccacgaagcggggcgcccgggcattttacacactcctcgagagtgtggtggtgttccaatcccgacattgccgtgccgccctcaggcattggtgttgttccctcccctgcccatactatatggcaagtggatacggtagtcatattttttatatccacaataatcctaaacttaacgatagaaagattaaatgttgatttagaaaatgtcaaagatggagaccaattttggtgctagcctatttgacaaatgagcgcttttaaacgaaatggcaatgaaattaattagcatggattttaactttggatgactctaatcggataagcaacacaatttgccttagggcggcatccgtcctttatagtataactaattaactaattaattagttagttaaattgttaatttggccctcggggcgcctcctctcccccagccacacttacaaattaggcacactttttgttgccttttctaatcacaaacaaagccgcttttgtctctgtgattacaaaacatgcacaccacttacagtaactcgtgtcaatttcgtcccaattttcgtttttccgttttttgcctgtggctggagttagaaccccttcaataggctcggcctagccgaccaattttttttgtttttttttttcaaaaataaattgtcccgaattcattgcatcagttcgcttcgctactttactaaccacatccccgaaaactgttgtggctgggagggaggtgcaaggctttcattccaattgtcgcattttgattggtcactcaaatcattatttttcttaattattgttaattattcctctcgctctctggccagttctcttcccaatcaatatttgtctcgctgtctgacttttccagcaaaatattttcacttcaaaacactgtcgaatggcgcgcattttcaaatgaaatgctcccttaacagcccactgatccagtgccgataaactctcagcccaacccggacaagggcgccaacaaaaaacttgtgagtcgactggcactgccacaaatggcattttccatacatcatttgctctcccagggttactgtagcaacccatggccaaccaccgtaggcgttcgtattacagtagtcccacccagccacatatttccgatttgcttactttcgcttttattaactgcaatgcttggcaatttgccttaaaagttgctgcttttttaattttctgtccttttgtccaaattgtcatttgtgtacatatggcatttcgttttaatccatcatgcgcgagatgtttaatgtaggcattacttgttaccgtttttggcattttaaatttgtgttgtgatgtaattgttgccttctttgttttttgcttccattcatcaaagtcatgtgtatatttcgtttgttttgtgtgccctttttgtgaattgtgccgtttctttttcaaaattctgttcagcgaggcaccgacgaaattcggcaacttttgagcgtcaagcgcaacgtgccgaaccgacgcgaccttgcggaacaaatgaacaaattggttggtttgtcgcgagtgcaaagcgtatgttcactctgacaaagtgccgaaactgaattggtcactgtaatatggccaatgagttgtgataagtcggcttaagtttcactgtacggctggtacggttggcttactgtagtgcaacactgtatatgtgattcaaaaaaatggctttcgctttataacttttttttgtcttcttttttgtgttttgttgtttatcagtacggtttttactgtaaatatgtggtaatttgtggcccggggattacggtaggcaacggaattgaaaaattaaaatttctgacattttttcggctcattcattccctaattttaaatttttcgtccccttctcccacaccaaattttttggggatttttaataaaacatcaaaatccacaagtctttagacatttatgatctccgaaattatggcctctggggcgagtcagcaacaattggaggcggaagtgcgcttgtgctgcataatccaagtcaaaatgtggccggtaggttaaaacagatttccacaaattttctatttcaataaaaattttgggaaagagagggtgccgaaagatgccgcagtggaaaattttattgaaaaaattttggtaaatttacggaataattttccctttaaaaataagtgagggatcttatagaaggggtatcaacttaaaaaagtttctaaaatttttttgaattcgattttcccttaaaaacagacaaattacagaaaattggctataaattcccaaaaacttgcctttttcgtgttttttggccgttttcattttaggcatttatttcgtttctgaattcacttttttacttaaaattttccgattaaatttgacagattgaaaacaaagttccgttgtccaccaccgcactgatcgaagtgctgaaaatgacgcggtcgtggcgaaaacgggcgcccgatcggcccgaacagcggccgaccattgtcatgtctcagtgagagaaaaataattaatgaaaactaaaaaataaggtataacacccacctatcggaatcttattgaaaattttaaattttttatgagatttccgagcacattttgtcaaaaaccatggcactgaatatgtcggatgccctttggcattcgttgcttagcccattcccataattaaacgagtggaatggaataatagcctttattccgaaggtggatccatacaaaatatgtgtaatatgtgtgaatagttggggcaaattgggggagagggggaattggaagagttcgggattagccaattcccctcccgaaagagtgaatagtacaatgtgctggagggcagcaaaagacttaaagtgggcggagcattaatgatcagctaatgagatattaggacatactgtacttagtaaagggtctacggtaaacacaaaacaatgagctacgtcagcattagcgaaaaatattgcatttttaactaaatcttgtaagaaaattgactaaattttcaaaaattttgtcctacttttgctttcatctttttattttaagtcagaaattttacagttattttagaatacaaatgttattttaattattattttttgttttttagcaacggcgtctcccgttgtggcattttcatcgctgccaatgtttgcattgatcaaatggaaatggatcacgaagttagtctagcaataagcctttaaaatcatattttgaaaatcaacatttcgccaaattctctttttttctctgtgcctttgctacaggtcgacgttttccacgccgtcaaact

SEQ ID NO: 1525 - DNA, 4515 bp, Heterodera glycines
ttccgatccaataaaatcgttttttaatttcgtgccacgttttttcgaatccaaaatggccctctgaatggaaaataagaaaaagtttttgtcttaaagaatgagggattattaatttaggtttctccatgttttctttgccttttacgaaataaatggctccatttatcaagttataatcagaaacaactcttttccatttcagaacatcacttggacactttccggtttttaaaatgtagaaaattttggccaattcctttacctttgtttgtgcctcaatcactgtttttaaggttattctcggattttcattcaaaattccatcatttttggcaatcaaattttcattaatattttttgcacttaaaatttttggctgaaattcaaattcatctgaattttcttccagttttggttcacaatctttttcatttcccggtatattatatcgagacaaaaaatccgccactttattcttttttcccgggcgataagttatctctaattcgaaactttggagagttacttgatatttctcaagtctcccttttaattccttagctttcatcatgccggtcaaggcactacaatccgtgattacttttgtaaccccagacccaactatatatggcgagaattccttaaccgcatacactaatgccaatgcttccctttcaattgaagggtaatttgtttcgtgccgatttaatgctcttgaaatgtaagcaacgggcccattctcctggaggagaactgctccaatggccttttttgaagcatcacactcaattgtgaatgtcctcccgaatcttggggactgtagcactggtactgttgtgagcatttgttttagagtttgaaaagcatgttcctgctctgggccccaattttcttctattttcccttcaaatttatcttgagtcaatgtctgtagtggtcgagcaatatgcgcaaaattgtgaataaagcgccgaaagtatgtcaatgcacccaacaaagactttaattctgttaggctttttggtgccttaaaattttgtaccacttcgacctgctttgggtcaattctaacacctttttcacttaacaaaaagccaaggtaccgtatttctgacattccccaatggcatttttccaattttaatttaagtccaactttttttagcaataaaagaaaattcttaatatccgttaaatgattttcttcagtttcgctgccaattattatatcgtccaaataaattaacatcgcagccgttagccgtcttctcaacgagttcatgactctttgaaaggtgtccggggccgctgttagaccaaaaggcatcgttataaattcaaaaatgcccaagtgtgaaatgaatgccgtcttttcaatgtcttcctcggcaaccggaatttgcataaatccttgctgtaaatccatgcacgtgtaaaatttctttgcccccatcagatctaacaactcttgaatgtttggcaagtgaaatactctcttttttgtcattttattcagtgctctgtagtcaatcgcaaaacgccacgactttttatcagccttagggaccatcactatagggctagcaaactcagattccgattcccttattatattctggtccagcatcattttgatttgcctttcgatttctttctgagtctccggtgggtaccgatatggccgacaatgaaatggtaacgaaccaggaattaggtcaattttatgcacaattggtccgttatatttgccaatttttccatcatcccctacaaaagcttctgaacactcatccacaattttctttaaatcattttgcgcattttcacttaattttgtaccctcaagattgattctttttgatggtggcctatttagtccgttttccggtaattttggtaaattttcgctccatcgtgtctcgggaggaatgtaatcttttgctgggatttcatctcctggtgatgcattaatttgaaccgattccaaatctgccaaatgtgactttccatataatttaaccgctgaatttcccgcatttaaaatttgtattgttacattcttactatttcctggtgaaaccaaagttcgtccaacaattattccgggatatttaagcttaattcctttcaccaaaaaattttgttccattggaaaacattcgtttacttttgccgaaagtatattttccgaccttggctctaaaacttccgtattttcaagtatcacagacggtggttttggcttttcagacccaattactgacacaatgtttgtccacacatcaccaagtctaactcttttctctcccagggaaattacaccttttaattccataagaagtggtaatccaataagcaaagggccgggacaatgttcgtccactgagacaagcaatacaacttcccattctccgacatttccagtcacattatcctcaattcgaagttttgccatagttttccccaaaatttctatgctcgaatcgtttgccgcagtcaaatttccttttccgtcattttgctccaaaattttaagtcctgcttttcttgctgttctttctctacagtaggatacactagcacatcaatcaaccaaggctgctgttaacaaatcattaagacggacactaatggatgggagtctcctcgggtcattcgtaatcgctgcaacccgtctcggaggaagataatccagaacataagcttcttcatcgattgaatccaattctggtgcggttggtaccgccaaaacccgagtacttcgtttttttgttcccatgattgctcttaacactcttgccaatactgacccagcacgaaccccggcaaatattatcagtctgtatttaattccaatgtaacccatcaatgccaaaagaattaataatggtatcgcaatcagtacatatgatatgcctttcaaataacttattgcttcttggttttctccggaattttctttactatttccaaccaatctccggatctaccaattatcacaccaagcgtttcatttgcctcacttttaaccaatttaataacttccgtaatgtttggtttttcaactaatcgtaatatcggtgtgggcaaattattcatttttgagcgatattcacgaattgtttcctcaattcgcacattgtctgattcaaaaagcgctccggcttttaaaattaacgggttttgtatatttcggtacttgggtcgaattttctcaatattttcacccattttttgtattattcccctttgagtctcattctgcattccctttacactgccattttccacacattccgactttttccccaaaatgctcaactcccttgtgccgggtttaacaaaaaatattgtgttttctgcaaaaactggcgtccattcgtaacactcattaccaatttttttatcccaaaatattttttcaggtgttagtggtgcgcaaaatccaacttccaaattatcaccttcccaatgcgcgaccaaatcatctctatcaaaaatccttctaaccccctcatttggatttatctgtaagattgccctagccaattgcatttgaaatttggtgctctcacatgcctgaatatatatctgatcatattgttgctttctggcttcatccagcctatacatcgcataattaacgcgggtgttcatgttcttattttcctgtcccgctttacccctttttttacttttctcaacttttttaagccattgcgcatcaggcgtggtcactgttgtccgttttctcctgtcattttctaacacttcaaattcaacgtactctccctcattactcccttcatcttcctcatttataaaattcatctccatttcctcaaggctctcattttcagaactattttctgtacgtatctcaatctcgctttcagtttcatattcagtctcaatgttctcacccatttctgacttaataacttcggtggcattccccaatcccgagaaaatatttgaattaattggtgagccaatcattaaacttgtatttgttttgtcagttggcaacactgttatttcactcgcattttgcgtgacttttgtagaaatcgtagtgacagaagtacttgttaccatgggctttaccgttgaagtggttatggtcgtggtaacaatttttgtgaattccgacacgaaatgagattttttgactccatttttgggtttttgtgtaattgttagattttttgttggtgtcgcagttgacaccaacggcctttcaattttgtgaattttaacaggtttagacacggtcaaattttttggaatattcgtcccaacttttgtgacagtaataggcttttttgtggtagtgctttcagaacgacttcccaaatttttaaactctcttccctttgcctgataaatttgctcattctgaggccttttcactgaaattgtctcaaaatgtccatcataattaacatttgaaggactggttgatgttacaaccctttgaacagtaattggcttagaagtggtgcttgtcgt

SEQ ID NO: 1526 - DNA, 4006 bp, Heterodera glycines
ttcagccgccttttggtattttggtatagagcaattcgtgatatttggtaacagaattggggtagtctgaactcgttcagaacaaatttgatattgtgcatttgacagactaaaagtaccaaacaaaatagacaaaaccatcgaaattgttaaaaatgtaaaagtcggagtcggagaacgtcttgatgaacttgactgtgtttgttcatctcccaccatatttattcggtatctctgtttttcattaccatttcctcggaaattaccacgattattctgaaaattgcccctgttaccgaatcctcttccccttggctcattattgttaaatctgttaggatttgaattatttccattccacattcgcttttgaccaagcgggataaaatttggatttcttggtacgaatccaccgttatatccacctctcgtactatttcggttttgctgccaatttcctctgattggcctacggtaatcattccctctgttgtaatttgaatttacaaattccctatttattccttcttcatttgttttactttttatggaaattgcattaatttgttcctttaactcggcaatttggtgtctaaattcatcacctttctcgtcattttcaagctcttccttcaactgaaggaccttttttgcttgagacatagcttctattaggcttttcggcttatccataaaaaataactttcgctttagggaagttggtaagccatttaaaaagtaatgaattgactcattctctctggcatccttggtatacgcggggtctggagaagactgttccacaagctctcttattttatttgcatactcagtcacggtttcttggcccatctttatttttgctaacactttctttgcccacatcggtccatccacctttttagtatggtccgccaatgcttccgttaattcccgccaggttttctttttatccgcgggtatattcataaaaatttcttttgcctccccctctaaaaacaagggtaacatgcgaacacagtcgctggggtgccagttggacgccgtagccaaaatgttaaattcttttaaaaatttgtgaaagtcgcccatggcgctatatttgggtattttgacgcccgacggcaaatttgttgatattttattagtcaatttgccttccaattcatccacttttatttttaagacttggtatttcagttccaaatcattaatgtccgtcattttttcttccctttggctttgaccttttttaatatctctttcctttgtccttttgtctctttctgaattgctcttaactttgtccttaaatcccctctgtaaataatcaggcacttcagaggatttcgtttttatcttttttctgccggccttcaaattcagctttatttttaatcactcttggtcttttcgcacaatttactcaatttgacagtactttaaatctttcactttattgccttcaatttacactccttcaaattactcctctcaattttattaattttcactcttttcaaattacaggcaattttttgtattttaaacgaatggccctttttttaaaacccttttttcaaaaactgaattcacctttttgtccgttcgagagactgcttcaatttggtccacttcgtagttgaacacgccgtccgtaattgccttcttcgaaaagcacgtccgcaccgcaaatgttccgctgtgatcactgaacagtaccgatctcgcccactttcgactgcgtgatgttccgttcgatcaaaaattgatgatttgacaacttcggtgttttggtttagtcgttttaaaattatttggcttaaatgggaaaatcccttttgataggaaaaactaaaagccgttggtaattgctcaagagaaaaaaaatgaataaaaaaaaagtgacgatgcgtccgatcgcgattgttttaagcaaaatgcctaggatttgccaaatgactcttttgttccatcaactgctgactctcgtaattgccaattaatttcttcccgatcatcttatttttggcaacatttgccaattctcattatctttatttttgttaaacaattggcctttgctttttcgcttctgttcctttaagttttcgttaattacttttggccgttaattatttatccaattgagctcaattttccatcggaatttctcgtgatttttcttttatttcaacattaaacatcaacatttttgtcattggtttatccaagcagccccttcggccaacaataggcgcctttatcgtttgccgtcagccgcttttcggcctttgctcgctacttctgcgatcggagcaattaaaagatgaacagatgtgttcggagaattaactatttattttttttttttgaatttgaaaagaagtcggggcggggtgtgaaggaaatggaaaatttaaataattgttcaaaaagagtgaatttgaatggacaagggatggggacattgattcgatggtaaacgccgttaatttccgcacttcctccggccagtcatttcgttccgtaatttaatttattttatttcttcttattgaaagcaaaatttgaattatggtcgaaactgcctgggaaacgaaggcaaattgtgccgtgccctgtgaattgcccaatgtttgttgggagcccgtgctttataccagtcccaacatttgccttcctcctggtgccaatccccacacttttgaaaactacatttcattgcatgccatttctttcctttggcttttccttgctgcttttattggcggattttgttttggcgttgttttgaccgtttcgtctggcatttacaaatgcctcacccgtcgccgttgcaaaaataccgtatatttccaccatatttcgttgactgattaattcttaggccgaaatttctcgtccaactaatcgttccactcgttgcactcgtgggttcgatccgttgcctgtgccattcacttctgctgtttaatgtaaaatcccttttcctaaaaatttgcccaatttcattctcattgattgtttctttagctgccgccgatcattcaacaatcacttttcggccaatttctcagcgggcctctcttttttctttttgttaaattgatccatacgccctttaatttctttaaaatttttgtctgtccattttcctttttgcttcaactccaatcgatcggacaattttcatttaaatgctttttaacattatttaaactttatttaattaatttattttattaaatttttccgtatatgtgcagctatttacaatcagtctcgccaagtctcgtcccctaaggcgggacctccatgaatatagatggggacaagggggtgcccaaaaggtctaagtgccaatgtctgactcttccaatgactaacagcacagtctttattctggtgtccaatgttcaggatacaatgggcaacccccaacccgattcggtctcggggacagagactgatgggcgggagccccgggcaagactgagagagagaagaggcggatgaacacttataaagagtctcgattagtgaaaagaaaggaccgccccccgggctgacattgacgggggaacaatgatcagaggataagagagagaaagagagaattaagaaattaagtatatcacacgcataaaattgaaaaattatatttttttcttgattaaaaaatttaggtttaaaaattttccttattcgaaaaaatataaaatatttaatattcatttaaatgacaagaaaattaattttttgattttaacaatcatttaaatgacaataaaatttgtttttgattaagttttacgtgttttgcttcctaaaaatcctttaaaaaatttttaaatgcctattttcatgccttttttagggattgccttttcatggctttttttcaatttttgctgtatattatagtgcctttttcgctatttttggtgcatttttagtcgtgttttacccatgacaaggcaataaagctaatttgtaacaatgg

SEQ ID NO: 1527 - DNA, 3249 bp, Heterodera glycines
  unsure (1)..(3249): unsure at all n locations
aatttacagatttttcgagaaaaactcggcatcacttctcttaaatacaccctaaaaaaataatttgaatcatacgatagctcttggcttgctctataagcataaaaaatttcagaatatttcattaagttttcagaaagttatgtctattttttaacatttttggtcagaattttttgaaaactcaatgaaattttctgaaactttttaggctaatagagcaagcgaagagcaattgtatgatatcaagattatttaatgtggttatgtttaagaaaagttatgacggatttttctcgaaaaatctgtaaattggctttacgaaacgacctatgtagcaccaattcttttatttatattaattcaaaggtttttttgcccaaatgcttcgcttttcaagctaaataacggctttattctcgggtcctctcttttggtccccgttcattttgtccttttcttagaaatcgaggggagaatggccactcattttctgtttcaattttaagaaaatttaatggaccaaacattttgtttatgtatttatggtttttgaattttcactgtgttattaattacctaacgaattgtttgtatttatgaagagaaaagatatttcaatttagtaataattcaatgaattcgcgaataaaaggacaataaaacgctaattaacaaagaattcattagtaagtccatttttaaagggttaattaagcaaagaattcggctgtgatattttaggcaagaaaatgatcatttgatcggcaaaaaactaattcgaaaaaaaccaaacaatgacaaaaggaaatttctaagtaacgaatgaaacatgtggacacttctgggaatttaaataccatttttggcattttcaaacccaaaagggtgtaatttactagaaatttaaatttgaaagcacgcaatttgttcggtaaaaagagtggtcattaaaacggaaattctgctgctgaattgggccgatgtgtatgacgcccattatgaggaagaagccccaatttggcgtgctgctgacgtaaaagcataaaaaataatttttatgcattttcatcgctttgttaagtttgtcattatcagccatttttacatttgcgtgacaaaataaaatgataagcaacgataaaagatttagctcatcgcactttgcgtgccgtgccaaaagcgacggcggtggtgccaaattggcagggtagggcttcatgaactaagcattgagctgattctcccccccccccccccccccaatttgtcaattttaaatgccgcaatttttggttttctagctaaagaaataaactgaaggctaaaaaaaaatcatgaagtccgtattttaatcccttagatttctgagaatttttaaatcgcatataatcccgaaaaatataattgaaatatagttaatccttataaattatagaaaaaactgatttacataaatggtggaattgagtgttcgaatttaaattcaaaaaagccaggcttatcccatactcccaatttttttctggccccgcatcccacccattctcggtcaagccttttatttatttcctcattatatattttttttgcattattattggcattttgttaataacgacgtcctttgggaaaaacgggggtaaatgcgcaaacaaaactatgccaacaaacaaacaaacacaaaacaaacaattaaatttgtataaaaagccgctcaatgagtacacgcaaaatgacgcgctaacaaatggacaaacattggacaaaaaatgtttttcttttctgcaattgcacagcgcagtgcatgtgtatcaatgctggtgacaaactgacaaatgagcacacgcactcattcaattcattctcgaaaaaacaatcatcaccacagggaaaggtgcccgtgtcattctcgaggggcaaaagttcgccccgggcgattgggggggggggggaaatgacgaaaatgtgactgaaaaaaggaatggcagtggcaggaccggcaaaacgaaacaattttggggaaaattggaacagcaacagaagcaacggggggggggggtaatttgacccaaaaaactgtgtaaatttggtggggaaagggggggggggagccggcacgagggaatgtgcgggggccgatgggcggcggggggggacaccgtttacgcagcgcaccaatcactcattacgcattcattcgtcacatgatgatgacgaatgttgctgctggaaataattatgggaaagaaacattttggagtttgcttgttccttctcgcaagagaatgaagtgttgcatttcatcgttcttgaccgattttttttttgcagtgaacggcgaacgaacgaaatgccaatggaaaaaaacaatgcgggagatggcgggaatttaaaagtggaacaattaatgtgcacagcagggggcggacgaaaaagaatgcgaaatgctttgtttaagtttaataaacgggcgaaagttaaagtgaaaaattattaataaaaaaacatttttttattttaagaataccagaaaaactttgctgtcaaattgaaaaacgttaatttcattaccaaattctgtgttggtttaaatcaaaataatttttcaaattaaagaaacacaaaaaatgttccggattattttccaattatgcctgattttcctacagtcataaatatcggaaattggttggggtgccaattgatgaggagactgactacattcatcgaccactttttggctttttctaatgcctatcccgctgatgagaagagtaatttgttggagcttaatgaattgttctcacattcgaataatgaatgtttgtcacgttgcttctttcactacaatttagctgcttattaaggtgctgggacgttagtcaaaaaccatcaaaatgggcgttagtcaaaaaaccatcaaatggaaaatttttgacagaaaattattcataatttcgcataaaatggatcaaattttataatatagatatttttcgatagccctaagtgttttctattatcctgcaaaattagaaaaaaattctttaagtttaaaaaaagttatgacctgagaagctcaaaaacccaagtttttttgaacatttttagtcataactttcttgaatcttaacgaaactttttggaattttgtaggctaatagaaagcacttagtgctatttaatgatctcaagaattaaaaatgtagatgcttttgaacaanagttatatcaaaaaanntattt

SEQ ID NO: 1528 - DNA, 1356 bp, Heterodera glycines
agcttgttgtggcacaaaagcacagaaaatgccaaagttgggcgcatatgagccgacggtggaactaatggtgcataaaagtgcatttatccagcagataaaagtgcattgtgccaaatacaaaagcagaaacaaacagatttgttgttgaatttgtactgtacgtctaactgaccgatttctgtgtcaaaagtcattagcatcacatcagatgccggcgacaccctataaacatttcttaaaagtggccggcctccagcagcactcattagcggcatatcgcaccgtaccggcgcaaaaactgtgcctttttagcagaagcagcggcaaaagtgccaacgtttctgtttgttatgcatgcggtgttatgtaaaaacaaacttttttggctgttgttgtttttgtttattgctgctttgtgttgtggcgcacgctaattcctcctaatgcccccaatgtttttgccaccaccattaaattgtatgtccattatccgtcaattaggctattattattttgtttttattggtggctgctccaagcagcagcagaaccattaatgcgaaaagcgcctcaggggaaaattatttgcggaggagcacacttgctaacaaaagtgttttcgagtgcttatgacatgccaatggatgaatgggtgattaaaatattagtgattaaaaaaagacaaatgcgccagttaaaaaaacacatttaaaagaaaactcgcattgtacagtatacagggttccaaaataaaatttttcaaaaaactatcaaaaaaacacaaaaatcaaaaacgattatgcgcaaatgtttgtttatagaaaaaatcactttttaaaaccataaaaaaagataaaccctaagaaatggataccttgacacttaaataatgcttacacgtagacctctgctgctggttaaatgatttaatattatgaattcagaatgcttcaaattcattacttgggctgggatttttagtttttttttttacattttttcagcggcttggtttcgctaagaaatgcacgaaaaaaaattagcccgtaaattctcattttaatgccgctattcataactataataatcactattttggatttttttgccacgaaaataattacatcacaattaagtgaattttgtcactatttttattctcaacaaaatataataaaaacgaataataattaaaaaatttcttgctaaaaactcagaaattttgttttttttattaatatgtttatatggcaaaaattcaataatatttttttgaaaaagcgataaaaaaatcgctttaaaacatctgccattgtacgtatttataagacttgtccttatttggaggggttg

SEQ ID NO: 1529 - DNA, 6346 bp, Heterodera glycines
  unsure (1)..(6346): unsure at all n locations
ttcatcgccggttcaaatctatcaaatgaaagtgtgctccttaaaagggcaatttggcaaactgtgacgacaaggtggtataattctcacagtataagcttgtgggaaaagctcttcgttctcggaattttttaagccaaaactttgaaaactttgagcgggattagcggaacacttatcccccaccccgccccgttatcaatcattttgccaagcaataaaaaaagcattcgctaattgctaatatctcccccccccccaggggacactaccctgcggcgtcacagcaccagcattatattggccatttgaccccgcactctttggcttaatcccttcccgttttaccgtaccgcctccatacgctggcgtgccgttgtgaccgaatggcagttaaaaatggcgcttatttgcttaccatttaagtgcaaaacatttcgcgggtttgggggcggggaaatgttcggctgctccacccgccacagcttaaaattgaatttatttcggaaagctaaaagcaaaatgagctcgtcagcattttgtgcgcgtgccaattcttgctgctgcagctgctgttgacgtatgtacccaattttgctttaaaaagtgatttttggcaaaaaaaaaatgggggagagccaacagacaaaaaaaactattaagaaacaaggcaagataagcccaaagcgaaactgaaaatatgtatgatatcattagcaattggtcgtattagagacaaggactttgtgatttcgggtccgggtccgggcttatgattgaccgggccgcctagtaaaaaggcccatttgaccgcgcggggggaattttgggcaccgggaagtttgggcaccaaattgagaaattagaaaaataaaaatattttaattgtctataaattgcaaccatctaattaaaagcatagtaaattttaatcaagttaggaatcgaaagtttttgaatgaataatccgctcaattagccattcttaatttgctactcattaccattcattctatatcaatataataaatatgtattgtggtgtatcataacaaggctcggtctgttcaaaacttagttttatgagtttaaactagggttcggaccccgcccccgcccccgggggcgggacaggtttttggggctcacccccgtccccgcccccgtgactctgacccccgcatcccccgcccccgcgaccttcgcccccgcgggggcacgggggtgaaaaacacacccctaagaatggcatattcgtggaattaaaggcaaaaatttatacaatttagaattttttaaccatcttttacaaatttttatgaaataaagtaaatttgcttatattttttaaaatatttgtggtttagtggttagtgcttcaacattaacaaactttttgctaagaaatgttctggttttggggtagtaccttattttcatctaaaaaagggaaatttctaaaaaatttggctaatttctaacaaaattcatatagacttaaaaaattttccgcttgcggcgccaatcggcaccaccggacctctcccctcgcacattcaccaagtttttttgaagcgttccaaattttttttttttttttttttgacacgtagttgtccaataagtttgagatcaaaatggattcaatttcccgccgcagaccctccgtcattacccccccccccccaattaactccaaaaaacagcgaattgtgcagcaattggacaatgccgcctcagctatcgaacaattccacatggaacatctcactgatgcgcctcaatgggcgtccgcaatgttggaactggtgaaccaaatggtcgggatgtgccgtgaactggtcaccatggtacgcgaacaggacggagaaagaaacccgaacatggtcttcgacgaggaacgacgactgcacagcgtcgtcatcgcgcagttgccagaaagcaacagccaaatgccaacgcagcgtgcaaccgacgacttggcaaatgtcaaagcattgatggaccattgtgacgtcgagtgcctgccgacgcaagtgtacagaatgggcaagaaacaatccaacggacgaccgaggttactcaaagtggaactcccgactaaattccataccaatttgttcttgcgcaacaaaaacaaaattaaaaattttaacaaattttccaaagttttgttgcgcccctccctgtctaaaagtgatctcattgaccgtgcccggctcatttcactttgtaaagctcaacgcgaaaatgacccctcctgtgattacattgtctatgcggggcatgtgcttgcccgtgacgacatttccgccttcaaatccgaccccaattttaaatgtatttgtcataacagctcataaaatcttgcggggaccacccatattgcaatctctaaaaaatttgataccgcaagattttttaaaagtcctcataaggataataattgtttacaaggtgctttagttaatataaggtctatttataacaaatgtgtacaagtagaaactgtttttgaatccttaaatttagactttatttgttttacagaaacctggggtaaaaatgaaaacccatttccttttcattctaattttctacaaaaccataccatttcttacactaacagattgaataagcgtggaggcggtatagcttttgtcgcaaaaaagaatatacaattttttgtaaagttttctgaaacaaaatttggctgtgaaatactaatattacaatttcaaaattacaattcgctgaatttaatccttgtctataggcctccttctattaatttaaaaaataccaaaaatctttttaaattcctggaaatttacatttcagaaaattgttgtttacttggggattttaaccttggaactaaagatttaactataaaaaataaaaaaccgtaccctttaagtaattttggtactttattctgtgattttttcaacaaatataatttgacatgctgcattaatgaacccactagggagcaagccttcctagatttaatcatttcaacaaaaactgaattaataaatgcggtagaagtaaaaggtggacttctagatacagatcatttaacaattctttttaatttttgtattttaaagaaaaaggcagtcaagaaacaaattattcttaggaattttactaaatctaatacttttctatttgatgcatatttatcctcatttctccctcaactactacaaaaattttatacagttgaggataaatatgctattttctttagttctgttcgaagaaaccttgaaattaatattcctgaaactattttatctattaagtccgccagaaacttttacccaccgcatttattggcttcaattagggaaaaagcacgtctatataagctaatgaaagaaaatagaggaaaatatgaacctttatataaaagtatctccttacatattaagactcaaataagaaatattcaatcccgtaaagaaaataaaatactatccggtgataagaatagattattttcgtatcttagaaaatactttaagccagtagaggatccaccagttattcaatataagacttcttttatttctgactcaatttctaaagcggaaatttttgcaaaaattttttctgaaaactttactgtaaataattattctcttgattttgatacttctttttcttctccaacaataaacgacgttgaatttaatattatttctgttggtaaagtacttagaaccttacctaacagaaataacacatcaccggacggtattacctttagactgttaaaaaattgttctctttcgtttactccttttgttactgaaattttcagactctcccttgatacaggaaagcttcccactatatggaaacaatcgattattatccccttgcataaacaaggggacaaaagtaaccctatgaactataggcctattgccttaacttgttctttatgcaaaattatggaaaaatttattgtttgggctatttccgattttcttttaaagaacaatttattctccgaacatcaatttggatttataaagggcagatcaaccacaacacaactaatttcaacccttgaaaattggtatgatggtatttataataataagaatatcgattgtgtctatatagattttaggaaagcatttgatgttatcccccataatttacttttatataaggttcatagaatcggtattaggggtaaaatcttaaactggttatctgactttctttcaaaccgtacctttagggttcgggttgataatactctctcttctgagtataaaatgagctctggcgttccccagggttctgttcttgggcctcttttgtttctgatatatattaatgtttacctgaattaattcctaaacaaatttctataaaattatatgcggatgatgtcaaattatattccgtacataaaacaaaaactgatagaattgctatgcaccgtgctttaaatattctctctgattggtctaagaaatgaaatattaaaatttccatcaataaaacttttattatttactttggaaagaataaccccagggaacaatataaaattaatgataatgcaatttgtgaagttgaaactatccgtgatttagggattcttattgacaataaattttctttttccgaacacataagcaaaatcactcgtaacgcctactaccgtatgcgtttacttttccgtgttattaaatcaaagaaaatagcaatttggaaaaatatttttgttagttatatccgtccacttcttgaatattcccctgaatcttggaatccgcaacttaaatcccatattatcaaaattgaaaaatttcagaaatattttactcgaattgctttcagaaaatgttgtctgccaaatattccctatgaccaacgactccgattttttaaattagctactcttgaaaaaagaagaaaaatttttgacctcctaactacttataaaattctacatggttttacacatttggacccaaattcactgtttaagagaactaacttaaatactcgaaacaagtcttttttccggttaaatgttaaattacaatttaaaaaatcttcgaaatcttttgttaacagaacagtcaaggcctggaatgcccttgataaaacattaatgtctagctccttaaacacctttaaaaaattattagaattgactcttgattctcaaagcaccaatgtataaagcaattattaacttttgaggcatctcattgactctgacttccattttatttttttttcattattgtttgttttaacctgtgatctcactcgatatttattcacttactctgagactattttactgtgatcagtcatcagagtaagtggtctccgcccttctgatggcaattttttctttatcgataaataaaatcaaagttttaccgtccatgggtggcgcctgtcgatcactaataaaattgggaattttttacggcctattttgggcaaaatctgtaagaaagctgcgcagaaaactcaaaatttgtcattatttttacacattggccatacttaatatttccccggnncggcgcctatcgacaccactgggatcgacattaatcctgtagaattgagtcaaaaggtgtgacatttagtcattttttggtcaaaatcagttaattaattgataaaatttttcaaaaaaaatttcagacggcgcctatctgcatagacggacccctttgttcctagttttcgaaaaaattgcgccgaaaaaaagcattttcgaaaagcaaaaaatagtcaaatttatcgaccattaacaggtttgatttccaatctctttttactaagaaatccgcaatcccgcgcgggatcccgcaaatttaaaatcgcaggattaatccggccggatccggtcctcgcaaaaatttttcgaattccaattctgcaacaggatccgcaaatttgaaatttccgggctctaacaaaaatgcaataaaaacgaaaaataactaaatttagcgattttcgagaaaaatttttaaagaaaaattatggtttttatagtaatggcggtgccgataggcgccgccggaatttttttttttcgaaaatttcagtgcaatttattaacagaagttgtacaaaaattactaatttttgaaaaaaattcaaaaaaaaattttccgaaagtttccgactttttattcaaaaacttcggaagtcggaattccgtgccatccccgctatatatgacccatgaaccgtaatatggaacttcgtcgttgattcaattggtttggaatacacatttttttttaaatttaaccgtttgttttaatttcgtttctttttt

SEQ ID NO: 1530 - DNA, 3691 bp, Heterodera glycines
tctgtcatttattaattgttcatagatcaccataacccctcttaccattttactcattaatcgtctgaatttgcagttgattttgtttactcattctttttaaatatatacttttttttgtcaggacatattctttcaaattctaatttaaactaattctatcaataaattatatgtaagaaaaatggcaaaacacacataaatttttgaacacgaattatgcttttcccattaaaattcgtttcattcaattcactttttatttatttacacaaattagcgcgttgactaattcctgcaaaataccttaacaattattcgtaactatgagcgattccgggcggtcatctattattcgaaaaagctcatcttccaagctcatccgacaatttgccgtactttttttttattaaaaatgtttcatgttaatcattcattcactgttaggagatgaacattcccaccaacggcgatgaatatttggaccgaggcgagtcggctaaaagggagaaacgattcgtattcgaatgtgcgtgggaagtggtgaacaaaggtggggagaaccgaacccggcatcgctactctttcgagagttcttaaattaagttggaggcatttacactgtcctgcggacgaaggcgccgattagcacagacgaactaggcgaccagtattacatgatggttggtggacagcaccaaatggaaggggaatcaaatcaacaaacattacacgaacccgaagggttcatggtccattaatatatgtttcgttcgatactctttttggaattttattcccgagttcgaacaaaaaataattaaaatttaagggtccctacgtggaggaaagagttcgcctggaagtggaggtgttggagccggagactgcaaatctcaagtacacgttggaccaaatgtatgactggggtttccgcgttgtgtacgggcggtggctgattgacggatatccgaaagtgttgctgtttgatgttgggtccgccgcttggaaattggatacatggaaacatgaggtgatagataacacgccaattatttccttgctttttcctctggtaacaactttatcactaatttgtgtaattttttgtttactattttgtccaaaaaatgaccattatattactttttgtgttaaattttaaaaaatagggaattttgagtccgacgttgcggacaggcgcctcgggaaaaaggaaaattttaaagaaaaaattagccaattattccttgctacatgtcaccttttcaaatggttcgtttaacgagaaatgaccattgttggtaatttaaacaaaaatattgctttttcacgtatcttttcctattttagttgtgggaaaagtgcagtatcggtgttccgttcctcgaccgcgaggccaatgattgcatcattttcggctttttagtggcaatatttctcaaatcgtttttggactcatccgaaaatttccaaccgaatgttgctgctcattttcacgaatggcaagctggcattgggctgattatgaccaggcaattaatcattcactatttattccatcaaattccaacattttgatgtttttcagaatttggaagttgaacatcgccactttattcaccacccacgccactcttctcggccgccatttgtgcgcctccggggccgacctttacaataatttggccatggttttattcaaagtgtctcttttaattccataaagtcgcattttgcagtttgacatcgatcgagaggctggtcgtctgcagatttaccaccgttactgcttggagagggccgctgtgaacatggcgcacgtgttcaccaccgtcagcgaaatcaccggcctcgaggcggaacatttgctgaagcgaaagccggacactctgacgcccaacggactcaatgtggtcaaattcgcggcgctgcacgaatttcagaatttgcacgctcaaaacaaagagaaaatccacgactttatcaggggacacttttacgggtgcttttttccatttttaattacgttttcatttgttgtgccttttaagtcacatgaacttcgacttggacaggacactttaccttttcaccgctggtcggtatgagttctgcaataaaggcggcgatttgttcatcgattcccttgccaagctgaattacatgctcaaagttggtcccccccccccaatccttttttattgtaatttattgtttccattgcatttacttttgcaccaaatgttaatggtttcagacctctgaggacaaacgagtgaaaggtgtgactgtaattgcctttatcatttacccggccaacgccaattcgttcaatgtcgactctttgcgaggccaggcggtgtgcaaacagctgaaagaaaccatttcgaaggtgaaggatagcattgcggcgcggatgttcgactcgtgtttacggtaagttgtgatgggctgcaaaataaattttttggaggaatttcccaaaaaagaatttttcttatttatttttattaatttttaaaaagactataatttttcctcaaatgttagaaaagcaaaactatagttttttttaaatattttgtgaactgcttccctttgtaatgtgtgtgtttaagacgtatttgttttcagcggtagaatcccggacatggaggaacttttgttgccggctgaacgtgtccaattgaaacggtgcattctctcgtcaaaggtgttgtttttgttattcttactatttcctaaattcccaattttccaaaattcaaattcaccattcaatgaaacacacttgtttttgtttaagcgtgacactttgcccccgatttgtacccataacatggtggacgatgccaatgaccaagtgttgaacgctttccgtcgttgccatctgttcaatgaagagagtgaccgagtaaaggtacccattcgaatatttcatgggaatcggaatttgttataagactttccaactttcgacaggtgatcttccatcccgagtttctgagttcggtctctccgctgatcggattggattacgaggactttgtacggggctgtcacctcggcgttttcccctcttattatgagccgtggggatacactcctggtaaatattttgctgtccggacaatcagtcgatttctacttgccatggccattttttattaaaatttattagcggaatgcactgttatggggattccgtcagtgaccaccaatttgtccggcttcggctcgtttatcgagaaacaagttcctgaccacgacaactacgggctgtacatcgtggatcggaagaaccgaagcccggacgaatcaattcagcaactttcctccattctttacagctattggttggctattttgattatttgtcacttttcaactgcaaaatgttctcttttagcgcattgtcgcgccgtcaacgagtgatcattcgaaatcgggcagaacgcgtcagcgaattgttggattggaaaacattgggcggagtgggtcaattcaaccatttacttttgcactgattgactttagttttgtttcttctttagctgtaccgcgaggcgcgtcggatggcactaaaacgtgtgtacccagactttgaaaaaaagaatgtcggaacatttatcaaaaatgcctcggccacaaaagccactagcaccccggcacacagtgacgaggagag

SEQ ID NO: 1531 - DNA, 10082 bp, Heterodera glycines
  unsure (1)..(10082): unsure at all n locations
atttggggctaaaatttgaaaattcatatctagcctaagggttgaccaattttgagcaaataaagctttaaaaatagagaaaaatcaggagaattttatgggatttatttatgttttctaacatcaatatgaaaaaagttattccagaaattctggaaattttagatttttcagaaaaaaattcagaactcccttctgaaaagtcattctgtaaaagtaaaatactacaaaaatccgcaatttttttctctataaaataaattttattttacatttttatctcttttttgcgaattgttataaaaataaaagtgatttttggtttcgggaccataggggggtgaccaggatttttgggtggaaaaattttttcaccgaaaatattccaaaaacatgtctttaggggtattttatgacgctgatcacgaatacgtgatcagattttacttttgacatcgttcagacctcagaatccctgtgtgattggggattctgaggcatcatttttttgggggggggcgaagttcgaatccgcgcggtgtatattattttctatgtatttttgggttatttttaatgttttaattcatttaaaagagtgtttttttcttaataaaaataaaattttttaatttaaattaaattgtttttttgtgaaaaaatgttttaaattaaaataataatttatttacttttattaaagaactcctgtattttttaaattagaatttgtaaaattaatttcaatttaaataaatattcaatccttgtacatttcaaactttctttttaattaataaaaggaaatttattttattttttaaaatctattaattacattcaatatttaatcttactttttaataaacaatttccttaattatttaattttaaaaccatgattgtaccctttttaaccattattgtaccattccaacaattattttacctctccaacaattattgtacattttcaacagtggttgtacctcttctaatcactgttgtacctcatctaatcactgttgtacctcttctaatcactgttgtagctcttctaatcactattgtacctcttccaacaccttttccaacaaatcaccaaatttaaaaaacgggcgcgaagcgcccgtacaaccagaacaaaatttgaaaaacgggcgcgaagcgcccgtcgagcccaacaaaatttaaaaaacgggcgcgaataattttaaaaattttttaaaataatttaaacgtttttttgttaataataaaaaatttatttatgttttaaattaatttttttgtgttgaaataaaaaaaacaagaaaattcattagatttatttttaagcaaaattagatttaaaaaacacttgtacctctcctaatcactgctgtacctcttctaatcacaattgtacctcttctgatcaccattggacctcttctaatcactgttgtagctcttctaatcactgttgtacctttgagaccgttttttaatattattaaaaggttttttatttatttccatattttatatttttttcaattcttcgctttttgcatatatttttacattttcacatgaatgtcagactatgctctcagtttattgacacatttctcgtgtttgtgatggtgtgcgttattgattaatctgtttcttttttctctatgaaaacttttgatgggcaaaaaaggtactcaaattttcaaaattttccggcctcctgttcccaataatttttttggaaataaagcgtgccgaaaatattttttgtaatttttgtcattgaaataaaaacttttttaccaacaaaacctacaaattattatattttttggtaaattaggattctggaccaagggggattgacaggctttttgagttgaaaatttttttcaccaaaaatcttccaaaaaatgtcagttgcacatgttccaatcactgctttacctcttttgttcactgttatacctcttttaaaaattttccgaattctcgcctttgcacctaaataagttaggaaaaacctaaaccgatcatttccattcttttttattaaaattctccatatttttctctttcttttgttattttttccaggtttcttccttttttctgaccaactttttgattttttaaataaatttcgaattttttttgtcacaatttgttttattttttggagtggaaaataaaaaaatattttattcttgatttcgaattagccaatacatacctaaaacatttgatgggttaatattgatttttttaaaatttacaatactttattcaaattcaggcccacattatatggcaaccaatttttcagttttttgtcatttttaatgaaatattttgaatttgttgctctttttaaggcattgttgacattcaattcgatgacaatcagcagcaaatgccaaccgcaacaccagcaacatttggtggtgctgctggtggtgatcagaataagcaaagctgtgccaacggttcttccaacacttctccggcacggcatggacatcaaactcagatgacgacgacgagtcgaagcagtacaacgccaccttccacggcgccgtcgttgtgcccattgaatggcgtcggttgtgacggagaagcggcgcaacaaaaacaggacacaattcagccagccaattgtgttgctggtgcatcttcatcatcatcatcctcgtctttttcagttccgaatgaggtaaaaaaagaaaaaatggggccctaaattatggacgattttacttggttttgtgagcaattttttgcgtcttaatccggctcaaattgttttttttattacccaaatggttcaaacttcttaatgaaaaaaagcattaaagttttagcatttcgctcaaaaagcctcaaaattttgcaaatctttgtccaaatttgtaataaacggcctaaaaatggaaacatttggacttttttgtgtgccattttacggttgtaccccatttttcggacaaaaatcgctgcggacgacggaaagccaatgccaaccgatggaagaagccattgccgacatgccaatggatgatgatgagaaggaggatgaagacgatgatgacatcgatgtcgaaagcgtgttggttaaccagaaactgcaacaacaaccaaattgcatcaccaccacttatatgccgttaattgacaccgactcgtaatccattttttaaattttatttaaatttcgaatttgatccgcaaaaaaacccacgctttattagcgattatccgacattagcgccaattataacgggttaaaatacatgtttttttttgtttatcaattaaagtttatatttattcaagaaaaaataggcgatgtttatggaatttgggattgaaaaaaaacagaaaaattttgagtccaattttggacattgacgcaaataaatgtatctcctccctctttttttccacccttagatttcaaaaaaaaaaaatttcgcagaaaattacaattttttactatcatttattacatatttccaaaaatgaacagcaaatctttaataaaaaaagaaaaccaaaaatgggtttgattttggtttaaaaacacacatttaatttcccatttttttgccaggatttatttgttgcaaaatttgccttcgctgagccaagaaatgctttaccgcacgccggcattgccgttgaagacgcgctcaacgccgctctattcgctggtgctcgacttggttcggttttgctttatttaaaaaaaattgccaggacgaaacgctggtacactgcagtgtgcattttattggccaaaatctgtttttcaatgcgaaataaatgcaatttggcattttttttttttttggaattgaatagattttttttaagtcttttgtttgttcaaaaccctcaaaattagctctttttttcttaaaatttgctttgtttttttaggcccgcaatttttactcagtttaaaagccgaggacgacgacgacaaaaataacaacaatcgccaactgtcgcactgatgttttcggtttgcacatttttttcacggttaaatttaaccaaaaaccctgagaaatttcaattcattgggggtttcgattgaattaaaaaatcgctacattttttaaactttttttttgccaaatttcgtttgaattttttaaaaaatgccaagcaaggactacaaactttcaaaatgaaacccttaaaatgcttccaaattgttgtcaatatcatttttggccaaatcttttgtctataaatcagctaaaatgccttggtctttcacccgaggcacctaattttcaaagcatcacactggctaaaacaaattttatggccaagactaaaatttttcgtgttttccgcccaaatccgatttttttttgttcaattatgagccctccgatttcaatggtgaatttatttttagcattttattgcctcccccgaagctcgaaggagtgttggccgaattgaacggcacaatttgcgtgttggagcaattgttggagcagcgacagcgcatcctacaaaaattggtggcttttgccgggaaaaaattcttaagaaacttattgttagtaagaaattttcaagaaaaaatttttttgaaactttctgtgatttttttgatgaacactaccaaatttttttaaaaaattttttgaactttttttactaatatttttttaaataatttcttttgtgaaatttttaaagtaccaaaacttgaattttttttgcgttttttgcgcctaataattgaaaaattatggtccaatttttgttttttttgcatttgaaacccctaacgaatttttttttgcgttttttgcgccgaaaagaatttcatgcattttttataggccaaaaactcaaatttggcctaaatttttttttgtgccaaaattattttaaaagagctttaatggattttgtaaagtagcaaaaaatcaattaatggtttaatttttatttatttatttttgcttttaaccctaaggggtttgtttccgaataattgaaaaaatgctttaagttcttattggtttttttggttttaaaacctaaaggggttatggttcctgataattaaacaattggcctattttttggcctttttttgttttttaaagccccaagggcttatggtaccggataattaaaaaactgtctattttttgtcttttccctaggggttttggtaccctattattgaaaaattgatatactttttgggttttttttgcttttaaaccccaaggggttttggtacggaatatttgaaaaaatggtctaatttttatttttgctctaatttttgggtttttcttaatccagacgccgtttcttttgtgttggccaccacagcgcaggagttgttctcgcccgatgttgctacgatgatttcgtttgccatggttcagttcgcttttctccgcttcctggtcatgttttcgcttccgtcacttttggtgcactgatcggactcatttcggcgttggtaatgcaaaattttgccgttttccgactctaaaatggcatttttgtcgccaatcaatgccatttttattatttttaaaattttaaagaatttttggtgtttttgcttttaaaaccncaaggggttctggtaccgaatatttgaaaagatggtctattttggttttttaccaataaattgaaactttattatttttttttgtgaatcgaaaatatccaaataaatccattaaatgtgcatttgcaatcatcccttcattaactaatgtcaaattcttttcatttttttgttgtttgtaaaattttgacaaagtttctttttagtgaatttcaccggaaatgcccatttatttttaaaaattttttttaacgataaaaaaatcatttttgcctattttgagcgattttttttttagtgaatttcaccggaaatgcctatttattttttaaattcttttttaatgataaaaaaaacattttgcctactttgaacgaactttttcttagtgaatttctccgtaaagtgcccattgtttttttaaattcctttttaatgataaaaaatttatttttggctattatgaacgaactttttcttagtgaatttcaccggaaatgcccattgattttttaaattgttatttaatgataaaaaatttatttttgcctattatgaacgaagtttttttagtgaatttcaccggaaatgcccattgattttttaaattcctttttaatgataaaaaatttatttttggctattatgaacgaagtttttttagtgaatttcaccggaaatgcccattgattttttaaattcctttttaatgataaaaaatttatttttggctattatgaacgaagtttttttagtgaatttcaccggaaatgcccattgattttttaaattcctttttaatgataaaaaatttatttttggctattatgaacgaactttttttagtgaatttcaccggaaatgcccattgattttttaaattcctttttaatgataaaaaatttatttttggctattatgaacgaagtttttttagtgaatttcaccggaaatgcccattgattttttaaattcctttttaatgataaaaaatttatttttggttattatgaacgaagtttttttagtgaatttctctgtaaagggcccattgattttttaaattgttatttaatgataaaaaatttatttgtgcctattatgagcgaactttttttagttaatttcaccggaaatgcccatttatttttaaaattttttttaatgattaaaaaatcatttttgcctatcgcgtatttttattaaagtgccagattttttaaggtttttggtacctcattttttgatttttttttgcaatttaaaattttcgtgacttttttagcacatgcgcaacgaagttttgaatttggatggacattttcccctttttggcctttctcaactcgacctcaaattggcactgatttcgcccctttctatttgatttatgtttcagggttgcttttgccaaattaagccacttttctaagcgcaaatttacttatttactaaagttattctttcacaatttcagctgggtgtgccacgaagtttcgatggacgttttgccctgttttgaccatgctcaacttggcctcaaattggcattgatttcgccccgtttcgattcgctggtggacaaatatttcaatggcaaaagcggattgctgcgcaagtttttttttcacaaattaaccggtcaaatattttttatgctctaaattttttgattgcattcggcaattaaaaattgaaattttcaaaatttgtattttcaaacctatgaaaatcaattattgtgaatttttgaaatctcaacattgttgtggtgatgctgtttccatcccgctaattttttgtgagattaaaaaattctctcaggaaactgctgtatttggccgattaaaatttttaaaattcatcgatttgaccatgatttgaataaaataagaaaaaattttcagatgcacatatatattaaattatggcaaagtgtacactaagtaaatagttttagtcacccaaatctgaggttacttaggaaataagtttcgtacactttggcacgcataagctccacaatagtatttaagaagcctttactcttgattaatatttaagtaaacatttttgttttcaaatatttgaacaatcacttgtaaaggcttctgtcctcttattcattttgagattcacattttttatttgtttcaaaatcttatcggtctgctttgcgaccatgatgagatttttgcacgtgccggtctgcttagcgaccatggcaacatatcggtcagcttagcgaccatgatatgtagtgcaaacgccggtctgctttgcgaccatggcgaggctggtctgctttgcgaccatagccaaccgtgtcggtctgctttgcgaccatgacacagtgccggtctgcttcgcgaccatggcacccatatcggtctgctttgcgaccatgatatggaaagcaagcccagacttgctctcgcatagagatgcatgtggctgggccgctcaatggtggcgccatgaattccttatcgttactggccaacatccggtgcgaagctggtcccgcactttgtcaagaccagtggactggtgagaagtaacgtaggaaatctgagttcatcaaaataaatgtggactgccttttgaggattgtggttcaatggccagtcccttaaaggattgtagttcgcactatgctgatctttcccctactggggaaagattcggcaaaagatgcataatttttatctgcattcttaatgggatgtgtgagcgatcaatttctgcattcaatgacctttgtgcgaaattggacatgtttgattcgcagcggcatcactgtggcaaacaaggaagatgcaccttaatttttcacatttcaatgtttttgataaatatttgattaatgtggtttaatggttgttttcccaaatattttgccgcatgtacacatcattgcttcatttttgttttcagatgccttcaaaacaacacgctaaaagaaagaaggagcaagagcggtaccaaaggcagatggagcaatctgtcagcccaggtcgctcacccgtccctgacggaagtgcagatgagaatggggtggcatcacacccgggcatcacaacgcccaatattagtgctttgcaattaagcacaccggcttcttcctttggaagtaaaagaaagggaagacccccaaaagccggagcggtgtcaattatgacttcccaacacagtgtgtcatcttctgacactcaaattacatcggccccccaaaatattgattcatcgcctcgcaaaaaaagagagaaggtcgacgaagttgaccatcacatatctgctaatgaatcaattgcttcaacacctgtttccaggcaaaaaagccgtggagggcggccgaccaaaaagagaggcggcccaggcaggggtcaaacaaattattcaatgagcaatggctcctcaatgaaccacggctctgaagctgccacatcagtggtcgatttgccaactgtgcctgaaaagataaacttcagcacagtgcaaattaatttcgccacatctcgaaatatggcctgtaaaattcggagatgggctgatattggcctttacgaatgtgatgagagacgctcaggcccaagattcattgaaacgtgctggaatgatctgacacagtttctaaatgatggctttgttgtcgaatatttggcatacttggcaagcatatcacaacgaaaagtggtcgttgttgatccaatggtgtggcaaatgggcatagaccgagtcatgccttacaaaaatatgacatttgggtacgaccctaatgttccggcagaagttatacttttgccagtacatttccctggacattggactctcattgtccatgatgttcagtgcggtactcattttgccgattctttgcctacaccttatggcaggttggattggcaactgacggataaaattggaaagatcatatctgacattttgccgtcagcagtgttgaccgggattgttaatgccgtaaatctgacggtccaacacgatggaaatagctgcgggtactttgtgtgcctatatgctgaatcctggctcatgaacaatcgcacgtttgttctgcctgatttgtccataaattatgaaaagcggcgcctattgtggcacattaacgagctttatggcacagacaatgtgccataccatccgagggaaggggtaccaactccttgcccaattgtctgtcgacaggtgcagtcgacatccaagaccgctgagccaatggaaattgatgagcatgatgacataacgatcatcgaacctcagacgagtgggcaggcagttaatgccgtttccacccaagcccaagtggcaggtgaaaaccaagctgacacgcttggtttggtgtcggatttttgcgtcgtgcaagagccaattgcgcaggctgacgatgcaatcttcgtcaggccgaagacgcctccgaggcgatcatcgcgcataagcagac

SEQ ID NO: 1532 - DNA, 1206 bp, Heterodera glycines
gcgtccgggtttcagaattgactgaaatggataccagattcgtggtaagtgcccccgacaacgcaaggaacttgtttttatgacaataaaattttcactgacgcattttccactgacgcattttccactgacgcattttccgggcgccaatctaagcaaataattgtccaaatgatatcaaataaactctttttttccttcaaaaattccagtcattaattattattttttggttgaattttatttgttttttacacatttatttgtacagaaaacagcaggtgcagaagcattttcattgacagacactttcgttttcctgctataaagcttcatgtagattttttaataaaataaatatttaatttttttccttttcctttattagaaattttgccaaaattacataattataaattatttatcgtaaattaccaaaaatttatttaatgcttaacattatattttggtttatttttaatattgccaaaggcatacattttgtcaaatgtttttattattttaaaattaacaggactaaaattgactttttttaattcgaattttttttaaataaaatttgccaaaatattaaatcattcaaaaattattatttttccaaatgcttatacataatacattttgcaaaaaaaaacattttaaatgaaatcgactaaaatttcctaaagcttttttttgccaaatggctttacatcattcattttgctgatcccttttccacacccaatcattcactttccctccccccccccactttttcgtcatttcctcgcttcatcaatttcctcctcgtcgtcgtcgagcagccatttttggacacaacgattgcacttgctgatgctgacggggaccggggggatggccggggacggggaatgctaaaatgcgcttttccccgtccattattattcacatttgatcgtccccgtcccggcccatctccattacatacattcccccccccagctaaagatgctaaaatgcaaaaagcaagaccccccccccccgaagggcgggtgtctccatcatcaaattattttccaactgatcgcattatgtgattttatcgacgatgcgatcagcggcggactggggagaagcaaaagctaaagcagaagcatggggaaggtggtgtcgtgtggtgcttaatgcacagggcttgtcatcatgggttaaggggggggg

SEQ ID NO: 1533 - DNA, 3999 bp, Heterodera glycines
  unsure (1)..(3999): unsure at all n locations
gtttttttttttgctattttatttctgtataatatgcatttataaatggatttataagtctggcaaattggtcggaattagataagtttaggtatatcagttttttttttgcacgacaacagttggataaatacgtaaatagcttattttattttgaatattaaagatgatcaaaaatatttgttttaattttctaatcacccaatcaacaatttttattcattccatattacgagaaattaatttgggcgcggaaggggtaattaattgagtaattatttaatgaattaattgtttccagccgtcctaaggcgactatttatagtgttcgccgttccattatttttattgcccttttaaaaaaaaattttagccaagaaaatcatcttttaaaatcaaaaataattcttaatgcatccaatcattattatttgaattaactcaaattcaattaatttttccaaaattagaaaagcctaattgaattttaatattttcattatttaacaaaaaattaaactatgaaaatataccatgaatgagcaaaatttataaatatgtatgaaatatactcatgaaaaaggattttctcttaaaatttttgatttcccggaatagaaaacccttattaattataatatttttattatttcaataaaaaatgcaaaaaataaaaaattataaaataaattttcattaattatctaattagaaagttcctcatttcattaaatcttttatcatttcaatcaaaaaaaaatgcaaggattgaaaaaaataataatttaattaccttaaattagaaaatctctccttcattcattttaatattttatccgctaaaaatcgaagattagataaaatttagaaattatttaaaataaaaatcccccttttaaaagatttattcccatggcaacacttttcccttaaaatgcgtcccccgtccgccgcttcgtccgttggccatttgtcggcccaaactgaccaccaccaccacccgtccaatcatcgacaacattgtccaccgttgcctgaacgttttgtggccggattgcgttgcgcttttcaactgcttgacatcaacgggagcggaaaagtgccatttgaacaggtggaatttgaaaaaaaaatttcccatttttcttacccatttttcaaaaaatttattttcgaattttttgcgcagttttcaccgaatttctgatttttatgtgccattttatggcagttttaaattttaaaaaaatggaatgttaaagaaagacgggctgatgaagaggagggggggggggcgtaaaatctaaaaaattacggattttttaagagttccagtaaaaaaaagggcgggacttgtcctggtcatgatgacttactctaatttacaaaatttaatatatttttcttaatttattccggcggcaaatactgcagtcaattagtagtgactttgttagttttggttttaattaggcatttttaaccaattttgtaaatttaattcaaatatttcacaaaattcttgtgaattagtccttaaacattttaattttcctatttttcccatttttttaaattatttttcaatttttatttttcgaatttttccatttgatttgtttacatatttttgcattttcataaaggtacacaatatgtatgacatttgtttgcccattatttcccattcggaaatggtcgcgctgacctttctcgtcggcttggctttatttgcccttttaatacttagtaaaagggaccattttggcatttcatcaaaacactgaattattcattttcggcctcttgggagttaattaaaattttgatttaaataaagcatttaaaccaaaagattttccataaatttttccatcaaaatttttaataaattttaaattatcttaaatgtttagtcaacaaaattttgcttgaaattaggtgtacttctcgtcattttaaattaatttaatgattcaaattttctttttaaataaaatgcacctttttcttgtcaaagctggtaaaaaaaataaaaaataaattagtaaatttattaatatatttgcctaattattccgaatttaaaaagaacgttatttaaacttaaggaagttttttttcgatttaataaatctttttttttatcaaattttgagcattagtctcaaatttttttttttttaatttaattatttttaaatttttattagatttgcaagaaatggccagtgcattttgccgaggcaccagtgccatcaaattttttggaatgtcttcgtcgtgtgaaccccagcgaagaaatggtcacttttgagcagttcatcaagggtgcccaattggcactcagagaaaggtgcgaaaaatattaattaattaaaattttttaaaattatttctatttaatttaactcagaaatttaattaattaaattattttaattaacactaattgttttcttagaatgaacacggcaggccgattaaagagagtccaaagtgaaggcaaattgtttggcagtgatttggaaaatggcaaaagcggagaaagcaacagagcaaaaagtaaattatttaattgcttaaaaatcaatttaaaattaaaattcataaaatctggctaataatgcttgtcttaattttattttaaattatatataaattatataccgtatttaatgaattagacccctcaggggctctagttttcaaccgcctttgcatgggcggctttatttcagagggggttctaattcatggaagggattctaattaagggcgcgggggggggggctctaattctgtaaatacggtactttgtttgataatttttaaaagattatttattttaaggaaaaaaaaatcatttttttattttcaatttttacgtttttacctttccgtatacaaattcatattttaattacggtttccgcttccccatttaatttatacaaaaattcatattttttcaacttataaatattacgattccacccaccccccgactcgctcccattatatttatatatttaaatgtcaaattttgaatttccatttatacaaaaggtcgtggtgccccgtcctcaacccctcctcctcctgctgctgctgctgctgctggcccacatccgttgcgcagcaatgggcatccgtccatgggtttaagtgggcgcaaattggacggacgcggtggcgctggcggtggtggcgccggtggcgatgcggccgcggccgcggcggctgatcaccgcatgcaccggctggtacgactgaagagggccagccggagccagccgcagctcaacgaattgtttgacggggcaggacagcaacgaaaaaatgatggtggacaacaccagcaccaccagcagcaacaacaaaacgcagaagcagcagcattacgaaggtggacgggggggggggaagaacattatatgaacattaataataattataataattgattcttattcaattaaataagtgggtgatcgatgcggtttgtcgccctagtctcgattgccgagaattttctcgtcccggattccggacccaaaactttttgaaaaatctagacattttttgttcctaatcccgaatcctggtaccaaaatattttggaagtctctaccaaggatatcggcatttttctcaccccgagtcccggatccgaaaatttgtggagtcacgacctggatcccgactttttcatgtcccacgacaaccctgctgggatgttggatcaagggtttagggggaggtcgatatcgattaaaatggatcggaaatttcatgatcatgctcctttgcttagcaaattaattaactaattaattaattaaatttttttttaaaaataagtattttttccagaacgaattgtcttcaagaaaatcagtttaattttcactttgncgataaaaatggttctgcttcgcccgantaagatggaaatgatgtngaaattgtttatcgatcaaaaaaggtaggtgaaaa

SEQ ID NO: 1534 - DNA, 2019 bp, Heterodera glycines
taataaagatttcaaagaaatataaaagaataaattcaaatttattaaaatctaaattttttacgaatattttctcagataatcacaaaatttttactaatattttttgccccttttttatcatttttaactaaactttaattacatgcagtgacgtcaacaattatgcaatcatcgccattgtcagccgtaaatggtcagaatggaattcataagcgacaaaattcggcaattcaatcaaatggcaccacaaataattatgccgacgaattacaaccccaagtggtccgttattcatttaaattttattttatttatttttaaatataataataataattgatataggcaaagcatgagcgattgctggatgaagagttcaatattgtcaaaatgggaacaaaaaaagcgcaggaactgatggattggtatgcgggtgagttaacatttattgaaatattaaatttattcgattaaacattaaataaatttttttaaattatatattataaaatagtttaaattaaataaattcatttaaatttaactatatttgaattctaatttaaatttaactatgttttaatattgaataaagacgaattaattaaaaataattaagtaaaaaaataaatttaaaataaataaatttacaaattttttattaatttaatttgaaatagaaaataaaataattttaaaattgttaaatcgctaatctaaaatttaaatttaaattacagatcgggcagagagtttggaaaagcgcaaaagaatgctgaacaaagggatggtggcattggtagccaattaaaaattttactttttatatattttataaaaattccaggattcggctatccacgagcagaagcttaattttcatagggctcaaattgcggaaatgaatcggcgcattacggcaaaatattatcattaaataaattaataacaatatttaaaatataaaatttcaaatatataaattcgatcagagctttgccattttaaatctttttttagagaaaaatatttttaaaattttcgtaattaaataaataaaaaatttataaatttatttaaataaacgcaaatgagataatttaggtttatatttatatttttttaaattttctttcaaaatctttctaaaaatcggttcaaattctaatttttttttggaatctatgaatcaaaaatttttcaaaaataacaaatgtacttttggaaatttcaaaaataaattaataaatgactaaataaaagtgccataaatttgtgccatttttattttgcatggattgtttagacttttttggcttcatctgaacgcggcggtttcccatcacacaataatattgtgaacaacaacaataacaacagttcttctgcaacaccacaaaatgcaccacaacaaatccgtagccaagtgcttccgccaccattcccagtcaattttgaataattaattaattagttttttaatttattcattatttatttagcctcagtcatgctattcatctgtgccaaactcctcctcaaattgctcatcctcctcaagctcatcggcggcatcttcagcactcgacagcagcaacttttgtaccgcatctgaagcggaatttttacgcgcacaaaaccagaaattgacgagggtaattaaggcctaattaataaatcttaattccacaaatttaaaatttcgccatcttccaatatcactaaatgtttctacacagtattagcttgagaaatttcaaaaagtcccatcctgactgatgaaatagatctgtgcatccttaaagcatgaaaaaagaagattttcttgttttctagctattttgctaggacttggcaaaaagaattattgagaatcttcgagcatgagaactacactgatatgttagagctacggaatcatgtaaaagttaattggttttgagcacaaaaggaaaaaatttttgcgccgaaataggagagacattttatgaacatttcctccccgacggcggtatt

SEQ ID NO: 1535 - DNA, 8191 bp, Heterodera glycines
aatttctttgctcggtatttcgaaacaaaatggaaaaaaatgatctaaaagactaattaaaatccatcgtgttattttctaagaatagctcaaggatgctcaatttcccagcgcacttggaggcgggggggaggctttaatggaggttgaaggacggttatattagatatggaaaactcacaaatttttggcatcaaattttattgtagagtgccaagattcacattttgcagggttgggttttcgggacaggaataaaaaaaagctaaaattcatagacgaatcattttttaactaagtaaacaaatcataatttattttaatagcctcttttttattttacagtgattatctgatgatgtggcatggtgtgccagtgccaaattcaaatggatttgcgccgttccatgcgccaccaaaggacacacttttgtgaacagagctctctactcctttttacaaaactttttcatagattggcgatatgttttaaaaaaaaataagaattttttatttttccatgctaatacatatgtcatatttgctacatgttataaaacgcaattaattcggcttcaaagttcgaaattttgatgacttcttaaaatttcaacatttgctttttaaatgtaattttaaaaatttttgggctggctaaagttttcaaaaaaaaaaaaacaaatccattttgtgggtatatgtttttttgaaataactgaattcaattctttttttttgttaattacataatttggcttcattaagtagccaataatgttttttttattaatatttctcaaccattaaaataaatttctaataatacatattctactcctccaaataagcataaatcacacctttgatacaaaaaataaaataaagaaagaatagaaaaaatattgtcaataattgaaaaaataaattggatgaatctcagtgtactgattttcttttatttcaaaatttgtcataatgactattacagtactcgattccacagtatattcagaacacagtagcactgccccatttttgctgatccccactccggacggcaggcactctactcatttttaaacctaaaaatttccatttaatttttaaaaattttttacaaaaatttttcttttgtaatgttttttttttgtatcatcgttttctttcttcatcgcttttacatttgtatttgtcacccaatcaaaaataaataaacaaattattttcttgaatattattcatcttttcggtgattcattttcttcttttttttgcttccattttcctcattccgtccctctttttaagccatcttcttcttccaccgatggtgaaacaaaaacaaaaaaataggcttctcctcccattcgccatcattcattttttgtgtataaaaataattttattatttttaattattttttagcaaaaatgttcaagtttttctttctgttcaccattttttgctgttttgtttttgccaacactgctggcccagctcaaaaagtatccaattatgtgcaagcattttaactagagatcggatgtgacttctggtactgaaaaaccagattttttttctttaactttggaattttcaatgaaaatttttgaaaaaattctcaaaaatatctctcctattaactgtaggctttttggcatgccgttgcccgctggcgttttcatttaaatgacaaattttgcgggtttttgagatgttttcgaaattttttcattttaaaattcttgagttagaaaaaaatcccaactcagtacctgctgaagtctcccgtccggtctctaattataaccatttaataattgttaattgatgttaatttcttttcaaggatgagcgtttctgtcacacgttgacgcgcaatgccaagtacacctgctacgagtgcaaagagccggagaatgagaaaatttgtaagtttattaattagtaactggaaatcatttaaaaataattattattcaatgttttttaatgccaattagtccgtgaaattgaaagtcataaaaaacgggaaaattatacctctaaattctcacatttttggaaataattacaattttttccatttgaaatatcgaaaaaaattaggtttttaatttaaattaccttccatatttttactttttagaaatttttcatgaagaaaatttccaccaccataagaactctgtcccaaagggtaataccgaatcgtactgtatatactgtacttgacttaataattttccacggattaattttggtctggcaaattataaccggcttaatttaataatcaaatgccaaattcataattaataactttcctatggaaaaactaacaaattaaggtggcgagttgcgcgtgaccttcgaaaacagtccatgaaaaaattgaaacctacacaaaaacgggaaaattatacctaaaatttctcaccatctggaaattgatttcagaattattttgcattttaagaattgacatttggctttcatccgttaccgcctttcttaattagtgttgccaaaaaaattttcgtgcccatcgccaccggcgcaattaataattaaaatgcccaaattaataattaataatttttctttgtaaaaaaaacaaaaattaaggcagcgagttgcgcatgaccttcgaaaacagttcgacgaagacggatcgcgatgggaagtcgggtttggatgctgtgcccgtggtcttgcaatgccgcgaccccaatcagctgcaaacggtgcaaaaaattgcccataactttgcttaaacccaactaaaattttaattttgatatttattcgatagacctaagagttcattattagcctacaaattcagttttaaaaaaagtttggccaaaagtacacatgcaatcaggttttcaaaaattttggccatatatattttttttgaaatttgacgaaatttttttaaattttattgcttagaaataaataattttgatcatcaaaatttcatttctgattaaaactttcttagaaccaacaaaataaagtgatcttatttccatagccctaaatgttttctatagcctgcaaagtttcaaaaaagttatggccaacatttttgaaaacttagttgcttgtgtactttttgccaaaactttgttcaaacttgactgaatttcttgaaattttgaaaatttaatagagaaatgttaggactatcgaatgatatcaataagtaaaattttagttgggtttaaacaaagttattgtattatttttttttgttgaaaaatttcatttagtttttttttagagtgcagcgggaccgggaaatttggacgagaccgggacttttttgtttgaaaaaccgggactttttggctgggaaaaccgggaaaaaagccgggaatttcccggtcccggtcaaaactggtcaaaaccgggaccttggtactcagttgtccgtgtccagagtagttacccccccagattttgggggtgacaattcagtcccgtcgtttcagtcccaggctagtcagtaccggagcaattaaatactattttacaaaaataaataataaaattgatttaaaaataatcaaaattaatttattaaaacccagaggaggtaaaataaaaaatcaaataaaattattaaaaacctgataaaaataaatagcctaatatttttaaaaattgttcacggcaaatgccctcaaaaattgaaataattgaagttgcgcttaacagcgctaaaaattctccacctgaatgaattaacatgaaaataaggtcatcaaccgcttcgcaaaaaattgcgcatgtccacattttgccccggtcatttgaaatttaccaaaaaatttgcctttccaaaaactctatcctaaaatggaattcgaggaattcgacccattcctaaatatgtttgttggccctgaaaaagaccttgagtacgatcctttatttgatctgtttctatcaaacggtgaaattaattaataaatgaataattaattctttatttaaaggcaaaaaaatcaattttgaccaaggattcttggactatttactaaataacgatgatgcggaacctgtggtaaaataaataaaattaaatgaaacattaaatttttaaaaaatacagtacatggatttggacaatgtgcctacggcacccccacaatttaccatacctcaatcacctaaacatgtaaaatgaataataatatttaaaataatttgaaacagcatttcgatttggataatgtgccgattactccactacaagtggacaacccacaacaaattccttcattccaggaggaacatgtaaaataaaaaaaattaaaaaaatcaaataaaagtttaaaatatgttaaacaataaaaatatataatttagttggctgatttgggaaatttattggctaaccctgccccacaattgacatcgcaggtttccccgatttttccacctcataatgaatatgaagtggaacaaatcattgaccaacgaaaaaagaaaggaaaagaagaatttttggtagtagtagtaataataataaaaataataatttaaaaaaataataataaataataataatattaataaaattaattaaaaaataattataataataaaattataataaaaataaatagtttaataataataataataataataaataattaaaaaataattataataataataataataataatttatttgaaggttctctggaagggattccttccagaggaatcgacgtgggaacctgtggagcacttagaaagtggtcatgctcttttggaggagttcaagaaaatgaaagtaaaaaaaaaaaaaaaaaaagtctacacacctaaaataaaaaaaaaattaagaaaaaaccaaaaaagcccgccaaggcgacaaaattggtaaaataataaaattaatttaaaccaaaaaaaataaaaaataattattaataaataaataaataaatttataaataaattacaggcaaatggccaacgaaagcccagccaaaaagttggacaaaaaataatataaaataaaaacaataaattaaaggccaacgaccaacgaaagcccagccaaaaagtgggataaaaataataataaattaaaaaccaataaattaaagacaaataaccaacgaaaatgcacccaaaaagacggataaataataattatttaaaaaataaataaatcaattacaggcaaaaggccaacgaaaatccaaccaaaaagtgggataaaaaataataataaagtaaataattataaataactttcaggaaaaaacaacaaaacgcaagggaaaaatggatggattggtaatgaaaattaattaaaaagaatagaaaaattatcaaccttaaaataaataaaaaattcaaggtcacagcgctgcgtgacctgcagggctcaatagccaaggttttgaatgcgatagatgaatgaaaaaaaagaccaattttgatttgaacttattcaaaactcgtgatcggatttaaattgcaaaaataaaattaaaaaatatataactgaaaaaataatttaaatatatatataagtagttaagataaaaattaacaaaaaaaagatgaagatgaatgattctgttgggtacatttaataacattcgttcttcacatacacacgctctattgcttctcgcgcaaatcccatcatcctacccttgtcgtgtccttttccgctgtcccttttcagctgtctctttccccagtgtccctctccaactgtccctttcccgttgtctctttccctagtgtccctctccaattgtccttttcccgttgtccctttcccgctgtctctttccccagtgtcactctcccactgtccctttcccggtgtccttttcccactgtccatttcgctctgtccgttccagctgtcactttccctctatcctttctcacattatcgtttctctatccttttgcgcactgtatcttttcccagtgcccttcctgttgtctatttcctctctaaccctttccgctctcccattttgtcctatctcttttacagtcatttattatacttttactctcctcatcatcgaatattattaatgttcgcaaaacaattaaaaaattgttattaaacaaataaaaaataaaaataaaattcaaaataaaattcaaaataaaaataaaattaattaaagagattaaaatcataataaaattaattaaagtaaattaaattaaaaataaattaatattaaagttaaattaaataaaaataaattataaaattaaataaattataactaaattcaatttgttcgactataaataggaaaaattttctcccattattcatttaaaatgttttttccaacaatcaaaaattgcgttgctgttgtagacaccaaaacaactctcgatattgaaaaaatttatttaatatcaccctccactaaatataatccacgtaaaattcatgctgtaattatgaaagtctataatccaaatgctaccgccataattttctcaactggaaaattcgtatgtacaggggcagctaatgagaaagaatgtacgcaagctgttgagcatgtcacggaacgaattaggcaatgtggctaccaagaggcactaatccataaatttgatgtgaaaaatttgattgcgactgctgatgtagggttccatataagattaggagaactttcagactttcttggtgtaaaatgctgttcatttacccccgaacttttccctggactcgcctacagaaacataaatcccaaaatgtccataattgtcttctcaagtggaaagctaaattttacaggaaacaactcgattgatgatatcaaaattgcatttaatcagttttatccgattttgtacaaatttatacattcaccacaaagggtatgagtcataataatttttgataaaatgtgcattatttgaactttcttgcgctgaagggacaactttagtaaaattttgaccaaaataaatatcagcttgatcattttcaatcattcgcacaagctcaagcggatagaatcgatcgtgcccattcttattcttctctattacacacggattgtttgcataacggagacaaattctatgccgtacataaaagtgctggtcaacggtcacattcttgaatcctttgtacgccatttgcttgcgagcattatccttcgtaattccgccataaataaattctttatgttctccaatttgatttttttataagttgtttgtagagttttatctttgagaaaaattttcaaccttttgaatttcatcaggatgatttagacgatcgcataaattacgtgcactgcaattcagaagagaagcaattattgtgtctaatcggtccatttttataaatgagttaatgaaaaattccttaaatactttttatcattttcttaacaaaatttacaacaaagaagtcgggatcatattgtatctatcattaacttttttaatagatttaaaaaagtacttttaaaattaacacttcctgaacacatacaatatacaaaataaatacaaaaatatccacaattctcactaataattgattgtataggagttttattaccttccacagtcttaaattgacttaaaaatttttcaatacatttgttaggtgtacgtccaaaactgtcaaagtagtacacggtcttataatctttgataaaaattgaaacccaatgcgttccttccttatttgatgggtcgttgttcgccactaatactgatgggaatttgttgatatttaggggtattttgttgcatgggaaacatcctaaataatgttcttttgttttttcgttcattgttagaatccgatttatcgtcgctgtgtccattttcttctctacatattcgcataattttacacaaatttctgattaaagaattaaaatagaaaaaaatgcctgtcattacaacagctatccataataaaactaataatacgcaataaacccatcttgacaatgactttgtctcttcaatattacaaagttgaaatttatcaataatttcatcaatcattgagaatagttgactttgattcattttatttaaatacgaatgatcaaaagaagcaattttataataaatgtctgtcattcctacattaggtgggcgttcagggtaaagaataggactattaaaacatgct

SEQ ID NO: 1536 - DNA, 1287 bp, Heterodera glycines
  unsure (1)..(1287): unsure at all n locations
cgctgaaaaagtgtcgttcattttncggagttaaattttctcacataggcattgngtttgttatatggggaaaaaagactccttcaatttgccacgcaacatgtccaagtcctcctggagcagcttcagctgtgcttcgttggccgacaaagttcggctcaaacattcgttgcgccgttccaaatcagcctttaaaaaacaaaatggggatgatctgctagagagcattcccaccagcagggcgcaattacggattacgggccaggtaattacggaatttttagaccctctccccaacccgtaatacgggtttacgtaattgaaaacccaattacatcgatccctgaacttccaacaagcagtcagggttttttttttggttaattaatgaggccaccatctctctcaattatgagtctcgggaattttttcgagaatttcagtctcgagagtgtcattctttgtttaaattagccatggacaccttttgctcctccgcccccttggccctgagctcggcctcgcccagcatccgtgttcgatccgccaaactcagctcactgcgctccaacttcgccttcaacgcctgccattcatgcattgtgtagctagtctcggtgaaatcgcggggcctcggctgacttaaaatggcaaaaacatttttttaatttatttttttgcaactgggccctctccgacgcgatcagtgatcacggcatttttaaatcagcgagcgcaaaaaagaataccagtagagaccggacgggcccgggggcccgccgggcttttgccgggccgcccgggcccggtaatttttcaaaaaaaccggcccgggacgcccggtaaaacgggctttttttggacgggccgcccgggcccggccaattgtctaagcccgagcccgggcccggtcatttttaccgggctaaaatgggcttaaatttcgccagccaaactgccccaaatttgaaaatttaaataattattatggcgaaatgtcttagttcaaaattaaagataatcagaaacaaattccaattgattttcgtaaatacatgccaatctttttgtttttaaatcctttgaaatgtttttcagaaatgaatgcatcaatctggaaaataggtttatttgaaaaatcaaaggatgccaaaatcgcggagtgccgagaatgtaaaggaaatggaaagtccaaatatgaatttagcctctctgactccagcaccaaatcgctcaaaaacatctttttcacaattcatgcaaaattcggaatatgaaaaaaatttc

SEQ ID NO: 1537 - DNA, 2767 bp, Heterodera glycines
gcactgagcatctgcgtttctgtctgtttgtgaatagaatcaaaacaataaaattaccgtagtttgctacagtcatttggtccctccacttccaaccaattatactgtaaaacagataccctctacccaccctcatcaggtttagccgttgttccagttcgtttgatcgacgccactgttctcgccaccggtgtcgttcccgtcgcagttcgggcgcccaaaagttgcgcacagtgcccgccaaataattgaaccggtcgcatagggaagccaactcgcgccgaagtgcgcgtgggtccaaatcgacctgtggcgttttagcaatttgtaattaattagggtgggaccctctctaatatatgaccaatttacacaaaacggtattttgggcccccgaaattaaggatttccgtaattgaaaaaatctccgtaatggattagggattgccgtaattgaaatccacagttacatgcagcccggctggaaacccatataggtaaatgtccgcgaattttcgactttttcgacacaaccccgaaatgaacaccgacgcttggcattgcctcccccaaagtgccgaatacatttgatcaaaaaaaaaaccaaaaatgatcatattttgatcagcaaaaatgttaataggaatctttgattaggaccatatgctgaggtccatctattcaaaagtggcgagagaagaaaaacaatgaattacctgttgaagaatggcatgtgccgagacgggctggtagagatgagctgctgcttgaaaaccctttaaaataatttaaataaaaatataaataaatagtgcgctatttaaaaaaaacattactttttgaaaatattaaaaattaaagggcgggggccttttgggttttcaattttttgtcctaaaaattcggaagaacgtgcccctgtttttgggtgtaatcacatcaattttggccaattccgaatccactacccgaacaaatgattgaattttaaattttgatttttttgctcgggttcgggtttaggggttcgggattggattcgggatcagcgaccctgaaaaatagtccaaaaagataaaatagcacacacacacatcatcatcctcatcaatgcgcaaggctgattgtccgtcctccacatctccgattggtaccattccctcatttccccatggatgaatgccctgctgctgcggcactgtgccgctggacgacggcatccatagactgtgatgatgttgtgttgttggctggctaaagctgaatggcggatcaattttgccagaaactggtttacagtctcaacattttggtaaaaatcatgatcggcaatttaatttacaaaaataaataaattaataaaataataataataataataatgggatttgagtcctggtccaaaattgttcaacagagtgccaatcccgaacaccgggatcccaggatgtgcaataaatgattttagtatagggcctaacaaatttttgtgacaccaacaattgacgggaggcggtagaagacgaatcattgatgaacgccgccgtcttcgtcgtcgtcgttgttgcaattggtgccgttgttgctgctgttgttggttgtggcacatgagcatatccagaggcgccaaaataaggcgatggtccaccagcggcggggagcagtggttgaagaagcgatggtggtagtggtccattcaaatttggcatagttggaccattcaaattttgtggcataatgttgtgctgctgtagatgattatggtgacagtgggaggacggtagcgactcgctaaactgttgtactacggtggatggtgccggcggcgggaacatggaaggcgcggaggaacaggacgggttgtccgccaacagttgatgaacaccctccagcgaacgatgcttccttgaaatgggaggaaagtggtttttcaaaatttctggtggcaaaaattataagtttccgtaaaccattgcctaggtttactttcctagggtttggagcagggatggcattccgccgaggctccaaaaattttcggaagatggaaatcggaattccgtgccatccctggtttggaggaggcgtccattagaccggtctaggaattgtagaggaaaaggaagaattaaatctcactaattccgaactccaaatccgcacggatcaatgataattttggtattgagcgttaggatgtgcataaatttttgtataattcataaaacactaactaacaagtttgagttaatttatgatttatttttctgcaaacaaaaaataaaataattattaaatttaattaattaattaattattactatcattgacgcttttttagctttgattgggggttaagacaattagcggtgaacaaattgcgctttaatttactgctacacacttttaccttattagggactcattattttgttgttgttgttgttgactccatcgggaaatcccggcggaagaagccgaagttgttgtccaagcagcagcagcagcgggtgaggagaattggttttgttgatgggcggcggtggatgagtatggcaccgattgcaacaaatgggtttggtacggcacatttggcgtgaacatatccccagcaggggattgggggaagtgcggggaaacgggttgaggacgggaaatgttttttattgctattaaatattattttatgttatgtttattaattttcatatattgtatcaccatttaaatggcgaaaaatactaaattccccccaaaaatttatcgt

SEQ ID NO: 1538 - DNA, 2512 bp, Heterodera glycines
ccccccccccccactaaattagtcctccccaacccccccccccctaaaaaagccccctttgagggggggggggggctgaaaagaaagcctcagggattttaatttattcggcaaaaacaaacaaacattacggtccttaatgatgacttgttagtgagttgaattgagtacaaataagaaaatgattctttccggacataaacggggggttgagggggcggagggcaccggcattattcccttgggcaatggatatgtatgtgtggcagtgtatggggtgaaaatagaaagcaaatagtaatagaaataggcacacaaaacattgggggaggagaggagggctccaaccgaccccgagaggagagcggcggcggcaccggcacggcgggcggtgtctttttttttctttttactcattcatccccctttttggtcgtgctgtagaagaagccccccttccgtcccaccgccacgctcttcgtccaatccatttaacgtcactttcatttggccacataacaagaggcagacagacagatgaatggaatggaatggaatggaatggaaatgccattgatgaaagagtgggggagggggcacatttgtgaaggtacggacggcatcggcatcgatggacaaagagaggggggaggagggagagcacacacaaattttgacggaaaacgaaatgccctgaagcgcttttcatcccctccccttcccacatccattttcccaaccggcaaaaatggttaattgctggcggcagaaagcacacacaaaaaagaaattttttttaaaggatccatatgaatggaaacattggaaatttgggcactttggctgttgggggcccccgaaaaaattccaaaaaggggaatttttttcagggatttggaattgattaaaatagatgtcagattcgtgaatattgaccccgaaaacccccgtgacaaacaagttttcacgaattatgacaacaacaataatttgcaaaacaaaagggctcccttttttggaatttttttctggggtcccaacagcaaaagtgccgaaatttataaagaagattaaaactacaaataaactcttgaaaatctaaattttggtaagcctgcataaaataagggaattcatttaaaatttgatcattgaaacgaaagaatcgattgtttactgtaatctcactcatttccattcccattttcatttctccttagttcattctgctaaaatttggcttttttaattcgtcaatcaattcacgttcacttacaacaaaagtgtctatgtttttttccttttgtaattttcataacaatttccaaagatttgttaacccttaggttttttaatcgaaaatcagatgtatagcagcaatcttttgagtaatttttttaagaaaacattcgcttatgtcttttagaaacgagtacagttttggttgtgcttcgtttttggatcctaaagccatttaacacgcaaaaacttccttttctcaaaacagcgaattgtttaattccacgttgcatcaacaccaagataatacatataatttcaaacgttcattctttcttttttctttgttcctccaagtttcaaactgcacacaaaatttacctaaatttatttttagccaaagcatttcattgactttctgtttaaaaaaatgtcgcttcttgttttctctcgtctccgtactcttcctcgtcttgcgccgcttctgacgaacagtccttgtgcactcagcaccagtgccgttcgcaaagacattgacagtgccgcgaaatacgtcggagccggttaataacaaaaatgattttcgtacgaattttttgcattttttaggggctgcaactgtcggagtggccggttccggtgccggcattggcaacgtgttcggctcgttggtcatcggttatgcgcgcaatccgtccttgaagcagcagttgttccagtacgcgattctcggctttgcactgtctgaagccatgggactgttctgcctcaccatgggcttcttgatccttttcgctttctgaacattacgaagacgagcacagaggaatggataggaaatctttttttgttttttctcgcttccaataatagtacgtttttctatttttgtgttgtcagataaagttggactgattagaattgcccttttaaactcgatttattctatgtttgggtactgcactttatgagtccaaacaaccttcactttttttttcgaattaggtatctgtacattttggtatcatttggaagcacagagtctcagtttggactaatgaagtcgattggactcataaaatgcatgggtttatcgtgtcccccttattgcgagtttgttgaccgaccgtgaatccggtctccatttccacttcagacccaaacatcggaattcctattcctttttttttgcttaacatttgaggtaatccttcggaattggtgtcccgacggaaaaaaaaattttttcttacaaaatcacttttgctagggt

SEQ ID NO: 1539 - DNA, 3470 bp, Heterodera glycines
cttgaattcgtccggcttgtgcatgtacagggaagccgtttcgccgttcagcggatccgctgggttcggataggtcaacagttggggaaggaacgactcaaaaatgttggaaagatctaaacaatttcaataagttcatggacctggatttcatatttaacattgattgacatgtattttctgtaaattcatggaaaatgcaggcgtgccaaaccgactaggtacaggcctggttttttgaaaagtcgtttaaaaaattgtatgggtccaaaaaatgaaacttttttggaatttctaaataatggtaaagccaatgataatgacagaatttttaaatgctaaaattgcttgcatgaaatccatgttttccaatttctgattggccaaggacctggtttttcgtaaaaaaatgcagatttacaaaaaatacatgaacctataggcccaacgattttacctttttgggagggttttctgagtctttttacattcgtccatcccgaaaagaaagcaaaaatccacaacaaaaaaaaacagaccataaagtgctgtccaactttggttgatcacgtccagacaaactgtgccggatgcttcatcaatgttcggatgataaattctgttcatgaagccaatggaaggtgactaaacggattgtgtggaaaggcatttaaaaaatttctgaaaaataaattgttgtttttattattttttgcaccttgaagggatatttctccggcaaatcgacccttactcgccaaactccgccttcgtaagcagctaaaatttgttgaaatggattagcatataattgtacgaagatatagaaccactcacttccttttgggccataaaattttacctgaaaatttaaattacaaaaaaatacatacagaattcggcactttaatttgaatcattttaccctagaaaaatgcatatttatgaaaaaaattgaatttttgttcgaattcagacgcgggattggataaattcggttcaaattcgcgatcagtatcctcgaaaatcctcataaaacttatttttgagccgaaaataaaaaaaaaaattcattagggagcataattcatttaccatagccccctttttggatgcttttcgggggtccacaacagcaaatgcccaaaattcatcaactcatttaccaggaattcattcagtccaccggtgatgaccacctcatggttcgattcaatcctaaaatttgtgagagtcaatttatttgatggtaaaattcacaatttcagcacatccgtgtccattcttcgttttcctagaaaaaaaaaacaaattcaattatattatggaaaaaataattaataataataattgtaataatgtggcaattaccggcactgggagacgacatttgttgattaagccaatttggaaaaacagaaataattaaatataagtatgtattatatttgtatgaatgtgctgaattgtagatgaagcaatggcaatgtaataacaacagcaatagtaaataaagtaaacaaacaaacaaaatttggaatccgttaaaatccactcaaattgttttttttgcagcacgtgagacggttagactgtgcagagaaaagcttacaattagtagtactatctcgtcgtttatctttttctttataatgtttctctcatttcagcgtactatctcttcattttggatgtttgatgtattataaaaacagaattagcttaaattttttttttcgtattattttcacacgtctctaaaacatgaaaaacatcaaatactcaaatgctaacaatgaatgatatgtgagtggcagacgataaaaaagagagacacaaaagaaaaattgaacaattttttttgtatcaaattttatttcaaagttcattcattgtcagtgtttttttaaaaaagggacggtagagggagaaaggaatgaaaaaagggatggggacggacgaagaaggaagagcggaagtgaaaggaaccgactgctgcgtgatgagctgattaggtaacgaacgaaggggatggaggagagggagggaggggaagcgaatggaagtaaaagtacggaagaaaggatgatggatccaatagttcgaattcgggttcgtccccgacccttggggagagaaaagtcgggaggatcggcggggagaaaaattctcagacaaatatttgtcggctttggctggagaaattaaaaaaaaaattttttttttaaatgtcggggacaagacccacctcgaaattctcagacaaatatttgtcggctttggctggagaaattaaaaaaaaaattttttttttaaatgtcggggacaagacccacctcgaaattctcagacaaatatttgtcggctttggctggagaaattaaaaaaaaaattttttttttaaatgtcggggacaagacccacctcgaaattctcagacaaatatttgtcggctttggctggagaaattaaaaaaaaaattttttttttaaatgtcggggacaagacccacctcgtcgggtaggcaattttcaacgtgggcggagcaaccctaattcaaataaacacctttttttacttgaaagtgccaaaaccgctcgctatgggttgcagaaaaaccaagcgccatttcaaaacgaatgaaaatgccaaaaaaaaattttataacgcactttagctgtaaaaaaacacctttttggtagggtggcggcgattgccacaaatgtcgccagctgctgcactccccccgctttcggccatgtcgtcgtccatcggatggccataaaatcggcaccaccataccaccaaatccaatccttcgcccaccccccagggcacaataataataataatcagtgaccattttatgttcctcctctgcgctctctgttcagttcagtcagttttttcttggccatttcgttcactccggcagatgttttgcttactttttgctccttctttcttccttccacactatataagcatgtcatcaatggcttctcctcctcccctcgcgtcctttgcccctcaatggcacttttccgccgcttccctcctttttcatcatccatcaccgttttggtggcacttttatccgcgtccatcaccaccgcgcaattggtcactcgagagcaaatcagacaaagtttgtatggacaccgatataaaaaaaagggaacccccctcacccccccccccccctcgctcgctcgcaaaaagccccaaaatggggactcattcgaagtgaggggggccggtgtaaaagaggtgggagaggggcggggtcaccggcgacggtgaaggaaggaaagaggaaaaattttgaaattcaacaaattttcttattagaattcattaaaaattccgaaattttccccttgcagcgccgacccccccccctttttccctaaaaatttattggaaaaagccgcgccgcaaatgcttcatcagaacaattgcctcttttg

SEQ ID NO: 1540 - DNA, 3553 bp, Heterodera glycines
cggctcccggtaaactggacaccggaaaattggacaccgaaaattggacaccgaaaattggacaccgaaaattggacaccgaaaattggacaccgaaaattggacaccgaaaattggacaccgaaaattggacactagaatactggacaccaatggcaaattagacaccggaaaattggacagtattggataaaaaataaataagttaagaataaaaacaaaaattttaattgaaataaataatgttattatttattatttgtagcatcagctgcagaactcaccatacattcataacgaaaaaagtttttatttttatggagttcccatttttgcgcattttttggtacattgaacaatcatcacgcaattttgtacattttttggcatcttgatcaatcatcgtctaattttgtacacttttttgccacatttgatcaattattgtgcatattgagtgtttaaattcctgggtttatattttaaaagaggaatttagtgtccagttttccagtgtccaattttcctttggtgtccaaaattccgacagtgtccaattttcctttggtgtccaatttaccggtcccccaaaaaaccagcccacaagtgctgttggctgctcagtggtggccaaaagtgccaaagtcagtgctatgacaaattgcgagcgccgagcattgcgccagcagaaaagttcactttcacagtgagtgtaaaatcgcgaattgcattcgcagataaatggaattttatttgaggacgaatgtgcaccgttgactttgaaccggacggtgccaatcagtgaaatgaagtgaattttggcgggcataaatttcctctcataatcagtgaaattcattttctcaaaaaatcgctgtaaatttttttatatttttcttgaaattaaaaaaaaaaatttattttaaagattttcctgcaagttttttgcaaaaagtcgatgttttttctttttttgctgcctgacggaccgcgaggcggtggtgcacagctgtttctcagcgtgtctgcactggtgggacaacaattgggcaacgacagcggtggcacggcacggacgcacatttgacccgctgagagactgtgccgagtaagcgaacgggtgaacggcacatttaatagtgatttagccttgtggaattgaacaagcccgagaattgtttggtgccagcatatgttttactcaaattgggcctaatgaatgagacaagaaacaacggaacggaaaagctcaactaatgaatgaagcaaagcataaaagaccaacattgtttccattctattttccatgattatcataatgccaataaaataaataatccagaatcgagaaatgttttttaaatttgctccaaaatgtgcattggaaatattaaattccaatctctcattttttcaatttataaaatccagagactttaaaagccttcgggtaagacaagaaatggaccaaaatgcaagagacaacaaataaattttcctgtcaaatatttttcaaatcaaaagaagaaaacatatggtgataacgccacaaaatcatttagccaaaatctcataacatcactcactcatcgtcaattggtcaaaaaaaaaacaggcatccatccatcattttcttagactgcctgtagtgttggtcgcgcaccgtattacatgtaggagcgatatttgtggttgaaattgttgccgtattgttgcgaaaccgcagcggaatgttgctcactagtcgaatccggcaccgcacccccagcatatccctgcgcatcgccaccaccgcggcgctggttctgaacattggcctccggcggcgaagtctgtgcaggacgctgtgcagcttggaaacgattggcattggacatcatgtactgcgggtgctggtacggatgcggataagtgggcatctgcgaaatgtggaaaaatggggccaaagatttatctaatcgcatggagataacgacaattttactttaatttacctgaaaaagcgaatggatgttggccggctgcacatacgatggctgcgtcggtgcggtgggcataccaaagccgggaggcggtcccacatggcttggcggtccccccagcaaagttgcctgctccgattgggcaagtccgcgctgttgttgctgactttgctgcgtttgttgatagtgtccattgttggccgcttgattgactgaaaagaggcatattttgattattataatagtttagtaaggaaagcacttttttgaccctcacacacaaacaacaaaaagtcgaaagttcaaattttcaaaaaattcaaaattacaaatgaatgaccaccaccaccaaaccccattcccaccgttttgttgctgctgcccaaatttgttctccatgtacgattccaatgtggcacgatgatggtttggtgccaaagtcgtcggtggtccaattgactgaaaaataatgtaccataaaaaaccaaaaagtataaccaaccattgcgcccatctgcaagtccagctgcgaatacggcgtcccatactgttggatgaggaaacggtcaatctccgcatttggtccttgcagcgtttgcgcggtggccaccggcgaatacatgtacggcatgttgtagctggggaactgaggcactgcagtggctgaggtctggtggaagattgtctgagcttgctgttgcaaatgttgttgcatggccggcgttgcgcttaccatcgctgggtttgctgccggtgtgaaaagcgttttgttttgttgcggaggcaactgctgttgctgctggtggtgatgatgaacagccgcaacatgttgcgatgggtcaccagcagcctgctgttgctgctgctgatgagcagcggcagcagcaaagttgaccgcattgccaccgtggaccacaacagggccaccaccgccgggctggccacttgacggaggaaaattaaccgaggcagtgtcagagaacctaaattattagtgtataagtaactgcaacattttttctctgggccttgagggtttatgatcacaaatctgacacatctgatttgaccaatctaaccccaactcaaactcgcaatttcccattcttgtatatattttttaaaattcaagtttagggttaggaagaaaaaatggttattatttaaaacgaacgataacgcattgccagtgggcggtcgagctggtccaccattgttattgagccgttgctgatgcgcttcgaatatggcggtgagtgcactgacgctggaactcgtcgtcggaatgtttgccatcgaattgagcatggacccagccgaattcttagaaaaaatggctcaataattagctaatatatgataaatttaaaaaaaaacctcaattggctggccccatgtgctttcgttgtccttggcggaactgaagtgaaacccgaactgatagctcgtgctggtcggatgcggaagtgcctcgccagtgacgaactcaaccttttcttgcgcctggtccactaaaagaaaattttccgggggggaaaattacgtccattttattcgaatacgtgttaggg

SEQ ID NO: 1541 - DNA, 1282 bp, Heterodera glycines
  unsure (1)..(1282): unsure at all n locations
aaatttgtatcaattcaaattacgtccatttattcgaatacgtgttaggattcggagtacttatgtanaagtacagtaatgaggttttttttatagcggagttagagggtttctgaaacatgggactttgtttgaactcggggtcctgtttatttaccattggtgtcagccattccagcagtgtcacaatggttatccattattccggccgtgtccaatttgcaactggtgtccagcattacagaggtgtccaaattgttggcagcttcaatgttgccagcggtgcccaacatgtcggtgttttccaatttttcggtggtatccaatttttccgggttgtccaatatttcggtgctttccaatttgccggttgatgcccaattttctgacgaccaattcgtcggctccgttgtccaattttctttcgtccaatccggctcccgactttcgtatgtgattgtctgctgctgctgttgttgttgctgatgttgtggaggtgaaggctgtggtgatgcctttttagccgcagcaacagcggcaaatgttttcggcttgtgaaccgcggcgggttcagccggctcaacagaaggcgtaaagttgtccagagcgggccacttcacaccaccatttgtcgatgtttccgccatcacaacagtagcagccgaagatggcataaacacacgaggcccatttttctacaagttttaattgtttggtattaatacccgtaattattgcataaaaacaaacccattcgtcgttttcgtgtcccgctgtttcgccataagattgctcaacagttgaagaaaagtcgccggtgtttgttcccgttcccacaactttgttggtggtctgcttgttcgctgcaacattgtcacgtcgatacgctcctccggcggtaaaagtgcggttttgccccttgaatccctgtccctgacgttcagtgcgaacacgcggcccagccgaacttaatattccctttttgtattaaacaggaagttttgtaaacaaatgaacattcgaatctgttttcagagtaatttaaatatgaaaagtcgaaaacatattttagcttttcgcgatttgtattaatggggtttaactctcccccccccccaaaaaaagtgtaagttatgtcgtacttctgctcattctgtcctttgcctttggtctgattgtgagtggtagtagtccgggcaaccgatggagttgacgatttcgtcttttgttttttgccttgctgactccccacacaccactaaaccaacttattgaaaccatt

SEQ ID NO: 1542 - DNA, 2347 bp, Heterodera glycines
  unsure (1)..(2347): unsure at all n locations
ttttagacaaaaaatggaaaatcgaaaaatttgaattttcgactttttgttcgaattcgggtccaggattaagaattggtcgaaattgatgccggattcatgatcagcgaccctgaaaacccttagaaacatgttttcatgatttttgaaaccaaaatttttttttaaatgttcgaattcgggttagggattcggaattggccaaaaaggaggccgggttcatactcagcgtccaaaaacacccctataaccgtgtttttttgaatttacagaaaagtttcaaaaagaaaaaattttgggaccagtaaaacatttgattgcctaaaaaatgatgatatctattcattatacaccattttagaaccattaaacgtgtttttgctttatcccttaaatccaaatctagcaggagaaaatcttgcaactcctggacaataatttagaatacatacccagaaaaacccagattacaaaaaaaaaaacggattggacatgcgtccaggaaaaagccaggtccaactttactgaaaatgaaaccttgacaggtttctgctcagcaatgtcatcatgtgcaattgtagcgtcatgccctatctgggtgagttcagccagacgcaactgttcttttgttgccatgactggctgtttttgaagctccattggatgtttctgctgcagaattaagcttgttttgtgaaatttgtttgacagaaaaataacaattctgaaaatgttaaaagaaaaatttggtcctaacacgacttaattattgaatatggtaaaatgtaaaaccgattagacttcaaaatgaatctccgttatgcttcaaggtgtgtgagtttttgcataatacattttggcatcgattttttgtatacaatatgtaaatgcgggattttttgtatacaatatgtaaatatggagataagagacataaaccaaaaaatcgaagattaaaaccgaaggaaagaaagaaaactgcaaaagactgagataaggattggaagaaaacggccgttattgagaatgattaagaaaaaaaatcttttgtcattgtaaatttcgaccagaaaataggtatgtactgtctgtatacatacacaccaagatccgctccccatgtttcgagaaattgcttggtatcaataacagaccaaagggttcggaaattatttcgtttatcggaaatcaatataatcgtaatacatacgctacatatttttccggaaaattgaaccgccgttagtttaaactttgtgtttagttggttggggcccttaaacgataaaaattgatgaaacccgagtccgccattggcttaattcaaaatgattatttatcaattaaaaatttggctttccgtcactatagccacgcagaaacaaattggtgttggtgtgagctaatgagctgttggatttggttctatctgacttttgctgaacaaaaccctttgttttcaattaccggttcgggtacaaattactaaatttactttttaacaaattttcttgtttattcaaggaaattcagccaacttttgcatcaaaagtgatgagaaattttcttcttttactatgttttgctataattttgcaagttctttgtgacgaacatgaccatatttacaagtgaaagataatttatcctaattaaatttttcgatttttttaagtccaaatgctgaagttgtgctttggatgaatacggtgagcgcaattattgtgttgttgtctttaatggttatgattttttaaaggttggcccgtacaacaatcgtcaagaaacgtaggtcctaaaaatccagaggagggttttatgggtgggtcgctgatcacctaacattcattttgaccattttcgagtccctgacccccactcgaacaactcttgaaaaaataaacaaattcccaataactattggtcataattaatgtcctttgttttagatacagttatttctcgctgccattttgtcaagtaactttggacacaatcagtcattcaaactttttcaaaaaaaatttagggttacaaaaaaacaattgagcattaccatgagactttgggcgaagcactgctcggtgttgagttggaattttccggtttggacatacgcttcaccgttgatcagccaaaaacggttgaacaaaaaaaaacaaaatcgccaatgattagatgaattaatttatattccattattttctcaggagtattgcaacacgaagctgactcctaccgacatcgacgcactgatttttgcagttgaacacaattattgtccattcaaatccatggagagaaattctaacggaaaatcgttttgcttttttcctnatagacctgc

SEQ ID NO: 1543 - DNA, 927 bp, Heterodera glycines
tcggaagtcggaattttcaaaaaatacaaaatataacaaaaaaaatttttaaatatttaataggcaaattttaaaattctaaaccatgtaaaaggtgatttcaaatttttagtatatttctatatttaaaaaagtttttaatgattttcaaaataattttatgtaattttacattattttggaatttttttgggacaattacaccttttttttgcggcgcgctttatccaaagaaaatttggtgaacttgggggagggattcggcggtgccgataggcacgccgagaaaattttagtgatttttaatgtgatttgttaacagattttgtagaaaaaatgaccaaatttagagatttttagcaaattttcaaaaaaattaagggtttttaaggtgcggaggtgccgataggcgccgctgggaaaaaattgataatttcagtccaatttattaacagaaattgtacaagaattgctaattttttgaaaaaaaaacaaaaaaattccgactgtttatcaaaaatttcgcaagtcggaattccgagccctaaaattttcgaaagtcggaattccggccccaaaaatatcggaagtcggaattccgtgccatccctggcttccacctcagtatccccctctttcttataaatcaaacatcccgcaccgctgttcggcacaggcgcccgagggtggtcggtgccgaacatcgatgtaggacttcccaaatcacatcaatacccccctccccctcagctccacaccatccaccaattcctcctccctttcttccaaaacatgccttaaaggaagccaacatgtcacacacttgagacgctgtctcaaacgggttctccgaaatttgtgccgcaatttttccgcaaattcctctggcacaaggccagtgacctgggtgtttaaaactgataaaca

SEQ ID NO: 1544 - DNA, 2214 bp, Heterodera glycines
taaattttctcctataagcatctgggagagagaggacggtgaaaagtgaagagaaagaggaacagaaagagagaaggtttataaagaggaaaagaaagatgctttttggcccatttttctgttttttggcccactttttctttttttggcccacttttcttttttcagcttttttggcacttttcttttttctgttttttggcccacttttcttttttcagctttttttggcacacttttcttttttcagctttttttggcccactttacttttttctgtttttttggcccactttttcttttttcagctttttttggcccatttttcttttttcagctttttttggcccatttttctgttttttggcccactttttcttttttcagcttttttggcccatttttcttttttcagcttttttttggcccatttttcttttttcagctttttttggcccatttttctgtttttttggcccactttttcttttttcagctttttttggcccatttttcttttttctgttttttggccctcttttattttgaaagagaaaagaaagaggaacggaacggaacggacaggaataaaaaggaacgaaagaaaaaagagaaaaggttagaggaagtgagagacagggaaagagtaagagattttaagtggccctattaaaagtttgagtataaagaaaaaattattgaattcccggccattataaaatccaatgcccttttataaaaaattttttggcgaggagcgccctctagtgagtgttaaatatcgaaaatttggaagttcaagggtctgacctaggtcataaactttaaaaatcaggggtcaattacggtatataaaaccatagcacttaactgaataatcgctgccgtgctctagttcttatttaataggactgaaaaaaacttttgaaggcttatataattttcaaacaatacttttttaatccttttaagaaatgctcggcagctatttccttaaattttatttgtattatttacatttttctacacaacatgaatatactaaggttaatacctcgacctggattaggccctggaatttccaatatttttttctttaagaatttcagtcgagaaacccaccagatttgtgccagccaaatccgtagttttgggaaagtctggaaatttcgccatcctcggcttgtccttttctcgatcacttgtagaaaatgaaaaaataatttgtaaatctaaaatattgtaattaacaaaaaaaatcatttatttttttcgaaaattcgcaaaattaagactttttcaatgaaaatatggtcaaaattcttaatttttcccggcggcgcctatcggtagcgcggccccaccaaaagttttttggaaaagcgccgcaaaaaaatcgagcgatttttcatgctcagatttcacaaaatgcttatttctaacaataaattgaaaatacacataacattttgaacattttaaacttgttttgaaaaaatttgtaaaaatgttaaatgcaataactaagcaaaaaggtcgcaatattgggacgacgaatagaaaatgttgtattaaaatggcgattttttagctattatctttagagatcggtattttgaaaaaagcctggacctggaccagacaaaaatccaggaaaatccaggtccaggaaaaatccaggctcttcgagacctggattttttgaaactcatcctaaaaatcaaaaaaaggttgaaaaaattaattaattgcttagaaacacctaaaaatatctacttaataataataatgtatttttaaattaatttaatctttttttgaaaattaaaaaaaacatcggtcacttgaaataataaattctaaaattttgtccaggaaaatccaggtttttcgtgttttgcctggacctggacctggatttttttttcacattggacctggacctggatttcctggacaaaaatccaggaaaatccagtgccatgaaaaatccaagatgccgaaaaatgacctggacctggacctggatccaacaaaaatccaagcctggatccaggaccaagccgagatcaaatctaaagcatactgtatcactgactcattttctattgtaccgctcagatatgttacagaaatgataggtgacttgtttacaagtatttttatgattattttctcatttatattgaaatcgtagcgagcttttttggataa

SEQ ID NO: 1545 - DNA, 9040 bp, Heterodera glycines
  unsure (1)..(9040): unsure at all n locations
cagggaaaacagcagatacggcgttcatttcggctttcttaaatcgcaaatgactaaaagaaaactagattttcacataaatttatgtgttagttttcaccttttctcggtgcgaccggtgaaattcggtttcgtagaaagttcagcacttcctcgtagtagcgtcgatgtttcccgggcagaagaccccagactccaatgcacattcggtggttgacagacgcgcccacaacaaagcactgctcccacatgtttggtgcagccttgaatgtcccgtccaaatgccaagttgcactgtttttgctcaaaatgtccaaagtctaaaaaatttaaatttaaattctgttttcgcccctgatgattacccgttcactcccaaaaacaagcacaacgtccttttctccaattctgaccgtgcgactgtcgtagagcactatgtcctcgccatccttcagccgtaatttgtccggaattgtgaatgcctcctcttttcgtttctccaagtttgaagtttacgatggcgtgttcttcaaaatccgttgaaaagccgacaattcagtgccagaaaatttggcaaaaaattttcaaaaaaacccctaaaaatacaatataaattgaagtggttagattctgtctgatgttattgttatactcttatgctaaatcaatccaaaattaaaataatgacctaaatatgtttagaatcaccttttaacatttaaaaaattatttttggaggggtacatttaaaaaaagttttttttttaattttttcactagaaatttctaaaaattttcaaaaattctcaaaatatgtataaaaaaataaaaaatttgccaaaattttggatttttttttgaggatttccaaaaattttccgtaaaaaacccgcaaattatgtaaaaaaaatcaaaatatgtaagaaaaagtccaaaatatgtaccaaatatgtataaaaccccgaaatatgtaaaaatatgtaaataaaagtcccgatttttgtttgcaaacataaaaaagaaagtgtttttcctactatttagagcatggagaagccaggaaaaaaatatgtacatatttacataaaattgacatccctaataatgaacaaaaacaaatacaaaattttcgattccattgaacacaatcgtttcaaaaaaaattctcaatttccttatccacctaattttcacccagacccctttcttaccagtgcttatttcgacccgaaacccgacccaaaatcatcgggtcgggtttcgggcgagaaaaaggccgggtttcgggtaacccggaacaaccctggtatgaataaaatgcatctggggaagggtgaggccccgatggtgtcaacagataacaacgacgaaaaggggtttttccaacaaaaaaattttagaatttgaattaattttaaagaaaaaaaaaactaagaatttggtggtgggcggtgccaaaaggtgtgcgttcagtgaaaaaaaaaccgcaataaaaattatgaagaattatgtgtaatttgtaagaaaatggcaaacatttcagaaattcctcttttcccccttttttcatgtatgatttattttttaaatttacttttgctgcccgacttttcagcgtttcttcgatggccgccaatttgacgagtgcatttccaattttccagtcaaatttgttccgctcaatggcaacggcctcctgcaaaatgaaaagtgatgtaaaaagagcagataaatattaaaaaaaattctatttttctataatggaaaattattttttaattttactaaattttgttaccaaattttatctattttcaaatgaagacgcctaacagcatcgcccgatccaatatttccatgttttttttccaaaacttggccccaaaatggccaaagttggtgaaaatggctaaaaatttcctattttttcattcggttctgaaatttttttctaaatacatggcagtaccgtatttaggggggggngggggggggtacaccggtgggggtcgactgggcgccgccaactgggcgacgccgactgggcgacgccaactgggcgccagatcaactgggcgacgccgactgggcgccaatcaactgggcgccagtccccgtttccctccctaccagagaagggattccgagaccacaaaaatttttgaaaattggagttccgaagcccaaaattttttcgaaacggaattacgtgctatccctaccccctaccatatatgtgataaatagggattttttaggcaaatgcataaaattttgcgtaatagttatgattgtaggcccccttttaagaaattttttttgttgttccaaaagttttctgggtcgctgacaatgaatcctgtatccatttcgaaccctcggacccaaatctaacaatttttgttcgaatttgggtccgggttcgtaatttgtcgaaatgggtgtcggattcgtgataagcgacccaaaaccccttgaaatcatgctttcatgacttttaaaaataaaaacaaaaaaaatttctttgaaaatacacccttcagaattgaaagtaaaaattctcaaaaattttattgcctcttcgaaaatttttgtgtctatttaaacctattttgcgatttttgtgcctaaagaaagggaatttgaaagtgggtcttggcgcccagtcggcggcgcccagttgatctgggtcgcccagtcggcgtcgcccagtcggcgtcgcccagttggcgtcgcccagtcggcggcgcccagtcgacccggtccgacgtcgggggcccaaccctaatttaaacgaaagaaaaaaaattaatttatttttttcaaaactctcaacaactcctccctcttttgattttttttttttggaaaatttttggtcataatgtagtttgcccccgcccccttttttgaaaaaaaaaatttcaaaaaattttttgccataaaaacattaacaaatgtgtatttttattgctccctatttttgtcatttttaaacaaaaaaacagacaacttaattaccgtaccgtaccgtatcaatggtttcatttttacagtttctcaattgttcaattttgttcaacagtttcatgatcactgcacagtcttttccatagatgtcgcatcttgttgatttgctctctaaaatttttttgtcattttaaatttttgtaatatgcgcataaaatatgcattaaaaatcccccaaatataccctaaaaatccaaaaaattcacaaatatgccttaaaaattacccaaaatggcttctaaccctcaaaaaaaaatgccaaatttggtgtaaaaatacagaattgagtttaaaaaacaccaaaacaattgctgctaaggagctttttttgacaattgaaaaaatttttgattttctaaatttaatatgcaaaatcatacaatttataaccctagtaattagaatacatgtaattttatttttgtaaatttttaaaatttcctttacatatggatattttttataatttttgaaaaatttggctcagtttcgagccacggtttacaataaataagaagtggtgatactctttggcccccaatccttttgccggattttgttcaatttcttagcctttttttagtcattttcgtatggcttctgggcactgatcagtttgttgaagttaggcgttggaatctggaagaacgctttcatccgatcagcaacaggcggcaccaaatgaatcattttggcaaaattttctgctttgatgtcattgagaacggtgccaatgccaatggcctaaattttaattaattaattattaaaacaaattattctttaaaaaataaaattcatcatttaaaaaataattggcaaatgccattggctaatttaatttaattatttaaacaagaaaataattgacaaatgaattgtccattttttaaattaattattttcaaaaagaattggcaaattgctataattctaaattaattattaaaaatgacgttttattttcacattttcattcagtgctccgctgatcactttcccattttcttgttctcgtattgcgctttgctgttgatcggtgccaaattcgagaaagaaaatgggaataattttctttgttttcataatttgttcaacggaaattgggaaattgcgcgtcattttgatgcttaattaacccaattaattaattaatgacatcatttaatctctctcatcattaattgacatacaatttgtctgtggtggaaaggttcaagaatgtttcaaagacaagcttctgttccatttcatcccgatggatgcaaatttgtacagcaaatccggcagcattcgattcattaagatggtcttggcataatttggcgatggcattgttgcttggcaccactggattcatgcttttatagcatgcgttcagttccgcatgcctaaaaaacaatttgtgagaatttggcaaacaattttaccattttgcaaattttttatggtgccgttttgtgtacaaaactttttttataagaaaatttaatgaaaaatggaaattattgaaaaaattttgtatagtgcctaaaaaacctagactcttatgcatatgcttaagctttaagtttaggcctaagcttagacttgcttaggcctaggcccttggttaggtctatgcctatgcaagtctattaggcctaagctttaggctaggcttaggcttacttgaagctaagcttaggctaagcttaggctttatttttgaaaacatgaattgccattattatctcaatttggcaccaaatttttgtgccagaatttcaatcactttgcgcattttgttgtcggcactgacatgcaagcattgaaaaaatctttgtgtgcattttccaaataatgcggcggtaattttccgatctcgtactctttttcatagtcattgcacgcaattcggtagggcctagcggtgatgttcacaatgaatttggccacctccacggggaaaacaattttcgaacaattagtgccaaaatgggacacaaattcggaaaatggttgaaacgaaaatgtttgttcttcggtggttgtcgggattgaagttgttgttgttgttttgccatgggatttggttgtgccaacaaacggtgcctttgtaaggcactaaaaatcaaaattaattaaattgagaattttaaatataaaaaaattggactttctctttgcacaatttgttggtgccgccgttttctgcgcaaaattttgtgccaaattcgaatgccaaaacaaatggcataaaatcgtccaaaaatgcggcagaagaaagcgcttcttgaagttcgtttccgagtggttcagcatctgtaaaataataattattattaaaatattattattaatttggttttacttttggtcaaattaatttccaaatatttttccgtttttttcgtttgatcggtgccgaaaatgtcgtcgaatccatggcttaattaattaaattcataatttaaaatattttatctctcccaatttgcctcgattcgtagctgatcactccgtcttggtgcttggaaatgatcagaccgtgccattggtcttcggcaatctcttcggcacattccacaaatttcaatttgccaattattcctttgcccaccccaaaacgttttccgatttttctgtttttggccatttcgctttggtagcagatgaggagcctaaaaatggtttaaaaatagttaatttaaaataaattattgaaatattttactttgtgcagccattttccaccaaaattgtcccatttttgccattgcacaatttccaaatgccaacgtcggacgacaaagggctgaaaattgaaaattttgaaaaattagaaaaattcaggccaaatatccaggctttgattaggcctgaatcaaggcttagactcgattattttgaaatgcttttaaaatttaaaatatttattggtttgagattacttttgaaattaccgtatcggaggagctgagcaattaatgaccaagcaaagaaagacggtcaatagagaaaaagagttcatttgctagttaattaatattaattatatttaatttatttactattaaaaaatatttttattttattttacaaataaaatatgtattcccaaatgatcaaatgaatgaaatgaatggatgaaaatggtgggatggaattggttggtgcagtaaattccgtcgttggacaaatcactgaattttctgtgtcgacgtgtaaaaaagtaaaaaaaaaaatgggggaaaagccaccagcagaagaaaaagcggacaaacgaccacacattttgcagcagagattgtggacaccgataaatgacaaaagtaatttattcatttatttattttttataaattggccaaatcatcacaaaatcatccgacaaattttccaccccatttttcatcggacaatttggcgtgaaatatgaatgaatgaataatgcataattaattagtatacaataaattggaattctgtattttttaattgttatggaaaaaaattataaagcatagaaaaagtggttgtctttttttcattggcgcaatttgttgttgattttgtttcggtccactaatgaagttcaaaagcgccgttttcgattcggattttttactttttgttgattggcgccgccgccggcttattttaaatttttaaatttcctataaattttgaaattttgaaaaaaaattaaaattgcctaagaaatttttattttagttaatactctataaatgaataaaccaaatatatccgaaggtgtaaagcagggataacagataaaatcagcaagaataaatgataaagtattatatatgatgatggtgacaattaatttgctaggcttctgctcacagggttgctgggcgcaattacggatttccttaattgataaaatcgccgcaattactactgatttccaatagaaaattcacgtatacagtcctgcttctcagtaaaaccattgtgatctgagcatctggacttccagcagtgaagctcgagagccgcgggctcgattcgagaaaagtcgggttttttgagtttcgggtctcttggtctagtctcggtctcgtggttaagtctcgatctcgagtttcgggaaatttttggtctcgagcatcacgagctaccagaaactatcccatactcccttccagttttatggatctttatgctttggctttaaagcgttttatccgtccgcttcttgcttaatccttacaaatccatcttttttttccatttttgtacgtttatccgtcccctgtcaaatcttaactttgtgtgcactgtgaccactaacatgggcgtcactgaccattaacctctcccatctcagcatttttttcagatttattgtccaaaaataggtcattattgtcacacattaactcgtgttgagtgcgatgagtcattccacaaaaaatcaattaaaataataataataaattattatttttattattgttattgtacatatgtatatgtagaacaaaatgcaacgaaggatcaatgaatgtcagcagactcggaagaaaaaagtcactttccgcgaaacagttgaggaaataaatggcacaacaacggaaattggtaggaaatgaacaataattaaaatttaataacaattttatttaatttattttttcttgaaaactaagcttagatttttacgaaataaaatgacaaaatatttgccaaaatatgcaataaaatattatgcttttttggacaataaatttttagaaaaacatgaaagagatggcacaaaatgccatcaaaaagaaagacccaattaggcctaaaagaaatttaattctaaaaaatctcaaaatatgtaccaaaaagtttgaatttgtagaaaaatatgtaaaagaattttcacaacacctaactatattattattaaaattataaattgatttaaatgtacattaaaaaaagaattcactttaaatttgccctcatttgtcagggcagggagcgcggctctttcgcgtttacacaaatttatttcatttaatcttttaaatgcttttttgacttttttttttatctgtgggttttttaattaatgctgctaataataatttaattcttaatttcaatagtaattagcgcgtcttaattgctttttttttgcaaagaataattttaatttaattcagtgcacatggaaacgtcgagccatggtaatcgacgacaatcttctgacatcagcaccagcattagggagctgcaacaattacacgaaattgttttgtccatccaaaatttggcggcaccaaattcacggcgacggcattactcatctgctgatgatggtgagcatggagaagcatcggttgccattcaccaactgcaacaggccactcagcaacttcaacaagttggatgagcgaattaataaaagaaatttaaaaaataataattaaatttaaattatagcaaatgcgcgaaagtgatgcaaaatttgaatatttgtgccgagagattaggcgaaaagttgagaaattgaaattgcttcacattggcaccgcacttcaacttgaacatgtgaaaatttaaaaatttctgagcaaaattaaaattggcaaaaaaaagaaaaattatttttactatttattattgttggtttatccccggcagattttgggtcgaattgctcaattagaacggatgaaagccttcaggttatcaacgccttctgctgaatgcatccgaaatgcaaataatggtaccagcagcagatggaacattcctcaaaaatcggggggagagtgaattctcgaaaatcggaggggggggggggaattctcgaaaatcggaggggggggggggaaattattgaaaatcggaggagggggaaaagaattctcgaaaatcggaggggggggggaaattattgaaaatcggaggagggggaaaagaattctcgaaaatcggagggggggggggaattctcgaaaatcggaggggggggggaattctccaaaatcggagggggggg

SEQ ID NO: 1546 - DNA, 3663 bp, Heterodera glycines
agaaaattgtgggaaggtgggaatgggaattctcgcaaatcggattatggagggggaggaattcaagaaattcggaaaatttttgactctcgtcagcactaaattatacccaaatataaattgacagtcaaatcattgatctaattatattaagcattgacaacgccatttacagacatgagaaagaatggcaattatcaaaatgtgtgtagaaatgcttttcattttactccatcaccgatcacttgtgatcagcgagtgcagcaaaaagatggggtacaaaaataatacaataattattttatattattttaaacattagcattttttgaaatgatttttaaaaaattattcattagcattttaaatgatttaaattgtaaatcccaaaaaataatccgttttctagctgacaatttgctataattaaaaaataataattaatttcagttgtttgctatacatttgaaaaattgttgggacaaatacgcctgtcacattggcctcaaaatccttggcactcaatttttgaaggttcaaaaaacagatcaaagcggtaaaaaactttttagttccatatacaaaaaacattttgaagggttaagagatttttttatttaatttaaaatttaaaaaaatgtaatttttttaaattaaatttttcttgtccagtggttaaaaactgagattcctgaccaagaaatttcatgattccagggatggacaattttttgtttatgaaaaagtcaccaaattatgaacaaaaatactttgaatgtaaccaaaattaaaaaagtacagtataccattatcattattatacagtgggttggagttctgtgttcgcaacatgctgtgttccggcagaaagtgccggcattttttacttcgaagtgcgcatttttcacgtgctcaggtaaggaggcaggcactaaaaatccaggacaaatcttggcttgtcacggcatggacccatgcttgtgtaccaagatttttgaaacatattttaaaaagcaaataaattatttgaaaaaataaattaaatggttaggaaaaattctctaaatttttaattgacaaaactaattctacggtagtggaactaccgtaggccttgtgctgggggtgggaatttgaaattttgaacaaattcaatataaattattattgtcctaaaaggtccaactttttaaatatgatatttgtattaaattaaaataataatataacctacaaaagtctacggtattgatctaccgtaggcgtagagcactgctgcttctggagttggaatttgaaattttgaacaaattcaatacgaaatccaatgtacatttcgggcaaattgaacattgacaagcatgctattgtaattttaaaatttgaagttgcttcaccatcggactggccaccaagcaaatgccattggcgccacaatttgccctgccggcacacaacgcttcttccgctgctgcatctgctcccggtggcaccacccatttgtttggtggcaatgaccattttttgttaatgatttccatgagcagcattaagccaacacagcaaggatcaacaacaacgaacacaacaactacaggatttgcatgtggggatattgttggatttggcattgaattggcaaatcgacggatttttgtcacgaagaatgggcgccgtttgggtgaataagttctttattgcactttttaggcgcccaatcggtgctaaatgactttactcaaaaacccataaaaatgggcgttactcaaaaaaccatcaaatggaaaaattttgacagaaaattaattcataacttcgcccaaaaagaacagaattttaaaatttgggtattcgatagaatcaaatccctcgatagcatgcaaaatttcaaaaaaattcattaagtttcaaaaaagttatgacctgagaaactcaaaaactaagtttttttttttttgaacatttttggtcgtaacttgttgaaaccttaatgagattttttgaaatttcgcatgataattagaaaacaaattgtgctatcgaatgcaatcaagaataaaaatttggttgcttttgagcaaagttatatcaaaaaggtattttcatttgttggtttttgagtaatgacccggcaccatccaatcagtgacgggtcggggtcactttggcgcgggccattttgtttggcgcgggccattttggcgccgcggactttaaagtgtcataatttttttcttacccaatcaaataaaataatcttgataccatcaaataggtctaaatgttctttattagcctgcaaaatattagaaaaaatgaattctgtttgacaaaagatatagcgtgcggcgccaaaatggccagaaaaagtcagttttttgagggtttttggccataacttttttgtgtatcaattaatttttttgaaattttgcaggctattagggactatcaagcgatttaaaatcatatcaagcttatttaatttaaatgagaaataaaaatgttatagcgtttggcgccaaagtggccggttcccatcagtgaccatccccagttctcagtttcctaggccatgtgaattttttgattcttggccaatgcctacattcctggtattatattgaaaggttgaagtctatagaacattttttgtataactaaatttttaattaaaaacttgaatatactcgaataatgttgaatttcaatttttatcattatagtttttttttcttaatctcttttcttgtatttataaattcctgaggctttaagcttccgattgataccaaagaatgtaaacattgaccaaattagaaaaagctatgaccaaataaactaaagatgatcgatcattaattgaacgcctaaagtggaacagtgccaaaaaattattaaacatattttaattatattaaaaaacattttaagttattgccgatttgttcttttctgctgcccaaccgctctttccgtttgtctctttgagagattttggtgccacaattgaagccaattttgggccaaacttcaaatttaatccttaaaaagcgtaagaaaaaaacacacattttgttcattttatgcgcctttccgtggttttatttatttatttttttttattaaagtatgcattaaaataaaccatttatttttcaaaatatggcctttgttgtatgtatagtataacaacctgtaatatttttttgttattactttacattctatcattcttctacataaaaaaccaggacgaatcggaaagatcaggaccaatcaaaagaccagcaaaagaataatttttattttatttgaaaaatcaggccgagatcaggacaaatcaaaataacagaagaagaataatatttaataatcatgattgaatctgaaaaaccaggacaacggaagaataatttttattttatttgaacaaaatcaggacgagtgtcataaggtttggcatttattcacgtggacatataatgacaaataattgactaatggaccgcataaatatggcattgaacaagcagaagccatcattttccaattaaaaaatattttcaatttggccattcgttttttaattaaatgtatacgcgttttatttttacattaaaaatacaaaattaaaatttttgtttaatttaactctttttt

SEQ ID NO: 1547 - DNA, 1538 bp, Heterodera glycines
agcgcagagaaattttattggccgaccggttcgagtatagctttgaagctttgagccgaattgcagatggttagtctgatgtattttattggcattttacattgcattttacgctccaatagagcattttggcgtccatgatcaccctctatttctatgactagggatgcaatttatagtttttttagaacctaaaaactaacgattttggcggttttagttactgtaaatcgcatccatacttatggcataactaagtttacttttgattggacacctcaaaatgcatttggccagtaaaatgcagtagcgccgcgttttgatcataggcattgaaatttatcgctgcagatccggaattgggtgcttatggacgagtggacgcatggattcgaaatcgaattcaaaacaatggattacaggggaggtctgcaagtttcccacaggaaatgtggaatatgagtgaaaggtgaaagtggaaatagaattttaagaaacaaaaatttagagttgagcaaaatttaatgaggacaaataacagcatcgaggggtggcatcgctctttcaatagccaattccgcttccttcatccgccattaagttattttgtcaaaaaaatgaaagaagaagacagacactggaatttgattaagcaagattacaacaataacccacaaaatggaatgcgtggcaggggaatggcaaggaaaaacatttacgtacagcaggaccaagcaattcgcgccattttcttggatcgtcataacagaccttttttggcctatctacgtgcaatcgcttatcgaatgccggaaccaaattgatttgattgagatatttttaggaaataatccgttctaatgacttgaaaatattttttaaaatagaaatttactgtaggattggattgtccactgtcggattgtccacttctgtcggattgtcctcactgtcggattgtccaactgtcggattgtccacttctgtcggattgtcctcactgtcggattgtccaactgtcggattgtccacttctgtcggattgtcctcactgtcggattgtccaactgtcggattgtccactgtcgaattgtccactgtcggattgtccactgtcggattgtccactgtcgaattgtccactgtcggattgtccgggagccgtttctgatggtgttcagctgcaattttctttttcctcttcagtttctgctcctttttctcctccctttttctctcttttccccccattttctcttccttctcctcccccttcgctgtttcctttttgctgttgttgatttcgtgtcacgacatttgcggccaccagccaaaaacgacaattgcggtccgtcttttgcggcccgacatttgcgcctcggacatttgcggcccatttcttaagggccattttcggacatttgcgtcccgacatttgttgccaaaatcaaaataggtctctcatcgaaaatcctttttttctcttcaaatttatgccgaaatttactcaatcgagtaattctttctcgaaatgggct

SEQ ID NO: 1548 - DNA, 4482 bp, Heterodera glycines
tttctcttccacatttctctctctctcttccgtctctctcctcttcaaaattctcgcgtttgcggagatggtggtgtctgatggtgttcagctgcaattttctttttcctcttcttcagttgctgttcctttttctcctccattttactctctttctcttccgtctctcctccttccaatgttcttgcttctgctgatgttgttgtttctgatggtgttcagctgcaattttctttttcctcttcttcagttgctgttcctttttctcctccattttactctctttctcttccgtctctcctccttccaatgttcttgcttctgctgatgttgttgtttctgatggtgttcagctgcaattttctttttcctcttcttcagttgctgctcctttttctcctccctttttctctcttttccccccattttctcttccttctcctcccccttcgctgtttcctttttgctgttgttgatttcgtgtcacgacatttgcggccaccagccaaaaacgacaattgcggtccgtcttttgcgcctcggacatttgcggcccatttcttaagggccattttcggacatttgcgtcccgacatttgctgccaaaatcaaaataggtctctcatcgaaaatcctttttttctcttcaaatttatgccgaaatttactcaatcgagtaattctttctcgaaattgggcttgttcaaaaccccatcagagcttaaaagttttttattaaaagtaattatttggaactttttcgccactatttttgccactatttagttaattattttgggattttttgccactaaaaatccgatccctacttctaacatgcatttttttgagactttttttgactttttttacactttttcggatttttatgacttttttgagtttttgcgacttttgttcgtgatttttttgacttattgaggcaaagtttgagttttacagaagaaaatgccgaaaaataaaattttcggtcgataaaaaggcaatgaaacctggatgaattttttcttaattattggaagattagaagtaatcattaagcagaagctaagcgatgaatcatctcaccaaaaagctatgatttataagacttaaaaattcaagaaaatcctaattttttgtaaactataaatcaactttttggtgagatgattaatcgcttagcttctgcttaatgatagcttctaaacacgttgagctttcgttgaaacaaattttgaagaaactaaatgacgaacaaaaaaattatggccattcccatttgaaattgtacgaactgccttgacaccgaaaatcccggtcccgtggcactctacttaaaatagtgaaaatttactattttggcgttttgtcaatattttttttactatttcgacattttttggaaaattttgcaacacaaatgcaataaaagcgaaaaatacacttttaagaatcgaacaaaaattgagccaaaaatttattatttactaattgcagttgcaaatgagtaggactgagatttttaaggccaaaaatgccatgaaaatgaatttctgggaaaatttttaatttcttaggagtgtattttttttaatttttgggacgatttttaggagggtaatttttctgaaattttttaagtagattcttaggggtgtattttttggttttattgcatttttgttgagaaattttccaaaaaatgtcgaaatagtgaaaaaaatagtgacaaaacgcacgccaaaataatgaattttcactattttagtgacgaagctccaatggtgacatgaagtttgggatgaaatttgggcaccagagtaagggatttcaaaaaaataatacaaaataaatatgtaaaatgctaaataaatcgttaaaatctagtaaattttatgaacccttgtgcttaaaaatttatgttttcttaaaaaacggtaaataaataaaataaataggggagcaaaatagaatttagtgctaatttggattttggtgatgaatggttttggcatctttcatttgtgcttttatatgccatggtttctctgcccatctctgctgttcccattttgtttctcttctctaattgccattaatctgtccatttgattttccttgggttaatttgagtggcttaatgccctcctctgccagtgaatgggaacggacggcattttctttgctcgcacaacggcactttgggaaaagcaacctaatcctcaaccaaaaaatgaaaagcaaaaatgaatggatctgatttatgcttttctgaggccgaaagtgatcatttaaaagtgaatttttgtaaaaattaagcatatgtctaaataaaaaaaccggagaaactaattagcaactccttaaaataagaatcaactaaagcttataaaatcttttgagaaattatttttccatattataaaattggtaattttacatacaataaagaaggttgacgcaaattccgagtgaaaaatgcaaaaaaaaaatttgttcgaattcgggtccgggtttcgaaataggtcgaaatggatgtcatattcgtgttcatcgcccccgaaaacccccaagagcacctgaaaatcgctcaaaatctcttttttacctcttttttatgggaccagtgaaaccgatgattacccaacaacagcagcaaaaccaagaagttcaagcagtacaacaacaacagcaaattttgatgggaaacgagatgaagatggacaacagcaaaaatggagaaacaagggaagaggagggaaatagcattggggaaggaggagagacggaagagaaagagaggaaaaggaaaaattcggcggaaggaagaggagaaagaggaaagaatgaagcagaaaagagaaaggaacagcagcaaattgacactttttaaaatattgccggtgctaattgctaacggacgtcgtaaatcccccgtcaaaatcccgaaaattaatgtcacaattttcaagcagagagaaattcatacattcgtagatagcaagccatttttatgcatccgattgatttaccaattgagaggtttttgatcataaaatgcatttgatcactgatttaattatgatcagtcggtcattcttctcaattaattcaattcttcttcttctgcggctgatcattgtttttttgttgttttgtccgtcactcatttcgcccttttgtgatgctttgtcccgtttcttctgctggtggaggagacaatggccttaattaagcgcaattcgaattatttaaacaaaattaaatgtcttttctaattgctcacccaatgctattagtgccaccaagaaaaatgatcacattgtcccaattattgtcccaatttccgtctttccaatgaaccgctgccgtctccccaaatttgcatcgtttcattatccaaccgatgccccattcatttttcactttggccaatgtcagcttttcctttgtccattcgttcaccaatgcaaatggcaccatttgcattggcgacacatgaacagaaaaatgaatttcgtaattgacggaagaaatggcattggcacgaagaaaatgctaaacaatttgattggaaaaacaaaaatcacaaaaatgttgggccacacctccttgaagttgttgacccaatcgaagtcctcttgtgcgttcaaatttctgcgaaaacgcaatcgcttgggttgtccatcttttctcggagagtgcaaccatttggacaatgcttggccagcagaagttgttgaatttggcccatcaaaatcatcaccaaacgcagcgggcgacaaatcataggaattgattgaagtcaattggttgagatcagtgagaattgtcggcgaaatttgacgacgcaaattgtccaaatgatcaccatcgttaaagcccaagtggcgaatgttttcagaaaaaattggccaaatttcacgggccaaaatgtcccaaatccgctggccatccgtggtatgtgataatggaatccacaaatgtaaattggtgcctcttttgtcgaaaatttggtgatttgaacgaagaaaagcgatgacggagtgatcgatgtaactgtgaaaatggaaggaatgcttttattgtcatagctctctgatttttaattactaaatccgaaggcgcttaaaacggattttgctgggcaacggacggtccggcaatggaaattccataaatttgttatatttgtcatccatttgtacaaacagcttcggttctggtcctttgtccttgctaattgcgattggtctccaaattgtcaattcgcttttgccattgaaatgtttgtccaccaacgcattgaaacgtggcgaaagaagtgccaatttgaggccgagttgaggacggtcaaaactggggaaaatgtccatccaaacgtcgttgcaaatccaactgaaatggaaaattacaaatattttcttaaaaatattgaacaaaaaaaaaaatttggggaaaaatttttgtgaaattttt

SEQ ID NO: 1549 - DNA, 2638 bp, Heterodera glycines
tgatccttcccctttcctttgtgaccgaataattttgatacagtatcccccaatttcctaccgtttccgtcttgcccaaacaaatcagcagaacttgcgattgatggttccgctgtgttagctcgattcagctcagcaattctggcaatcagaacactcatttcctccgatgtgctcagatttggaataattgctggaaataaaataattttacaccaattttttgaaaaaaatgtgaattaataaaataagaaaattaatttgtaactttttacccttttccttttccctatggtgaacagtcaaatatttggcatctgtaaatttaaattcattaattttatcgaatatttaaataaatatttccataaaataattttattaattcctttatttattatttttaccatttttctccttttcctgttcaattttggccaatttttccttcaatgccttctgttctccaatcagttcctgctgctgctttaacttttgttcaagtgtcttcttaagacaaatagggaaaacagaaaataaaatatttttatagcaaaactcacagtttcgagttccaatttggccatttccaattccatttccattctggcaaacttttcacgaaattcctgaatttaaattagcaaaatctcttttgggttgcacataatactaaaaatatttttcccaattgtttctgtctgtttttttgtttgtttttctttcgcccaccttaagctgttgctgatcagtgatcgattcactgttttttccatcaaataattgtccatcattgtccaaattaattgcatcgccattcacttctaaaaatttgggttttatatttttcttattttcctccattttctcatctttttttacctccatttgctgctgcttgtgtgaaagcatctccataatttattgaattggtcaaaaatgacatttttgtttgataaaacaagcttatattttatctttttataagaaatatgtttatgttgaataaataataaaaaataaaagagagaaataaaaataaactagcgcgctgtcactaatcattttatcaatctgttttttttcttttgcagtaaattttacatttttctaaacttttctcttgcttaatacgtcactaggggggttggggtgatttccctaccgccacttccctaccgccatgtccctaccgccaattccctaccagccatttccctaccggccacttccctaccagccatttccctaccgccatttccctactaaggcatttgggccatttccctaccaaagtatgaatattaataaacagtacgattaaaacaagcaagaaaattaaataacattttatctgtttcaaatcacggtctcatttcataatttcgagaaattccgatcaaaaaggtaatgataaatagatgattaaagcgctgctcaagtggaaaaacattggggtctccattgttgagtggtaaataattttgaaccatcgtgagaattcggcggtctgcttcgcgatatttctttgccttttgcggtgggtcttgtccagttgaacacttcgcgaagtcatcatccgataacttttgatccattcgcagaaggtcaatgaaatgccaaatcgatggatgtgaacaggcaaatgcgcattgcaggcgtctgtttgcggcttctgaatggttattcgttcggtcatcgccttgcagtgttcgagtgtaaacactccaaatgtttgggtcaaatcgcgggcgtgttctgcttccatcatgcttaagacgacccgtgtagttcatgatgaacctaataaaatacatgtcagattcgtgattagcgacctttaaaactccggataaaaaattatcatggttttttatcttaaaaaaattttgcaaaacaaaagggtccccccttttgtttcataaagacccacttttaatatagcgccaaatttttggtagggaaatggcccaaatgccttagtagggaaatggcggtagggaaatggctggtagggaattggcggtagggaaatgaccccaacccctaaattttggttactttttagtcgaaatctgtgcaatttatgtcaaaagaaatagtatcgaggcgatcaacaaataaaggaagtggagccaaagaaatcattcttaaaaaatatttttttgtgagatttttggacctaattcaaagcaaacccccgcccccgtccccgcgggggcgggttcgaatctgagcagaatgattatttttaggtgatggttttctgattaattttggcttgttttaatctattttagaagttaaaatgaattttttaattaatttccgatattttgttcgaattcgggtccgtggttctaaataagccaaaataaatgccatattcgtgataaacgacccaaaaaacctcgagaagtctgaataattttctttaatttttgtttgaaaaatcaattacttaacgaaaaatcctagataaaatcaatgatttttcaaaagccacgggaccgggattttcggtgtcaaggcagttcgtacaatttcaaatgggaatggccataatttttttgttcgtcatttagtttcttcaaaatttgtttcaacgaaagctcaacgtgtttagaagctatcatta

SEQ ID NO: 1550 - DNA, 7458 bp, Heterodera glycines
  unsure (1)..(7458): unsure at all n locations
aaagaaaaccaaagaagaagtaaagaaggatatggaagatgaggaaatgacagcaattgcgtcgatccaccgtaaataataaagtatttaaaagcatgtgattatttgatttagcccttaaacattcatcatgattggaaaccaattttacacagataaagaattaaagctaaaaatgccccttcggtatgcttatttctggtccatcggggagtggaaaaagcagctttctagtcaagtntatgctcgagtcctcagaacttattggtcctaagcccgcttccattctttacgcattcggtgaaatgtccagcattgtgcctaccctccaaaaatgtggtattagtgtgtattcgggagtccctccggaagagttaattaaacgcttacctaaaccactgcttctaatccttgacgaccttttgctatcgattgatgaggcctatttaagtgcattattcacaaaaaaatcgcaccatcagaactttgccgttgtttttgtcacccaaaatttgtttgaaagacggattaaagttgcaagacaaaacgctcaatatttggtactaatgcgggcccccaactcagcacttgctgttaggaatattggagttcaactctttcccgggaaactggattattttctctcggcataccgtattgcgaccaataaaccctatggataccttctgatcgatatgcatgctgcctcaaaccctttgctgaggcttcgaagcgggatatttaaggaggacgaagaagatggagaaaaggtcattttcattccaaaaaatggtgtcttgtgaaattggaaatattgttcataaaaatattgattttattcgttcattggcaaaaacaaaatcgtgcaaaaacaaacaacgaattttaaaacgcgcaacagcagatcaattgctaacacttgttgaaatttgtttgaacattctttgttcgcgtttcaagatgacgacacgtcaaagaaagcgtttgttaccgtatgcaagctttgtccggactcttgctcgtagaaggaccgagaaaggagcacgcaagcttttagttcaaaccggtagcggacttggaggagtgttcgcggcgttgctcactccaattttgattgatttggcgcgcaccgctataaattcaggcttaaaatctgacaattaatcatttatcatggcgtcaaaatttattctcgtccccgatgaaatttatcatggtttaacaaacaatgattcggggaatatcaatttgggctttgcgcaacgtactttggagagaacaaaaagaaggagggaaaatgtgacggcgaagaatgttcattataaccaggaattggcacgttatctccacctgcgagatgaacagcaaaatcttccaacaaagttgagattacaagagggttaaaagcactgatcaaaagaggagatgaaagtgatgaagaacaagtttttgattttggggcagatggagtccaacgccccgcttcacaaagtcgcagacgccttcgacgccatcgccattacaatgatgatgaggaaatgccattaatgccgccttctccaccgcttcaagttgaaaatagggggcaaaaacggaaagcaaatgaattttatttctcatgggaggagggcgcaaagagacaatcgcgccacgaagatgcaccggttccttcttcatctaaaattgctaatagacaaggaagaagaaaactgcctccagtttcatggcgaagagaagaagaacaaattcccgctgacattcagcaggaagaaccatttcagccagccccacaaccgtccattcctatacatccacaacttaacagaaaacggaaggcacagcatgctttgaatgatgttcgagaatcaaaaaagagtcttattggcttggaagagttaagacctccttcgcttcaacaagaggcatccctacgtttcaaacagaaaaggacaagcaaatcccgagtaaccctaccacagcattcgaattcattggccttggcaaaactgcgtaatcctccgagggacttactggccgaggcagcctctgccccattaccggacgatgatacccatgattttgatctctcacaaaaccccggggtcgctgctcaggtcgagcctctcccacctggacctccgttgcctagtaaagccaaaaagcggaaaagcaacaaagcggaaaaagagaacgaaagaaaaagaatcaaaattggctctcgaaagagggacttactggcagaggcagcctctgcccctttgccggacgactttgaactctcacaacaacccgggacctcggatcaagtcgagcctctcccacctggacccccgttgcttagcagaaccaaaaagcggaaaaccaacaaagctgaagaagaatataccgaaagaaaaagaagcagaattggttcttgaaagagattatcttcaccaagtgttaccaaaaatctgccaaaaaggcaaaagaactcgggtagcgatgcactctccgaagagcagcgtcgtcagtttgcagaggatcaacatcttttcagcattccaaattcgcaacttaccaatgagcaaaagagaagacggcttcagttcgtatttaatagaaagcccgccaagtacggtgttcagggtgacaccattttgaacagcgcaggaaacccaataaccgacagcagtgtcgcccaagcattagactatattatcgaacgcagagagggacgaattccgcagtttagacagcctccaggaacaaaattgatccgcgatcggatcaaccaagaccttattttgcgaacatggacggctccaccagtaccaccaagaggacccaaacggaaattgatacaaacagaccaagcgccagaattaaagcaaaaatcacaaaaactcagaggaatgagacaggcgagagtcagggagcaagaaggattgatgcttccgtttccaacgaggggagtcaagcggaagtcgacggtcctgccaacagtagaaacggaaatcccaaccaaaagccagcgtctcaggccacaaaaatggaaaaatcaatagaaaatgtgttagaacgcctctacaatgacccaaaatcccctgctgcgttcgccggtgtcgacagactgtggctggaagccaaaaaagaattaggaaataaaattcgtaaaaatgatgtaaaacattacttggagggacatcgcacctacactttgatgcgcccaaggcgcgtaaattttctgcgcgctcgaacgactgcagccggttttatgaccgactgtcaggtggatttggctgattttcaagcactttcccgacacaacttcggcaatcgttatttaatggtggtaatcgatgtcctttctaaacggatttacgtaacacctcttcgtaccaagaaatccgatgacatggtagaaggctttaaacgagtgttttcaactatgccaatgaaaccacacagaattttctccgacaagggtacagaattcagaaatcaacagctgaaaaagctttttgatgaagaagtcgagaaatatgagagcgcacattctgagaagaaagcagcattagccgagcgcgcaatacgacaaatcaaaaatcgtgtatatcgctactttgcccaaacaaaaacccttaattgggtggacgtaattgaccaaattgttgatggcattaataaatcaccgagccgagtgcatgggatgcgaccgattgatgtgaactttaaaaattcacaacaaatatgggaaaagatgttcggagaagatcagcatagggccctttttggaaagcacagaaaaagggccaaatttgtgcccggccagacggtgagaatgagcatagcaaaaggacaattcgagaaaggttatataccaaactacggtgattaaattttggaaattgatgccgtaaaaggccatatgaagccaatgcgctacaagatacgtgatgcaaagggagagaagtttaaagggtttttctaccccgaagaattggctcccgtacgcagagatgcggatacaacatacagaatagaacgagtttttcggaaacggaaaatgccagacggaacaatggaagtgcttgtgaaatttgtaggatacccagagagagaatggattcatgagacacaacttgtataaatacttgtaaattagcattgacttcacattttaatttgtataaatgtctaacactttttttgtccatttgcccagtaatagcccagactatgctgataatgccccaaataaatttcgagtccgtctcccgaaaccaatttatttcaatggctcttgggtttgcggactacacagcataaattatgcatattcttggccctccacaattggaaccttggatgatcaatggattaacatccattttactgatggcctagaaaatgaaaagcttagagttgttagagtgcctgtcccaaaagcttccaacacaaccattgaacatttgagagaatttattacagcaactctaaagaatcacgcggagtctctcgaatctattataaaagataatacaccaataagaagaaaaagaggtgcagttgagcctacaactcctcctagtgcacgtattgtaccaaagtcacctccaaatgtcactaaaaaggtcatagtaccaacatctccgccacgtgttggacaagaacatcaagaaaatacagaagaaatctctgattcattaaccaatgtgacgaagccaccagaaaaacagccaaaaattgaaaaacaacccgaagtcgtaaagccaaaaaatgaacaaataaatcaaacagaaaatatttcgcaccaaaatgcacctagtccaaaacctccaccacctgcttcaattccgactacgaaaaaacatgaagaattaaaaagcaccattgaccccactccttcagtttcaaaacctccacctccattgccagtttctaatccggttaatcagaataaaaacgtgtcgatcaatcaaagtgtttcacaaaaaataactattccgaatgagaatggcattctcgtcgtcgatgacggcatatgtttgctcttctccgttcgcgtctcgacctactctttattatgctgataagaaaaaagggaccatctcaaaaaaaatattcaaattatagaaagctaaaaaaggatcaacggtccggtatataaatgggaacaagcaaatttattctcattttgatcagattttcaaaaaaaatgagtatcaacctccacgacaaaaagtcgctcatggacaacattttgccggtggttgagataaatcaaactaccaatggcattacggttagcagtgagcgaattgcgataccacgaacgattcagttcgacattcttggcaaatgccgagaatgtaagtcaaccgaatgtgagacggaatggtgcatttccaaggaaggcgttaccatttggtgcacacgcttcaaaataagcccacgttttgtgccatttgatgtgatctacgattttatttagctggactcggaaatcgaacacgttccgaaattccaatgagtgaaaaataagtctcgcttcgtcattgaagacgtaccggctgaccccgagggacttttaattggaatttttcaacactgtatggacgaagcaattggtgacagccgcttgaaaggagttcaaccaacacatctcggctgtatcatttccagccagttactgacatccgatatttggattccaattcgtcaaatgacacccgacaccataaacaccatacttaatcgctttaacgacgtagcgcagagcaaaaaacacaggacggggtgacgctttggggagatgcatttaccgttattgtgacaacggttaaccgaaatggacaaccagagaaaatgaagctaaaagggggagccgcgcggaagttggctccagtccaccaccgaattcatgaacaatgtcttataaaggttttcacttttttcttaatttaaaaaatcattttttagattaaaaatttcggacgggacaattactgcttattctatgcaatgcaagcgacgatggttcgggcagttggtgccatgacgcggcaacaattttacggatatctcaatggaattgatggaatgcgagggaagctgagaacagaaacaacagaattgatggaagccgttcaagcacctcttgggcagcccaattacgacgcagaaatttatgttccacggattgtcgattggtggaacgacgagaagtttgcagggcagtggaagtttaaagctttcatctttggagcaacggggcattacaagccgcttttcaaatacgggccagaggaatacatcgttccaataattctctactttgacgatggacacttcaatggggtgcagaaaagcggaaatctttttggcaagccctattgtctgagctgtgaaaagacttacgaccgaccgaaacgccacattgctagttgcaaatcgcgctgcattaaatggttaatttcttgtaattttttattaccttttattttagctcacaaataggaccacaattcccatgcaaaccaattgttggagttcggcaaaagtgcaaggattgcaataaaatgttcttcaataatgcttgctaccagtatcatctttcttccaactttgtcaaatgagcaaagagtgcaaatactgtggcgtagtatgggacatgcgtaaaaattgcgataatgggagagaggtttcttttaaaaatttaataaattttaatattggaatagggtcacaatgaccgccaccctcttgttgcattcgttaaatggcttctctacaaacttccaaagcaatacgaaacaattgcctattcccatttcggcggacgtttcgacatggtcttggtctttcgggaacttttcatggagggactgaacccctcaatgatcagaaagggaaaccgtctgttcgagatgaaggtataattgtccatgcgtttttatttaataattttcccatctcaggtgaaaagcagaaagaacttaaacccgaatgtgacatttcgtgattcttggaatttgattccgggaccgctcgcctcaatggggcccatgttcggcttggacgtgcaggacaagcccttctttccacacatggccaacaaacctgacaattatggatgccaaatttttccgtcgaaagcagattacctggccgacggaatgaacccagagaaacggaaacaatttgatcaatggtaccagcaaaacaaaaatattccgtttctgctggatgagtcattggcaaggtgaatatgaataaatcaatgttgataaaataataaaaaattaagctattgcaaaaacgatgtcgacattttaatggctggactcatcgcatttcgaggagaatttttggagatgacaaaacgaccggcaggcatcgatggaaaagccgacagagcagcgtacaaaacaccgcacaacggcattgaccctgtccgacattgcgtcacaattgcgt

SEQ ID NO: 1551 - DNA, 5014 bp, Heterodera glycines
tgaaaaacacccgaagtcgtaaagccaaaaaatgaaccctctaacaaacagaaaatagttcgcaccaaaatgcacctagcctaaaacctccaccacctgcttcaattccgactacgaaaaaatacgaagaattaaaaagcaccattgaccccactccttcagtttcaaaacctccacctccattgccagtttctaatccggttaatcagaataaaaacatgtcgatcaatcaaagtgtttcacaaaaaataactattcctcctccatcagtttcaagttcatcaataaatgtgactaaaaagcaggaagaattaaaaaacagcaacggtccaacagtttcaaagcctccgcctcaattggcagtgtctaaccaaactacagcagcatccgttcagcaaatatctcctgctcaaacaaattatactaaaccatcatcattgatcactgaggagaaactgaaggaaattggcccgccgccaaaacaaagaactgaaaaaagtacgatagagccggtctcaccgccacagcaacatcctccagctgtacccacacaatccaatgttacagtgaaaaaggccacttctcctcctcgagttattgccaccgacattattggaccaccaccaaaacagagaaatgaaaaaagcttaaatactaaacatgtgcaagcacagcttgtcaacgaaataatcccagatactactaaaaagacaacaataacaacaacaactaccaccacaattaccgagccaccgaaagaaacaattggtgatttgtttgggcaaattaaagaaccaacagagaaaaacaatgcagagcagttgcttgctgtcttgtttggaaacgatgaatggaaaaaagttaacttgagaattcttaggcaaatcattgaaggagttgagttacagtatcatcccaattttgaacgatttaaagcggtttttacacatccgagaattgaatttatctcattttcgcctcagctcggctatgtgttgggttttgaaaattcgcaacatgtaagaaataatgaaatagccaaatacggaagtgatctccgtggtggattcgcaagctttgccgtttacgcaaaaggtctaaccgagaatatgattgttggaaattcattgagctcactcctccgtgttgtctctgtgtcgggggcggtaccaggcgaatacacggaaaaaatttacgattcaccgctctatgcacgtgttctaccaaaagaagtatcagaaattgaaattgagttacgagctatgacagacggacgactggtaccattttcctatggtacagtgctggtcgtactgatatttaagaaggtgataaatttttgaaatcactcattattgtttttattatcacactcaattgataaaatggtacatactctttatgacacttcggtttcgggctatgatgcattttttgtgcaaaatggttgtggagtcggggatgactcctcctaccaagtttttcgaggagcgccaccgtttcagcgcggatggggcccaacacagacgggtgcggggataggtgatatttttcgtggtctctggcgctttttcctgccactaattcgcagagctggagattctgtcacagacgaaacaattcagactggaaaacgctttataaatagggtaatcgatgaaaaacccggtttgaagggaacgatagagacgttggcaactgagagtaaacgtggagcggataatgttttagagaagggcggatttcggcgtcaatttggcacaggagggcgaagaaagcgtataaaagctaacaattcctccattctatcacatcaaacgataattggaaaaacaataacaaaaccgttaattcaaagcaaaaagaggcttcgatcagacgcgttcgggctttattaaaaaatgacctttcacaaaattgacgcgagtagcatcgattcgattaccaatgccgttgattttttcagtatacccccgacaaatgttaccgtatcatcgtcaaaggttttcgagattttgccgagtaatccactcaccgacactccttatcattttaaaatacactcgagccaaaactacattgacctgtcaaagtgttaccttttgaccgaatttcgaatgcgaaaattgacacccccaaatggtgaatggggacatttggatgcttctgatcaggttgtaccgatacaattgatcgggcacaccttcatgcgggacctgaaaattgcaataaacggtcgtgaaattttcaattctaattcactgatggcatataaaacttatctttctcatgaactttcgcaatcacttgaagctaaagtttcgcatttaactgctgctggatacgaccgtgaagatgctagtaatctacaaaacgcaaattccgaagggttcaaaagtagaagacaacggtatttgggaggtcgaacagcacaatacattgcaaaaatcgatgccgatcttttcaatgtaccccaatatttgattaatcattgtgaaattgacataacgatacaaccccatgacgacaactttttgttaattgacaccttagacccccctggtcaaccatatagccttgagcttgttggattgaaactctactgtaaaaaagtcagtcttatggatggtttggctcttgagttggcgaaaaaattggaaatgaaaccagcacggtatgctgtacgaaagacaatgatgaaagcattgttcataagcccaggacgctatgaatttaatgcaaacttgttcatggaccaagttccacgccgcgtaacaatgggacttgtcgcaaattcagattatgtggggaacatcaaaaggagcccattcaactttcagcactttaatgtacgggagttaagtgttgtggccaatggtcgctcctatccccaggcaccgtatgacattgactatgaaaattggaaatttgttcgtccctacaatgacacgcaggaggcgcttggttttgccaactctacatatggaaatggaattgattacttttcttttttgcacactcactgtatttatgtgtttaatatgacaaacagcggcgacgatcatggcggtttatttgatctaatcaaaaaagtctgtacagcagtgaacattaaattcaaaaaaccagtacccgatggtggaataacacttattgtgatgggtgaagcggactctatttactttttggataaaaaccgaacgattgcaaccgatacaaccatttgataaaaatgtaccaaattttacttgcttccatattttttcaaccaattgtttcattgattgttgaagaaggaataaaaacagaggaaattcctgaatataatgggtggaaaagacttttgggatttaaaaattcttcagaatttcgaaacacaacaacaacaacaacaaaagggatagttacttcgattgtgttaaggaattcttcaacaactcgaaaaacaacaaaaaagactactataaaaacaaaagtaacaactaaaagctcacagacaacccatgcattgaaacattatcaaccccaagaaagcatcaattttccttttataccactttgtaaagaactacccaaagagtcaaatgtgtatgcacatattttttgttgggcaatgattatcctttttggcttgtccgtcatcagcctaattatctaccaatttcgatcaattctttggctcaaactaaccctgacgcaacagcgcaatagggcaaatggacaacaatcaaatcaccaaaattttaacgtcatcaaaaataacgagccccaagtttcttggatgcttcctatgcgatcaattacccaaccctaattcaataaaatttcccgcatcattgattgttaatttggaccctcatcattttccgggctctcattggattgcaatatttgtctatggattagatcagaagaccatttactttgatagtctgtctttgcccattaatgaattggtaattaaatcctttcttaatgcttttcctggaacccattttaaccaaagaccctatcaatcagtttcatcaaattcatgtggacatttttgtatttgttttgtttattttttatcaagcggactaacttttactcaattcctctctaaattgaattcttcgcataatccagaaatgtttgttcaaaattttattcgcaatttcccgataaaatagaaaaaaattcgttttatttgttttatgactcttttttttttttggttccgtcccaaaaaggattgaccataggaaaggaaaggcaaacattgagtgccgctcagtgccagggaccaatgactgtcgatggggtccctttccttccgaataaatctcggcgagtgttatttgccaaaaaaaaaaggtaaaaggagcgagtgacctttcccttcaacagcataggcgaatgctgattggctgaaggacaaattcaccctttttccttcagcagaatgaaaataggatgatgatgattggttgaatgaccaatatgaccattcctcttagattaatcgttggaaaatagattagtaaatacaatacacaagcaaataaaaatggttttaaaggtttaaaaataaagaaaaagactaaatattattcataatttggaaaatatttttttttaattaaagaaaaatgtcaaaatctcctccttcgaaacgagctcgccgttttttcatcgaagaattgcttcgggaaccctacaacgagctttccccaccacaaaagtcggcaaaggattacgtcagaaagctcgactcggagatcgaacacgttccgaaattccaatgggtgaaaaataagtctcgcttcgtcattgaagacgtaccggctgaccccgagggacttttaattggaatttttcaacactgtatggacgaagcaattggtgacagccgcttgaaaggagttcaaccaacacatctcggctgtatcatttccagccagttactgacatccgatatttggattccaattcgtcaaatgacacccgacaccataaacaccatacttaatcg

SEQ ID NO: 1552 - DNA, 9495 bp, Heterodera glycines
  unsure (1)..(9495): unsure at all n locations
ttaattgctcatcaggtcgaaacttgggcaattattttagttcattaaaatttcatcctttgcttatgaggagggaattaagtcaaataaaaagggttcgccaaaatataaaacttttctcgagtcaaaagactgatttgtgagcaaacgctgcaaaagtatttattattagcttatccgcaaatggcgactaaccatttttaataattacaatagacaattaaattaaatcatttggtgacaaagttcaattttgaacccgcaggaaattaaataaatttaaaattgaatttaaaaaaatcattgtcatattggcaccgaaaagaaaaactatggtgccatattaggtaagtgaagttgatcatcttccattgttcttttttttcattttgcccctaaactcttccaaatggcattaaatattaatggaagtttaaatttgcgtttatccatccgcttccattttctatgctttcagacaaatttcacatcttccaattcggctgcatcggcagcgtcagttcgcgctgtgacgattttgtgagaaattccgtcggttctcggtacaaagagttcaacagcgccccgtacacatgtgaatgcttttttgggggacccggtgccaatatgtccaacaaaaatgtccatcttccggtgactcatcctcggcccgaatccgacgcgggcacaacagcagcaggtcgaatttagggaaatgcaaattgtataagttgtcatttgctctccttaaccccccggctttatctcctctaaactcgaagacgagcaacagcaggccccagatgccgcagcattaaatcagcaattaattttaataattgccattaattattattattattaatttctttccatatttcagtgactcatcctcggcccgaatccgacgcgggcacaacagcagcaggtcgaattagtgaaatgtaaattgaaaaaggaatcatatgtcggcatttcattacctataaaaaaatgtaattaatcttttttattattttctttttagattcaattaaaatttttgtcgaattaactggcataaatgcggaaagtgccgctgttcgtcggcaccattttgatttgaatattctgcagttgttgttgttgatcagctgttgtttttttagaatgatgtgaggaggaaggaattatttgtgtgatttaattccaaaggaattgaaaatatattaattaataaatattatttataagatcattcaccgaaaaaaattcgcatcaaaaaaagttgaagtaccaaagaagccttttggataaaagtgagtcaaatccgatagaagagccaatgatttaggatttaaaaggtacaaaatcatttttgatgataaaaatgcaaaaattatagcaatgagacgtccagtaaaattcagtcctctttcgacaactcaacagtgttaagcacaatttggacaaatcgcaccgatttttctggaaagaaataataaatgataaaaagcaaataattattaaagttctaaagattttactcataatagatttgtttaattatcaccctttctacctttaaaaatcattattttcaaaatgaaaataaaaattaattatttttgttgtttttccctcattagccttcccctctcccgcccccttttgctaaacgaccgtttatccgctcaaaaatgggcaatgtccgctgcgggaagatgaacacgtagtaaagcatcagtccgacgcccaacatggccacagtgtaagcgatgctcaacgggtgggcccatgccgaaatgagcagcagagagacgaacatgcacaggcacagcaccggcagcacaagcggcgtgcgcagcgagtcctcccgcaaaggaaagtcgccccggcagagtcgcatgtacagcagggcaaccatggtgcaactcttctgcaaccacagcgaataggacctgagtgaatgtgttacaactgctcgggaatccgggccgaggccaaagccgggaatttcgggttatttgtgcctgtcccgagtcttgacgcaaattctcggaccatgaaccccgaatttttcaggattaagcagatataaagggaatgagtaccataaggaaaagtaccggcttatgggagcgtatttcacccatcggatatattatgaaatattatgttaaaaaaaaccaaattgttttataataaagcatgcaaaaaaaatatgcgtgtgacaggattcgaacctgcgcgggaaaatccctttatgacctagagcacaacgccttaaccactcggccacacacgcgatgtttgccaaccaatttgtatcatgaaaaggatgcaacaggacaaatgaccaaaggtcaactcaataattaaccagccgagggaggggcagttatatcgaaacgagccaaccgggcattagagactattgggatttcgaaataaactggaccggggtgacgatggaaaagtgaatggtattaacggaaataaaaccccgtcttccgggactcccgctttttgtaaaatatattagtaaatcacataaataccaaaatataataccgatgaattccatttgaatttttcaaatgttgactccaaaatccttccgttaatttttaaaatacatagcataattaccagaattaatgaattttgaatgctttttgattttgaaagtgggggtattttaaagccccaatgaggtgtttcagagttccggatcaaattgaacttaactcgcgaaaagtaataccgtacccttaattgaggaattctaagttttttagtttgaaaggtttaggaaattgtaaattggaaaaactgaggttgaaaaataattttaattcaatgttggttttgtacgaatcccttacagtagaaattctgtaggaaaaaaaacaaaaagtggaataaaataaaacaaaaaatgcatgtgacaggattcgaacctgcgcgggaaattccctttgcggcgtaaatcgcaacgccttaaccactcgaccacacatgcggcgaatgtcaaaaggcactaatcaattttaatgtaatttcaaatttataatttccaaagtcactgatcacaaatatagcttgtgatatgagctgatcatacttttgattctattatcagattacggcatcatctgtccaaactgatttatattcgtgatcagtgattgtgaaaagccaaattataatattggaacaaatacaaaaattaattttgccgattcgcatgcgaatccaactcaactcacatatagccgatcagattctccaagtcgcagatgaatgacagaacgattaaagcaaacagcttaaaattattatttaatttacattcatatttaaaatgatcaaaataaaaatgcacttcgtagagaatggccacccgcggactcatcgaattggcatggaccgtactcaacgcggagggcataatggcatttttggcaccggcaaacaaataactgaaaaacggacaatttttgtcatttttcataatttgaaaattttgaccgtgacgaggcgaagatggaactgttgaggttgccaagcagcaaaatggcgaccaaaaaaggcacgacacgggagaaattgccaagtgttttttcggcaaaaagctaaagacataaaataaaataatttaatttaaaagtaaaaaattggaaaatttgacgaaccgcggccaccgcttgtgagtgacggaattcgtcagctgacataaccgagaaataagcaatgttgaccaacacgtagacgaaggcggagatggcaatgccgcacagagcgccgatgggcaaaacgcggcgcggattttcaatttcttcggtggcaaaattcaaaacgtcccaaccttttggaataaaattaaataataaaaaaatctaattggaattttagtgaatcttagttttgcctggatatccaatattttattggcttttacctgctgtaatatttaaaattaaatattttattacaattttgtggtaaaatttggttaaatttaaaatcaaacctcattcttaaaatataaatattctaaagaatgggggatttaatttaacttttttattttaagttaaaaaattatcataagatgctgtcgaatctatgatttatcagaattttatgaagcttggtgtttttaataatcacgctcgagtctcttccacgtcataaaaattcatttatttttactccattttttaattaccgttttcaaaagaaaatgtttttgaagttttttgacacaataaaaccccctattcttcaaattaggtttgctccccgacccctcgggggggggggggggggcaaaatgtcgggggccggaaaccatcgaggggcacatgttgggggtcgggtcggggaataggtcccaaaaaggtctcgggttggggggttcggggtcggggagcaaccctacttctaattgcctaattattcgttaatttgtttctttattattatctacataaattataaaataaattgaaattaagcataatgtgatcagcagttcgaaaagttagttaatgatagaatttattttcatgcccaccattgtaagcgaaaagactggcaaacaatgccagcacaatttcgcacgcttctgtctttgtccccgcaaaagtgtcgcggaaattctccgttctgccgcgaaagatgatctgttctgtgtggaaaggggggaaaactgtttaaagactaaacaagcaattaataaaatgatttttatgagcaaatgcggacaaatggcagaaaaggaaaaacgaagggaaggaaaggcaaataattggaattatttggtaaattaaatttcaaatttaattttgtgagaattttggttgctccaaagaatgaatttcctcggccttttcacttgcttatatctcacctgataaagtcccgtcaaaataatcagcgcaattaccagcagtttaagcaccgttaaaatcacttggaaacgggcggcgattttttgctgaattaatgcgaacaaaaaatatttgcccatttaaaaacaaaaaatgccaccaaagagaagagattgatgaagcagatcagccaaatggccagataaccgatcagtcgcttcagcacaaaagccattgtttcactttgttccaacgatggccaaaagggcctcagcccgtcgaagaaatactcaccaaaagtcagtgtttggatggccattattgcgggaaatgtcagcgaagtggagacccacagaaaagcggcggcgatgggatgcctttaaagggattatgccaacaattagcatattttaattaggcactttagaattatgccaacaattagcatatttgaattaagcactttcggattatgccaaacaattagcatattttaattaggcattctggaattatgccaaacaattagcatatttgaattaagcactttcggattatgccaaacaattagcatattttaatttggcactttcggattatgccaaacaattagcatattttaattaggcactttggaattatgccaaacaattagcatattttaattaggcactttgggattatgccaaacaattagcatattttaatttggcactttggaattatgccaaacaattagcatatttcaattaagcactttcggattatgacaaacaattagcatattttaatttggcactttggaattatgccaaacaattagcatattttaatttggcactttcggattatgacaaacaattagcatattttaattaggcactttggaattatgccaaacaattagcatattttaattaggcactttgggattatgccaaacaattagcatattttaatttggcactttggaattatgccaaacaattagcatattttaattaggcactttggaattatgccaaacaattagcatattttaatttggcactttggaattatgccaaacaattagcatattttaatttggcactttgggattatgccaaacaattagcatattttaatttggcactttgcccccgataaactcgccattttgcgtgacttaggtaggcaaagtcacagcccgacttgcgaatggaagtgccttcaaattttaaatttgttgttttatggccatttgaatccccgttgaacttgcccaactccacgtaaaccaacgcgccgcaactggccaccacagcgccagccacccaaacgcagagggacatgccgatggagccggtgtgcagcagaatggaagtgggcgagatgaaaatgccggagccgactatgtcgccggcacagtaagcaattgcctacggtaaaaggggtcatttaacatatgaaaagccttcccatgttaagtcaatcgactaacagacttcaaaaacgccaattttgttattgttgcccaatttgttggagaaagaagcggacgatgaatggtcagaaagaagcatttggaattgtaagcaaaaatgaattaattacctaattaaaattggaatttaatttaaatgaatcggaaaggattttcttttgtctttcgctgcgtcggggcccaattttcgctgctttctttcactgtttgcactctgctaatttatttttattctcaagcagtcagaccaacttttgggtaacttttgtcgtcgattggaccaaagtttcttcgctttcgtttgtttcatttttcagtcatcgcccgaaaatgacaaaaaaaaattggaggaaaagcaaacaaaaagcacaaaatgttatcaccaattggttaattatcatcaatcagcacaaacaatgaaagaagaagaagaagaagaagttgttcaattgtattttgaggcaaagcaatcgaaaaaaagaaaaattcaatggccaaagaacacagtgaaaaggcaacacaatttgagaaaagatcaaacaaatacaacgacacactcattaagcaattaattaattatgtcattaaaatttaacaaaaatcttttccttttgagattaaaaatgaaaaaataaatacatttaacaattttatttctatagaaaatgttgcaaattgtcgctagtctttttcataatgtccttatcagcttatcactttacaatatgaaaaaagtgagcaaaaaatcgcatgtgacaggattcgaacctgcgcgggtcaaaccctttgcgtcttaagcgcaacgccttaaccactcggccacacatgcagtggacaacggacccaaattatcattttctgtgtgaaagggcataaataaataatcaatgattggtatttgaccaccgaatgtcacgccaaaataagcacaaaataatcaaaaaataaaacaatttattaaaaaaatcaccgaaatagtaaaaatatcaagcacaattattctgagatcagaacaaataaacatattttcaattgatgcgtccttttcacagttgagttgcgcgactgatctgaaccggatggatgccgcggcttcgcagcaactgaacgaaaaggcgcacattttatacgaaatataattaatttaaaatcccattaaaaaatttccaagaattacttagataattattatgacatgccattgttcgaatgcaatttgttttttatttaatcccggagaaacagtacacttctggcacttccaccgtacctcttcgaaactttcgtcagctttgtcaaatgactgtgccgtcgtggcggccttttcgcctttctcggcaaattccacgtgatgttgttgtcctacagcacgtgcggcaccgcttccctcgcctgagcctttcagcgacgaacgcgttggcgctgcgcgagtgacgtcaccagcagaagtgacgacggcgccgccttcgctacgaagtgccgggacatttacgagtagatgcgaaagcggtggggagccattgccgacgatgacatttttctaatgaaaaagcaaaggagcttgtaagagcaagaaattagcatttttgagaccaaaattctgtaaaaaagattctttattcgttttctgcgagtaaatcaatagttctcataatttcatatcacttttatttaaacaaataataattttaacctgaccctctcttaatgaagatgaaatttattatcattgacgaattttaatttgcttcaatttaatgtttcaaatacttatagattctacgacacattaaatatcgtttcctgtaatttttcgctataaaaattactaaaaaatattgtgagaatgtaagtttttggaatgtttgcttaaaaccagagctcccaagtgtccttatttgtaagatttgtccttattttggcacgacctccttgttttgtgcttattcatggatttgaaaataaaaattcaaaaagtgaatatttttgaattacatattgttttttttgaagcgagtatttgaatgatttctatttaaattttttcatttcttgagttaatgcccaaaatttcaatgaaaatctgttaaaaaactgtcaatatttctatttttcctccggcagcgcctatcggcaccgccgggccccctaaaacttatttattcataaacaaataagctcaaaatctcaaaaattggtcatttttgacaaattctgttaacaaatacgaagtaaattttcaaaaaattttctcggcggcgcctatcggcaccgccggacccacccttcctgtcccaaaaagttttctggaaaacgcgcgccgcgaaaaaaaacattttttgatttttttcattttgaataaaactttccaaaaagttggtttttgactccaaatgatgattttttatcggccaatgctgattttgaaaattctcaattggcagctccggtttttacgctaataaaatattgttttaagtcaatttttcatgtttttattgcgtttacttcacgctactattagttttagaaaaatcttatttttggagtccgaatcttacttttagcctcatctgtccttattttgaaaaaaaaaaacttgggagctctgcttaaaactcataaaattgtaagaatggaagaaaaagggaagcgcgtaaaatcgaaaagtacatatcaaacattaaaacaagagcaaaacttttactcttttaaaaacgaataattttttcgggacaaaaaggttcagctaaatataaataaaattaaataattttcatgccttaattttaataagcaaaattaattaattaattaatgcatcgcatgtgcccaccaattgttcagttgtttgtgctccgccatcagctgctgttggagtgccgccagctgtgcgcgacacagtttgtgccaaagtgcgcacagtgccggccaacaattgggtgactttttcaccgctgtgccgtcgctcggtctgcggcggtgagtcggaaccagcggccatcatttcttccggctcctccagcaacatgttgtgaatggtggacggaaagggcaccacccagtccgcgaaatatccttaataccccttaaaaggaaagaaacgggcgngaagcgcccgtataagcccaa

SEQ ID NO: 1553 - DNA, 1804 bp, Heterodera glycines
agactggatccgctccctccccctctcgactcggacaatcggtcacctgcccgttgcaccgctgcggcgttgtccgtccgtacccgccgtgggtgccgcccatcacggaaaaggtgcgcgtgaagcgtgcaaatcctccggtgccgtggtgacgttgccgcgcctgttgatgatgattactgcggacaattgtggacaattcagtctgcgcaaaggcgtccctgcgcgggcaaagcccgctggtcggcgtgccggccacgctgttgtggttggccacgtgcaacgaggcggtccgcgttgggcaactaagcgtaaaactgaagggtttctgtgtaacaaattttcaacgcctttaagtttttcaataattaaattttaagttttccccaattttcccattgttttgtccactgacccaagtgacagcgattgtgtgctgttgcgcgccttcgatgatgagaactgtttgctgtcgttgagcgcctgcgaattgccgaaatggcaacggatcaatttggtggtggtgtaggaggagcgcacattcttctcgggccgaagcaaaatgatgaagactttggggaagaacagcagacaaagcgcaattgaagcggacagagaaaaagtgaaactggcggtcaatgcctttggagagggaaaaagtgacgaagatggagggggaactaattgggtgagtaatgaggtcgataactaattaattgtgaattagcatttcatttattatacaaagcatagatcagtgaattgagtgaggccgtcaaaattgaacaggcgggtttgaaaatagtgggatacagtacgataggaattttgtctgtgcccattcttgcttctcaccttgtttacggcgttcacatacagtacaacgaacgcgccccaagtaaccaaggtacagtaccttaaattggcaaaatggcaattaaatcaaagatttaagaaataagcaaatgaatgtcaacaaaaaaataaacttgcattgtgaatccgatgaatttggcctcgttgaaattctccggcaaattgcgcgttttgaaggcgtacaaagtgcagaagagaatcagaatgaaattccacacgaaaggggcgagaaatgcacgcgtggaaatggaacagatcagaaacatgcgacgctaatgaaaaatgaagcattaatttaaaaatttattaaattaaagtttaatgggataattaccggcatcaaattggggtcgaaccccgcctgaggcatctcctccatcacactgacagcaacaattgcgcactgaacacccaccaaggaccacgtgattactacctgtatattttaattttgcataattaaacagttattaattttcctcgacaaaaaatagcatataaaattggagattcaaacaacaagagaaaaagaaaaaaatacgcaccccatctaatatatcttttatcctttttataaacagctaaaaggatcaccattctaactataccgaaatacttgggttgaacagtgtgtcgacgcaatttttggaatgtcaaaccggaaggttgaacgaaaagatttggtaattttgtcgaaaatggtacagcacaagtatttaaaacccccggtgatcggagtgttcgtcgatctctttgccccccccccccatcgttgctccacctgactgaaagtgctgaggaagcgcggctttttggtcaaaatgcgctttttgctgcccgccaaaatgcgcgcaattcgattgggttttgtaaacagcgcggaataaatggcggagaaagcgatgggcggcaaaagtcgcgtgaaaaa

SEQ ID NO: 1554 - DNA, 2534 bp, Heterodera glycines
  unsure (1)..(2534): unsure at all n locations
tttttaatattttcttattgtatcatttttatatctccctatatttttttgtaatttcatcaaattaatttttaagtaatttatttatttcttattttttttagcaatttttatccaattaatttttaataattattttccatttaatttttaaataggtaatttaattgtttaaattgaatcgtttttaataattttttcagcaattttcatctctctgcggctttattcaatgtgttcccactgagccatattgtgcccgaccagttcaagctgttggccaatgctgtcctcattgcggtgcttctcatattatttttaatcaaattttgaaaaaaaaaattcatgaaattgttcggtccgtaaatttcagggcctcggttttttttctaaaatttttggtttttcaggtgccatgcttcgatttcgcaaaagtgcattgaatttcactaaggcctttgccattgtggaccaattcattcgcgctcaaatggcattgccacgcggcgctggcgtgtcctttgttcgccttgaccgggacgactttcacccgctgtaccaggtgtactgtaaaaattcaaaaatgcatgcattactgtagccaaaaaataaagcaaacagtacagtagtcgattgattgcacattaatcgctttttgccatttaaacatgaacagatttccgtgttgtcaaaccatccggcaaactttgacgagtccgagtactgctccattatgtggtccgtatttcgcaaaatccagcaacggacaatcaatggtcagaaaggcatacatttgtataatttttaattataatatcatccatttctgattatattactataacttccatttttagggtcttgataaatcgctaattatttcttaattagacattagacaccaatgaatttagttttgatcaatttatatcattcatttctttttaattttatatgatataataaatagaccttttaccatcaccggaaaccgaaaaaatgaatatttttttttgccgaacctaatcagttttcaggattttctgtctatttaattacaggcctattacgcaatttccttaaatttcttctcaattacccatatgggtggagataaaaaataaatcatggatataatcctataaatccctttgcagatcatctgccaattgagtaccagccaacggacagtgccgaattcttcgatatccgtccaaaatgttcaattcagctcggcattttgcactggaaaaccgtgttcaaagcaattggcttcattgtattggttggcattgtgctcggcttaatgacctattcatattatcggcatagtccaaggtaaagcaaaagcttttgatctgtaaaaagcaaagtgatcgaatcgggcgaaatcatttggccatttgaaaattctgccaatatttgatcactctttaatttttctgatcattaaatcaactgatcggtcgatccttttgccaacagatcaattgattttcgtgtcgataattgatcactctttaatttttcggatcattaaatttaagctttcgtctttttgttcacgatttactgtcaagagagcaccatgcaatacaagtcagttggcgaaggacacatgaacatgttgaagtgatcagagaagaaatcgtaagtcgtctaattttgacactttcaaaaataaacgaattttggcagaggttgcctaaaatttatatgaaattaatcataaagaattcatattcaaaagaaatgggttgttttaggatttatggttaaatttttggcaaatattggaaaaaaactttaaaaatttgaaataagataaaggcatacattcataattggcagagctttatacgagttagatgaattttgccaaagttggtcttaaaatttatatgaaaataaagaaattaaatgtcttaaaatagatattattatagcatttacgattaaaatagaatttggcaagtattggaaaagccttgaaaaatttgtaattcgtgatcgatcaaacagttttgtgatgccatctttggcatttttttttgttttgtttaggaagaacaaaaagttgatggaaatggtggcggcggtggtgcttcatttttggctgagtttgcaaaccgagcattctcatggaagatggaaaggaaggataatgatgatgataatgatgatgaagccaaagaagaagccgccgatgtcaactcacagaaagaagcattagctgctgatgaaaaagggcaacaggaaaaatagaaattttatgatttgttaaaattattaaattacagtaaaaatatttatgaatattttgttagagctttaaacggatgaggctttatgcatgaaaaattaaagaaaaatttggaactgcaacagtgattatgtacatacatcttttgcgaatttttcttcccaaaaaaattgaaaaaattttaagcaaacataaagcatgttaattanactccgaaaatttcctanatttttcanaaaatccacaaatttttaatgaaatctgctaaaat

SEQ ID NO: 1555 - DNA, 760 bp, Heterodera glycines
aaaaaaaaaaaaggtcgtcgcccgggggggaagtgccccaccccccaagccaaaatcctgggaccgtccctgttaattacattcattttcaacgaaatatgagagaaagacacacatcagcatcatttgtcggctttttttttaaacaaaaaatttcattaacaacaatttttgtgcaacattcattagcgcaaaatgaaaaagttcacatcggaaaataatttgttatataaataattgattaaatgtaattttggaagcgaaaattataaaattcattttattttatttttgagtagtagtacaatatcattttggtacttttccgtttgggggccacacattcaaattaaaaaaaaaaaatttgacaatcaacaacaatgttgtttcatgccaagctcccgttcacaaaaaaggatggacgtattttcatgggcccaccaaagaaagggaagttgtgtgccgagcccgaaaaataaatgtaattcttcccaagttttgggttcctcgaaaaaggattttccctgacccgggatgtgattttccccaatttcccattccattttaattgcccaattccctttaaattattctccgctctttatatttccatatccttttctttgacttctccattatccaattggtctgatcgatttatttacttaaaatggaaaatggttgtgaattgaaatgtggaattggtggaggcgaaatatgataaaatgtgaattaataagagataaaacgatccgagttc

SEQ ID NO: 1556 - DNA, 5180 bp, Heterodera glycines
  unsure (1)..(5180): unsure at all n locations
cggaaaagtacctatcattttataaatttttaaataattacaccatctcaagcagttttaccgttttgagaggagctgaaaaaatatttttttgtactcgttaatcaatgcataagataatgctaattaatttttatgatatatttgttcaattttaattcatattatttaatgcatttcatacaaaaagcaagaaactcttttatttatttttttaaaacaatgttccctttaattaaatttatttataatatttaaagcttttaatttaaataaaaaagcattaatacatagtaataaaattccttcatgtatttagcatattaaaaaaaatgcccagaatttattacttcttgccctgtaatttactttgttgaaaacgccggcaaaaataaaaaattagttgtttttttttttttgcttttgaaatttttgtttttggccaaagtcggaagaatacaaagcgttagtgaaactcccgataatcgatggttaagaattttaaagaaatgctcaacgacaactaaaacatcaacaaagtggctactttgttagagcggttggaaccaagggcgtaaaatattaattttttggcgaaaaattttgtaaaatacaccccataattcggaatttcaaaaaaaccaaaaatacaccccctaaaaatcgacttaaaaaagaaagatacatccctaaaaatcgacttaaaaaagaaagatacacccctaaaaatcgaaattttccacttacgaatgaattccataacgtagcggaattgcgtgtttttggagcaacgggcaaggtgccgttaagtcgaccccattctattacccatttgcaaattacacggacacctgtgtggttgttcattattattattattattattattattattattattattattattattattattattattattattattattattattattattattattattattattattattcaggatccatgtttcgcgcttgtgaactgtatattgtttatttctttctttgatagatttacgtagtaataaaagaaatcataaactattgagtattcggaaaaaaaacagttttcacgcctaaaatcaattaatttcattattaaaagagtaaaaatcttttaaaatttatttacaatattttttctttaaaaataatttttaagcggaatttgaaattctttaatattttcgtctttaaattcaattatttttccctatttagcatcaaaaaataagggaaatataaaaagaaaataataattctgtacatattgtcgttcctattttcgtttgatttgcctaaggaaaaaattctcaaaatttgataagcaaaatgataatttaagaaatgaatataattcttacaaaaataatttttcctataaatttttattgtaattcggctaattggttttggattttctttaatttcttcgtcttaaaattcaattatttttctcctttcacaaaataaaaatttaaattattaaaaagataaataaagagaaaattattgtatagaaaattaattctgtgttgtctttcctatttttgcttgatttagccaacgaaaattttttcaaataataatttaaggggttgaatatgtttttctgaataaattatagcaattaactgttgaaggaaagaatgatgaattcggaaggtataaaaattggtgccaaattaacattagccatacatttttttgattcatgaatttataaaataaatttcaaataaacagctttagaaatgtttaaaattttcgttttattcaacgcttttttgctgatcaaattcgcaataactgatgaggaacgagaaattcctcccggtggagaggttgaacaggatgtaaatagcgagatgattaaggtaaaggaaacaagtaattaaaagcgaattctcgagagtctcagcttcaaatcgagaaaaaaatggctcaaaatcgcaaactttggttattttttagacaaaattatttcggttgaaccccccccccccccgtccccttctgtaatggtcttttgaaccctggtctcgaattcgtctctaatttcgggctcgcgcatcgctagtgattaattgaaataatttggcaaaattccttaattaattatttttgtttaattaagacgctcgcctctcgtgcgatggacaaaatgaatcaagagtccaacaatacgctcatgtttatccctgtgaaggtgctcagtgccacatcacaacccgtagctggagtaagatatgaactgcgcattttggtcggaaagtcaaaatgcttgaaaaaggtaagtgcaaaatggggagaaattggcacaaaaatgggcaagtcggcactgtaatttttttttttgggggggggggggggaaatttctggactgacagtttaaatcggatttgtatcgagattactttttgttttccaaaagtcgtattgctcattattgggagggataaatgtgaaatttaaaaaacaaattttataaaagtaaagttaaatacaattttgatttaaaatgtagtttttaaagcagccaaaggcgaagaagtgcataaaatatgaaaaagaaactgaccgggcagcacgaaaggcatggacataattaaataaattaatacttaattacatgctaattagactaattgtatattcttcaggtctataaagtggaggtgtaccaacgagcttgggaaaactttgaggagattacattcgaacaagaaaaaattgcaaatatgacaggatgtttgggataaagttgattatcaattaccaaattggacatgttaaagtgccaccatgttgaataaaaatgttcaagttcaattcaatttacttaaatatgcgagggagagggttttgttttttccttttttaagaatttaaaaaataaaagtatttttaaaaccaaaaaacatttaaaaaaaaccacggttaaggtctcaaaaatggaaagtcaagaatttttttaaattttgttttttattttttgggtaattcaatttcgttttcatgtatggtcgagtttccttttcttaaaaaaaagtttaggccgaataaaaaaaactggggccgagaccgtgactttaaagcttgcatcgagctcagacaggattttgtaaagcagaaaaacgttggaaaattttctgatcataaaattatccattaaataacatttgttttaattgttaaattcccggctttttcccggttttcccagccaaaaagtcccggcttttcaacccaaaaaggtcccggtcccgggtttgcccaaatttcccggtcccgctgcactctagtttaaacagttatgacacaattttttttgcctgagccaatcaccaaaatctcaatatctgacagcctcagatcagtttcaaacatttgaatttgtcaccacaattttaaaaatggaaatttcaaaataattcttcgaagatgaagaatttttcctttaaatttttattgaaaatagactaaaatggttttgaattttcatctttaaattcaattatttttcccctttcaaaaaattaaatttaaattattcaaaaaagagaaaattattaaatatgaaaattaattctgtgttgtcattcctattttcgtttgattggccaataaattttttttaagataaacaaaatgataatttaacgaattgaatgtgcatgcttttttgaataaattatagcaattatctgctgaaggaaagaatgatgaattcgaaaggtataaataaaaattggtgccaaattaggcttagccattcattttttctaacaatttataaattattttccattcattctttttccaataatttataaattatattaaacaaaaatgctttagaaatgtttaaaattttcattttgttaaacgcttttttgctgatcaaattcgcaataactgatgaggaacaagaagttcacggtccaccggatgtacattatgcggatagcgagaagattgaggtaaaaaaaaagtaattaaacgcgatgctcgagaatctcagttttgagtcgagaaattcggaatctttaaaaaagcggtccgagtcgttgatttagatggccgagtcccttcgcaaaaattttggttgacccccccccctcgctttttccatgtataatctttggagctttgatctagttgtctcgtatctaatctcacgctcatctctcgagtctcgagagcttttcggtctcgagcataattagtaattaaaaataatttgacaaaattccttaattaattattttgtttaattaaggaactcgcctctcgtgccgtggaccaaatcaatcaagagaccaacaatacgttcctgtttttcccggtgaaggtgctttgtgccaaatcatctagagtagctggaataaattttgaactgcgagttttggtcggacaatcaaattgtgcgaaaaatgtaagtgcaaaacggggagaaattggcacaaaatggtgaggtcggcatatgttttacaagggggaagggctgtaatttttgggaaaatcgggagcacagaagtggaataagccgagatcaacagaccctggactgacatgttgaaaatcgggtttgtatcggagatttgcttttttaactcggatcgggaattattgggattagattctcaaaaaaaatttaaaattaccatttaaagcaaagttaaattacaataatggtagtttttaaagcagccaaaggcaaagcacacaaactgtacaacggaaactgacctgacagcacgaaaggcgcggactaattaattatttaattacatgctaattagcctaattatctattcttcaggtatatgaangtgagtgtgttgcagcaatcttcgaagaatttggagttgattaaattcaaacaagaaaaagtgggaaatgcgacagaatgttagggacaaagcgaccctaattaccaaattagccatttaaagcaaccatgtatttaataaaatttcatgttggcatccaacttccttaaaaataaaatatgcgaaggagcgggaagtcgggcatcgtttcttcaatgggtgttttggctttgccttatttaattacagcttgttttcggcatgccgattttccaattccgtctcttttgggctcggatcctaattgcgggatttgccgaaattttttag

SEQ ID NO: 1557 - DNA, 4532 bp, Heterodera glycines
ttaaatttatacaaaaatatattttatatttttatggtattttaattcgataatatgcatgatgatggagttttctgtctaaaaaaaagttggagctcagtccgcttcattggcccaagaaaacggcacttttgttcgctgcactttgagggtgtcccgggttttcgagcctccatccatccagtaatcccaaacacacacagccctttcgggtggtgccgggaatagcctgtgcgcaatttttacccggcgcacccatccgcagaattccactatttgttccccacaggaaattcggtacctccacgggtgtttattgggtttttgttgtttggtttgtggggaccctcggcaagtgcaactggccgcgatttgggcctccgcccgctccccatttcatcgctttgcctgcccacggagcgatggcctatcactgaccaaaactgagcccacgagtgtgtcctccaggcacatttcttttatatgaagaagacaatatattaaatgattattggatgggttcacatttcttttatatgaagaagacaatatattaaatgattattggatgggttttaatggagaagagagatttatagaagaattatgcattctctttttttgctctgacttcttttcctgtatctctcatgtttgtgcactcactgtctatgcacacatcgcattaaacgacaattcctttgattatttagggttaagtgattcaatttaagaaagaaagaaggacaaaaattctgatctgttaaaagtaaataaaaatttacctacctattatttttatgatgattttgcgtgattttttctttatttattcgaacaaaagtcgaaattcaaattttgtggacgttgttcaaaaattagtactactctacataccagcagtttgggtcctggttttatgtcaacatttttctctccttaatttacaaaatttgctcaaaatcgcaaaatttggtcatttttcggacaaaatctgttaacaaatcgcattgaaaattataaattttttcccggcggcgcctatcggcaccgccggccccacttgcgcccaaaagttttttgggaaaagcgccgcaaaaaaatcaacttcgtttttcatgttcagaatcccaaaaaatgcttatttctaacaaaaaaatgctcaaattgatcatggacgatcaaaaataccacaattgaacattttaaacgtgttttgaataaatttgtgaaaatgaggtttttttttgcatgccaaatgaggcttttgaaaattttcatctgcgagtcagttttttgaggttttttggccataacttttttgtgtgtcaattaaattttttgaaattttgcaggctattagggactatcaagcgctttaaaatgatatcaagcttatttaatttgaatgagaaataaaaatgttatagcgtttggcgccaaaatggctggcgccaaagtggccggttcccaaaaagaatacttcttactgtcttatgcgatgcaactctgggtacttccgtgttttgctacccccccccccccccctcgaaaaatttttaaaaaaatcatatcttggagttttcaaggtcactctgactatgaaaatggtgtttgtttttcgggcctatctatgacatctagtcatcgatttaataaaaatatctatgattttttgaaattaaatatccaactctgctagctttaaagctattaagatagtaaaacaatagccattttcccgttctagcaaaaaaatgtattcaccccccccccccctatttccattaacaattagactgaattaagctttatcaatcaaatttctcattttaaatttcgtactaaataatgtcatcgtcctcgaagcaggagaatccgattgaacggatgaagcatttgttgagctcgggcgaggacgcggacattcactttttggtgggggacggagacaaaaaagaggcgcgatttttttaaatgaaaatttcttttttttcaacgtcctattttattcagattctatcagctcacaaactgattttgaagcatgcttccgatgtttttgaggcaatgtttcgtttcgactcacagaaagaaaaaacagaaaatggtgaaaaaaaattttttgatttaattttttttttttgaatttagcctctgccgtcagtcccgtggaagtgccagatgttgagccagcagcattcaaaatcatgctcagcttcatttactcggaagatttgagtgaattgaacggagacaacgcaatggcagtgctttacacaggtgaaaattggcagcaaaaatttttttgaaaaaaaaattcctaggaggctggtaaattttttcggggaaaatgaatagcgccattcgaaacaatccgtttttttcttccaactcatttataaaagcgatgaatgtttactgaaatacctcatgtcaggcccattggcgtcattttagttaccattaattcgaaaaaacaatttttcgttccagccctatggaattagtaaaaaaaaaaaaaaaattttttttttaatcttttcgggagggagggaacgatgcgggggactgatccaggggtggggatagtgtaaccctttgacacccccccccccccccccactttcctgcgccggtctccatttttaaaattttgatatttttgaaaaaattttcgactcaaattttaggaaaatttcgatttcaaccaataagatgtttagattatttccgattgttttttagcaaaaaagtacgtcattgatcggttggtcagtccagctgtggaaattccaattgcacagctgcgcagtgttttcgaggcctttgctctgactcgtctttatgacttggaggtgacgacaacaaaaaaaaaaattttttttaacttcaaaaattaacacatttttagcatttttctcatcaatgtttgcgttacatttgtcaaaatgcagccaaattgttcaaatccgagggatttttacaaattgatcagaatttgctgtgtgaattattcgaccgtgatcagttgatgatcagcagcgaatttgaaatttggaaagctgtaatttgagaattggaatttgttgttaccaaattaattgctatttgtttgttttttctgaaggcaatccgttgggccgacgaaaagtgccgtcaaaatggcatcgaatgttccgctgagaatcgtcgcgcggcgcttggcccggcactgtttaatattcgctttcctctcatctcaccagctgtatttgcgaagcaaattggtagaaaaccaaatggggggggggcagctcgtttcctccttccgagaaatgttttaaagaaaattttaaacaaaaatttttaaagaaaaaaaaattgtcaaacattttttataagaaaatttcttttaaaaaaattcgaaaaattttaaggtgtatcacttagattttttttaatttccaaaaatggctaaagtttttagaaaagttttttcttgaaattttattctaaaaaaattcttggccgggggggggaggagaactgacccatccaaacgtcatttatcgagcatttatttccctttttgcagttccttccggcattctgtccaatgatgagtttgtcggcgtttatcaattcaatttttatccaaaaatttttcgtggtgtgcccggggggctttacccgttgaaatttcctaaactcggatttctgattggaacacagccaaaggaaacagcagcagaggcacattggcgatggaaattgagaaattttctgaatttgcacgagaggaagtgggaaatgaacggaacagtgaaatggaactgtcaataaatggactctcgtggaaaatatcggcaaaaattggaattgatgaagaaagcaatgagaaatggctgcaattttacctttcgtgcaaaggtgggcataaatttaagaatttgaccaagggcatagccaggggcatacctgtgcagggacgcgggttccgaaggggacgggacaaaaaaaaaatttcaaacaaaaatttttaagaaaaaaattttagaaaatttttttgtaagtaagttaaaaaattgaaaatttttaagcgatttttttttgaaaatttatgataaattacgaagttttttcaaaaaaaaaaaaaattttcaatgattttttatgaaattttcttatataaaattttttaagatttttttcttgaaaattttctttttaaatttttgcggcgatattttgtctcggtgatattttggggtgtacccgttccgaagtggtcttacgatcgaatttgacctaatttttttttataaacgaaagggaaaaaatcgaggttagtcgatcgtagaaaaaactggaatttttagtatccggccaaatttcaggatttttctgcctccttctcttacaatcgacgaattgtcctcataagttaaaatttggaatttttaaatgaaattagttaaaaaccaagtcaatttttcgaattccatatgagaaatttttataagaatttgcttttattttcatatgtacga

SEQ ID NO: 1558 - DNA, 796 bp, Heterodera glycines
  unsure (1)..(796): unsure at all n locations
aaaaaattagctttttttttattcaaaaatgaaatacaaaaaagtgaataatatgtctncaatattcatcatttcaatcaatcactcatcatccgtcaaataaaatatttanctaattatgcttgtttaaaatgtgatggtccgtctgaattaagaattaaagggcgaccaaatgccaacggaaggaacggcattttgttggccaacagtggcggcggcggcattaatcggcgattggcaattccgagtgagcacaccgttacactcgttgatcacgctgaccattgtttcaagcaccgtttgcaccgatggaccaccaaatccgtgcgtcagctgaaacaatttggggaaaatggtggaaatttaaagactaaaaaattttgacagagaaaaaccgagttttaatgaatttttgtgaaaatgccaaaagaaagaaaatttagcgcttaaattaatgaaaaaatagtcaaaaatcatgtttttcgggcgcaattttgaaaaagttcgggatctggattggcattatgccgcgatttgattacgggagattcaaatcctcccgattatgttggaattccgattgggcaaaaataaaattaaactttttgttattttttcgaatttggcccaccaggctgaaatgggccaatcccgcttgaacttctgggttcatgttcaggtcagcatcaaactgttcagtcggctcaagttttggctgctccgttacggtggcggggctttggtcggctttatggacgtccaaaatccgattgagaaatttgctaaatggggaaaa

SEQ ID NO: 1559 - DNA, 1365 bp, Heterodera glycines
acgcccaaattaaccaaatcatcgattgatatgcccaccataatttaatcaccacaatcatttcaatcgttttacttataaacaaaaaacgaaatgaaatgagaaagttaatttaaaataataaaaaaaatactttaacatttttagttgatcgaaaagcaaataacaaggcatataggtagatgagaagatgaccaatgatgctttgaaaaaacaacattgttgacaaacaaattaatatgaccagaatcaatatccacaaaaatagatgattgttatatgtacctatttatgttgagttcaaacatcaaataacaaagccatttaattgtttaaattatttggaatagattaaaatttaattaattcagggcttttactcatttcaccgcatttatgtacattttttttgaggcgtgcttttttcaaaaagctttttggcaatagggggtccggcggtgtcaagaaaaagaaattccggcgcggcgaaaattgttttcaaatgagtcccaatttcaaggacatccctgccattcaaggactaatgattttattattggcaaattttgacgcaccaaaatgtcccgtgccaatgtgaccttggttctacaattactacaaagtagataattaaatatatgctcctgattagaccagagtgctaacaatagagcgaccccatgatcggctgatggacatacattggtttaagagaagaaacggccctctgattaagtgagctttcgcaatgatatgagaaagcatataagcaacaatgggaagaaagaaaagcacgggaagtggacggatggtggagagagagggttaatgattttgaaatagcaactaaatcaaatttgtcacgtgttaaaaaactgattgcttacatatgtactagaaggaacggaaaagagaatttattcttgtctacttgattttgtcgaataaattgcagtttaaaggaatttgtacatgtaaaaaaccaaaaaccgaggtaattataagggggggggggaggagggaaaccgaaatgaatcattagagagagagagagagagtagaggcattgcattgacaataaaagatacacaaacattccgcaatgatcgaaaaccaactacaaaaaggcacaaagtaaagtaactataaacaaaagaatcaaagaccatcatagtcattgtacctcttccttttctgtacctcatcttttctctgttctggactgaatcccgaccccaccattccaaggtgtttctgatactaaatgccgagtctccaaattacaaatcctcgaagtgcgggtccccaaaagtcgggtagccgtcagagaattgtgtctaacgaaactcaaatgatatcaagaat

SEQ ID NO: 1560 - DNA, 4635 bp, Heterodera glycines
tgacccaagacaaggtgtggtcgacaagaagggagtgtgcatgacttgtgccggaactgtgaatgattgtccgggtcattttgctcgtttggagttggctaagcctgtgtttcacattggttttttctccaaaatcctcaaggttgcttttaaaattctctttgcaatttgatttattttaattgcattttcttcagattcttcgctgtgtctgtttctcctgcagccgtttgcttgttgacaaagatgacccacacattaaggaaattttaaagaaaacctcgcacaattttcgttctcgacttggtcttgtgtatgaacaatgtaaaaagaaaggaatttgcgaaggtgcggaagaattgccaccgaacccggacgaatttgaggaaggggagaaagagcaaaaggcggggggctgtgggcgttatcagccttcatatcgaaggaaagagatcgaaattcatgccgaatggaaaaaacacgtcaatgatgacacgcaggagaggaaaatcattttgacggcggagcgcatccttgagatatttaaagcgatttccgacgaggattgtctcgttctgggcaagttttcaagttatctgagcaaaattctaatcagcaaagtttttagggcttaatcccaaattttcgcgaccggattggatgatttgccaggttctgcctgtccctcctctgacagttcgtccatcagttacgactttcggttcaataaccagtcaagatgacctgacttataaattatccgacattgtgaaggtgaacaaccaactcaaaaggtaacacttccgtaaattgatgcgtttcttcaattcgaacattggtttagaaatgaggctaatggagcagctgcccatgtaattgcagaggacattaaacttctccaatatcatgtcgccacactcgtcgacaataatgtcccgggtgttacacaagtaatttactcgacttctcctcacattcttctaagaacaaatttaggcactgcaaaaaagtggccgtcctttaaaatcaattaaaagcagacttaaagggaaggaggggcgaattcgtggaaatttgatggggaaacgagttgatttttctgcgcgaacagtcataacgccagacccgaaccttccaattgacactatcggagtgccaaggacaatcgcacaaaatctaacttttcctgaaattgtcaccggactcaatatcgaaaggcataattcttattgttagcacttaaactaactgtgacttcagattgcaaactctcgtggcaaggggcgaccgagaatatccgggagcgaaatatatcatccgcgataatggagaccggattgatttgcgttttcatccgcgatccgctgatttgcatttgcagcctggctacaaggttgaacgacatatgaccgatggggacataatcgtgttcaacagacagccaactctacacaaaatgtcaatgatgggacatcgtgttaaggcatgactgttttatttgcaattgttattttggattattacgatagatcttaccttggtcgacttttcgtatgaatttgtccgtcacaaccccttacaatgctgattttgacggagatgaaatgaatttgcaccttccgcaatcactggagacacgggcagaaataaacgaaattgcgatggtttttattaatttaaagcaccaaatataacccttaccttttctctaaaaaggcatctcgacagttaattacgccacaggccaacaagccagtgatgggaattgtgcaggacacattgaccgcagttcgaatgatgactaaacgcgacgtttttattgattacgctcgtctcatggatttgttgatgcatttgccaaattgggatggaaaaattccgcagccagcgataatcaaacccaagccactttggaccggaaaacaagtgtttacaaagataattccaggttttgtcaaatgaaacttttcctccattctttgttttgttctaactaaggcagtgtcaatgttatccgaacacattcgacccatccggacgacgaagacagcggaccatacaaatggatttcccctggcgacaccaaagtgctcattgagaacagcgaacttctctctgggataatttgttccaaaactgttggcagaggttccggaaaccttcttcacattgtcgcattagaattgggtcatcaaattgctgccgagttatatgccaacatacaaactgttataaacgcatggcttctcgccgagggacacaccattggaattggtttccaattttactttacaataattttgttcaactctcaggtgacacaattgctgatacttccacctacagagatatccaggagaccataagaaaggccaaacaggatgtcattgatgttatcgagaaagctcacaacgatgatctcgagccgactcccgggaacacacttcgacagactttcgaaaaccatgtcaaccgaattctcaatgatgctcgagatagaaccggagcttcggcacaaaaatctttgtcggatgcgaataattttaaggcgatggtcgttgcgggatcaaaaggatccaaaatcaacatttcccaggtcgctcaatacaaaagtgttttttattgttaatttaatcattcaaggtgattgcctgtgtcggtcagcaaaatgttgaaggaaaacgaattccatttggatttcggcacagaacccttcctcattttattaaagatgattacggacctggtaactctaaacagtactttcgttaggttttgccatttatttacagaatcgaaagggttcgtcgaaaactcttacctcgccggactaacaccggctgagttctttttccatgcaatgggaggtcgtgaaggactgatcgacacagctgtcaaaactgcggaaacgggctacatccaaagacgtttaatcaaggcaatggaaagcgtgatggtcaattacgatggcactgttcggaattcgtctgggtatacagttttcctttattttttaataaaggaaatgctacaaatagggctgttattcaattacgttacggcgaagatggactggatggcatgtgggtggaagaccaaaccgttccaacgcacaagccgaacaacaatttattcgaaaacgagttcaaattggacctcaccgacgaacgacaactgcggaaattatacacagaaaacattgtcaaagaaattactgtaagtaactacaaaaaatcatttcacttatatgactaaatccaagaattctgccgatgctcttcactcggttgagtcggaatggcgaaagttggaggaggacaggaacattttacgttcaatatttcctagaccaagcacgaaagtctatttgccttgcaatttgaacagattaatcaaaaatgcgcaaaaaatctttcatgtttccatgaataaaccagttgatttggtgagttccccaatatttttggcatgtccttttctttatcttccacagagtcctgtccgagtaatcgaaggggtcaccgaattaaccaaaaaactggtcatcgtgtctggagaggattctattagcattcaagcccaacataatgccacactgttgatgaacattttattgcgttcaacactttgtgcaaaacaaatggccaaataccataaattgaatcttgaggcatttgaatggcttcttggcgagatcgaaactcgctttgaccaggcgatttggtgctggtattccatatttatgttttatcgtttaaggctattgcacaaccaggcgaaatggttggcgcattagcggcacaaagtttgggggaaccggccactcagatgacactgaacacttttcactatgccggtgtttctgcaaagaatgttaccctcggtgttccccggctcaaagaaataataaacgtgtcgaaaaagccgaaaacgccttcgttgactgtttttctgaaggtttttgcaaatcggttttacactcatttaattgattggaattttatagggaatagctgccaaagacgcggaaaaggcgaaagatgtgttgtgcaaattggaacacacgacgatgaggaaagtgacttctaacacagcaatttactacgacccggacccacgcaacacatgcattgaagaggaccaggaatgggtcaacattttctacgaaatgccagactttgacccaaccaacgccagtccttggcttcttcgccttgagctagacagaaaaagaatgacggacaagaagctgagcatggaggcaattgcggagaaaataaaccattcgttcaaagacgatttgcaagttatttacaccgatgacaatgcggacaaactcgtgttccatctccggctgagcactcaatcttccgataaagaaggagaggtttgaaatatagtcaattatagtgtgatatattaaaaaaggagtattaggaacaacttgacaagatggaagacgacggcattttgagggcactcgaacagaatattttgagcgatttgacacttcagggcattgagtccattgctaaagtgtatatggtatatgcgaaaacattagaaatcgacttaatcgttaactgattaagcacaaaccaaccaccgatgacaagaaacgaatacatattacag

SEQ ID NO: 1561 - DNA, 1553 bp, Heterodera glycines
cagagagaagccgtcgttgtgtaattgcgtgcagagggaacaacgcatggatgggctcaattgtcaggtatttgcaatggaaatacacaactgataggttgggtgtcagaagcggcggaagagactgaagaggacggcgaaggaatggccgtggcacagcgaatgggcgcttcgaccgttctttctgcgagaggacctaagccacaacactcaaaacacttgctgttcaaacatttgcgagacgtcacagtgggacatcaccaggtagtgccgtcgtattgcacttgttcccgccgccctgttgcaatcagtatcatttactctttttcagggacaaatatccgccgtcaaattccatccaatcaaacctgttttggtgacggccaatgtttctggcaacatttcgttgttcgaagtgagtttaaaacagggcacgtgggcaaaataaagtatacggtgcaataatcttggcccctcatttccactattctatttttaggtgtgtaaagacaatacaaatttgaatctgaagagcaaagactcctttctccaaagcgtgcatttcccacgttttcgtcttgaaaatttcgacttttttgatgatggcaattctattttggcaagttctgcgaatcaggtgatggatgaattaatgacgtgctctgaattttgctttttttatttagaatcatctttacacttatggtatggcagtcacccttccgcttttttttctttttcagatcttttaactggcaaagtggcattggtccgtcaaccgataggtccgttgttgaactcaccgttggaaacattttaattccgtgccttttttagtacttgactcccttcggatgcgaatggcccgtctctccggcgatggttcgcttatcggaatgttggccaattcttccgacattttcgttttcgacttcaaagtttttaaattaaatttctataatttaaaactcattagcattaaaatcgcagtcagcaaattttccaaaatgacttctataaaaccgaataagattagactgcacatttaaatttcagacgatggaacatttgcacacttttcgtggtggcgagaacgtcgtcgacttttgttttgctccatttaatagacagattttgtattccctggcaggtgccattttgttttatttctttactttttcgtcattcgttcagtcggtggtgctgtgaacactttcgacttggccaggtgcactggccaggacacattcttcgaccagggctgtgtccgtgccacgtgtctttcgtgcagtccttcgggccaattcatcgcctgcgggtgcgtccgcttggaaactcgggacatttttgtgttaaattaaaccccatttacttttagttctaacacgggaattgtcaatgtttacgacctgacaaaactctctccgagtttggccaagtcgaatgcaccaagaccagtacggatgttcgaccagctgaccactttggtgtcattcgttcgctttaacaacgactcgcaaatgttgggatttggtactgcagtgccggtattt

SEQ ID NO: 1562 - DNA, 3440 bp, Heterodera glycines
  unsure (1)..(3440): unsure at all n locations
ggggagtcgacccgactcctgggggaggggggggggttgaaatttgccaagtccctgctttggctccttgctcaggtaaatccacaactttttttgctcttcaaacctttcttgatgcgaatgagccccgggggcatatgtcttggtatcttttatggtatagaaaattcgatcacacaaatacgaaaagtatgaatttcatgtgaaacaaaatgacgtaagaattgtttacagtgggtcgctcccccatttgtccattctcacacaagtcctctcttctttttgtattcttccaatgtgagtgtccgcgagctgctcgtcttctgttgtgttcgtggtgcctgtgagtcggtaattggcggcgctctcaacgaaccgccgacgacggctaaatgtttaaagtcatatccaaaagaaacaacgattaagctcaccgggcatttttatgtcaatatttatgtcgattccatgtgcgttgaataaatcgtgagttgagggaagttgcacttttttgtttggagaggactccgacgaagacgacaacgaacccaacgaagaaaccatcgtgtccataacggataactcggcattggctagagccaaaggtattgtaaagaaggaaaagggatatcccaacactaccgccacttccttcgccggcggttttggacttcacggatcccgagaccactttcatccgcgccgacttccgtgtgaatgggtcgtcgtccttctcctgctcttcccgcaccattccggcaccaaggaatgtttgtttcatatggtccctattccgctggttgatggcactgatggcacttaagttcttcgttctttggtgttcctcaaaaataaccatttgtgtattaacacgggaattccttccaatcacaattttcttggccttctcttccaattcgttgacttgctgctgcaagtcgcgcaccctcgcgacatcgccgctttgttctgcttgctcctaaaacaattttttgtttttattatttctttgatttgtatcattttttaacgaaatgcccatcaatgacctaaatagtgaaaagatatcaatcttcccactaatcgtcggctgacaaacattccaatgcaaaatggataaaggggatgaaggagatgagggggggggggcacttctcacataccatcacatttcttcttctgttaacaatgcatacggcaaaacaaagtcaaattaaataggagcaggaaaacagttaggcaaacaaaagcatttgaaaaagtcgagaggaaagggaggggggggagcggtaagttcactcgccacccgccccccagcaatggcgcgttgttagtcaaccgcagcatttctttcccattccaatgtgaatatagcgcggcgatctctcaaaagtacccactgcaaaatccacacactaatcgatggatggtccacgcaattcaaccaaacacagaaatattgcacattttcaccggatattttgccaaagaaaataaccgcagcaacgagattaaaatcctccagccaactgaccacaaattttgttatagatcagtcctttcactaaaaatacgttaacaaactgttggcatttcacagtatcacccatttttcgcattttgttaaataggcaataacaatttcccgtttttatagggaaacaagttaacgagcgctacacaaatccaaaggcaatcccgcctcagtcatcatcaatcattttaaagcatcgacagacaaattataaaccaaaaaatgctaaattcgggggatgaggaaatcgaaagcacgaaagaagaaaaaccgaaaatcgtagtgaaacagtcaaatgggtgggttcgtttgaaaattgaacaaacattcggtcgcaacattaagacaagaattaccgcatcatcaaactcctcagacgaaaataaaacactcagaaaaacatccccaaactaaatgctttggcagaatgaacgccaaagtgaaatttattcccgagtcacgaaaggggcagctcaacacacaatatctggccactctcccaggacttctcaaaatcgtggaattggttgacgaaatggccctaaatgtattcttgtcccatttttcagattctgggcttcgtcgcgtttattcttgcaatttgtgccagacgctcaacaaactccgcctgggtagaacacatcacttttgagacgacaattgttgtctccgttttgatcattctctacgtggtttttccacatttgacttttgctgacgaacgcacgcgcgaaggactcattgtcgtggtacgctccgaatgtgttagtgttctaatagaacacaaatttggcaggaaatgttcttttatggaataaacacactcttctttttcattggggttggtcagctaaaacctattttattaacattttgtattcagatttggctaatggttcatttgagtgcgagttttacggctgaaggacgaggagcggccattttgggatcggttggttgagcaaaaacatttgagcaaattctgattttccagattttatgcttggcactctgtgttatttatgcgggagaagcctatataaaattcaaagtgtggacaaatcccgcgggaaaagtgcaacaatcaaaaagccaagcgcagggacacaaccaagtgccaccagcaccgacgcattacgaagagaaaacaatccgacgaaatgaaatggaggaaagggcagtcgtatgaaaggcaacggacgaactttctttcctcttcactcactaaccaatattattattaaactcacaaaacaatttgtaataataaaaaaccgcaaaaacattggcccaccttcattctgagcaattccgatttttgaaaggcgaaattggtcggttgtcttttgaagcgctgcttttctttgatcagcaaattgatctccgcctcattgtatttgtagttgagtgcgtccacaatttccttccttttccggtcaacaaagtcgacggttagcatgggcgtgttctgtttttataaatattatccagaaaaacccagagacttataagctagaatgatgcaaaaaaatatttgggaatttttttaatctataagcaattttgctaacaacaaaaaccagcaatgttgaaaatttttgggggtgcaaaaagaactagcgcaatgttattataaacaaaaatagtggaacggtcgaaattcaccgaagaccgcattttgttgaaccaaaacagaaactcgctttccataataagactgttggagacgaactccaaccgatagactcgcattggctcgccatcgctcacctaaaaaaacgaaaatggcataataaaggctaaagttggtttatttttgggtgaattgtgttcacttgccattaccttgaggcgaaagactttgtttgtacggatgtcccactgttcggctcgnnacttcggactc

SEQ ID NO: 1563 - DNA, 3705 bp, Heterodera glycines
atttggtcatccgattaataactcttgttttaacttagggccgtaggctcattaacaatttaagccatggatatatttgttttttgtgatcaattctctaccatagaccatacgatcggttacatgcgtaaccttatgctcaagacaaacatagatgaaagaaaaaaaatttaaaaatttttttttaaatgttcgaatccgggttcggggttcagaatcggtcaaaaataaggtcggattcgtgctcagcacagtaaaatagccctagaaaaatttttcaattatttttaaagaaaaaaaaaacgggaccagtaaactccatgattgcccaatatctgctcgttcggcgcaccaaccttcctctgcttcggatgccgagtccttctcgtcgctttcatcgtctccgtttgattcgtcggacatttttcgttttcgctttttttgccttgcggcaacttctccgtctgcctttttcccagcagccatttcgagtttcttttttattttctctctgaaaagcattggcgatgatttatatttttaaaaattgtttcttaaaacttgtgtggaattattccccctttcccaacctcgtcttcatgatttcacgctgctcgagtcgcttgtaaatttcaatttctcgctccttttcagtcattttgtcgaatttttctcgctcttcgtcatccatgagcaggtcataatcctcatcctgttaatggtttaaatatatgattattattaattgaaaagaatcaccttctgattcgggtcgaattcttcttctgatgaagaaactttttgccttttatttgtcttcatctttttggcttaaaagaagaaagaagatgcaatcgttaggcaattgttaagcgaataaaaattgaaaaacacgcaaacggtaaaaaacatgtaacagtcagtgagtgaaatttggggtcgaaaaccaaaacattcgcgatttacaatttatcctatcaaaaatgtatcaattatttttcgcctcccattatcgattttaacaattttggggaggaaataagcaaataatatatttaagtggaatcgggctcaaaaaatcagatttttatgaattttttgcggcacttttcccctaaaaaaacttttgggaaatgggcgagggagtgggtccggcgttgccgataggcagcgtcggggaaaattttgaaaatttgagtgcaatttgttaacagattttgcctaaagaattgttttgtctaattttacgattctggacgatttttttaagaaaatcaaggatttagggtccggcagtgccgataggcgcagccgaaatttttttttgaaattttagatagtttttaaacagattttgcctaaaaattcagagtgagcacaaatgggaaaaagtcctttaagatctgtttctcttcgcaagctaaaataattatatcttttcaaaaaataaagatttttaaccttttatttcttgtattagcaaataaatgttgagggaaactgagcccatttccatcaaaattgtcgaggcggtaatgtacgggtgggctttaatgtaggtgcctatacgtgataaagccactgtcaaacgagctaaagccgaaactgccctttgtttccgatgtctctgtttgttcgaactatgagtatttggtagcaacagaattataattgtcaaaaaaagaaattttttcattttctagaaaatatattcataattcgtaaagcaatgacaaaaacgggagaagagaattgtgccagccgtcgcgtcagctaattgaacattgtttttgagaagccgccgaacgaacgaacgagagcggggggggggaagggaattatttgtgccagcctacaaattcgtttttgcttgttccacttaggacaggcaattaatcgtagattgaagaccgggaaacttagccactattacacaacaaataatgaatacaaaatcttggttcggagtttggctgcgctctcttttctggaggaaattcgagttgtgccagctttttacttgcttcgacaacgagcgactaaagcagacgtaatttttctaattttgtggcttagaattaaattttttaatttttttttgttttattgaaatccccaaatgtcgggtccctaaatgtcgggttgccaaatgtccgtggttttcttaagtgtcttttgctcaaatgtcgttcggtctccaaatgtcgggtccccaaatgtcgggatccccaaaagtcgggtccccaaatgtcgggatccccaaatgtcgggatccctaagtgtcggatccccaaatgtcgggatccccaaatgtcaggatccctaagtgtcggatccccaaaagtcgggtccccaagttgcaaatccccaaaagtcgggtagcccaaaattgggccgctgtgtatatgatccccctaattttgcgtcaattaaatttgttatacaatatgccacataatttcaaaattaagagtttgtttaagaaatcagaactaaatttggtcactaccctcaaattagaacatttctgtgaaatcacaacaaatcacataggcattgactaagtaaaaaaaaaatatggcctaggaaacaaaggaagtcactgattggacgcgtaaactttgaatggacaactggaatagagcagtttcttttttgtcgaacagtacgaatcggcaaattggagcagtacgaatgcttaaggatgtctgtacgttatttgcgtgcagatggtgatcagtttcttagttgctaaagacaatcaaacctcgtgtgacaaaatctctcttgagaaacttaaaacttgatgaaagtctagtaaaaaaacttaaacgctttaccaattttattaatgttttgctcttattttctttattttgttctcttcatccattcattgtccttcttccttttgcattcgcttagttaccattatcccgtctttcccccccccccccccattcatcgttcatcctttagccatccctttcattgtctttgttcgtttacatgaacattgagacgaagaaaagcaataggcgtgtgaagaatcgacgaaagcgctatggaaatggaaaacaatcgttttaccagctgacaacaataaacgaagagtcactggccgacgagaagtggcggagagagaggaagcggtcagttggttggataggagaaccgaacagtgagtgctgtggacagcgcacgccctaacaatgattggtctttcggcttaccgcgacagcatcagttgttatggagcaccatcaccactgtcaaaccgatagcagcagagatcaactgttagcacttatcctcgtagcaatgattgcatctcattcctttaaattaaactaaaaaagaaaacaacaaagttttggctgtttggaatttgaaaaacgtcgtgggtggtaagtggcctttcctttccgcagtgcttactttacataaacactttctccttacacccaccgctctgtccgttatttttcatttcccaaccgcaattatttcactccgcactttctctccatcacttctttcctttggttcgtagatagaatcgtcattttaaatcgattaaataaattcctccatgggaaggataatgttggggaatggaatgcgatgtttcttccagtagactaatcggtgctgcacacttatcgtcgcccaggatcttgttgtaatcgttgttgaccatttgca

SEQ ID NO: 1564 - DNA, 1023 bp, Heterodera glycines
atccccgctcaaccggggcacacccccctccccccccgggctgagaccctaattttgattttccaatataaattcaattagtcaaaaagaaatattttgattttatatagcatttttaaaaaagaaaccatacattaaaagagggggggggggtggggggtcggttcccccactcagctatgtacatctacgacctttttttgcttttcagactgcgataaataggtttgactttgttcttgggtttagactgtaacccatcaataacccatcaagggcgttcgaacaaacctaatttgtccgggtttgtccgttttaaaggattaaaaatgcctcattttcttcatttttttacattttaatcggttcaaaaactggtttagcttgttgcgcatacttttttttttgattttcaattggtttcagcaccaaagaaaatctataaatatgcttttgtgagtttttgctctgggccttcaaatacatattttcccagaccgtttttttgcggcgtgcttttcccaaataaatttttttttttttttttggtgagcagggtgtccggcggtgccaataggcacctacagggaacattttttaattttaatgtactgtattttgtttaaaaaaatttgttttcgcgatgaggagtctgacccgctcccgcaaaaataccgctgcattaaaaaaaagcaggagcggagctctcgcaaaatcccacgagagtcggctctcaaacgcttaacaaaacataaattttgataaaatctatgaacctatgtttatagaggtggaaaattatttgaattgttatgggtgctgcaacatttgcgcccctacatttgcgccgcgattgttaacaaaaaaatttattcataaaattgccttttccaaaggctaacgggagattaactcatcccgatttcgttggtactcttcttcatctttgattcgactaataaacttttaattgtttttctgttttggtattttatggtaaaataacgttgcccaaggtggatt

SEQ ID NO: 1565 - DNA, 2594 bp, Heterodera glycines
tgaataagttccttccgggaactttgaaatccagtgaccatttaacacagcgtttgatttggctgctttaggcatttaaatatataaagaaattttctaaatgcttaagaaacgtaaagtagtcaatttttagggtgcattttcagattttcttgtattttttttgcgatttttctcaaaaatgccaaaatatgtgcaaaatatgtgccaaaaccccgaaatatgtgccatatgtttttatgtgccaaaatgccaaaatatgtgtttttatgtttttataactcgctctaaatcaaaaattgttcggagaaaatgctatttttgggcttctctcgccataactaagccgcaaaaaaatatgttaaaacataaaaatcccagccctagtcatatattatcagggacagaatcatgcattccaagtttctggcacaaataaagcagatcgtcgatttacatttccatcaacactatgagatatgtactgtaaaaaacaccagaacaatttaaaaacataatctacgatgtaaagtaatcaaagattggttgcgcttgtataggtgcattatttctgagaatttaataaccctctttcaatgaaaagtgaaaattcaaaggcggaccttggcattttgatgctttatgcggtcaaaggagaaggaaaacaagaattgtttgcttgtgcatgatgattttttgataaaatcactccgttagcccttgggaaaggtaatttcatgaataaattttttattcacaattgggcgcaaatgtaggggcgcaaatgttcggggcgcaattgtaggggcgcaaatgttcggggcgcaaatgtccagtcaccttgttatgtagaaatatggttgcaattattcatttgctttttccattcgattgattgaacttatgtaagatgaaatgtacaatatataaataataactctttatcgaatgttttcctgtttatgtttctgttaaatcattttctctttctccgtttgtttgttgtcccccattttcgttttccccgtaacgtaaaatgagaacccgcttttacggggattcccttttttgcccccacccccttgccctccccgtccggtgtcatcgccccgtggacaatcgctgtttcacattcatagaataatattatgcactatctaacttttgaatgactcttaaacactgtttacctctttttatccgaatcacataaaaaaggatccgttcataaatcaatattccctttacaattatgcttaagcattaagcccctcacacacaaaaaatttatgattcacaaaagtatattttcattttaattgcttcgtcataccgccaaaaatggaagccattgttttatatttttattgatctctttctttttatgtattgtaaaatgaacttgtgacttgtgaaccttgttttggatcaatttagaattgcgcgcgctcccattaaacatgctaaattccactttaatgcttcagactaactcttctctccttgacggcaaaaatagagagatcaaagaggtgttttttgacattggtccacaatttaacatttctttaatcttccagcttaaatcacagcttaatcgatcaaaagagacgaataaaatgatgggtcaaaacataatagtgaggagtttcatcttgtctctttttactcagtgaaaatgacccactttcagcatttgcaacagcaagtccatctgttgacacaaaaattagaagacgaagagaaacgagcaaacattttggccaaaacttatggagacacccagaagaaattagcccgttcggaagttagacttcgccacgttcagcggactgttcaggaattggaagcggtccaaatgcaatttcgaattgccgtcccttcctttttgtaatgatagattttcaggataattttgagcttaacaacgaattggaaagatggcgcaacatgaagcagtcgtcggtgacattggacgatggccttgaagtgtgggataatgacgaagagaacaagacggaggacgaagaagaaatgagagagttggaggagcagggcaaaggcaagacggagcaggaggacgaacacatggaattgcttcaacgtgaaattgacaaccttttggtagcaattggaaatgcatctctattttcgcaaattcaaatgaaccatttcctcaagacggactcgggcactttctcttcgcgcagttgcgataccaacggtgtcaactactgcgatcaaaacaacggcaccactgtcgaggaaagtggatcggcgataggccctttcgacatctttggcggcttttctccttttatcaaagcgtcactgtcgcgcagccaaagcgaatcgaagccgacgaattcttttggcagtctcgctattaaacctccgactttggcaaacactcattgtcagttcaactacaacaagtgagtttaacagttaataatttcgttttattcacaatgagtagattaacattctcaaaatgtagctcttgcttatttttgccatttaatagcattttggcaacacttggcaatggcattgattatcatcgtcagaacagtggaacagatgaagggact

SEQ ID NO: 1566 - DNA, 4986 bp, Heterodera glycines
ggattgtcaaaacagcccggccgggttcatattttcagaaccaacggtactcgggccggcctctaaaatcagtcaaaccgaatttttcctaaaatcgccttgccggtccatgctatatacaaatgtgcatcttctgtgcaaaccatttaatctttgattgtaacaggggtatccaatgaaaatgcgatgaaaaagcattccctcccccttttgctaaaggaatacctccctccctctcctattgagatgaactcaccaaaaaatgtatcatgctagaatcaaatttattgcattttgtttaaacaataatctgttttttgcaggcaacttcgcatgataatgccacaaccttcggtggtgtccaaaaagaattcaccgacttcacagaatgatgtaaaacttaacatttaagcagtgtgtttggcaacccaaaatttgatttgcttgcagaaacgaatggataaattggaaaatggtgagacgaacacatcatcattgtgtggggatgaagaggagaaacctgcaaagaattaccttcacaagacccaaatttgtcttttttggaaggcatatgtaagtggaaaaagtcggactaaatgtcgtaacggcgtcaactgcaactttgcgcatggggagaaggagctgaagaaattggaccccttctactttaagactgaactttgcgaggtcggtggtcaaacgttcggctaaaatattttttccattttccagttttggaatttggacgaaccgtgcccttacggcgacgggtgcaatttcgcacatggaccagatgagttgcgtcagatgggagtcaaaggtccctttccattgcgcttttccaaatttgatttattcgacccgtcaaatttccaaaaggtccgaagtctgttgctaaagcgccgtctttctacaataatcgtcaacgtctgcgtaagacgcgcaccaaaactcagactattcagccactcgcgagctatgggaaaccggtagaacagaaagtcacaattattaatggacattgataaattattaatatgcgacctaatgaggcgacgttcgtttgtattttgtatacatgtgtatgcttttgttcgttatttacttgactgtatttcgtattaactctaatgacgtaacgatcaaaatctgtcatcattcatcacaagcagtttggttcagtaaacctttgccatataaatattgatatctgagtttctgatgtattttgattgaatttatttattggggtactgtggagtacagtttattaatggaatagtcttaaaatgggggttttgtaccataaatacgtttatttcttggccattgtcctgttggcatcaaacatcgtcgtccatccgttttttgtttcgttcttcgtgcccatccgtccttcgcctcaagcaatcattcattcgaagatcgatccccccccccccccccgttgcttcggaatgttttcatctgccgccatcccttcccatcaggcaaatgaacatttgttgctgcttggaaattggaagagctgtaactttggcagagagcaagcaatcattttgcagaaaagaagagccaatccgcgattgttagcccaaacattggcacgcataagccgaacattcaaatagaaaacaaattaaatgccctttttggagtgccgcctttcaaatcggtgtgcccaaaacaatcaattgccccgtcggtctcttggaattcattgtgcgggcaaaggcgacgtttgcttcttccttcacctttcctctgttgccccgagaatgaatgtgcaaaggatgaatcaatgtcagcgctatgaagcccccccccccgaggcttataacccccgggggaaagggtgggagaaggagtgaatgaattgggtggggggggagagcaagcaaaacgttctttttgaggggggggggcagaataatgcgaaaatgaaaaaaggagacggacggatgtttggcttagtgatcggagggaataaataaaaccaattcacggcttcgcttcgctttgattgggctgagccgtgccctcatccgccgccgccctttggccgcccaatgtttggcggaaaaaacattgccttttcacgtccttttacatattgttgaaatgttttttattttaaggtgaatcgaatgaaaacctttttatcaatttgcttcgcttccatcctaaaaaatgcttttcctgtaaaaatttacaaaatcagtacaaacgatcaatagtcaattataagtaattattattattctttgcccactcatcagacgaccgaattattccttatcgaacaaaagtcaacaacactcaccacaagaaatacttgttgtgctttcgggaagaataattaggtaattaattcacaaattataacaaatgattatgagtgattaaatttgaattgattttttaattaattgaatttaaattctaatttaaataatgaaattatgtgacttaaagaaagttccataaattataatctgttgcagaggtcgtttcttctttcactttgcacttttacttccgtccgatgcattgggtcacatcaaattaagcgtggcatttcgcgtcacttaacaaccgacacacagtaattcattgctaacaacgacaacataatacggtactttttctgtaaggtgactaatagtgcaattgccgtccaattaagcaaattaatccactgaaaaatgggcaacaatcatgccaatgccgcggtgatgacaatgtcaagcggaggggacagtcggcacggctcctcccggggacggggcggcggccaataccatttgagccatccatcgacccatcatttggtggtacacacaaacggtgggcaaagagtgaaggaatgaacagaaatgacaaaaatattaaaataaatcattaaaataaataatattacttaattactaatgccttttttattttgaaaagtgtgtttttgaatttattatttaatataaataaaaatgcaaaagaattggaaaacaaataaaatccaatttttattcgcatttattatacaattttaaaagcttcttttgttttgaatttgcgcgactgtcctccctccgttttttcactttttccattttcttttgccactttgagtgccctccggcatttttttccgcaaaattcaaaatggtctttttcctttttcacttagctcgccttttctcaccacattttgcccttttcgactgcttatcgcagccgcagttggcaaaatgacacaaaatcgataaaaagtcgacttggccaaaccgcagcttcttatcattttcagatttgttaaaggctttccttttctttcgtttcttttttaataattaagatggcttataaaaagttagacagacaatttattgaaaaaatcctatttttcgaaaatgctttttgcatttcctgggtcattatcgaatgtgaatgactgacattatttaattttcatttgccataatttccatttattaactgataattaaatttggctgatttgataaggtaaaatcaattaaagtgatcattttatttggttttccatttcattctaaaggtttctcactttatttggtcataatcattagggaccggatttatatggacaaaaaaatccaaaaagcagaaattagtaaatgtttgcaaaaaattattttttacacgaattttgctgatgaaaaattttttgcacaatttttggtagtttctccaaaatttttcgattttagggcgtattttccaaaaatttaccatctttaggggtgtatttttcgaattttttgtcaaaatgacgaaatatggatgtaaaatatggaaatatggacaaaaatatgaaatatggaaaaatatggaagtaaaaaagcatcctagaagcatcaaaccaggctaaaaatactatttacgtggtttttaggccgaaatgagtgtgcaaaaaaaaaatatggaaatccatacaaatccggtccctaataatcataagtaagcgcattttgccatttcttaatttgcacaaattaaaagatttaattccctaccaaattcattcgttttttgttttttctttatttaatatgggtcgattcttttcttcattcgcaatttcaaagtaattttgccttctccataagtcatcagtccagtcccactttctttctcttttctcttcgctttcgtctcaaagtgccgccgacccaatcaaatttaacggactttaagtaaaaaggaagtaatttgaattggcactggcaaagaaggcagaggaatgagtgtcttcacagattcccccgtcgtttgggttttttcgctctttcagcggacaattcgttgagttcataaagcattaaaaaattttgggattataattttcatttcattatttttatttttcatttaaatttcaaattttgggtgtcttccctttgcacatcattaagcattgttttttcatcggcaactttagtccatcaaagggatagccttcaaagtctcccgcccctcccaccacttcacaattaaggcccgctttcgtaaatttcaataacaaatttgacagctctcggctccttccatgccgtcgtctctgcttccggttcgcctttccacagacaaattgaaagagagaaaaaggagagtgagagagagagagtgagagatgagagagagaggagagagagagagatggcgagagagagtgagaagagacgaagagaaaaagcgcccatcgtacagaaaatggcatttgcccaccggctgtcactttctttcccatttgtgccagctattatgccgaccattgtttgtgtatgatctctgcgtcatccccgcctctctgcttcccattatctttctctttttcgagttgtctggtaagcaacaattggctgtctctgcttcttcccaacgctctctctttccttccgctttttctcctcaaaatgccaatgcaatccttgtccccccccccgt

SEQ ID NO: 1567 - DNA, 2669 bp, Heterodera glycines
  unsure (1)..(2669): unsure at all n locations
ttcccatcaaaatcacttcgtttcattcattatcattatcattatcattggcattgccactgtctttgttaataatttctgccaaaaattgggtctaattcgtttttaatntaatttgtaaataatatttaaatatcatcaaaaacagaactttttctttgtttcttttccttttctctcctccatatataaaatatgcaaattcagtttaagtgcttattcaaattatttttccatttttgtccatttttatttccctaaaatcccaatttagaaacactgtttttatacatataacattaatattttctccatatttttttattgttattaatttttaatcaaaatatatcaattaaaattaagtttatttaaaaaaactttacattgatttttagagcttttttcaaatcctcaaccatttaatgaatggtctctctcggtcacttgctcttatttgttaggcctttcttccctttcccattttttatccttttgcttctcctctcccttggcttttcctccattccttccgtttttgcttccattttctgattcattaatcctgcggtgccgatagaggaagctaggaaaattataaaaatcttaggtaaaatcccgaaatatggcaaacccataaaactgcaaaaaatttattcgctaatccaaaatatggcaacttctattacctttttcatatgtatgctaaccaccgttcccccggcttttgctccgtcccctatttttgctttccccgcctttttccctgattattcatccgtttgctctaacaaaaattggtggggaaaggcaatttgcttctcaattttaaccctttgcatggaatggcaacaaaaacgaaggacaaaccaacagaaaattgcactcattttattgtcatttcaatttcaaattaaaattgccttttttggctgtcgcgtcacttaaaaaatattagaaaatccaataaaatttaaaatttcccgtacaacaatgaatcgatctacaatgatttgcatatttaagcagcaatttattctgttccaccatttcatttcccggccttcgctttctctcctcacgccgttacgtaacgaaacgaagcgaaagcctaatccctccctccctccctccctccctccgctgtgtccttcttccaatcctcgaaatgttttgttttgggcttagccgtgcatcgccctttaggctgtttgggttaattttgaattttcactttttgacattccgtttgaatttctctttggtttcgaaacccaaaataattttctaatttttggctttcaattgaatttcgcttcgaattctctcccctccccaactcgccctttttcccatcatattaatttttgtattgccaaatgaattttggtggcgcagctgtgctaaaaagcgcataattttattgcccccttttttctcccacaaatatttttgatggtttctcggccattttccgccttcactttcgcatgaaaatgaattcaatgcgcatttaataataataatttgttattaatcgatcaattcgctgctaagagtcatttcatttgaatcattcttttcttttcttttcttttctttcttttttatgcgtgcttaatattttttaatgacactttttgtgatttatccgttaattactttcaaacattaattaattaatttaattttttaaaattcttcactgaaacttttcagcgaattgatcaatcgtaaatttgcgcgtgaattgggagggtaaattataattcgatagattgatatgaatgaatgcaaagaaagcccatcccccgcaatggtccaatcagtgatcagacagacgattggccttgaaaaaagtttcttttgtcgtccgaatgatcatttatttttattattattattattaaatttttatactttttgcttaaatcagttattaatcacacttaactaataaatttgttttggctccattaccacacacaaaactcacattgaaaaatatgtttttagacaactcaaaagcgcaaaagcattacacgtgctatttattccttcgtttctcctttttatttttatttatcttttctttcttttcttttttctctttcttcgcttctcttttattttttcttctcttttcttttctcttcttttctactttttagtcttaaagacccattcctaattctatttaaacgtttcccaaaatttcccccgcgtgtcggaccaaccgctaaatccccgtcatagcttatgacttttggattcagctatataaatttttttattttgaaagcttaacattttggtaaataactcatcattaaaaatgtgcgaatattattattttgatgagaactcggagaaatatttaatattttatggaaaaacatttttattgctcccttttaatcatttttaaagaattgactttgattaaagtttatttgcaattcggatagaagcaattttctgctaaagttaaactgtgaaaagcttgtggatagtaatgaaagtgcattttccgatcgaatttgaacaaaaatatgtcaacttcccatttaaattggttatatttttcaaaaattagcattacatttatgcaagaaatttanacaatttgctgacatattttaaatcttttaccccccccccccattttt

SEQ ID NO: 1568 - DNA, 1067 bp, Heterodera glycines
gatcagaagcagcgaattggcccggcatttgacaacgaaaaagtgagcggaaaaagcaccagcagaagaagaagaagaagaagcagaattcacattcacagcaaattgatcagcggacagatttttacgtcttttgggactgattgagcacaaaattcactgatcagagaaagagacaggtggagagagagaagcgatagagaaagaaagaaagagggaggcaaatttgtgcacttttgccgcaactttcgacttcatcggctgcattttgatcactgctaaaccaattcatccaacaaatttgagtaagtgagggcgaaataaaataaatttttatttatttaaacaaaatcccacgaggcatccgatcctttgatgagaaaatgaaaaagcttcaacttgtttttgacatttaacaaaagatcagccgaaatattctttgattttccgctgggaaatcctcgcctttctcaaattccaaaattaaaaaccaaaaataatttttcaataaaaataattcagttcttctcacacttctccaggcgcacaatgctcaaattcttgaagaacaaaaacagcgacgatcagccgagtggcggggggagcagcgcggggggcaaggaaaagtcatcggctggcaattgtgagttatattcacttttttatttttttattttattggtgtaatagtgattttacagcgcggagcaataaaaatataatttaattgtgatgcattgttttgattaaaaacaaatttaattcgcagaggcgaaacatatgtaatttatgcatatcataatgtcgtttgaatattaatatatcaatttgttcaagttttgtttaattaattttttcaacaattaattaatcaattattttgcgatttttgccatttctcttaatttgtttttcacaacgctatctttaacttttgttttccctttttataaattttttaatttttttttctgtgggatagttgtgagaaaaaataattttgtttatgcacagacaattgataggaaaattcaatttgtaacggttcggatggagatggggggggg

SEQ ID NO: 1569 - DNA, 3461 bp, Heterodera glycines
  unsure (1)..(3461): unsure at all n locations
aaattcattagtcagtcatttcattgtcttctcttttttgcaataataaaattgtgccactttttcgaatttccttttgatgtatcaaaatgcaataaaactacttttgttttttggcattcattctccgatcaattcgtttcgttctttgggcttttcngtcttttcggttttgtccccccccccccncaatggaaaaagcatcgcatttcgtcgcttttcaagcggagaatgtgtcgaaaataagtgataatcgactcgacacaactgcgatacaatggcaataacataaaatgaaaccgccaaaatccataaaattcatttaacgaatataaaaaaatgcacaaataaaacaaataaaacattttaattattgtttagggaagtcattgtttatgatgtgaattctttctaatcaacttgtattcatcaaacacttcttatcactcattttccctattatcatacttttccttttcaccttttccttttccttttcttttccttttccttttcactttttctttttttccttttcttttccttttccttttccttttcactttttctttttttccttttcttttccttttccttttcactttttcctttttttcttttccccctcttttcccttttcaccctttttcccttttcctcccttttcttttcttttttcttttcccttttttctattcggccaattccgctgatttcgtccgcttttctctgctgctgatgttggccacttccatttttatgcgcaatacgcggcagagaaaggaacgcgaagcgaacgaagcgtcggtgaaaatgcgaaattttcactccgaattcctcacggacgactaccgaaaatacagtatgcagaaagtgataccaaatgtacagttacagtatgagaggcgcgtgattttgcggttaatttggaataattaaaaaagacaattttattcagtttttcctttttaattttgaaatgcgttttcatgaggagaagagtttcaattttcttttgaagttttatctgaaagaattccaataatttcgtggaatttcttcggcgaaagacattccttctcaccaccgcaatatccttgtgctattttcccctcattttctttgtctttccattccatttaattatttattttatcagtttttgctgaacaaaaaaaaattgaaagacgcaattttcgataaaaatcggactgaaggggccgaaacggtgacgaatttgtagcagagtccggattcagtcggaatttaggggggggggggggtaattatgtaattatttgagtttaccattactctaaaacagtctgatcagtctcttcagaggaggaatttctgaactgtttatccttttttggtttaattttattccattcccttttaaaatgagttcctttataaatttttcttcctaattttgctgctttttggcttttccccctttacctcccctcattttatctgcgagtgaatgggtgccttttatttgtttgatcattttgtttaacaacttttcgtcagttgggccattcaatcggtgaatgcttttgtctgctgatcctttgattgatggatggtttttcgtcttttggtgatgaagcctttcgccctttaattttaacattttttaaaacaaattgccctttccctttcattcatttgatgagttttaattatgcttttacctatgtctttttttctgccgtaattcatttttcttaattttttctctgtctttgttctcttctctttctctctcccttccgtttttttggttagcaaacagaaaaagccgctttttgactgaactgatcgatgctcgaatgcccccccccccaccactttaacccttcttccgtccgtccgtccgtccgtccgtccgtccgtttctttcgtttatattgtgtctatcccaacctctttttttttgtactttccaaattccattcccaccatttttctttctttttaaaatcagttcgcttcattcaaaagtttaaaatcccacggtctctccggttttttcgagaaaatcccgagcaaatgccacttttttttggtgttttaaagagctttttttgctgcccattttgttctccctctgtggggaaattcgtcaacgacgcaaatttaagagagaaaaaggacgaccaatttttattggacgggaaaaacgaaacgaaaaggaaacgaaactgtgcggcggcggcggcggcggcgccctccgccgtttgcctctcgaaaatgatactgaatgactgctgctgataataataatgataataatacgaatgaatgaatgtgtgcattttgtgttgtgttgaggcaaatcaatttattattatggttaaaaaaaggaaaagagagagaaaaaagagaaaagagaaggaaaaaatcatttcgaccaaaaataaatgggaattattggacaataataaataaaaaaagaacaacattttatttgtttaatttgtatacaataaaatgacaaaatatacatcattattttatacaaaatgtgcattgactgagaaaaaaaggggggggggggacggaattgccgggggccgggggggggcagtgtttattctgtcccctttattctgtcccgctccctccctccgccgttggctccgctccattcgctcgtcccattccccccccccccccccactcttcagctgattgtgctgcgaatgcttatgattatgatttgatgttgttagtgattaccgttgatttgagtttgtctatgtcaactaaaaaaaagaaagaaattattaaaaaacccattttacgatttgatgacgcattttgatacataaaactattacttaaatcattataattatcctgaagcctccccattttctgcccttttttattgattgttgggattgcctaagcgatcatcgacggatcgtttccaaagatgtcaatcgatgcaaattttgtccttaacattcactctccgacgacgacaacaaataaacgggaaaaagccggcggtagcaacagcagcagaagcgcatcggatggcacaaattcgcttaattcggccgctttcactgtcattaggaccccaacgcctgcggagcagcaacgccatcaacaaaaagacgaaaagcagcatcaacaacagcgagactctcgcgactcagcgaagaacggagacgacgacggcggaacattcatggagagaagcgaatcggacaattcgaccgcttctgttgttgtcgaacactttcctcatcagcaacaaaatgccaaaagccgtcagcagccgccaaacattggggaggggtcaaaggtgaaaaagcatttttaaagccaaaagtaaaaagtcgaggctttccccgtccattagcctttgttttattagagcatattctttgattgctcctttaattctccgggactcaattgtccgttcagccgatgga

SEQ ID NO: 1570 - DNA, 1132 bp, Heterodera glycines
  unsure (1)..(1132): unsure at all n locations
tgcggcacctcaacttgcggatcaggcaaaagtcaaattgatcatgactaagctgggcgaggcggctttcagccagtacagcaagtcgtgtctgccgaaggaagtcatcgatttcgacttcatccaaacgcaggagcgacttaatattgctttcagccggccataatccatttggattgatcgctacgaatgcttgagggcctcaaaaagtgatgctgaaaactttcgccctttcatcaaccgacataagcggctcttacgtgacttttagtttgacaaactgaacgaagaacaattttcgtgcctcatgcttttgacggcacttaagtcaccaaaggacgccgaattgagaaagcgcattctatcgaagcttgcagcggatggcgggcgacctggtggcatatgatggagttgccgaagacctccaaatgtaccaatcgaccatcgctgaagcaaagatcattgaacaacaccgatgggatcgcgaaatttgatggcggtcaaacagaagctgcgcccatcaacccaatgcagaaagggagccaaattcaaagccaaactcaaggggtttgctggcgttgtggcaagttgcaccattctccaagctactgtccgaacatcaaagcgtttgccgaaaatgcaacaaagctggacatttggaggcacaatgcgagaagcacgatgagtggctcaaccgtaaccaaaacgccaaatttcaagggaaaaaagcttgtactcttcggatcggaggtgtaatggtgaacattgcgaaccttccaacgaagcttatcgaacttaccgtggaaatgaatggacngaaagtggtatttgtgcttgattccggcgcggaggtcacagtgattaatgaagagacgcactatctgatcggaaagcctcgattgcgccgatgtgaagaacaagcagcataccacgactgaaattgtagatgacggacttgggcattgccaaaaggtgaaggcacattcgtcgctgaagcctaatgcaactccgatttactgccgaccacgtcccgtcccattcaacacgaaatctgttgttgaagcagaattggagcgacttcaatcgatgaatgtcatccgtccggttcaacacacaaattngngctgcaccc

SEQ ID NO: 1571 - DNA, 7311 bp, Heterodera glycines
aaaatgatgcagcaattaaacgaatggtaacggtattcgatcagagtgatgaaccgaccgaccaaaagtatttagaccatattaacatgctttctatttgttagttatttaatttattgctgtgagctttcttgtttggtgtgtctatggaagggccgaaacacttagtttttttaatttgtaatacggaagggatcgtactgacgaggcccatccttctaattttttcagcaattctcgtccgcaattgtacggtccgcaattgtcgtccgcaactatacggtccgcaattgtcgtaacaccatgcccatcccttctttgacccctctgtcttttgcataaatggcctccccttccctcctcagttgttcttctccattcatttcatttatttgttccttatatttgcaatcgatatctctgaccccgttcgcccttgtccttttctcttttgaataaatattgttttattccctttggactttggggcgtaacagatatcaacccgaaaattcaaccaactcaggaatcaagaaccaaactgggaaattccaaaatcgagaatcgagactataaaaaaacctagagaaattcgaaaagagacagaaattagagaagttaaacagagactccaaaaatcttaatcctgagaaattcgatatttttctataattttcctggttcaagaataacccgaagtaaataaaattttattcattttttaaaattttaaataatattataattttaaaaaatatttccatataattgatgaatttaaaattatatgaatttagtgaatagataattaaattcaataatttaatcaagcactgagtttttttttaagtcgacctagcaccgaaaaaaagcactttcaaattttttttaggaaaatcgagggcaatttttatataataaaaacctattttttaatccatttttaatttccaccttaacaagctacttttggcattttgcaatacgaaattttataatttttgcatatttaagatttttttgaaaaatatagcaaaaattgccaaaatcgacaatttaataaaaaatataccattgaaatctatgtatcgcctgcattaatgaaacaatttaaaatttctaaatatcatacagtgccccaaaaaagtcttgcctcaaagaggcaaaaattgggaatattaaattttctatcccacgcataaaacaaattctctttaattgacttttttctatagctcgtttgatgctctatcagatgctgattatttaacacaaaatgagtgagttattggcatcagagtcaaagatgctcaaaaatgcaaaaaaattcttgcctcaaacctcaaaaaccatcttaaagttggtttaaaaatctgaaataattcatgtttgcttatcttttggtgttgaacaaaaattaggaaaattttattggaaattttaatagtctcattgaaaagagcacaaaattctctaccgaattatctttagaagggaggggctacgacttgttcacaaaaagttatacttagttgaaaaattggagaactcaaaaatgatcagtttttgatcatttaggaatttttttcgaaaattacccaaattttcagtgtgttttagggtgttcagatcaccatgaaggagtgatcggatcaagtattttgaggtttgaggcaagactttttccactcatttttgggcatctttgaaccaatttttgcctctttgaggcaagacttttttggggcattgtaactagtgctgcgatttttaggcagaaaaaattcgcaaaataagcattaaataggcacaaaaaaaggcaaattaatttttttaaattaacgcttttaggtagaaaacacataaaaattaatcaatacttactttggttatatttaaatttaaatgaaattaataaagattttaaataaaatcaaaataggtctttggaatttacaaagtgctcttatttttattcataaatctttttagaaactcagagcgcgcatcgaaaattttccaaaataagcaattttgaaaattagttaaaaataagattccggggtcataaaaaggtggtgtaacgctttattaaaaataactcactaatatgttttttttgatagaaactaactaacaattatatggagttgttaaaatctgatatagatgttgaccaattattaatttccatgaaaaacaaacctaccgtattttctctttttatccccccgtctccatttatcccccgtggggataaatggagtttttatttatcacgccattttttcaaaaaaacaatagtaaaaaatgctaacaaaaaatgccaaaatagtggcactgacgaaaagcccgaaataatgaagaatagtgacataatttacagccaaaaattagcaaaaaaatttttattcacgggttgatgttgcaaatgtggttacacttcttcataaaattttcttagaaaataatgatttgaaatcctaaaatttgtcaaaataatttgagggatgaatttttgagaaaattttccaattttaaggatgtttttttacatttaggtcaatcttaggggttgtttttttggaatttttttaggtcgagcatttttgttgagaaattttccaaaaaatgtcgtaatagtgaaaaaatggcgcccccacaaagtgtccaagccacgaaatgtccaaaagagtaaaaatccaggcaatgttcaaaatttttcaatatttataaacacaaaatgagtctaatttaggatttctagggttttcggggtcgttgaatatgaatataccctttatattaccccttgcctaaccttaggcccatctgaataataaaaaactcaaattcgagacttggacatttcgtgggctggacattttgtgggccagcggaaaaaataggtgacaaaatgccaaaatagtggcaaaaaactattttagtggccaacttcgaaatagttttttagtggcaactcaaaaatagtgattcctagtgatggcgctagacgaaaattttttgaaaaagaatatgctttttgtgcatttctcattaaaataaagctgcagaaaaaaatttaagtttttcccgccacttcacatttttggctcacttccatccatttttatcccataattttataaaacaattccaaaggcctagattgaattttattatatataaacaaatttacatgttaacaaaaatgttttaatgagattaaatattttatgaggggtttggatgaaattgttaacaggtttagacaaaaataagccctttttgtgaaccattttttaaaaatgaaaatttttgtcaggctgtgattacaggcaaccccagaaatattttgaaaattttatacgaattattgttaaaagattttttaataaaaaaaagacaatttataaatttttggttagaaatatttttttttttttatatataaagtcttagaaaataagcacacaaatgcgacatctgtagcagtggtgtagttttttttttgtttgctttttcgatctttctcaagtgatcaattctaaatttctcggtaaaaacatttatcgtacaccgctagggaggctaataattagacttgcaaaaaaaatgcaccaaaaatcgcgaaaatggcactttaataggcaccaaaaaattgaaaaaaaggcatgaaaaagcacgaaaatcccgaaaaggtatgaaaaaaggcatttaaaaattttttgtattttcacgatttcattacatttttaatgtaatttttcggaaaaaacgccaaaaaggcattaaaacggcaaaatgccaaagaaggaatttaaggcacgaaaatcccgaaaagggcaaaaaaaggcataataaaagtcaacgtagaagcctcaaaccaagtggaaaatttgtgtttttatgcttatatatcgaaattagtgcataggaaaaaaaggcatatgcctcaaaatgcgagctctactaataatacgaattattatgttaaatgcttaggcatagacggcctaatgcaatgcaccaaaataaatttgtaatttttgcactagagtccggtaaaaaaaaatttccgggaacggggaacgggaaacgggaatcgataaagagcgggacgggaaacgggaacgggattcccggctttttcccgttcccgtaaaaatcccgtcaattttaacgggaatcccgccgggaaacgggaaaaaatttttttaatgaaaaattttgattttttaaaaattttttactttaattatttttcaagtgaaaatattataatttaaacggtttaaaaaatttctctgtgtaaatgattgagtattttttaaaattaaatggacaaaaataacaaaaaatttaataaaatagaattttcggaattgatttgttcaaaatccttcgttaattttccaccaatccaaagggtccaattcctgcccaatcaaatcgcccgaacaatattttttgaattcttcgtcaaatgtcgattcggtttgcactttaaattttgtatgtgtaataagaaaaatcctttaaaaataccaaaagatttgcttgttgaggccatttctgattttttatatatgtacaataattttcattaaaattgtctattatttttaaaattccaaaatattcgtagagaatttttctatgttttcaacttatttacaaaatctttttttggttaaaatctcttctttttgtgagcgccttttacaaaatcctttgtggtacagggaggggtcaagcggtgccgataggcgccgccggggaaaattttgaaatttttagtgaaatttgttaacaaattttgtccaaaaaatgattaatttgtgggcttatggctatttaaaaaatattttttaaagttagacaaactttcttattaattaaatttcaaataaaataatttaaagaaaatatgaaaaataacctatcctaatggggaattgaactcaggagacaaataatgaaagaccagaagtattaaccattaggctacataaatatgtacgctaatgaattaaaatgaatttatatttatttttttcacaaaaaatctctcttttaccaccaatttccttcaaattttttcactcagacccccattcttaccagtgtacttttattcccgtttttgagaaaaaatttacgggaacgggaacgggaaaacgaaaaagaacggggcgggattcccgaacgggattcccgtcatttttcccgttcccgtaaaattcccgtcaggcaaaaaagacgggaaacgggaatgggattcccgaatttttggatattcaaggtcaattaatttagaattgattgttttttcttcctgcaattcaactgcattttcattataaacggtaagtgtgagcacttcggctgtgaatttaaaagataatcattaaattgtttttaaataaaatttatttaaattattgtaaaactaaaaactataagcatccccgaattaactatttgtttcattggtttttactagggttgctccccgacccctcgcgggcgacatgtcgggggtcggggcggggaggagctcaattgtcggtggtcggggatcctgatcggggaatgatcaaattttattttaaccaaaaaaacaattttttctttttcaatactcgtaaatcttcctttttttcactttaatcatctgatttcgttagcgccaagagtgagtccaagctggcgcctttaaaccagggcttccctttgttcttatttataagaatgttctgattttggggtagcgaagaaaattattctgatttcttaaatatacttataattttgaaattttatggcataacgtcactattttatcaagaaattataaattctgacgcagaatttttttgatctttgatcctgaatgtacttaaatttacaattttgcattttcctctccaaaattttaaaattgatgatgggagactaaaaatataaaatttgatacattttgatcgaataaattgaaaatcttatttttcggacttggtgttcatggtggaagccctggtttaaaatacatggaaagggggagggagtttaaccgaaatttttgcgaatccgtctcaacatcgaatttgaccaccattttttgcggcgctctttttcaaaaaaaaaacttttggggaacagaagggggggatgggcggcggtgctgttaggagccgcgagggaaatttttttttgaaaatttataatttgttaacagatttttcctaaaaaataccaatttgcaattttgggacaattttttccaaaaaaatttgggttttggggggccggcggtgtcgataggcgccgccgaaaagtttttcggaatttttaattaattaatattaagaaaattgttcaaaatttcataaattttcaacctttccccccttcgttttattgaattaactttttaaattttcaaggaccggttcaagctgttggatctgatcagtttgaacttttgctgcttggtagggaacaaaagtccgaaattggcaaaccatatttaccatgttaaaagaaagaaactaattacgggcagaaaatatcgatgttttgtaccgtaatgattgtagtctgacttttcattcgggcttaatactggtgattgttcatgtctgtttggttttttgctaaggtgccaaaattgaaaactgagttcttgtacaacaatgaagaaaaggttctgctggtgaaaaaccgtttaaaaatataagttgtgcttattctataggcaaaatggaatttcggaatccagttttaatttttggacgaagaatttttcttagcctgtctattgaatttgtcgaacatacgtcggcttgtccattacaataatgctgttatctggagaaattgcatctttaatcaccttggcttacaaaattgtcgaaattccgaattgtcaaatacgagttatttcggtgttcaatagcgatgaaaattttgttcaacaccgattgtgcccgtggcaatgtcgttttaatttgcgttatttacggcggcaacttcgaaagggcgtatattagaatcggcaaggtcagaaatgaaaagcagattttcttctcttggtgatgttgatgtctgccttttcgcattttagttgactaatgcgccaaagtcaaaaacattctgagatggagcacaagacagctgaaagcactgcaacaaatcaatgcttatgtatttcgtgacaaaaacaaattctttaagcctatattgtctcttgaaaatttagctcatgtggattttggtaggaaatgtgttcataacgaacatacgcag

SEQ ID NO: 1572 - DNA, 3947 bp, Heterodera glycines
cttttctgtttcctttcccccctgaaatttacaaataaaaagtcatttctagcgtagtttgtggcgctgatcacgaatatgacctttattttacaaaattccgaaccccgaacccgaaatcgaacaaaaattcgaaattcaaaatttcaatgtaaacaaatttttaagggttttctaagtcgctgaatacggatatggaatccattttctacaaaaggcatctcgtacaatattaagcctaagctgaagcctaggcccaagcttaagcctaagcctaggcctaagcaagcctaagcctaagcctaagctgaagcctaggcctaagctgaagcctaagcctaggcctaagcaagctgaagcctaagcctaagctgaagcctaggctgaagcctaagctgaagcctaggcctaagctgaagcctaagcctaggcctaagcaagctgaagcctaagcctaagctgaagcctaggctgaagcctaagctgaagcctaggcctaagctgaagcctaagcctaggcctaaacaagctgaagcctaggcccaagctgaagcctaggcctaggcctaagcaagcctaagcctaagcctaagctgaagcctaagcctaagctgaagcctaggctgaagcctaagctgaagcctaggcctaagctgaagcctaagcctaggcctaagcaagctgaagcctaagcctaagctgaagcctaggctgaagcctaagctgaagcctaggcctaagctgaagcctaagcctaggcctaagcaagctgaagcctaagcttaagcctaatcctaatgtgcgccgctcgcttcgctcagttcgccccactatttgtcctcctttctccgtgtgttggccattgcgaacgctccgcggcctttaaaaaataatattaaatgccaaatgtggtcaaaattaacataaatgtggaagggaaggccccaatcgtcacttttattttgcttccaattttacctttatttcctaaacccaaaatggattattacaattatgaccgattaatggccgaatgtcccaatgaagttgcgacagttaaatttctccaaacaaaaggcctactacataaagaacgccattgcgattgtggttcgcaaatgcgcgagagtacacgcacacaacgggacactgtaattcccgtgtggcggtgtacttcaaaattctgcaagcaactaagggcttaagaccggctacttggttcgacagctccaccctttcgttccgctcaattcttaaatttatttattggtggtcgactgagcaaacgtctgttaatttttgtcgccatgaaattggaatggcacacgaagcagtagttgactggtaattagctatttgtaagtgccggaggcattttataatggctcaggtccatgtacatgcgcgaggcatgcgctgactccctgttaaagaacaatgggcgtgtgggaggcgtaggcttaactgtggaagtggatgaagcgcttttttctaagcgcaaaaacaacattggcagggttctccccgaacaatgggtgtttggggggggggggtatgcagagagaccaaagaggtttttatggtggcagtccctaatcgaactgccgaaactctgatgaccgtcatacgtgagcgaattgtggagggcagtaccataatgagtgactgctggcgcgcatacaacatggtcggtgcggatggcacttaccgccacctcaccgtaaaccacagctgtaatttcatcgatacttactgtatcgtaagggcattggaatctaggcgcccacacgcagaacatcgaaagaacttggcgctccgctaaggcgcggaataaaaagcattctggcacgcatcgacagatgctcgacagctatctgtgcgagtttttgtggcgggcaaatgtgaagagaaatgaagctgacccatttaaggagattttgagcacaatttgtgcatacatgccaccaaattagcccaaattttatgcgtatttttttggcagtttggccaatattttgttgattttatgcttgttgaaaaaaaactccattttatcgagttcgggttatttaattggataaaatagatgccatatccgtattcagcgacttagaaaacccctaaaaatatgttaacattgaaattttgaatttcgaatttttgttcgatttcgggttcggggttcggaattttgtaaaataaaggtcatattcgtgatcagcgccacaaactaccctagaaatgactttttatttgtaaatttcagggggggtcacaaaacagaaaagaaccaagaaaattgttattaaaggcaaaaattctaaaaaaaaaatcatacctatattatataaaagtgacaccaatagctgtgaaaatggcctagtggctaatcttctttattttctattacttttccttggaaatattatgaattttttttttgttataatcataggttttctatcgacaaataacatgtaatttatcattttttaaagaaaatccggtaacaaattgagcctagtaatcccaaaaattaaaggcattttgataaaataaaactggtacccgacccggtacccggcttttcaatacccggtaatacccgggcccggttttgcccaaatacccggtgcccgtccagccctagtttatagttggttggccgaggacacctgttgaagatatgaggttcaaagtcaatgtttctgtggtcgagaatccactgtcatgggcctacactaagggggcggaaagggtctaaaatgtcggggattcggggtcctaatcccccgtatctgggtcacaagcccttaactctcggcttctcattaaatctcgagtaaaaaaaaagaagattggatttgtcctaaaattcgcttaaattttctcaaaacaaaaaaaagcgttaccattctcgaatatcaactcgcgacgaatttaagctgggcaaaatgtgtacgggggcggaatttttgaggaataaaaaaggtcatccccgcgggggtggactcgtaaagaagtgccgaaacaaaaacgggaatggcaaaaaataaaccccgtttaatgggtggagaagcaaatgggataaaagcacgcacatgggaggcttcttcttctcctgctgctggtgttttgctgcttcttcatgatgttcatccaaccccgggtccggcataaacagttgacatctacatttatgggagggggcggcaaaagcggaagtgttatccggcacgaaatttgataatgttaaaatgtattgggcgcaagcaagtgcatttttatccccccgggggcggggggagggcaaatgtggggggacaaggaggacggatttgggaacatagaaaacgcgcggaccgggaagagatttgtttttttctgtgactgatcaaaagcagatttcacccattattttatccggggggagtgattgcaaccgagaaatttgaccaacgatttggcacggcttgggacaaagtgagggggatatactgtaatcagcagcagatgctgttgcactttgttggccacatttggtccgccttgtcgttgatgacttcacacatgtttttttttgtaccgtaccataccgccgcggcattaaacatcgttggcacgattatttttattatttttttgttttgccacgcaaaagcattttggcaacaaaaatggcgaaattttgcggtgccaaagtgccaatgccatcgcgcgcggaacggcacggaacggcggccacacccaatttgccaagcccgaaaaggacggacggatagagcattttgtgtgctgctccattgcagattatgatgttatttgccgggtcgtttcacccaattagcgggacgaagttaatgctggcacattaaaaatgaacacaaattgtgtgatgacgaaacgggggcatcacaacaacacaatgtgcgtacgtactctgtgcg

SEQ ID NO: 1573 - DNA, 1876 bp, Heterodera glycines
tttttcgagctctatcgattggtgggatttttggaaaaatttcggtttttttccggaaatagaaaaaatttatggcctaagcgggacatttgagtcccgggcctataactcgtcagggatcggttttagccaaaaattgccttagaacatttttgtagagcattttaagctctatcgaatggtgtgccatttgtcggaaaattttcaaaaattttcgagctaggccccctagaaattttcaaaaaatttttttagggcgagaagtggggtgaaaaatatttttttggggtaaaataaggtgctgagcacgaatatgatgtttgttttttgtttgggaaattttggaattttttaaatttttttgaaaatcggtcactttttttgccctcgggattttgggttaaagtttgaaaattcataactcagtttagatcaggtctattttaatgtatagaggcttaaaaaatggagtaaaaatcggagaaatttttgccctttatttggtatttctatcaagaatataaaaaaagttattccagaaattctggaaattttcgaattttcagaaaaaaattcactactcggttctgaaaagatattttgtaaaataaaaatagcccaaaaatccgcaattttttgctgtatttgataaattttatttcatgtttttatcattttttagtaaaaagttataaaaataaaagtgatttttgaattcgggaccaaaggggggtgcacatggttttcgagtggggacattttttcgcccaaaaacttccagaaatatgtctttagaggttatttaggacgctgatcacgaatctgaaatcagatttcgtttacttcttcgggaaagcctcagaatccctgcgtatagtgatgaatcctatgatggacaccatccccataccgtttgctagagggattgccaccatccccataccgtttgctagagggatggccaccatccccataccgtttgctagagggatggccaaacaatccacataatactgtttaggtggatggtaccataaccaatcccatccccatagacactcttatggggatggatcacatccccttaaacactcttatggggatggtggtcgtccccttaaacactcttatggggatggatcccatccctttaaacactcttatggggatggctcccatccctttaaacactcttatggggatggctcccatccccttaaacactcttatggggatggtcccatccccttagacactcttatggggatggatcccatccccttaaacactcttatagggatggtcccatccccttaaacactcttatggggatggtcccatccccttagacactcttatggggaatgctttaaatacactaatatccaatctgctgttcttcctcttcttcttcttccacttcattcacttcctcctccgcttggccttcatttgcttctgccaatgccagatcgacatgtccttcccttgcgtttccgttgttgttgttttggctttcattaaattccattttatttattaacacctttaaaaataatcatgggactaattaattcacatagtcgaaatgatgttgactttatctgcatttttaaggggcataattttttaggctcgaaatttgacaggttttcaatgcgcattatttgctaacggtttgccgagagttttctttttagtttgcttgggaatccattttgtcgggccgagctgtccagcggaaagttttatctgatcatggttgtccggggctgcattcacaggtctgtatttatccggggcgtttggcagcttatttggccgtggtgtactttctggctttctctggcgcatttagtcgggcgatattttgtta

SEQ ID NO: 1574 - DNA, 1592 bp, Heterodera glycines
ggcgcgctgtcaaaatcccgatgcgtcgaaatcccgactaagccaaaatgagtcataatcccgacgtgtctaaatcccgacgcgtcataatcccgacgcgttgaaatctcgatgcgtcgaaatcccgactaagctaaaaagagtcataataccaataaatttaaaaataagcgaaaaatcgaacctaaatcttcggtaatgaaattttaaaataaaaaagcaaaagaagttttgtgctttatttaattgtgcaaataacaacaaaaataaaacattaaagtaaataaattctaattgaaatctgcggttgaattttccatgttttcatcaattttcctgcatatccctcgacttgaagaccaagcgccgtcatgactagggcctgtaattatatggacataaaatcgcaaaatatggccataaaatatggacaacaaatcgcgaaatatggacataaaatagcaaaaatctcaaaatatggacataaaatggaaaaaatatggatataaatttttcaaaattaggggtataatttctcaaaatttcttcaaattcgctaaatgcaaagtaaaactttcaagaattgctaaatatattattaaaaattatttttgaagaaaaaaacacgatacattaatcaatattttcgacaaaattttgataaaaaatgcctttttcgaaaaattttccgatttgaggtcaaaatcccaatttagttgatgggggccgttctaatagaggttttttggaaaaatgccaaaatatggacataaaatatggacttaaatgccaaaatatggaaatatggacataaatcgccaaatatggaaaaatatggatatagaaaccaatccaagaagcttcaaccgagctaaaaacatgtttttcgtgcgtttcaggcttcccacagtccaggaaaaaaatatggatttccatataatacaggccctagtcatgacaaattcaaatggcataattggcattgacggcgcatgaacagtaaaatgaattggtagatgacggaagaaatggtggcacgggtaaattcttaaaagcaatggaaattaaaaaatcaatcggcaatttttccccaaatcggaaaataaaatgcgaaacgcgaaagcccatccctggtggccacctcctttaaaatgttgacccaaccaaagtccgcttgttcgttaaaatctttgcaacgcaattgcttcggcaccccatctttcctcggaatgtgcaaccatttggacaaaacttggccagccgttgcatttggcccatcaaaatcaccaaacgcatagggcaacagaccaaatgaatcgattgaactcaactgattgagatcagtagaattgtcggtgaaatgagacaaagtccactcttgtagtagttttgttcacggtgttcagaatttgcttcgttttcactgttgttgttgcacataaacccgcgtttacgcgacttttgaataatttctattttctttcggttcattaagcttgctaaatattggaaattagaaaattatatcctttctcgatttaattcaccggaaataatgttatttatttattttttaaatttgtcgggattat

SEQ ID NO: 1575 - DNA, 4744 bp, Heterodera glycines
taaaaattcacccaaaattagacaaatttacgtctgcttaagccagagttaattccattgcaagataaaacaaaataatattttaaaaattaactctatttccggactcaccgcgaggaggtaggtagcagaattttgagcccatactaaccacaacacaatagacaaatcacaatacatttttatgtatggtacaccctttccaatttttaattttcgaaaaaagattttcaaaaattttaagttagttgtatctgttataagtttaaaaaaattcaaatttcgcttttccatcattaaattaaatgttcccaaagtgttagcccctttcatattcgtctgctgctgatgaagactgttgggctttcaaatcggagtgccgtcggtcggacacgtcgtcttccccagcgtcggcggcacctcaaaaagtggaactgctgaacatcgacgagtacagcaggaaggagcagacgatgtgcaattgtttttatttgtctctaaagctaaagggcctgtggccagaaaaattttcaaggggtgggcgacccgaatttttttgcctggcaaaactttttttcaaaaataggcctcgctgtggaaaaaatgcatttcagtctatttgtcaatcattcatgagcacaaattttctttttttattggaaagaggaaattagtagtgctgttcgagactctcggtctcgagtctcgactcgagaaaagtctcgggtttttttttaaatggttttaatagccctttaatatgctgcttgattgaattacatttcgatttcatgtattaaaacatttaggaacaaaaatgtgaaatcaaatttttaggctttgattgaatccgggttcagtgttcaaaattgatctcagaatgaaaattttaattattttttggcggtcaggattcggcaggtgtaatacctgttgctttcaaatttacgtttaacataaaaggaaggtttaacagaagagattagtcgttattatacggtctggttaatcgtttaattccattttctgtgttatccgattaatgggcgacacattctaaaacggccttcatggtcggttttctatttatatcgtcttgaatttttggtgcaatttttggaatttcgaaactattttttcaaatagcgaagctcaattccctacgaatataacttcatcacggaaaattgacatttgagaccattaaagccataaatacacgatgatagctcgtttcaacggatgataattctaaatccaagaaaacggtggctctaatttcagttattatgtgcctaaatttgccttcgctatttaaactcgaaattccgaaaattgcaccaaaaattcaagtaagatataaatagaaaaccgaccatgaaggccctttaggatgtttcgcccattaatcgaataacgcagaaaatggcattaaacaattaacctgaccagcagacagattctaaaatgaccttcatggtcgcttttctatttgtattgtacttgaatttttggtgcaattttcgggatttcgaagccattttttcaaatagcgaaagcaaatttagacacataatagatcaaaaccgtgcctgaggtctctgggaattattattattacccgttgaaacgagctatcatcttatatttatgcccttaatgctctcgaatgtctattttccgtaatgaagttatcttcatagggcgtcggcgaaatatctgttgctttcaaatttacgtttaacataaaaggaaggtttatcagagtgcgtttgtcgttatgttgctggtctggttaatcgtttaatgccattttctgtgttttccgattaatgggcgacacattctaaaacggccttcatggtcggttttttcgtcagggacttaattttcacgttaaatgttctatatacatacttacctattttctttaatgcattttaaactcaaatagtgataattctttcattcaatatatatggtgcttaaatattaaagtaactttttactatcaaacgaattcgtcagtggacaattttccaggaaaattaaaaataatcctgtagctcagatgttggattcgggccgacatatatgcagtcgagaacgaattaccatacgtaacaagcgattacacattttaaaacaaagtatccactgacgaaaatattcactgtcgaattggaacactgacgaaaaaaatggaaaacagtgaaataaataaaaaatagtttacagacgaaaataatcactgcaaattcacaggcgattaaaatatagtgtaaatattgccacatggaaaatcctactcagaactcattgcttttagtaaatccctgaattcctttgccttattaatttgcaccgctaccactggaagattattccagttttttactattctattgaaaaaattattttgagttttggctgtgtggcgctttactcgtaaaagtaaaggccttctgggcctttctgagaaaaggaagcttttaccagcatcgagcctagttaaccctttaattattttaaaagctgttgttaaatcattgatttttctttttttttaatttgtgtaattcagtgatttttaagccacattttctaaatgcttttctcgtgaaaaacttttgaacgcgttcaattttatctatatctttttttaagttagggttccaaacttctgtggcatattctaattgaggtcgtacaaaagttttataggctgctgttagtctttatttccctgctttttaacactctcaaaatttggaaagttctaagatatgcatttcgtacaattttgcatatatgttccgaaaaatttgtattgtacttgaatttttggtgtaattttcggaatttcgaagccattttttcaaatagcgaaagcaaatttagacacataatagatcaaaaccgtgcctgaggtctctgggaattattattattacccgttgaaacgagctatcatcttatatttatgcccttaatgctctcgaatgtctattttccgtaatgaagttatcttcatagggcgtcggcgaaatatctgttgctttcaaatttacgtttaacataaaaggaaggtttatcagagtgcgtttgtcgttatgttgctggtctggttaatcgtttaatgccattttctgtgttttccgattaatgggcgacacattctaaaacggccttcatggtcggttttctattaatatcgtcttgaatttttggtgcaattttcgggatttcgaagccattttttcaaatagcgaagctcaattccctacgaatataacttcatcgcggaaaattgacatttgagaccaataaagccataaatacacgatgatagctcgtttcaacggatgataattctaaatccaagaaaacggtggctctaatttcagttattatgtgcctaaatttgccttcgctatttaaactcgaaattccgaaaattgcaccaaaaattcaagtaagatataaatagaaaaccgaccatgaaggccctttaggatgtttcgcccattaatcgaataacgcagaaaatggcattaaacaattaacctgaccagcagacagattctaaaatgaccttcatggtcgcttttctatttgtattgtacttgaatttttggtgcaattttcgggatttcgaagccattttttcaaatagcgaaagcaaatttagacacataataggtcaaaaccgtgcctgaggtctctgggaattattattattacccgttgaaacgagctatcatcttatatttatgggcttaatgctttcgaatagagaccggcgcaggacaggatcctgcgcaggattttgcaggatcccagtccgcaatcctacatattttggaaaatacaggatttacaggatttgcaggattaatcctgccggatcctgtcctgtaaaaattttgaattccaatcctgtaacaggacccgcaaatttgatttttatgcaggattcaacaggatcctgcattgattttttgaaaattttatgataaacgatggttcaaattagggttgaaccctgaccccgagctccgagatttttgtgcctgttcccgaccccatccccgacggtccctggcccccgacattttgctctgctccccgacacttagccggggaatcggggaccctgagtgttgttaaaatttaaaaagttaattaaaccaaaatatgtaaaacaccgagccctcccggtggttctcaatccccgacttttccaaccccgatccgtcggggtttcaatccttgttcaaattacataatataaagctccctaaaacggattttgttgggcagcggactgtcgggcagcgcaaatttcaaaaatcctccgtcactcatatatacatggagaatagtgtcttcagactccgtgtcttttcgaatttcgacatctctccaaactgtcaattcgcttttggcatcgaaatgcgcgtccaccaaaacatcgaaacggtcggaaagcattgccaatttgaggccgagttcacaacgatcaaaaaagtgcagaatgtccatgcaaacatcggtacaaatccagctgaaatgcgtaaaaatataatcaaaccagcaaggctctcagatgtgacggatcagaccgttttcgttcgaacatatgtttttggctataactttttttatttgtcaaccaaatccaacactgttggtatcattcgagagcccttcagatgctctattatcctgcaaaatccaaaaa

SEQ ID NO: 1576 - DNA, 8007 bp, Heterodera glycines
aaagcatcgattggggcttaaagatgataaattaatatttatatttttaatttcttattttttacttttataaatgaaaactatattttaataaatttgtttttctcatcacttttttccgttttttgtttttgatgaactttgcttctgatgcttaatcatttcgctgattttttctaaattgttttaatattagcatggactgaaactgggtcattaaaaaaaatataaatttaaatcgattcaataaaaaatacagctaaagcaatgtttggtaatttctaccgtattttgtcaattctttttccctttgcttttcctctccaattttggccactttctcctgtagtacattaagctctgccaccaatccacagtgctttatcttttctcgaagttccttctaaatatttttgtcataaaaatttgttttttttcactcaaaatcatatttatttacataataggtgcaaaaataggtgttaaaaatgaaaaatccagtgtctttatgcacaaaattcccaatttcgcccgcacaattgcaacttgccaagaaaataaatacaataataaattttggaaatgatttttaaaaaaaactttttttttcatttcttaggggtatatttgaaaattttgggacgattcttaggagtgtatttttcgtttttattcactttttctatgaaattcctggaaaaatgccaaaatgtgcttatctgggcactagaaaggactaatatcgaaacaacaagccatatgacaatccgaccaatctccacccctgtttttaaataattttaaaatcactatcttaagttcgccaacagttttaaattttgaacaactttttgccaattgaaacgcacattttgttgttccaatttgctgatcttgtttaagtgtcttgactccttcaactcattttccattttgacaaatttttcacgaaattcctatgattaaaattgaaaaatttaaattgaaaaatgaattttcgacgaccttcagctgttgccgaccagttaatggtaattcctcatttcccccactggttacatcggtttccaaactgtcaataaatgcagtgccatcaacttctgaaactgtaaaataaaatttataatgcaaattgccattggaaatattattaatataatttgggatttaaaattataaaaaaaaaaattgtcaaaaatatctctcataataacattaatgcttgttaaatttgattaatactcgatatttttaaagaaaataagtcctttttaaaaagcccggaagaataagaataatactggccacaaacagactttgttgacatttttgttttttttaattataagaattggcctacggtcccgaggcgagacgaaaaattttctaattttgttataatttcttaatagatttgcataaaaatccaatattatgaatttaagccaaaattaataatgaaactatgcatgcccttaatatgcatgaaaatatattttaaaaaaataattaagctagttttgttgtatcgtttttggataaaactccgactttacaatgacttaaaatgagtaaataacaaatttttaatttttcaaaaatggagttgatagaaaggtataaaatttctctttaaaacttaatttcagttcttttttttattctttccccaatatttcgtcgtccaatttggccttatcttttcgctccgctttcttttgatttttttttatacatttctttcattaaaaggtcaaaatgcacatattaactgctttccgggccgggatcgagaatctgaccgaatcggattgaattccggttccctgattcccagtcccataagtttagggattggtgagacaaatacgaaatcctactgacaaaatgccaaattttgagataattcatcaaatatttaagtaaaataattttatgaaaatactgaggaaaagaaaaaggaaaaaatcaataaagctgatcaaaagtgatattttcttccttcaaagagtgaccaaatcaaatctgaagttggggccaaagttggcctcaattttatcaccagcgccattcaaactcaaagtgacgaaagggaaaaagaaacaatcagcacaggaggatgtagccatcaactcagaattatctaaataaaaaagcacgggaaatttgaaggaaatgaaaattattttgggttttttgggaaagaagggatagacggtgccgacaagccaggctccaagtttttcttcctattgggttgatgaaaaagttctgaccctctgaaaaaacaaattatgcaaaaaaatgatatttaattctaaagagattgaaaaagggaggcaggcaattgggggatgaatcagcggacggttggccatcttttggccatttgcattcgttgtatagtcattacttttgcaaaatcgaacgattttcaaaaaatggaaaaaattcgcctaaatgttgcgttcttaacgcaacaaaaaattgagcaacttcgatgggcggttcttcctcatccaccatacagcccagacatcagcccgtgtgaccactatctgtttcgatctatggagcacttcttgagagggaaataatttgctgatcaaaacgaggtcgaaaatgcattggatgacttttttgtatcgaaaaatgatcagttttataaaaaggggattgaaatgttgcccgaacgatgggagaggatcattgatcaaaatggtgagtacatcattgattgaacatttgttttttgtgaaataaaaaattgtttaatgttgaagtgcttaaagggtcagaactttttcatcaacccaatagaaagaagctagaaggaaattaggcgtgaccttaaaatcaaatgggttttaaattttataaaatcaaagggggactcttttgtaaattaaaatgcagtaattactaattaggcaccccatggcgtcggggaactgcgggaattgcggactgggaccccagttaatcccgcgtgggatctcttcccacgccgttatcttgtaccaaaaaatccttggcatgatgattaaaaaaacttttttttttttattaccaacccaattgtcgtccattcttcgtgaaaatgatccttcgactcgacaaattaacgccaattccgacagtatctccgacaccgtaagaatatccatcacttccttcctttcgttttccgttaatccacagctcgccattcttttcataagcatatgtgcccgtgctatatcgaattgtttcatcttttgatgtttgctgctgccttagggcaaatccgaagaaggcccaactgaaaaatcaataaatctaattttaaaaatataattttaatgtatttatcactttatatatttaaaaatctatacattctctcaccctttcaaatgtttgagcgaaatttcatagtaaaaaatacgagaggaattgttgttcaacaaaatcgaatacattgcgaagatggaacgaaacacttttaaaataaaactattaattttatattaaataattaaaaaattaccccaagcatttcccgtgcaatggaccgtcaaacttttgccatctttgattttgatatcattttgataagagttttcttcccaacaattttgacggaaattcgaatgcaccttaaaacagattttttttaaaaatttatatgcttaattgtcagaaatgttatgaatctgttacatttttttaattgtctccagcggcgcctatttatatgttaattaactgttcttatacacaccgtttcaattttggcctcccagttccaagaagatttgcatgtgtggctcagtggtttttgtaagatagtaaagggacaaagggtgttggttcgagtccgttgtgcaacatgaatatttttatttatttttgtgcaaaaaattaaaaaatgaccatttttgggaattatttttggaggtttttaccaaccaaattgtacaatcttgacatcattcgaaagcccttgatggggagaagctttttctaagcaaatgctaagcaattggattgattaggaaaaagatatgagggttcgaaattttgtttctcgaataactttttagttaaccctttttttgcttttaaaaacccttacattttgttcgtaatttttttctctatcgacatgcaaaatttggtgtaaattgtatgagtagaaaaaaagttatatgtggcgaagtaaattcagtttttctctattaacagagataaagaaatagtacgccaaaaagagatgtttttttctctgcactctctatttattggttcatgtctcgttttttgaaacggtgtgtatactgttaaaattttgagattgaaaccctgtgtaatggctgatcgaaaatagctgtgggagctcaaagtgctgtgggagcaaaaagcaacaggggccaaaatgaaggaaagatgtccccataacaacagtcatcccctccagtggtgggtggatgtggtctaatggctaagacaacggatccacgtaaggggccccgagcggcggttcaaatccggccttccaccccaatttttcgcctaagtaatacactgccttaaaagaattataattataaaacttattttattcagtaacaagaaattttgtataataatagggttcgaatccaaatatgcactaaaaatcattcaaacatgctctaaaaagcctaaaaatgcccaaattgtgaaaatttcagaattaactataaaaacattaaaaaatggctatggaacgctttttcagataattgcaaaaaatgttggtttttatttttttatatgcatttccgaatttttatattttatataataaatttaaattaaaaaaattttttttataaaaagttcaaaatttttcaattttaaagaaaactttcattaaatcaaaaaattttaatgtagaaatgctattttgagtccctttcttcaaagcatatgcgcagaaaaatgtgcaaaatcataaaattataacctaataataaacaaatttataccggaaataaattcttgggttttttaattttctttttaaattctatctgaaatcaaattatcgccacgttcgacctgtggctgtagatgttccttgcccttcaccaagtcccccttccgtgtgaaatgtccctgcgtccgtgcacatccgccgctggtcccaacactttcccaacaacattcattcgtcttgttctgctgcagttcattcatttgcttttccaatgcattgaatttctccaaaagttcattatgatccttttgcatctcattgaataattcgacagaaactaaaaatttgtaatttttttgttttgttgcatattgtatttacagtattcctttaccgtatttgctcgtctcgtcctcctgttgccgctggagtgatttcagttgaccttccaattcatcgattctgtccaaaagtgtcttttggtccttccgttgaccaactgtttaaagaaagcaaaaatattttctttgaatatttgaaaaataagacgttttaggttcaaaaaaatttattgttcataattcgggctgtcaaaaatatgtacaaaaaatggtcaaaaacataaatatgtaaaaaaaaatcccgaaatatgtatcaaataagtaaataaaattttttaaatggttatttaagaaaaagtgctaaaaagtataaaattatctaccaaatatgttaaaatcccgaaagaatacaggaaaaaaatatatttaatataattgacagtcagtcctattcataatgtacgtaaaagcaggagaattttcgctctttgagcccatttcatactattttggcattttgtgtctattaggcgtgaaatttccaaattataatgccaaaattgcaattgaactgcttatgatcacaaattcccttccaatccaagcgcccggcagacccaatcttgcaggtgcctcccgacgctgaccacacgtccgtttttcctgctcgtccatctgttcaccatcgatcacaaacacaccgcattggacttgggcggttgcttcggggtgccgtttgcggtaaccggagcgccaacgacggaggagcactttggggtcggtgttcgaaaaaattccgagcgctttaattaagcaaattattatgctaattgtacacatcaaatgatgcacaaaacccttaattgcttcccgacaatcagcgaatgtttgctcagtgagttcaatttccacttgcgcggtggtgtcggacgatgctgccttttccctaccgacccaatcggaaagaatttggaaaaaagctgaagtcgactcgaacatccaagtgtcttgtgcttaagaaaaaattttttatcgagcaacgggacttttgagcaatttccttcctactgtaaattttttggcaaattaatttcctactgtatattctttttccatatttcccctttgtcgccggctttttctcaacttcaccgattcgtccaaaaattgcctcgaaagcatcgattggggcttaaagatgataaattaatatttatatttttaattttctattttttaacttttataaatgaaaactatattttaataaatttgtttttctcatcacttttttccgtttttgtttttgatgaactttgcttctgatgcttaatcatttcgctgattttttctaaattgttttaatattagcatggactgaaactgggtcattaaaaaaatttaaatcgattcaataaaaaatacagctaaagcaatgtttggtaatttctaccgtattttgtcaattctttttccctttgcttttcctctccaattttggccactttctcatgtagtacattaagctctgccaccaatccacagtgctttatcttttctcgaagttccttctaaatatttttgtcataaaaatttgttttttttttcactcaaaatcatatttatttacataataggtgcgaaaataagtgtcaaaaaaaatgaaaaatccagtgtctttatgcacaaaattcccaatttcgcccgcacaattgaaacttgccaagaaaataaataataaattttggaaatgatttttaaaaaagcttttttttcatttcagtatatttgaaaatattgggacgatttttaggagtgtatttttcgttattcactttttctatgaaattcctggaaaaatgccaaaatgtgcttatctggtcactagaaatgactaatatcgaaacaacatgtagccatatgacaatccgaccaatctcctccacccctgtttttaaataattttaaaattgctgtatccgcagcattcaaaatttcatattttgtacataatgtaaattgccctactttccccgacccaataccgtcataaacttgtccctctgttcgtcccatcccaagccaatcctatccctctcatttccaatgttatcgtgccatttcttccttttcccctctgttgaatatgccatccatttctcttattccctttgtgttatgccttcccaaataaccaattgcactgacccacccaaaatgctctgaggttgttgttgacctaaacatattcccggtttttaacacataattatttgtcaatgcttttccttataataaattcctctctcttaaaatgatgatttgaaatgtatttaagccttaaacccggggacacaacaaaaatcactatcttaagttcgccaacagttttaaattttgaacaactttttggcaattgaaactcacattttgttgttccaatttgctgatcttgtttaagtgtcttgactccttcaactcattttccattttgacaaatttttcacgaaattcctatgattaaaattgaaaaatttaaattgaaaaatgaattttcaacgaccttcagctgttgccgaccagttaatggtaattcctcatttcccccactggttacatcggtttccaaactgtcaataaatgcagtgccatcaacttctgcaaatgtaaaataaaatttataatgcaaattgccattggaaa

SEQ ID NO: 1577 - DNA, 13236 bp, Heterodera glycines
  unsure (1)..(13236): unsure at all n locations
atcactgggactcaaccgtacgggggccttcggccccactcaccaaatttttgcgccaaaggtactcactcggcctcgtacggggcctgcggccccaacccttcccccctctccccttacaccaatttctgcgacaaaggtactcactcggccgcttcgcggcctcgtacggcggccttcggccccctcaccaatttctgcgacaaaggtactcactcggccgcttcgcggcctcgtacggcggccttcggccccctcaccaaatttttgcgtcaaaggtactcactcggccgcttcgcggcctcgtacggcggccttcggccccctcaccaaatttttgcgccaaaggtactcaccggccgcttcgcggccaagtaactggagtcttcggctccattccagtcaccagaattcaatctcaccaattcttcgaaacccaataaccggaaatgaatgataaaaccgaacattttcctcgtcttttcttatttcttgtggcatttccttatggcacaacattcttggaatttcatcagctcttcttgtttattggcattttcttaaggcacaacattaacattttcattgtctcttctattttcttgtggcattttttatgccacaacatttcttatcacagcatcttttcttgtttgttgacatttgcttatggcacaacattcttagcattttcgtcgtcttttcttgtttcttgtggcatttccctattgcacaacattcttggcattttcatcatctcttcttgttcttatcttttcctcgtcttttcttatttcttgtggcatttccttatggcacaacattcttggcattttcatcatctcttcttgttcttatcttttcctcgtcttttcttatttcttgtggcatttccctagtgtctcacacgaaagtcgcagaacaaaccactaatgttttttcaaaagcatgacacacattagtgtctcacactaaagtcacagaacaaaccaaagatatgcatttctatttcattaaaagttcaaataacattaagcataaacataattatttcacgtaaagaacacaaaaacaaaataaacaaacaacaaccactaaatcaaactcaaacaatatactgataaattttttcgtttacaaaaaacaaatttatataacaaataacttaataaactatgaacatacataaaaaagcaaataaataggtacaattttaagaatgtttattgcaaaacaaattgaaaaatcaaaaccaaacattttcatttttcaaatgcttttttaacgcaaaacaaaacaaaaacatttatatttttcaaatgcatttttaacgcaaaacaaatacaaaacgccatacaagtagttactccccccctttttggcccttaattttcagccccgccatttcagtcccagtggaaagggacatttcagtaccagatttaaaccttaaaaaacacctataataaatatatccaatcccagaagaggtaaataagtgaaaaaacatctgaaggataaaacccaaggctaaatcctattagagaaggaaagggaggcagaggataggcgtcagctgtcatgccttataaggaagggaagggacgcatgccacctgagcgcccgcgtgtgtgccatttaaacgctcgcgtatgccatttgagccccagagttattttttacagtgcaaccatttgagccccagagttatttttacagtgcagccatttgagtcccagagttattttttaagtttagccatttcactcccagtgcccacgggacacttcagtcccgagacccaaagcctattgagtagccaaagtctacggagggtcattaacattccttttaagtgcattttgaccaacgcagggccgacggagggtcattaatcattcttttgagtgcatttttgccgaagcctaagcctacggagggtcattaatcattcctttgagtgcatttctaactaatgcctccgaaagtgtcataaatatccccttaggaaatgtggagtctgttgtactaaaagccaactgagcgccattaaccattcttttgtgaacatgtctgtccaatcgaagctagtggtcattaattatcccttgggaattctttttgtgcatttctgaccgagtcaaaaccaatggaatggtcattaataaccccttggacgcattttgactgtataatgcccacggaagtgtcggtaatataccactggaaatagaggtcaagctgtgagtcaatgattaattgtgacagttgtgcctatgcaaaacccaacatcagatattctgtgcttgagacagctgctcaattgccggttgactttcagctgtgagtcaatgattaaataaagaatttaaaattaaaaatgaattataataaagttaaagttaaaatataactaaattcaatttattttagtataaatacctaaaaattttctcccattattcatttaaaatgttttttccaacgattaaaaattgcgttgctgttgtagacctcaaaataccccttgatattgaaaaaatttatttaatagcgccatccacaaaatataatccacgtaaaattcatgctgtaattatgaaagtgtataatccaaatgctaccgccataattttctcaactggaaaattcgtatgtacaggagcagctaatgagaaagaatgtaggcaagctgcggagcaagtcaccgaacgaataaggcaatgtgggtactacgaggcacgaatccacgaatttgcggtgaagaatttgattgcgacagcagacgttggttttcatatacgcttaggacctctgtccgactttctaggcgccaaatattgttccttcactcctgaactattccccggtctcgtgtacagaaaccaaaaccctaaaatatcgatcatagtgttctctagtggaaagcttaatctaacaggctctagatcaaaagaagaaattgattttgtatttaatcaattttatcaaattatctgcaatttcaaatattcaccataagcgataagaatcataataattgtcattatattttgaattattttcgtcaagtaaaggtattgactttgggaaattttgccctaaataaattatatcattgtccttcactttcacaagttcaagtgggtagaaacgttcattgccattcttgtgtttttcgatcacgcaaggattgcttgaatagcgaagacaaatgcggtgccgtacataaaaatgctggtcgacggtcacattcttgaaaccattgtaagccatttgcttacgggcactttctcttgtaattccaccgtactcaaaatctttgtattcatctagttgatttttgtatgttgtctgtagagtttttcctttgaggtatttttcaactttttgaatctcatccgggtgatttaagcagtcgcacaagttacgtgcgggacagttcagaagagaagcaattactgtgtctaatcgatccatttttataaatgagttaatgataaattcctttaaatactttttatcagtttcttaacaaaattcacgacaaacaaatctggattatcttctcctatcaacttttttgtcattttttcaaaattactctcataatttcttcctcctaatgagcacatacaatgaacaaaataaatgcaatagtagccgcaattctcactaaagactgactgaatagctggcttattcgagatcacgctttcataattccgtaaaaactggctgatacatctgttcggtttcctaccaaaactatcaaaatagtagacggtcttgtcatcaacgatgaacattgctatccaatgcgttccctctttattggatgggtcattgttcgccaccaatgctgaagggtacttgttgattttatttgggagtttgtcgcaagggaagcatcccaagtagtgttctctggtctttgtgtttcccgctagaatccgatttatcgtcgttgtgtccattttcgtctctacatatatgcataagcttacataaatttctaattaatgaattaaaatagaggaaaattcctgtcataacaatagctatccacaacaaaaccaaaagcatacagtatacccatctcgataatgacctcgtttcttcaacattacaaagttgaaacttttcaacaatttcatcaatcattgagaataattcagattgattaattttattcaagtaggaatggtcaaaggaggctattttataataaatgtcagtcatttcggtgtccctggatcgttcagggtagagaatagggctattataactcgaagaaaaatttatcaaaaataaagtatatagaataaacattttaaaaaattataaaatataaataataaatcactttaaatacattaaatggttgtatcggtcattactgttcgatttttatccaatatcaaaatagagtccatttcactcatggctattagggtgatcccacccgatgggacaggtgatctaaattgaatgcacacggtagtcgtcccttctgtaataagatcaataccctcgttgtcctccatgctattagtcatattaaacgcaaaaattgtccacccctttctatacttctcaagagaaattccgttactatctgttgaactggccatacctaacgcctcattcatttcgtggaatgccctggtatataaatttttgttaaaattaagctcaaaaggcgcagcgggccattgtttcccgtttgccatcaatgtgacggatcgaatatcaaatggtttaaaattaaatgggcttttcttttggttgcctacgtatgcagcgttctccaccattccgagaatgacccgtttaggcaattgacccgtaaatagcgttccattgtattcagttcgattctcgcttataaatgtggatttgatcaaagtttttctatgggcatattttgcttctttgttttcaagttttttctgtatgtctaatgcaagaccatcaacaacttcaagagttttaacatataacttacaagcggtaatttctattctatatttatcgtctgacgctgccattatcataaactcattgtcattaggggtaagttgtatatcaatctcaacgccattcaccatatatttgtcctgattaaaaatatctgcatccaattttgtaataaattgtgcagtttgactttgtgaaaacaattttcttctcagttcaaaaccctgctgagtaatatccgtgccgtcctgattctcactgtccacataatacccgctcgcctgtaggtctgactcctttacgtttttggaataagaaagttcggcatccaaatatgctttataagcataaagtgagttagagtcataaatctcacgtccctgcacagtgatttttaaattctttatccaagtcgcaccaatcatattaattgttgccgcttgctcattcactttcaaattaacatatttattggtgtcagaatccagctttttaattgacatttcggttaagatgtaacatttgttcaaatcaaagaaactagcggtagggtgaattttaaaatgaaaaggaatgtccgttaaaggattgagcggtaaatattcccgcactgaagaactactcactgacacattagttggtggaagggtaaatattgacaaagctgaagttatagaatttaccgattccttgtcaattttcttgaagaccattttaaaataattttccaaatacgtctgatctttttctcttctttattactgtctttggtatagtttttccaataattcttttccttttaatactcttttttcttcccgttccgaattgacgcccaaccccacctttttcgagtacattatccattcccttctttacttcattaattattgcttgtttgtttggtgtttcagctttctctattgtatccaatacacgtgttccagtgtctaatgcctctctacctaataatgtaccagccgattttaattttggtaaaagtgctctccataaaaacctcaacacatctcctactcctccacctcgctgtcttccatatcctcgttggtatggaggtatcccgcgaaaataattaaaggcttctcccgagccaatctgctctactacaacaaaatcatcaaaactaactgagtttggatcaaatatttgatgcaccatatttattcaattattaatatatactatatgtgaaaatgaatatttaaatactaaaatacaatagattttttaaatgctaatacaagtaatgttgtaccccattggaatggaataagccttccctccctagtcctaatttcaatttcaatctcagtaatttcctttactaccaccttaatgtacattggtgtgttataaatcttctcaatcacgtctccccccccccccgttgccgccgagcctctctcgcaaaaggcacggacccctccccaccattccgtcgtccgtcggcgcggaccccctctttccactgccgcggacccctcccccatcattttgcagtccgtcggcgtggaccccctctcgccatcgccgcggacctcctcttcaacggcgtgaacttcctcttaccaccacagttttgctgcgcaagtctcgggatgggggaggggcggggcgtcgggaaatactgctcaaaattgtgctagaggcgaaattctttcgccgttcagcttaagggggtgtgagttgacggctcgtaaaatttgaagtcaatcggtcaagggtgcgcgagttttagtccccccccccatcatccatttccattctcctccgcagttctgcattttaaaattttttatcatcataataaaaaaaaataagaaaaataacatacgaaaatgataactgattggtcctcccttttcattgatggttctcggcatattggcgcaaaatttctgcctcacgttcggcgcgttgaagaagcgcggcttcgatggtaggtgctcgacggtgtccaaaaagaaaacgaatctgaaaaaatgtgatgaaattttaaaaaatgataaattgaaaaacaagcttacgattgtcgggtcttcacgccaccagttcaagagcaaatcctcctccgcgtcttcaatttgtgcgcgcaactcggcgtcttcatctggttgttgatgcggcagttgaacagtttgaacattgtcgggttgttgaaagggacggtcagaacattcatttggagacattttttgtaaaatgaatgatgaaaagaatgagtagttttgagaatgcaccgccagcatgagtcattatcgattttgtcatactgaagagagagttcagtgtctgttttctctaatcttgcatcattttgttgcgaaaaatattggtggttgtcgaggtatatttttcatctcttccattactgtctcggcctcgctgggcgagaggtgcccgtgacttttaagccacctaattaaaacgaaccaaaaaagcaaaaacacaggaaatgcaagaagataatgagaaaaaagcagtacatgcaaaagagtttcattaggctcttctggggaattcaaaatttgtatggccggtttcgttgtgttggtgttattcattttaacattatgtaataatatttttatttatttataatttacccaagctttgagtcggtcacaatgtgccggttataatcaaccataatcatttggtcgaattcacccaagacaatcatctctacaccaccatgcggaattggtgaattgaatgttgctcgtacgtttgtcgtaccacttctcaacagctcaaatccacagctgtcgtcaagcgtggaagtcaatggaatgacaaaaaaggtccacccttttttgaactgggccattgaaatgtcaaatgaacgttccgagttagccattccgagtgcctcatacatgtcaacaaaggcgctgacaaagtgatcatttgaaaaaataagtttataaggaacagctgggtaaactacgccaccagcatgtaccgaaatctcacgcaaatcaaacggctcaaacatgaatggactcagtttgtagtcaccatgaaatgctgaatttccaactaacgcgattgtcacgcgtcgaggaatggtcgcgctgaagacattatactcaaattcgtatcgaccgacactgatgaatgacgacttgatttcggtcttgcgtactgcgtatgtggcgggttgtttttcaagtgttttgtagaggctttgtgaacagcaaatccaaattatntaagagataaagctcctggtttcncagatcaaagtcgaggcaagagaggaattgcgcattttttccacccttaaaaattttacaacgctctttgaacccatcgtctgttgaatcatcttgatttacggtgtgataataccctgttgaaccaagaaaatttttcttggcatttattggaaaacttaactcattggtgatatatgccttaaatgggtataaatttccgctatcgtatacttccgtgttaccaaccgtaacttttagttgctggacaaatgtttgaccaatcccttgaatggcagagacactagtatctgcatcatctatcgcaacccatttatcgtttgctcccggtttttcaatggacagttcgagataaagatagatccgagacaaatctgtccacaaattgtcactgtacagacgaaacaggtacggtgattcttgtgtgattgttgctagcggaagcacttgacgaaagaaagaacgcacaacagacacattggtcggtggaactgagaaaatgtttaggccactgttaattgctaggggactgctgtcgctgattttttgtgggcaagtcatttttagtaagttcctaatgagtcaacacgcagacgtttatttttggtctttacaaccattggtggcccaaaggaggattgaagtttatttatatttttcgccttatttttccaattttgggagccgagtcttttttataacgtttaaaatcaaaaccttggcccttttgagtgtttatgttgttggctgctttttcaagaagattctttagtcccgccttactctcactaacgagcgactctttgaggtcttttccctccagcacattggtgagtactcgatttccgctttgcattccttgacgtccaattgcggagccaatttgctttccaatcggcagcaagtatctcataaggcttcggaacactgcgccaactcccgctccacgctgatagggtaatcccctgtaaatgttgtatccaccaaattgaacacacgaggacgagaacgcggaccaatccacttgaagaggatcaaaatcaacatgcatttttaaaaaattcattttggtgttcttttcattatttatattctttgaaaattatgccttttacaaaattgtttacgagcgtatccggttgctgctttccaaagtgcaaaaatctgacaattttttcaaaggtcattccaacacatcgacagtacaaaaagaaaatgacatgacgcccacacgcacttgagttggcagactgaagggggatagagctatattgaatttgtttgtagcgtgacaaatgattcacaataagaacactgggtggtggccacatccctaatgagtcataatactccaaacgcaaaggagaagcgcaataaatgcatacccaatgagagccacgcgaggtgctggggtcaagattcaccaccatacaatgtggaaatttgacaattgctccggctggtatttggtctgccgcaaaacaaccaatatagtagtggcgagtcacgttgtttcttgccaatgttttgtcaatttccaacgtgttcatttttttaaaaataggacatttttctaaaatgtaaagttaatgtacaagttccgtattggaatggcatcaaacttccgctatttgtacggatttcaatcagaatttcagaaacttcctttaataaaattttgtgatattgtatggcaaaaaattgttcttcaatcacttggtcggggtctccgcgtatggttacaatgcgcaacacgggggccgtgacgtcaccaatcatcattggttcaatgaggtctggcgtgtaaacgtggaaggatgacactccaccgctcatgtccggcatgaattgtgcctcgatttcgggctgcataaactccgtgttgttgaagccgagaatgtaggcaagttgaggcgagatttcaacctttttaacgtaccgcggatcggtgttcaggacaaaacgatttctatggacgtcatagttaaattggcagacaagacgtatctcacgatacgcctgaatccatgcttccgttcccatttcctttgtggattcaagggatcgcacgttcctcttcagtcaaatttttgattttggcgttcaattttgtcatacccaattcatcaagaatgctcaaatttttgtcacataattttgaaaagtacgcatccaatttttgctggtaagaatcggtatcgtcagctaacgttctcaacggtatatttctcgtttcagtacgcttttcgcgtgccagaaggccttgcgccacgctgttcagttcaaccaatgttccagtatctgtcaacatggcctgtaagagcagctcttcgtcacggacgccccgtttttctttagtctttcgcttaatgtattcttctctggcccagcggcgagccttgtttatcgtcagcatgaaagaattctgtgttgatcgtaccttttttgccaacggatcatttccctctccaaggagtctgtataaatttttgctaagctcatgggggttggtgacatttgatgtcggaacttcgatacgtaccgtattgcctgtctgccactcaatctgtacaaattgttgctccacggtgcctatggaaggccaagagtggggataaacaatcaccgccagacccacctcccattccgaattgaattgtagtttgcgcggtaaacgcactcggaaagtatttgtcctatttccttcaatattggtgttggatggaataacaacataaaaagaatttgaaggcattttttgttaaaatttattaaatagtgcttttttatatatctttctcggtaattgaatttgcaggaatccaactattgaagcgagcgctataccctttccatttcacaaatgcataatccaccccgttctgtttctttttcttcaaaatcttttcaatttcatacatattttgctgcttgtcttctagtgatttgcataaatcatttgcgtaaaaccaaccactaattatttcattatggtcatcacgcaaccgataaacaactggcgaacgctctgtgtgtacttctaccaccgtgaatagttcattggtgaagcgtgggaggtagcccttttggaacacgtgcttgtacttttcaatgcgcacgcgatctcccacacggtatcttggctggcgtcgtacaacattttcagctgcattatgtaatttttgtctcaacgcttctgcgtttttaaagttcacgtctgctgggcgcattccaatgctcgaatttggcgagtggttaattgcacgaacaatgtcttgcacaacatcaatccacttgtacgtgttacactccgtaaagtagcgataaagccgctctttgatgctacgattcgcacgttcggccattccggcatgaaattggggtgaagtaaacatacaaaagtgttcaacgtctttagctcggaagaaatgctgtactgcgcgggcagtgaattcctttccctgatctgtcaacaccttccacggaatatattttgatcttttgaaaatacgaccaaatgctattattatgttagtgctcgtcttagtctttacgggctcaacaaacacctgtcgactaagggtatcaatacagactaacaagtacttgtagccacggttttgtttagcaagtcggtcaaaaatagccaaatcggcctgccattcagtgtgtaagcctggtgccaatgttggcaatcgacggtagcgccgcttggcctgacgatgcagtgtgtatgtacgttgggtggctaaataattttggacatcggttcgattaatttttggttgagttttctgcgcctctctcagcagcggttcaacgctcgtgaatgcgacaggcgaacttagttccttgtacaaaaactcaagcaaacgaagctttttcaaatccataaagatggattaaatttcagtgtggtgtttttataaatgcctttgccggattggccttcgggaaagagcttttattcacaagccgtgccgttgcactgacaaattttgccaccgaatgttctttttgtccacacttcgctgtctctgaaaattccttgcgattcgttcggaccaatggacggccaatggcccttttcattggtcgcaaaattggggtgactaaataaaaagaaattgaaaagtcattcgttcgtttgtaagaactagagttgagcgggaccgggaaatttgacaaaaaccgggacttaccgggaccagaaaagtcgggaccgggaccaagtttttcgaccgggaccgcgaaaaaacccgggaccaaccgggacttttcccaggtgaaaattttttttgaaaaaattgaaaatttaagtgcactttgttacgaaaatttccaatattcaaaaatgtacccataaaattttgtatttacgttttgggggacgagttcgaggaaaatttttaaaaattttgtttcaggggggttcttggaattttctgagtcccaaaattctgtatttttttaaataaattaacaatcttttaaattttttgcttttagatctctgtttttttggcaatgttttttcaaaaaacttttttggaacattgggagggggcggagtccggcggtgccgataggcgtcgccggaaaaattttgaaattttgagcgagatttgttaacagaatttgtcaaaaaatgacaaaatatttggttaatttatgggtttttaggctattaaaaatgaaaaaaataataatttaaattaaaatattttttattaattaaattcaattaaaataatggtaaagaaaatataaaaaaattttctgttccatcagggaattgaaccgaaggacaaataatgaaagtaaaaaggtttagccacttgactatgatatgaacacatgctataaatgaaaataaataatttaaaattagtttatcaaaaatttctgatccctcatcaattcccttctcttttctcacccagacccccattcttaccagtgcttatttagtcccgccgggaccgggactggcaaa

SEQ ID NO: 1578 - DNA, 3521 bp, Heterodera glycines
  unsure (1)..(3521): unsure at all n locations
acgtggcgaaaagtgccaatgttgttggcacgcctttagcgcttgaagcaacatttgtcaaaaaacaaaaacaggcctcaaacgacaatgccaccacaataagcccaaagagtaaaaaggagaaaatgaagttgtggcagcgaaaagtagttgtgaaagccgttcggatcgaccgacggaccaaggcaaatgtttgggttgtcaaaatgtacgggttcccaacaacgattcgggctggcacaaggcattttgcagacggccttgggttcccaaacaatttcaagcattttttttagactcaagaaataaaataagagaaaagtttaataaaatggaaaaaaaggaacacaaattggaaagatgagaaatggatttggacgattaagtgaaatgaatttgaagaaaaaacattcaattgacaaatttccgtcggcttattcaatttcgcacctgcaaaattgtccttttctctcagttcagtgtactatttcgcactttttgtgttgacaattgcacaattttattcaccgttcactctcccacccccacccccctcttcccatctctcagcaccaaattttcgaccaatttcttggaagtgaaaggaaagagtggggacaattggccgaacttcggcctatgaacattgcttcaacaggcgccgttgtgatgatcattaggggccgattggaaacaattagcgggatcagaaaggggattaaagaatgtgactaacaaatgtttaatgggaaaaatttgccaatcacgagaattgggccaaaaatgaatcggctggccagccttaaagtgatcaacataacaattaatcaggaatgtgttgcgaaaatcgccaaaatcgcgaaaaagcccaatcctctaaacagagtaattaattagtaaaagacgggcgaagtaaagtcataaggcaaataatgaaacatttgtgctcaggcgaaaataaaagctcatttgggatcccgctaatcctaggccatttgatttccactctcgagactctcgacttaagaaaatattaaataattttcactgattaaatattaactctgtacaatttagtattaaattttcacaattttagcaaaaagcaatcacatatttctctaaccctaatcctataaaataaaataacatcattcattgcacgttactgactgagcggacacagctgaacggagagagtcgaaaagtcgttccaaaaaggcaccattggcccaaaaagcctcattacatcaaagagccgttaataattaattaaattaatccgaaatgaataatttttactacagtcgttaagaaccactaattggactaaattttaagtcggagaagattggcacgacatttccaacgcctggaaacactggaaaagagggagattttcaaattggacgcaaacaaagaattgactggaaaagaagcaaattggtggagattggcacgacatttcggacacgcggacacattgcgaacagaggacgaaatttatcggacaaaaacaaggaattgactgaataagaagagaaggtgactttttgttatcttggaaaacatttttgaaagggctaaggtggtagaagtttcctcattttccattcatttgttgcgagtacggtattaaaattgggtacttttgaaaagtgccattgcttaaaaagcgagtatctgagatttgtttaaatcgtcagattaatatcaaattggctggcaaaagtgaaaaaggttaccaaattcctggcaaaaggaacagaattaacacattggttcaaatattaccatttattgtttggcgaatctgaaaattaaagtggcaactgtgaaataaccaagcagtcaatactgtaaatacagaagaaaatcaaacaacgacaaaaaagagaaaacgtttgaaatttgaaggtacggtattaaatactgtattgtaaaaggagacgaaaataccgcatgaatgtatttacaatagtttgactgttaaaaaataactaattctgaataatcgtacccaaactgtcatccaattcagttgagacacctgaatatttgaagaaacggttcaaaaataaggcacaaagtaatacagaaagattaaaaaggaaggaaaagagaaacgaaaagagagagactcaagaacctcaagaatacgtaataaatatggatcctaataaagatttggaaaaaaaatacgacgccttaaaggttaaattaactgagttggaggacaaaatgactaacaaaatctcaactaacctaccgcacggggtgcgtatgcccaaatttgatgctacgggagattttcaccaattcttaaaagaatttaatctaatcgcgacagcgtcgggatggcatccgacggactgtgtccgaatgctcccactctttttagaaggggaagcccgggaacttttcatgaatattccatcggataaaaagaaaacgtggcgagaaatgactgaagcactagctgatcaaacaaaaaaaattgatggtccaatgtatgcaaaaaaagtgcttgccagaattaagatgggacacgaaagtgtcacggaatttgccaataaggtcagagaacttgttgaacaagcctcgccaagtccgcattataccaaagaggcaagagagtgtgaaacagttcattattttgtaaatggtttacccacagggttaaaaagaaaacttttctttttggataaaccaaatacgttaatggaggcaattgctcaggcaaaaaaaataattcaggtaaaggaggagctcgaaagtgatgaaaaaggagatgaattaaaaagacaaattacagaactgagccaaagggtaaatgcaatttctgtaattaataattcaaataacgacggtaacggtcgtgaatttgtcaactccacatggagaagaaatgacatgaataataatgatgtcaaaaatttttataatagaggacggggaaacaatttcagaggaagtcagagggcaaggccttccggtggatttatgaacagaaatccaaattttataccacttggccaaaaccggtattggcgtgggaattctgaaaattatcagcgatttggtgcaaatcgcccccaaagaggaaatttcacgaatttcagagggaattcgagaggcgcgggatctggaaggcaaaactacaaaatcaatgcagtaaataacgagggaaccgaagatacgagacaatgccgaaggtctccgactccgtctcttacatttctaaccgtgtgtaccattttctctttactatttacaaacacattagctcaataccaactttnttcttacananttcctaccacccctatttanttaccaaacataactcaatntactataacaacccaacaaaaancanctgaaancaaaatcacattatttttncctntcanaattccaaaagaattccaaagctataaatnttaccaaannaattnncaaaaatanntgctcctaggagagttttcttttcttttttaaagaggtgaaaagtgacgaaa

SEQ ID NO: 1579 - DNA, 3175 bp, Heterodera glycines
gaattaaaatcattacttggggcactcacctattttcggcgttttattaaaaatttcgcgcacattgctcgtccgcttcaaacattaactcaggataaatttgagggtaaaattgaagaaaattggggaaaagaacagaacgaagcgttggaaaagctaaaacaaatgttaacttctgcccctgttttacaatcaccaagatttggcagattatttataattgagtgtgatgcctcgaagaaggcaatcggagcagtactgttacaggaaaagggaccagtggcttttatttcacgagctctgaacagacatgagactaactatccgtccattgagagagaaacgttagctcttgtttatgcagtgaaagaattttcaccatacatagtcggctcagggattacaaaagtgataacggactgtagcgcgcttacctccatgattaaagccaatgaattaaagggaaggctagagaaatatcaaataagcctacaaagctttgacttagaaataatttaccgtccgggaaacaaaaataaagcggcagattttttatcccgctacaatatcccaaaaattgatataattgaggagtcggacaataatcctaaagagtcaaaagaagaaaaggtgaaaatacttagtgcacagagtttggaaaattcaagtgaaaaaagtggaaaagaaattttttgtgaaaaaggacaaataactttggaagaaattattaaagcacagaggcaagtaaaagaaggggcacaaatattttacattttaaagacagggaaaatcccagaaaaaacatcaaaatggtcacaaataaatcatgattactgtcttataaatggagccatttactataagaaaggaaaatcaaacgcagaaagaccaaaattattaattccttatttatacaggaaagaaatttttcatttaattcatgatgagggacattttgggttcgacaaaacttggccagaaatcaaaaatcgattttattgggttggaatgaaggatgacgtaaatatgttaattgatagttgtgtggggtgccaaaaaagaaaagttcaaccaggccaagctaaggcatcaccaggtgtacccataatacctacagattatcctttccagagggttcactgtgatataatgggaccgctgaaaaaaacggagaagggaaatgtgtacgtattccttgcaattgacagcttttcgaaatgggtaatggctgtaggaataccggaccaaaaagcagaaacggtttctgaatcatttgtggaaatggtaattcaccaacatggggtacccgaaacagttgtgactgaccaaggcagacagtttatgtcacaaatttttgagaatctgtcaaagtgtacggatttatacataatacatcaacgccctatcaccaacagtcaaacggagcagcagagggtgcgatcagaattttagcaaacattatttcccaaatcattaacgaagaagggaataattgggatcaaattttgtcaaaatcagtgtttgcatacaatgtttcgatccattcatctacaaaaaatacaccattttttgttaattttttacgaaacccgcgtctgccaactgatcagttacttaagctaccaaaaacagatgagttaacatcagatatttcggtttataccagaaaacatggtgaaaaagcagcaaaagcgtgggagtttgttagagatgaaattttaaaagcacaacaaaggactaaagaggaaaatgatttgtgtaggaaagcgaaagaaagagaatttgaggtcggggacttagtacttctaaaaaaggaagtattgaaacataaattcgataaaaaatggagtggtcctttccgatgtgttggaattgaaaaggataagatgaatgtactcttacaatccttagaaggaaaagggaaattaagaaaagtacaccaagaaaaggtaaaaattttctatggacccgcagttttaccattgagaccttgtgatgaacccctttgctgggaaaagtatgttaatgacccaaatttggaacaagaagaagcagaagatgaaagtgagactagcgaaatagaatatgatgaattgaaagtggaagaaaaaaataaagaagagaaggaaggtggaaatccgacaaaaacggggaaacaaatgtcaaagtacggctttgaaagcagtgatgaggaaactcattcaaaaattattgctttcatacgagaaaaccaaaattttgaagaagatgaggaaaatgagggtccaggaattttaatgggcgatagaaatcccgaaatcgaagccataccgacctttactgagcttgaaattttgctcgagggctcatttacgagagtatacacagggtggataaatcccgtaacaatcgcattaatttcaagtatacccgaaaatttagtcagagaaaattgggaaatttacataaatgaacatggctcaagatttgtattgggttggatttttggtgaaagttttgaaatttatattattaatgaatttgatgaaataatgctaggaatcgatgcgcaaatgttattaggtgaaagatggaggctaaaaaacgaagaactaaccgaatcatactgggaaatttatgttgacgaaagtggggaagaagttgaaataccgagaatcccggaaattctgatttctgaaaaagaccatgtggaaaatgaggaaaacggaataatcagaataagcataaatttggttaaaaatgaaattgagagagatttatacgactttacactaaatacaaatccaaaagaatttatagaaatggaaaagaaaaaaattcaggataattcgaccatggattctcttacaggtatggaatcgacgtccaatttatttgattcactcacaaccgacgaggaggaatcattgaaacgactcaaaagaagtctaatggctcaattggaaagagtcaataaaacgctgaccaattcggaacaaatgagcgaaaagcctgaagaaatggccgacaaaggaatgccagatgaagggataaaaggtcatgcggtggaggataaaatgggcgaaaaggccaaaagaagtggccgaagttacaaagccatttgaagagacggaagcgaaaaacgaaagctcattacctgtcaaaaaagcagaaggaaaggtcataccagaggatt

SEQ ID NO: 1580 - DNA, 6760 bp, Heterodera glycines
  unsure (1)..(6760): unsure at all n locations
agttgaaataccgagaatcccggaaattctgatttctgaaaaagaccatgtggaaaatgaggaaaacggaatagtcagaataagcataaattcggtaaaaaatgaaattgagagagatttatatgactttacattaaatacaaatccaaaagaatttatagaaatggaaaaggaaaaaattcaggataattcgaccatggactctcttacaggtatggaatcgacgtccaatttatttgattcactcacaaccgacgaggaggaatcattgaaacgacttaaaagaagtctaatggctcaattggaaagagtcaataaaacgctgaccaattcggaacaaatgagcgaaaagcctgaagaaatggccgacaaaggaatgccagatgaagggataaaaggtcatgcggtggaggataaaatgggcgaaaggccaaaagaagtgccgaagttacaaagccatttgaagagacggaagcgaaaaacgaaagctcattacctgtcaaaaaagcagaaggaaaggtcataccagaggattgcatttcgttggatctcgaggaggaagagagaattctcgaatttccaaagactttcgagaccggagcattgggattttacgaatcatgcgtcaacaaaagcaaatcaaagtcggaatacgaagcaaccttaaaaaaagtggagaaaaagccaacgaatccatggaaaattgcttatcacgaaataaaggcggctgagacaaacattttgtcaaaaaaggatgaagcaattccgcccgaaggaaaaaagaagaatccttttgcagagagtacactggataaaaaggaatgtgaaaacaatagtcgaaaaagattcgctgttggagacccatggcttgcacctcccaattcaatttggcgtgaaatgaagacgaacgagccgaaggaagtgcaaaatgtgatggcaatgcttctgagcatacggaacaaagcattggacgtccacgatgaagcacagaatgcttggaacgaattaatgaaaatgaaaggaaaaggggagaagaaagaggaggaaggcatggattccggacttccagggttttcaactgctgattggcaatccgatcatgaccgttggcgtggacaaaatcgttggcgcggcgaaagaggagcaagacgttggggacaaccatggcgagggcgtgaatggaaccaaccaaatcaaggagcgggcccatcgacatcagcggcatcacaagaaggacaatggaatttctcaaagatggcgggatatggatagaaaattggattttgagttggaattggttgcattttagattttttttttgggccaaaatacaacaaaaacaaacaaaaaaacaataaaaaattaaaaaatgcaacaaaaaattttttcttataattacttttttttctctctctctctctctcttgtaatattttttgtattttcgggacgaaaatatgtcgggcccgggatgagatacgataacttactcatttaacacatttaattgttctccctaatctatcattaacaaatgtccctggggcgaaacggggcggtcccttcaattgttatcctccccccgtcgttctcctctgatcacttttcggatttggccaatccaactttgcgagagggaccccctcagacgtctctctgttcccgaggacgttctgggctggggcccccagttgtacccctttattattacccaataaaggactattgttgacggtataccatttgtactggggatgcgactgggaaaagggccccccgctacactacgaatgttacatgtatggataaaatgggaaaattcccaaaagtgccaccggggacagcgttaggggatgattaagtaagcagggcagataagggataatttgttgggaaatggggctaccgggaactaaaagttggggggcgaggaagccagggaccattttgtcgaccggacggcatgccggggcaaggaaattgggatattaagcaagggataaatttcgggggatcgccattttgaagattgaaatttggtacacttagtcaacggacaattataggggaatgagaaagttgcacaacggggatcagcatgtcggaaaacagaaattagcaacatcgaagtcggggaacgtgccggggataaggatttcggcatatcgggaaataaaaatgtctagggataattctgtccgggaatcatgatgtcggatacaggggctcaacatgtcggaaaacatcaggtttggccccattcaaatccctgcacatgccaaaacggcgccaatgtccacgccgttcatcccaccgcaatcatcagcggagtcagccgcttttccgtgccgttcggcgcgtattgcatgtacagcaagctgctcagctgttcaccgtccagcacattgagcagtgagcgcaagttggccgcttcacgatcgtagacaaagtcgaaaacttgctggtaattagtgcaaaatgctgcacattttgcttttgctgatcagccgagcgatcggtctgccgattgggagggatttgaacagagatttcctcccatctgtccttatttctaagagttggcccttatttttgcctatttttcacacttttttttgatttttattaattttgtcattctgcttaaaattggtgcataattacatattattaaaatttgtcaatttataatttttcctgaaatgttctactaaaaaatagtagaaaatttcacaaaatgtcgaaaccgcggaataacaacttccaaaaaacagaatgctttttttctctccaaaatcctaaaaaaaaaattttgcctaatttttctgctaatttttaaattatattaaaattttatggaaaaaattataaattgtttttgattttttaagaaaaaattctgttttaattgaaaaaaggtcggttattaaaggatatgggtggccaaatgcccaaggcgggagggagggtagtactgtcaattaccataacattgtcgaaaaaccgtaatagtgcaacgcacaaaaataaggacagccaacaaccgccattggtgtagcaaaattttgccatcgatggggcagatgaaacgacgcttgttgttgactaattttttaaaaatggatcaaaaaaatttttcactgctggacgaggtgtggctaaagcaggggtagtaataaaaaaaataaaaaagaagtatttcgaaattaattttgtcttttttattcaaattggataaggggttggaacagtctgaaaagaatgtcatatttgtgatagctcggaaacccccggaattttgcatgtcctatggctctcaattgtaccatatttggatctttttcataattttatgaaaatttaggacatatttaaaaaagaaagggtttttcctactatttagagcatggagaacccaggaaaaaagtgtttttccgttttggcctaaattttaattttaaaaattcaacaaaaggaaggtagaatgcaaaaactacgtgccaaaattatatcgttggcataaatgccacaatttgagctgatttccttaaatggatttatgccaatgggaaacaattcagcacgccctttgtcgtttttaaaaaaattcaaatctaggcaccaaaacggaaaagtacccgaaatttcgaccaaactagtgaaattttttaaatttaaatttgccattttgattgaatgtacgactttcatctttgacctcttttattatacacaagtgtagtacaaacaaacaaaaaatgctaagaaaatgaaagacaaattgcaattatatgacattttaagacataagtacaataataagaataaatgtataagtaattaattaaaaagataggcatataatggaggaccacttttttgaggaaagtgaaaaatataattaaaaaatcaaaataaaatccatgtccatcaaaaatgtcaattttttttaattacatttttttttgattaatagacatggatttccggtataataaatgttcaaaaaatgtgcaaaattttgaggattaaatcttccgaatcatggcgcatcatctcttctgtcctcctcctttctctgtagtgaattttcaaaaattttaaattttcactccccctttttctttcaaattcttttttgtatttactcattcatcatcatcatcatgcttctgcttttgtgtggcgttcagtgctcctcagcaaatggctgagtcggaacggttccaatcgactgaaaggcattcaaatttaacagcaaataaatattttaaaaattaacacacaattttaaaagtttaataagtatttaggaaaaaaaagcgttagtaatgaactcttctttaagaaataatccgcggctaaacgacggggaacatagtgagagtgatccaaaaaaccaagctttcgttgctctaattttaaacncctctccacaaaataagaggctttagtttttttttgaccccatctccccccttaaagttagcctcgacttgagaaacttctcaatttttaagtcttgagttggaatttaaacatttttttttgcctcgggtctcggaaaatttttccacattatttttatttctgaaattttctatttatttgttatttgtatgagttggccagtgatccgattcgtaattttccgatcattcatctcacagtatcggaattgaattttttttttaaataaacgacgttgtttttccctcacctttgccccctccgttttgcttcatcattttgattttcgccaattttctgcttttgatggcagttgtccgctgctgatgatagcaacattttggagcaaccaccgccgctgatcaccacacagtcccaatcattgtttggatcatcgccaccaccaacacaattttgttgctgttgctggtcgctcatttgcttaaaatttggaaaaatcgggatcaaactttgaaaagcggaatgggtaagcatactgtatacttactgtattcccccccccccctctaccaatcccacatattacagtagctcgtccaaaaaaatgtcgtaacagtgatgaattttctttctgcttgctttgttgaatggactactcaaacaaacaaaaagtagcacgagaaccaggacaagacggaattggggattccaattagggccaatccgtaattggttcctaattagagaggtctttgaaaagccgcagccgttattattcaagtccagaattttttggaaaaatgttgatacattaaattcaatgataactgttcctcctactctatttatctacctgaatcctctgaacggccatccggtaacagttcacctccaaccaccgtggcggcagcgaggcgagaaaggccggcatcagcacctgtgaagggcgcaaaattttgaaaaattcaattaatttccccaaagaaaaccgaaaattctgaaaatgagggctgatggtccttaccaggccgtggaagagtccccagatggcaaccagtgagatggttttgacgaacacgagcgggatgtaattctgaagcaaatttccgcttttcgagatttatcgaaacaagcaacctctgattttgggaacaaagcaattttcgtttttgtgggattttgtgccaaattcaatcactacgtaatgtaccctatttgtttaagatgccagaaattggaaattagaaattcgtatggcctagcgttgcacgagaaatgcttttttcgagagtcgagataaatttgcgaaacagggaccgttgaaatcgaataacaatcactcgagagactcccaaactggccgagatttggatctcgaatatgtataatgtaagctcatcaatcagtcaagcaatcacttgcaggaagacaagcggcagcacgcagatcaccgtgctgagccccgcctgactcattggccacgcgatggagcgtaacgcgtgctgcaacttgtcgcgcggtgttcgcaacggcacgagcacaacgcgaccgtcgcgcgtttcgcgtcggtgggacagctgaaacaaggaggaataaaatgtgaaaagaggaaaatttgaaacttctgacactaagactctcgaatgcgatttatgtttttaaataaattttaaaaaatagcattttgctgctcacttggaaagagtaagccgtatgtgccgtaaaatcgacgctcatcccaatggacatcagaacggcgcaaagtgttaccttttcaagaagtaagatagaaaagatgcttgattacgttaaatagattagacgatttagattgtgcgtagtactgtattccaatgcatactgtatcattccagttttcactgtctgcgctctaccgcgaaacagaacacaaattgatacaatatgaattgaccagcagacattgaaaattggtttaataaccggtaaaaggactatgtagagttcgtgctgtactgtacctaccgggtccaaatgcaaatgccaccaggacagaaagccaatgacaccgatggaaattgagccgatggcacacgaagcggtgatcacggacagtgggttttggatgaaaatggcacacaccaatgccatgcaggcaagcgtcaagaaggtggtctgacaaaatgggataaatttgggagtgaggcgtatatcatattaatgacaaaatttggctttatataacatcaaattaagtcggataaaagaacatataccgaatcagaggagcgatatctgcggattttgtcgataaatattattattaaattaattacgctttcaaggattt

SEQ ID NO: 1581 - DNA, 2034 bp, Heterodera glycines
atgaaaaacacttttgaggacaaaatgtcacaagacaaagtgtcaccatttgatgatacgaatgaaaatgttaatggttacaaaatgtctacaaaaaatcgggaggatcaattgtcagaggaaaaaaagtcgacaacaaattttacgatacagtgtcgttcgctgtatcagagaaaatgccaaaaaatgatgccaagggaaattgccaaactgacaaagtatcaccatatgaaaagaatgatgataatgatgacaaagcgctgacaaaaaatttggaaggaaaagaaaaggttgacaaaacacaaaataaggaaaaggaaaacaaaattaatgaagaagaaaaaacaaagcataaagattctggtaataatgatgaaggaattgttacagaaaaagaagccgctgttacaaatgccaaaaccaaaaaagcctatagaattgcaggtattttaaatgaaagaatatttataataattaaaaataaacggttacttttattagaaaatatataaaaatatttaaattaaaaaacttatcaatatattaagaaataagtaaaaacaattaaatgaaaaaaaagttgaatcatatttcaaataaaatttcttattttgactttaatctttttcttggaaaagaggggaaaatgttgttattaaacttaaaatttttaaattgaaatttagcaaaatgattttcttagtgtatttcgaaagaagaataaaaatatcaattttatattaaaaaaaataaataatttttcaaaatttatgaccttttagatatcaaagaggatgtttttcttctgggccattttcaaaatattctttcaaattcgaaagagtttagcattgagatgccgcgaaatttgctcgagttaggcatttattcaaatgaaatttggcaccgaattttggcagagagacattttgacaaaattggcatcaaattttggcattcaaaaataaattttgaagagaaatgggcagaaattgaaaataataaaataaataaagaaaatgaacaattattgaaaatggaactgtaccaaatgttgagcaatttttccccagattttgacgaaaattttgaaaaaaattatgtgaataaaaattggcaaaaaatcggtgaaaaattgcacagaaattggttggccaggacccttttgtccaatggtgaaatgtcgaatgacgggccaggacgttttcgtaccgccgttttcgtaccgccattttcgtaccgccgttttcgtaccgctgttttcgtaccggagacgttttcgtaccgccgttttcgtaccggagacgttttcgtaccgccgttttcgtaccgctgttttcgtaccggagacgttttcgtaccgccgttttcgtacgagtgagtatcgaaaaaattgcattcaaataatttgttaattttttttaattacttttaatgttttgacagttaagcttttattaactacaaaatgaaccagcagcaagtaattaaaacaaaacgaaataatgataaattggtgcatgatggtgcactttatgtgttccacaaattcagtaacgatggacttaagaaatttggcggtgtgagtttcatagcccggcagaccaatgcaagggtatgcaatatattattttgaattttgaaaatcttttaaaattcaggacgcttgcacacggatttaaatacgttgtgcagaagttggtcggagttcattcgtgcgacatgaacgctgcgcatgtggaatgtcagcgtcttgtaactggtgacgtgctgctgtgacgtgcgaagcacctgcgaccattcgtgctcaagtgcttcaaaacacatgcacacctgtgctggcctcttttccgagcaaagatgccacaaaaaaggtgggttactatcaaaaacaattttgtaaataattttgttttctttttattcacgtcatcaaacgtttgcgccgtgatgaaaatgcaccgcgagtccaacctcaaattggagcagctgaagattccgaatacctatcgtgtttataagcgccctgagatt

SEQ ID NO: 1582 - DNA, 2522 bp, Heterodera glycines
  unsure (1)..(2522): unsure at all n locations
caattttgcgattcattgcaagatcagatgtgagcagaaggcgcttgatgctgatatgccacgttgcatgaatgggagaagccgcaccccaaaagaaaaggaagtatcccgatgccgattcacggattcttcgtctcgtccaacgttataacgatgtcaatattgtcccccaaaatgatcacaattatgccaatcccaatgtgaatcccgaaaacattaacaattttctcgccggaatttcccgaaactatgagatgcgaccctagtttgtcccattttgttattgctaaatttatgcattttttacattaaatttatgaatgggaaatacgaaaatgtcccccgtacgaaaacggcggtacgaaaacgtcccccgtacgaaaacggcggtacgaaaacgtcccccgtacgaaaacggcggtacgaaaatggcggtacgaaaacgtccctgaccggtcaaatgaatgggacaaattaggcaaagattcgcaaacccaagcgattacggtaattttcgctgcagaaaatggaaataggaaaatgaaagaaggcaaacgcaaaagtctgcttaaatacatagagaaatggggtaaaacctagtgatgctcgagaccaaaaatttcccgagactcgagactcgagaccgagacccaaaaccccgagaccgagaccaaaaaaacccgagacccgagacttttttaaaaatttttttttacacacttaaaaatcgaaaaaaatcaatcttttgagttttctcaaaaatttttgtttttttccttatttaagctaccatacatttttccttttcatatgattgacttttttacaccattttttgtggtgctctttttcaaaaaaatgtttcgggaacaggggtccggcggtgccgataggcgccgccgggaaaattttttaaaattttactgcaatttgttaacggattttgtccaaaaaatgaccaaattttgcgtctttgagctacttttttaaaataaaagtaagagttttgggtgccggcggtgccgttaggcgccgccggagaaaattttgaaatttttagtgcactttgttaatagatttagtccaaaaatgacatttttacgattttaattgttaaaattgtgtttgaactcccatcgaaaaaaacattaattttgaaaaatgagaagaaaaaataatacttggaggggaactgatccaacgcaaaaataaggaacaaaaccaagaacacaacccgctggaccacgcatatattaacaaacttgaacaaaaaagaacctaaaatttataaaaatagaagtttaccaaaggccaacaatcaatcattaggggtgtaaaaaagtctcggtctcgagtctcgaaaatcgagaccgagacttgaaaacccgagactcgagaccgagaccaaaaaaacccgagacttttctcgagtcgagactcgagaccgagactctcgagcatcactacgatccgattagtcacttcataagcgcctgactcattaataaacaacaataaatttttcatcttgtttatttttaaaatttttttatcttgactttagaaggaatcacttacctactttaatacctaatcaaacttaagacaattctatttacctaaataatcttaaaaaatttttttttttttattgatgctaaatccatttataatagcaaaaaaattcactcactgtcgtaatgtccactgtccaattgtccgttttctgtccaaatgtccgggagccttattttttagatcactgtgccctcccaatggctaatgtccgtttcgccggtgatcaatcgcatgcttagcgttgaaatgttggagaaacagctgcgatcgatctcttttgaagagttgggcgtggacatggagcagttcatggaatttcttgacaatatttcagttggagctttcagcaagaaaatccttccaaatcgtaaaatttttaatttaaaatccttttaagaattgactttgccatgaatttcagtacacgaaaatatttttagccaaaaatgttttattgctgctccaattggccgacttcttccaggtggacgcgttgaagtcccgctgtgaaagccatctgatcaattgtgtggaaattccgctgatcgaccgtttccttttgattgatcgatatcagttggaccatttgaaggcatgtgtgatttcaatttggaatttttaaaaaaggacctacaccgatttttttttaattgaaaataataatttaaaatatattttaataccaaattttccccatttagaattactttttgaatttgcgtgacttttacaaggctaatcgtgctaaaatgttgcctgctctgaacaaggattttttggatgaattgaccaaccgaatttgtggatgaattaaacggaaagaagaatcatgaaacttgccaaattaattaagtcaaattgattcggcttacccaggggcgtatctagaaacatttttcngggggggggggggggacccgacctgaagaccttttttttttttt

SEQ ID NO: 1583 - DNA, 2324 bp, Heterodera glycines
  unsure (1)..(2324): unsure at all n locations
actcgagaccgagactcttcgagcatcactagtaaaacccaggcacaactacagattggtaatgagaaaaaaaagattattaattattgtagaaaaaatatntaatattgaatttaaatataaataattaaaatttttagactttgtatctccgatttattctcaagaaatatattatatgttttaaacacgatcctaagctaaaaattattagttgggtcaggcggtgtcgtgccaacagcaggggaaaatttgaaattttttacgcgatttattacactgcgagataaaataagaaaaactcatatatttaagttatttattccgagtcaatgaaaaaataagaaaattttaaaattttatttagaattttatatataataaatatatttgctttaaattaaataaatactcaaacaaaaaatcgcattaaatataactgatcaaattcatattcaaatcaattttaaaaatttttacaaaatcggtttttaatgtctgaacaaaaaccagctgaatggcgagcacagattgaataccttcaacaaattaattgcgataataacgtagacttgacttatcgtgtaagaaaataaattatatttatatgttaaattacgtttaaactaatttattaaattttgagaaataaataaaatcagagaaggtaattatattttattttgtttcaattaaattaagtattcaaaattatggtcaattggacattggtcagatgattatgcttaataagcaattgataattattttgaattaattaggattataaattatttctaattttttaatcaatttttaaaaaattcaatttgagctggaacaaattttgacaacaaatggtcatggtttacttgacacaaacaagacacaagaaattaatgaaaatttcaacaaaattcggacggtcattaaagaatgggtgaatttttaaaattaaaaattcattgaaaaattttaaatttagttaaaaggccaaagcgatttgttgttaagcggatcaatgatgttggatgcttttacgatgggttctgatgttgacaccatttgtgtgtcgccagaacatattcaagctgaccaattcttcggcaaagtgccgtgccatcaaaaatttgccgaggaatgccgaaatgatgactcactgttttgccgactgtgctttgtaacttatcgtatcaattgcaaattatgattccgcagttgcggaaaatggaccaaaaaacaaggattaggaaatgtccaaaattcaatttttcaaaccccataaaaaatttttttaatttaccattttttcagcactgcttcaaataaatttaaaatcgaaaaaattaatagatttttaatttttcagcacccggaagttcattcactgcaacggatccaatccaattgggtcccgctgatcagactaaaactgatcaattttgatcatgaaattgacattgttttcgcttcaattcctgggcccgtaccaaaagaacgaggtaagggttaacctacccgttacccgtactaaaagagcaaccccgaattgagggtgacttaacccggttaactaaccctcagctgcgggtaacttttcaacccgcacccatgccagggtaacaacatgagcatgttttttgaaaaaatattcgccctttggaacatgaaatacccacaaaaattcacaatgtttaacgtttaataactttcatatctaataaattggcaaccagcaaaaatcatcaaaaatgcacttgatgagggtatttgttttattaattaatttaaataatttataaattttgtaaagaatttatttaattatatatttatttattttaattgcatttaaatattgtcattttatatatttttgtaaattaaaaataaagtattttattttttacataattaaaaatttttaaaaagaattgtcaaattccctgcttttcctattttcagcatttaaattgttttattcttcaaaaagtgcaaatgaaaaattgcctatgctctttgaacaacaaataaaattccacgaaaaggtaaattaataattataaattggggacaaaaataattaggtaaatacgcgtaaataattccctattaattacagtactctcaatattttgatatcacttgtgtcgcatccgatttaaatatgtttaatgaattttgcggatttgttgttatacgcatacgcgttcaacttacgcgcctcagcgactgcacgcgtgacgatgtcgatttttgtcatttggttttgttaaatcgctgtccaccgtataatgtacaaaaatacacaaaaatgtacggta

SEQ ID NO: 1584 - DNA, 5104 bp, Heterodera glycines
atttattcaaaaataaaaataaccaaaagaagggcattgctgccgcttacacttgaggtggaaatacgacaggtcaaatgggtagtagtgatagaagacaattaacattggtgatgaaaaaaatgaggtcaatgggcagttgtgatatgagttgaaatttaatttaaagaagcggaaaagtcgacctccagcaaagggaaattggtttttataacaatttgagtaaaaaattttttgtgggaaatttttaagaaatttgtagtagaaataaatggaaaaatgaaatgaatttcaataaaattaaaatgaaaataatgcaaagaagtttttatgtgagaaaaagaaaaaaaacattgaacgatttgatgaatttaaaagtttatatggccaaggcaaacagaaagaatttgtgaaggaattgggcatttctgaaatgacattttggaaatggaaaaaagaagtaatgccaaattgtcataaatgtaagcaattattttaattttgagaatttttttattcagttaaatatgtttttagcaccaaataaatattccaatgaggaaaaattaagaaagataaagcaatatttcgaaactaaagaaaagaatccaaaaatttgtgatgaaacaaaagctaagaaattgagaattgcgagtgacactctgagaatatggaaaaaagaaacttactttagttccggaaaagtgattttttaaagaagtttatgtttttttgatattagcttgtttatgttatgataaaaaatttaattgttttatttttttgtgtgactaatagcgaaattttaagctggttacaaaggcctaaattaatttaaatatgtttagaagtgttttagcccattttcatactgctcgagaattttgttcaaaaaattagcatttgcgtcttaaagctataaaatttttagtcaatttaaatctcctaaatttgagaattttatgtcatattttaatttcttaggtcataatcaatataataattatatcaaattttacgcattgaattgagtttcagactaataaatttagataggggttaagatttcttagcggactgaacagtgagttcatttacccctcaaaactttttgaatatttttttttgtacggaaaagggcataatttatcgcaaaagtttttcgagggtctgaactcaggcgcaagcaactgggagcgagttcggcgccccaatacttaagaaaaactaattggaaatgccaattttgaaattcatgcatttttatattgtaaattgtataactctgttgagaattgtcgtcgactactgaaaaaattggacaattgatatgaaaccgccatgaaatttatagaaatgagaatttccttattcgaaatttattattaaaattttaaatatttatatttctgataatgagtaaaaagatgtaaaatattttgaaattaaaaatatataaatattattatttcttggtttttgcgaattttttttttattcaaagctgagtataaaattgattaaagaaatttccaattccttcacaaattctttctgtttgccattaaatttaattcttttttccattttatatatttttgcgactttctcctaataattttccaattttcttttgattagttttgataacattttttcattggaatattcacttgtttggtcaattgattcggttccattttcttcttctctgtttcttcactttcttttttgtcccattcttcgccgaatatttcatttttggtcccagtgccggggtccaaatcctacagggcgtttcctaaaaaccgccaagtgggcgtttcctaaaaaccgccaagtgggcgtttcctaaaaaccgccaagtgggcgtttcctaaaaaccgccaagtgggcgtttcctaaaaaccgccaagtgggcgtttcctaaaaaccgccaagtgggcgtttcctaaaaaccgccaagtgggcgtttcctaaaaaccgccaagtgggcgtttcctaaaaaccgccaagtgggcgtttcctaaaaaccgccaagtgggcgtttcctaaaaaccgccaagtggagcgatggagatgtgagagagataaagagagatcggaataaaaaggaggatacatagaagagagagcgagagagagagagagaaatagatgcgaggataaagagggaaagagtcttccaatttgttggcaattatttcatcactaatttttgggtttctttccttgattttgaaatattgcttcatttttcttattttgtcctcattggtattagactcttaaataatatttacttttatattttggcattaataaaaataatattacttttatggtattttggcattaattcttttttccattttcgaaatctttctttggaaatgcccaattccttcacaaattgtttctgttcaaaatttggtcggattttgttggattcaattccaaaagcaaagaaaaatataagaaataataagtgatataaaatcattttatttttatttaacgattttattgctattaaaataaaaatgtttaattttgctcactttaatattttttaatttgaatctttaacaaatctttgccaatggtaaaatgtcaagtaattctaattaaacgatttttcctcgaaattttttaatgaaaaataaacaaataaatggcataaatcaaaagttgtcagaactatttttctttatttataacgcaattttatttgtattttatttgtaaagccgagaaattaatagattttttcaaaaaattttttttataaaaatgctaaaaaatcaaagaatcgtgttatttttcatgaaaattttattataatgaaacatctatgtgatctttctatgtaaatttaccgtatttgttggttttcgtccacagtagtcagtcagaagctgaattaattggcgaaaaagtgactgaaaaatgagatggtaattttgaaaaaattgaattaaaatttcaaaaactatgatattaccaaaatgccctcgcaccattgcactcaatgaatggtgttgttcggaaagcctcaagacaggagcccgaagaacttaaaattcattttttcgaaactccagcagaccgcgtatatcccggcatctctgatcaaacattgccgtgaatttttcacttttttcatttttatttccttccatccatccatctccaaatatttaatcaaagtttggccaaagtttattattcattctaaccatttttttaatttaatcgaattttttcatatttgtatataaaagtcttaaagaatttaataattaatgaaatttgttgatataattcaacaaaattattataataaaatcatggaaaataaattatacttatgaaaaacagaaggatgaagtcctgtagaatgggagaaacttatgcttcaaaaatttcgggattaaatatcttcaatttttataaatccttggcgtttttaattattaatgttgtgacttgatgactagggatgccaattttatgtaaatacatattttttcatgcattctccataatctaaatagtaggaaaacactttcttttttgagtttgcgaacaaaagttgggactttatttacatatttttacatatttcggggttttatacatatttggtttatgacttgtcctggaaaacaaaaatgaaaaaatgtcatttattccaaaaatccttgtaaattcataatttgataataaatctgctaaaaaattaaataaatttcaaaaaaatttttaaaataatgaaccagatataaattatataatcatctttctatcaattcttatatatttaattgtaaatgttaaagcgattgattaagaaacaaaaaggttaaagccgagacttgcgacatggaccgagacttgaggccgagactctcgaacagcaatataaattagatcatttttaggtagtaattaaccggtagaaaaatttgttataagctataacttttatatatttatacaacattgacataatgttatgtggttatatatattatatccaattatagttgttaattctatcttatttattttccataatatccatagccatagccgccatagccacaataacaactgcgatatccgtagccgccaccccagccgccatagccgtagccgccccatccaccgtagccgccatagcgtctaccgtagccgtatccgtatcgtttatggcgtatcaaacttaaaaaacacacgtaatttcaaggaaatttcgaaccggatttgagttttctacagcactaaattgggtttagatctaagtgagtaccgtatgtgttcgattatttagactcccctcgaatatatgacccctttttaggggggcggggggggggttgaacaataaaagacccgggtctaataatcaaagaaatttggtaattatactattaattgtcttgtatcgcatttcatctcaccttgttgcttcatccgtgccaatggaagccgctaatttgccattgtttgcttcaacaatggcatttgcttcttctgcaactggtgccgaaactgccagtgccacaaaggcaatgacgaacagcagaagaagcacagtcactttggcatgggacgaggacattttgtgatttaatttgggcaaggctatggtttttgtttttaatttacaaaattaatctgaaaattaaaacaaattatagtaaaagttaaaaaattattttaaagaaattaaatttagtaaaatttttttagtgtttttgaaggcattaaatttcatttttggccaatgacaaatcaaaaattaaatttataaagtgatttggaattgtctgtcgttaggaaatttgaccttttttatattgtgtgtttgggtgttccattaaaacaaagtcagctgcgaaatttaacgaacaggttttcaatttatttatttttttcttcgacaaattgggggaacaaaactgacagaaattaatttattttaatttcaaaaaagaaatggtctttttttttttgtctttgagattgataattctcaacgaatttggcgaatttttgaatggaattgaggcgcaactgattaatgttatacaacaac

SEQ ID NO: 1585 - DNA, 2325 bp, Heterodera glycines
cgaaagttggagctgagttgggaagtttgggtgtgtcttctcacttttttcccccacttttcgcttccttttgctcaattagctcaactcgcccactcgcgtcgcaaatccctccaacggtcgcttcattttcaccgattttttgacgcaatccgtcgcttggatcaatggtctgtggaaatgcgttcaaagattggcacagagacgcgcatccgatcgatggaagaggcggagagggcactgcaacggcaccaggaaagactggccgaaattggggcacgagaggaagagatcagcgtaagtgacaagccaaaggaaaagccgaatggggaggaaaagccgagtcgcgaaaagaagggatgatcaaagcccaggaatcaccacaacagtcaatgtgttatttcagactctgagagaattcggccataaattggtccaggaacagcccgaactgaaaatggacgtgcaaagggcgcaacggcgcattcagacgatggagcaccagacgaaacagtactgggaacaacataacgccaaattggagagggaattgcgcagacagaaaattgaggcgaatttggcccaaatcgaagcatggactgcgacgaaagaggcttttctggatgggttggtggcgggcgacagcacagagtcggtggaagaagcactgaatgagcactgtgagaagaggcgcgggggggacggactacggaggggggtaattagccaatcaaagggaggaggaggctaataagccaatcaaattgcaaatggcaacaattaaaatgttgaatcaattggcatttcagcgcattttgccaaaacactgaatgtccaaatggagcaccgttttgggcaattggatactgcggaaaaggaaataagcgaaatgggagacgccgaagcggaaacggtgcgcgagagagtggcggagacgcgggaaaaatgtcgcggattgaccgaatggacagaagtggaaaaagccgataaatagtttaataaatggccacattcagctaaaatcggcacaactgacaaatgcccgtcatttggcatatttcctaagggaatgtgccgaattaatcatttggatgaatgccaaattacaattggcatacgacgacgcctttctcgacgcagcgaatttgagagcaaaactccaaaagcaagtgattttcgacgaggaacttaaggccaacaaaaatcgggtggaacagctgagagaaaagggagagaaagccatggaaaagtgcgaagatggcactgatcggcaaagagttgaggaacaattgagggaagtgttggacggatgggaggaactgatcgagtgggtttggggagactgtaaatgggagggggacaaaagaacgattgatcagaatctaacaacacacagagagaagagagagagaagagagagagaagagagagagcgagagagagagagcgagagagagagagcgagagagagagagagcgagagagaccgcgagagagagaaagagagagagagagcgagagagagagagagagcgagagagaagagagaaagagagagaaaggaagagcgaggaagagaaaagggaaagtaatagaaaaaaagggtagaaataaaggagaacataaattctcaaaaaaaaagaaaaccgaaacgaaaatagaaatttttttccggtcgcccgggcacgggagaggcgatccccgggattttcatctctaaaaatgctcctaataaccggcactaaatttttaatatctctaagctaaaatgattttgaaaattttcaaattatataaatctcaaaaatctacaattatatcaaataaaaatatcaaacatcaataacattttggtaaattttggtattttctgatcaattctcatttgaacaattggaccatttcccatttcttcacccatttgatcaactgctgtttttgagttcacatttcgctcattttgttcaattttcactgtttgctcactttcatttttgttccatccgttgccaaatatttcatcaaaattcgattggattttgccggagttaattataaaaaatacatttttacataaatggaaatataatattataaattttttcatcaaatattgctaaattttttctcatttgttgcatcaatataaaatcgaagatttttcaaatatgtcctgattaagaagccaacaattttgagaaatatttttaattttaaaaatgaacaaaattaaaaataataattaatggatattaaataaatatcttcaaaaatatacttaaaaagatataaatattttttaattaggaggaagcattgacaaat

SEQ ID NO: 1586 - DNA, 2693 bp, Heterodera glycines
tattttgatggccttttgcgttatgtcataacattccacatacatgtaactgatgttcagtgtcaccgcgtggttctgcagcgtgccaagttcgatcatgttcagtccctcgttgcccgtgctcagaatggcaacttcgggcggattctgccggtggcaaaggtgcataaattataaatatcatcaattcagtatttgtaagattgaaaaattacaaaattttgtgacaaaaaatgaacattttttactcttcgaaaaattaacattttgaaaacctattttaatacttttctgcactaaaaatcccatctctaatcacaacattagttaaatcatttcaccactatcagcactaatcagtgataattgataaaaaacccaccgaattgggctttaaagtgataaatccgtgcgtcactcgcatgtctgaagggatagcaaacactaagcaatttgactgattggttcttctcccattaccattttgatgccaacacgtgctcctaaattggaggagaataatattttgcatcaattaaattttagcgaaacgaacgtcaaattcaaagacggagggccaaacattggcacctaaaagggagaagaattgccagcatttaaactacgcctggggggagtgcctgggctggcgaaatgtccagcatttcctcgtactctcccgccaccatgtccgtcgggtagcgcagccctttgctcgcctgttccgcattgttttttccaaatgtgtggcctatcgtctacctgagaataccatttgcccatcataaattgtagcggttcgagtgccggggccaatggaatcggagtgagttctaaaaaggggaatgggggaaagagggggggagtcactgtcactgatcactcactgattgaagggtcgggtgagcacaatttgcacgaaacggcgcaattaatgtcgaagaaattggtcttaatagaatggcaattgtcattttgaaaaatgagtggacggaaaaatatttgtgaattttggtagccaataattacgacttatttaaaatggcatcttatggtttttttgtcaatcgaatgcgctacagttacggaatgtacagtaagcccacctgagttcggacgagttcgcatttctcctccatggcccaccggtcgcaactttggtaaatattgcgacaacgaccttcagttgtagggtttgtttgtgaattgaaatgggtaataagtcggcatacggtgacagtatttgcccatccatcccgacggacaatcgcacgaagtttttccgggaatgcatttgccaccattgagacaagggtctgacagatcgagaacactttttaaacacaaaagtaaaataattcatttttcattaattattcattaggtaattgaatggcatttccaatgattcaatttaaccaactaaatttgcattgctccttggagaatcgcttaatgaccacttgaccaactccggctgtcactgtgtgaaagaaaatcggaaataataatatttttttattaaaaagttcaaatattttattttttccgatttcttatccaaaaaaaaatcagaatttgatattgtttgtctagtcaagaaaatttaaattgagattaaggaataagcaacaaatgtccaacgtggatcgacgcgctgaacagaaataaccaacagaaaaagaatgctggccaaaacagttccaatttgtcccaaaattgatttcctcccattaatcctccacaataattgcgttgcattggacatctcaaagtacaataataattaagggaaatatgggcggaaaataattcgaagggataaataaaattatgggggggggggcagcggaagagagggagtggacaaagtctggcaattgcttaattggccgcttttgttggtggaataaaagcagaagatgattatatggtgataatgcgacttcgctgttctgcttcctccgtccgtccctttgtcttcggccgttcctcttccaacagtcgcaattcggtcgcgtaacagcgcgcgaatgtttcccaattgggtgagggggaggggaggatgaattggttggatggatgaggaagacgaaggatgaataaatcagaggaagagaaggaagagacggagaagggggaggggtggggggggtttttccaccggtacggtaccggtaccggtaccggtaaaaaccggtaattttccaacgtaaaaatttttggacaaaatttttcaaatacaaaatttttattcagttttcgcgcgagtgcctgttttttagcattagaattgttcagaaatatatgtatattgagggtgaccaagttttttttttcaaattcaggataaagaacactaaaattcagatgtagacctcaaaattcagattattgcaaaacaagggatcagcggccaattttccaattttgcgaagggtctccggccatgtaaattaatgtaaatcaatgaccttttttgctttcaacaccgcttttttcgcggcacgtttttctcaagacttttggggaacaaggagggccggcggtgccgataggcgccgccgggaaaaattttgtattttttaatgcgatttgttaacataattttgtaaaataaaagaccagttgattaagtttttgggtttttaggatgcttaaaattgaaaagaaaaaaagttggaatatttttt

SEQ ID NO: 1587 - DNA, 2239 bp, Heterodera glycines
ttaaacaaagcaaaaatagaaattacgtacctaattttctcattttacaaaccaattttcgaaattttgaaaaaagcccgggcccggcgggcgcccggccaaaatttttgaccggtccgggacgcccgtttaaacgggctttttttggccgggccgcccgggcccggccaattgtctaagcccgggcccggtcccgacattttcaaaattccggtctctagatatttttatatttagaaaatgcgctttccaaaattaaaaatgggaaccgcccacttcggcgccggccttttcggcgccgttgctaacaacttttttcctgatcaaccaaattaaaaatttttgttatcattcgatagctcttcagattctctattagcctgtaaaatttcaaaaaatttcgtcagtttacaaaaaaaagttatggccaaaaaacctcaaaaattaactttttcttggctttttcggcgccgcgtggcataacttttttatttttgaatcattcatttctatttttacatgtaaatatagagcacacatagagctttcaaatgatgccagattggctaaagctaactgacaaataaaaaagtatagcatttcaaaatttgcggcgccgaaatggtccgcgccgaagtgaccccgacccctttccaaaattaaaaatgaccaactcagtaccgttaactccgtactcggcaatctttttctttaattgttgcaaattcaccgaccaattcgactcgaaatgaccccgaccctttaaaagtcttaatgtttaacatatgtgtatttatgccgttatgctaatatttgaataatttatgaaatttgtttttgctttttaaaatggcacttcacaatcaaacattgactcatttcgacttagcaaagcaattgcgcgtgcccttcgccatcgacctgaactttatgggtggagttggaccagcaaggtctttcttctttgcctgagcattgttaagttcggcatttgtttcctttctcaaaggttggacttcgttggcacttttattggtcggtctccgttcgcgcggctttcccaaagtttcatttgaggacattcggtgaaaagttcgttttaaattgtcttcttcttccgccacttcaattgaaactgtgcgaatccgcgcattgtacggacattcggtcgcggaaagtgtgccacaaattgcgatggaagtgagctgaaatttactccgtttttgtaagtgttggggagtgggacgaatccaaacattgtacaacagaaatttgggaaaggtgcgaaatttatatgaggtggcggacagaacatcccctgaggcgtttaaaaaccttttgagtcattaaactgttttttgtttctttttatacccaacaacattttttgaggacgttataagaggaaatctaatttttttttattactttctttaccttttcaatttatttttaatattattattttttaaatttattttaagtttttttaaataaattggcaaattcaaatgattttttccttctttttttctttcaattttttcaccttcgctcactttttcagcctttttctccccctcatttccttttcgaatgccattttcgaatcgaagttgggaataaaaccgatgggacgacagtttgtgcacctttccgaggacatagagactgccaaaagtgttggacggagaaaggcgaaaagggacggacagccggcgatttttcgggtgattttggcacaaaatggaggggtgggaggatgaacaattaggacaattaccatccttcacagattgatgctgaaaaggctgccaaattgggcagatttcgctttttccgtccgaagaatgacggaaattcaacgctttggttggctgattcgattccattggaatttgttgaaattttccaataaaaaaaggcatttcatttcgttaaacaattcacatccattaagtcaaaattggcacatttattttatgtacatatttttcgatgcttttaaattttcactaacgactaccgaatttattatttaatccatggacattctccagcaggtgaatctggttatgatattaaactgatgaatgtaaaaatgaatggcataaatgccgagtttaataattttactcaattagtcataagaaattgccaaactttgatcacttgggctgtccctaggctaatgcaatgcattttctaatttcagtctgattttgcctccgtttcgaag

SEQ ID NO: 1588 - DNA, 1335 bp, Heterodera glycines
taatcaacggattcagaatgatcaccagcggagggttggccaacttcgaatgggtcaagccgttcattgactgcacaacgatcgccacttttcccgggttggcactctccgaaatggcctacggcagcacttcgcaagagaagtgccaaacgcgactccaaactttttccggtcctaaaggtggcagtcccttcggggactccgcgtgattccaaatgacagaagggcggcaggcggaagaacagtctctgccgctggcggacgatggtacccacgcggtgttcccttcgaagccgtgccatgttcttgtctgggacgagttgcggcaaatactcaccgatgtgctcagcaaagaaagtgccaattactcccagttcggccttttctccaaccaatttactgacaatgccaagccttctccgctgcctcccctcgagcctttcttcgttcggcttgggttcgctgcttcccttcccttccgttttgccattgtcttttcagatttcaaaatcccttcccttttcaattggtccttcgtaatttgtgtctttcccttgaccaagtgagtgccttatcaaaagtcgtcgttttccgatttgtcttatgctgtttctcagctgaagcttcgtcccggctgttctccgcctttttccgacaaatttcgctgttccatcgtttccgaattggtattttctccgttggctttggacgaacgaccgacagagaaagtgctgaaaaaacattttgttgatttgcacgttttgccagggcccgagttggaacagttctccgtcaatggtcttttgttggccatctgctgtgattgatttgtttgtttgaattggaataattcagggattaaattcgatctctgttcgccagtgcattttaatggatcagccgatgagattgatcattccgctgaaattgcctcagtttcggcattttttcctctttccgtgcgcggaaaaaggcttttcaaaaccaaagaacaggtggcacaaaagaagaagcactcacgcttttcttttccatttgtagcggatgtccacacaatacgccatggacaggcgtctttcggccaccgtttgctctgattctgtgccgttgctcagtttccgtcctgttggcggtgacccgggctttatcaaagccgtcactcattggcatcccctggaggcattctgcgaccaaattgtccaaattgtcttcgaaatagaaaatgtcggacagaatgatgttgagcaattgcgattttgcacaaattttgctgaacgaggtgttggtcatcatccaattcgattttttcacataaattgggttttagtctcaatt

SEQ ID NO: 1589 - DNA, 5960 bp, Heterodera glycines
tggcgctgaaacagtcggccggtggacgcaatgtccgtccaagggaatgccaaccgccttcacggatgacgcatctgtggccggtgaatttggcatggaagcggcaaatgttggccaatttgggaagatctccagagaatgtccgctgagtgttggcgaaaagattgggcacgtctttgcctccctaattaaagtcattatccttaggtttcgcttttcagcttacgagtagcgatcagagtgcagcagaagccgcagactttttactttctcttcctttacttcgatcagaacggtgccttccttcgccaattcgaaaggcttttcactgtttttgccgtccccacaggccgttcccgtcagtttcgcttttccgcccgagtccgtcccctctcgcgcattttcgatgccgaccattgcgtacttagcgggtccatcggcttgtcaatgctcacacttcgctgtttgccgttcaattctcacgaaagcgatgcaacagcaaaggcaacgacagcggtgacattgaccaaattggacttgctcagactttccgtcaaagtgacggatggaaatgcgcggacaaatgtgcgacgagtggaaaacgaaccaagtgaagcgaaaggacgaaatgaggggaaaacattcgtttaaataaacagtccaattggaaaacgcaacggaacagaatctctgcttttatatggccaacgaagaagcaacggacggacaatgcgtgccgacaccagcgattccttcggtgccgaaaggcgacggcgccggttgggccgacgtttggcttggcaaaacttatgtgccggacttcccggaatggaaaatcatggcacggagtttcgaaaagaaagcggaagtaattgggaatgagcagcattcgaatgcacttcagatgaagctgctttggttcgaattaattgaatgattagggggaggctaattgtacgcgaagagaccaatcagtgaaagggaacaaattttaggaaggcgtcactgatcagaggcgatgggccggtgagcaatgtgttcggagaacttttaaaacaatcagtcatggaataaagaaaggaataattgttagattatagtacattcaaagcatttgcaagcatatttatttaattcacttatttattctgttcaataaactgaaccggagcagctgttttttatttacatcttccggcacaatttgctcttctctctatccttctgttactatttatcgctcatttcttttctcttcagcctcattcgcttttcgctcctttttctccctcattccgctcctttttctccatcattccgctcccttttctacctcttttcgctccttttcttccctcttttcgttccttttcctaccacttttcgctcctttttctccccatttcacttttctttctccatcatttgtttcactcattttgttttgccttaatcgacccgctgctaaaattgcattcgcaaatactcgcgcattccttctgcgagcccggttccgttgcacaattcttgaaacatttgtcgttggtgcagctgaggcgtttgattcgcctgtgctcattcattcggccgttgacttccgaaggaaaagcattggccacggcaatttgggaaggatgctaaaagatggacgattaattataaataattaaataaaaaggatggagattaaataatcattttaaaaatgacgaaggaaaggacctcaaatgagaggagcacggaaagaagaagcagaacagcgaagaaaagcttcgtgaacatttcaaaattgaaaattacaggtcgagtgtaaaattgaagaaaacgagggaaacaaaaagcgatcggatgagaaaaaggaaagtgatcggaggatgggggaataatcagaggagggacaaagtgattggagggatgagggacagctgcttaaagaaaagaagagtaaaaactaggacaagacaaaacagaacaactgctggtgaaaggcaaagaaaggtataatttacaattggttaccgtatttctcaaaatacgatagttttttctgtgcaacaaattcaataaggtggcgcagtggcataaataaatgtgtcgttttttttaattttcggattttaggctcttattacactttgctgcattttaaaagaatgcgaaaagtgcagcagccactccttctcaagaggggtgaccatcgatcagaaagtgttcaattgggtcaatgctccgaaaaaatccattaagcgcagccaacgcaaatgaccgagcggagcttctcgagaagaacgaaaagcaaagaaagggcggacggagagagtgcaatttgggaatggtctcccaattgttttgatatccattttcatttgactcattatgaaaatacatttcaataaattgaaatgcttaatttgcattcaaattgacaacaataattagggaagaaacttttattttcggtgaattttccccttttctttcttttcatcgtccaatttttgcttttaacaacgaatgatttaaataaattggctttttattcaataatttgattggcttttggaagtgagcggataaaactgcttcaaatttattggaatgggagggacaacggccgcatttggcgttttgccaaattgggtaaagatttggttggtctgctccactttgatctgttccgtggacgtggcatttacggcactgcgaccggaaagtctccgagggggaaaatatgacaacttcttcactttgtgtgtgtgttatgggtgatggatgaccatttagtcatggtttttgtctgtgtttgttaatttttatttgcccctccgtctctcccccctccaattcccaattgtctttcaattacccccccccccacattaattggcactgttcagggaacgtttacgcgtccgtggacacgcgttacgccgacgcgtccgaccctttgacgcgtgtcaccggtccgctgatgtgtcttgagttggtgctcaatgtgtgcgctctgtgcttggcatgcgctgctccgccttcgtctgcgcttttcactgctccctttaggacttcgtctgtcccgcccattctctgatggccgcttttttaagcaatgctttggtgttctggaagacttccatttacctcagtctttttcttttgccaaatgaggaggcataccgtagtttggaccacggtaagtgtatttctatttgtcactaccgtaatccattgctgttttgccaaaggcacttttctccacttttcctttcgtggaattgccccacaaacgccattctggaaggaaatgcttctgttttgggctccaaactccgtttgggtgttggtccctttatttgccatgtttcatttgtgggccaaaattgcacgaggatggaatgaacaatcgcatgctgaggaaagaacggattttaacatgggaaaataccgaaaggcaatgtaagaggaaaaggaaaatgaaaaaaagagagagagagaatttgccaaggaaaaatggcaaaatgttgaacaaatgtgccaacgaactaagggaattgtgcgcattggacgaattggacccaatggaagcggcggaagagagtggcaaaagtgccaaaaatgggcaaatgatgccaaaacaactaaaattgttggtcaagacaaaatcggcgagtgaaaagaaagggagcgaccaattcaattctaatgaattctgaaattggaaatttgaaatttaataaactcatcggaggacagacaataattttatgccaatacgtgtcgagaaacaataaatgatgcttttgtgtttttcctttcgctaattaattgttccatttcctccgttccgtcattaattgtgccgatttcactgcacaatttgaacacagcctttcatcgatgatttctcatcgcatcggtgtggccctctgtaatcctaaagcccagcagcactcttttgcctttccatccccaagttttgttcttttcttaccgcatcgttacaccaaacacactgtgagtatttctgtgcaatgcatgcgccgtattgggcggaaaagccttggcaaatttgtcgtttcgccctcagttcgtcccccttttgctgttcctttcccagcgaaataactgcgaaaacgaacaatttaaaaaatgttttaattaatgtctccccaatttaccgacgatggcaaaaaggacaaaaacagacgaaaaagatggcattttaagaaaatttgacacagaaaaataattagtattgaatccaaatgaaatggtcgattttggaggttagaaagggataaacagctgactgataaaagaaaaggattggccaaccaatggggcgatcagtgatcggaaagcattgattggggaaggactcggccgtttcattttgccaaattccgaaaaacgagcagaaataaaaacgattttattcaaaataattgataatttaatatgcaatatattatttgtacccgtccttttctgcacttcatcatttgccttttgcttatctttccatttgttcttccgctgaccgtggcgaggacagtgacaattcgaccaccgattcgacccgtaccaaaggcgccattccccgcgtcggcctcactctgtttaccgtttgtacggctgaggcggactttcgcctcggcgttgtctccgtcccccggcacttttcgtccgcttcttccgccgccccctcccctcccaaattcgcttcgtcgccccctttcccccttcgatcttcccaattgcttctcatcatttttctgtccgctttttccctcttcggcatttcttccagtgcatattcgttcatcggatccgtggtggacatgtcgctcgttgtcaaagtcacccgcggagggatgggccaatggtcgggcaattggcggtggaatggcactttcttgctatttgctgcacttcgtccgtttccattggtttctcctgctgttgtgccgcaatttcctcgtcgtgcgccactgaaatcagttctctgaaagggcagcattatccgcacattctgtggtgcctgccaaagcaatgcttacttttgtcgggggtcccttcgtcgcattagcttatcgcctgctgaatgcgtatttctgagaagggaaggggcagtttatgatatcagcagcagacaaattcaacccattaaaacgctatcctaacgaaaacaacttttttaaattgttcactaatcgggcattaattaattaattaattgcgccgttcactccttaattgccgcacgcaccttctcgtgcacatcactttcaagccgttctcccgcatttgccccgtttctgttcttgtgatttcgccttttttctgctgcgacgcgtaacgacgcgaacgtcgcaattcggccgattcttcttgaatgacctgaaaaattaaaattggccaattaaattcgtcattaattaattacctgcgcgtgtctgtcacgcgattccaacgtaatgacacaagcgatgatcatctcaaagagcaattgccatttcaatgggttgagaagccaaagggacccaccaaaaacattccgatgccacagaaaaccgggccaatgtattgcatgcttttcattatgtaacgaagcaagccaaaatcagcgaactgatcgggggactgagtttgctgagcagccgaagggactgagttagcagtatcgaaatatccaatcactgaaaaggcaaaatgccaattattaatgccagttgggcaagcagtctctgacctgtcattaccaatccgatggaaatcatcacaatgccaaagatgacattggcacaggcagtccaaagggtctgaattgacaaagacaattcacaaaagtgttcaatggaggagtgaccttttttccatggatttcataggcattacgcaaatatttcatgcctttttaaacatttttgccaattagcgcatttgtgagatttttgtgtggt

SEQ ID NO: 1590 - DNA, 9819 bp, Heterodera glycines
  unsure (1)..(9819): unsure at all n locations
ctatcgaaatcacctgggcacgcatacacacgcatcaacgaattagtgctaattgtaagtgattagacagtaagtgaattgtacaataatttagttcaacaatatccaataaaatgtcaaaaaacacagaaaaaatgtgaattgtatgttagaaaagttaactcatttagaatttttagatacggtataaccaggactcgaaccaagttaaaccagacagaattccggacaaaaattcccgttttaataggtcgggcaagttggacgcagactgcttcagcgccgccagatttgaaattgtttcttttcattgttaatgtgctccacttttatattccaaaagtccaaaagtaaaatgaatcattcaatagtaattaagttaaagctcgcattttaaggcatattttgccgttttagtgcctttttggcactttttcagaaaaattcaataaaaatgcaataaaggaaaaatacacccataagaattaaaaattttctcaaaaattgattttaaaaatacaaaataatggcaaaacctcaaaataaggtaaattatcttttccaaaacccaaaaacattttaattgagtaattatttaagaaaaacgaaaaaatttaaaagcgcatacatggttttttagctcttttcttcggggccaggacgttttcgcgtggcccgttttcgcgtgagtgcctattaggactgaaattggtcggatgtgtgccgaacatacatttcgacctatttcgaatcccaaacccgattttaaacaattttttgcttttatttactcaaaagcgtcctcatttttatgcttgcaaagattaacaacttcaagtattgacaacgtgaatgagacacagaatccgaccatcggcatcacgacatttctttaatttttttctttttccggggcggaggactcttctttcacatacatacatatccaagagattaacccattggaaagtcttaactgttttgttcaatttttggcaaaggtaaagaacattggtcccgaaaaaaaaaccccaaacattttacgcacaaataactcaattttatatagaaaaaattctgtaatagtggttggaatttttttttaaattatgataaataagcctgccagaaagagagaaaacaattttataccaaattgcatttgggatggtgagtttacactaataccagcagagcattagaccgttaaaaaattattagactgtataataatttgtcagacttaattagtttataaaattcacttaaatatatattgaattaagcaccagaagtaaaacgtgagtgaaaaaattttccaaactataaaaaagtaaaaaattcgcttatgtgcaaccacgcgaaaacggccacgcgaaaatggccctcacgcgaaaatggccacgcgaaaacgaccccgaccgcattttttcaacgcacaaatgctctcaagcatgaccgggagccccaattaaatattttagaaaaatattattctttctgaatgattttataatggcaatttataatattttggcaaattgttttaaaaaattaatttctaattaggcaattaactaattttacggctcatttttcaattcttaaatggtcgatgataactacgatgagattgatggtcactcactcaatcaatctcacaatcggagggaatgttctgaccttctgaggcaattatcattataatattcttttttccaataaaattgtaattaattaatcaattaattaatgttaattgtgatgtacgacacaaaatgccacactcaataagatggttccagttgcacggagcagactcgaaatgtgctccagcttggcatcggcttcttcttcatctttttggccttaaattcccagggctttattgaagaggcggtccttgactcattcgctcgaaaaggcattggtgtaaaatcccatgatggatatacaaggtatattagcatagagaaaaacaggagctttttacgattttttgtaaatatgttagggccacaaacttttggctgtaattacaaatttgatccaaatttagacaagtgtaaaaattatgggccacaataacctacctttagcgnaccttanatggtaagtactcaatttaactgtctgaacattcattatctcctatggcatattatgatatccttttttacagtttggccatcatttatgcatcattcacaatccataattttgtggccgcaccaattattgcctggttaggcgtccgatgggctttggtttttgctggtctcacatatgccatctttcaggttaactctgacagtattttgcaacaattttgccgaaatgtcataatttatacacggcatttttcataaatgaatcgtactgttgcaattacccccgccgctttaaacattttaatttttgtgaaaatgcatttattttgggctctacatattgcattgcacgtccataaaataattttacaaaatttaatgcaattagatatcatttaatagccccaagaatcctctattagtctacgaaggttgaaaaaatcatccaagtttcaataacttatgtcaaataattcagaaagttatttttgaagttttctggtcattgctaataagtaaattcaattttgtaagataattgcgaacccttatatctatttaatgttacaaggagttatggtgcattaaaattgccaaattttttatggtcgtgtaaacagcaaccgagccctttttgctctaaaatgaccttatttcttaattatttgtagtaatttttgagggctccccggaaattggacaccgaaaattggacaatattggatataaaaataaattattgaaataaataaacaaaaatggtgagttggtcatagattttattttagtttgcacatacctatgttttttataagcttaataaaacggaaataaataatgttattattatttttaacatcagcagaaaaaagcaatcataacattcataaagaaaaaggttttcgtttacatagggttcctattttcgtgcattttttggcacattgaccaatcatcccnccatttttcatgcattttttgcaaattgaccaatgatcgtccctgctgaatgtctgattcattctaagtgccttaattcgttaatccatttaccatactcaaattttatttttaaactaattcctggggttattttttaaaaagaaatttggtgtccacttttccggtgtccaaaattccggcggtgtccacttttccgcttggtgtccaattttctggtgtcaaatttaccggtcccctttttgagtcacgagaaccaaaatttttttgttgcatttaaaaatgaatttcaacgaacaaattcaggctggttttctgtttgtcaaccgttggtacctgttcagctcgtccacattgctgggactcggagctgctggtttctaactatttcatataaccgtatttcctctaacagaaccacataaacagagtcctgtggctcggggaattaaaaatatagacctcttggggctgtattagagcattataggtatatgtagttaaaaaaagtaataaaaataagtattaactgtaaaatttcatattaacatatcttacagaattatagattaaatgatgaaaggacgtaaagaataaaaatattttataatttgaaattttagtgatttggacagctcaaggaaaatacttggcaatgaacagcacagaagaaacagcgggacgacacagtggcctcttttgggccttgtcacaattatggtaatgagtcaaaaaattggcaaatttgaaagaaataattgtaaattactctaattaatcaataaacacccccccccccctaatcctgggtttctaaaaaagaaaatacataccctaaaaatcgaatttttactttccccctcacccgaagacaagggtcctggttgcccccttagtaaatggaagaagagagtaaatttgcaacaactataaaaattcattaaaatacataaaatggattcgatacattaagtcagtcatgcggtggcatctttctccttgtcgttttcctattgatgccaagcccaccgggtggtagcgagcaggaaacatccatttctgtgccaactgtgcgcttcatctacggcacattcaccgctctcactgttctcggcactgccattttggcattgttaccagtgccaacagccacaacaccggcacgacaaacaaatacagtcgacggcacttcctctgctgccgctgttcgtgacccctcaacagtgtcaacagaattggcacattcgatcgatgaaggggcagaagggagcggtgaagcagtggcagttgctgaacagccttcccatctggccatcttgagtatgaagaaaattgtttttgggagtatgacactttttaaatttcgtctggaaacccaatgtccagccagcaccagcggatgcattcaaattcatggattgcctattccagctcattcttccgttcttgtctttgtttgggtgcccaaaattaatagtttttttaaaattattttccaagtaaaaattggattttttctcaaaataaatacaaaatctttcttaaaatttttgctacatatcggctaatttcttaacaacactttcttccaatgtaccggggccggccatgcctggtctctattaattaataaaaaattgatttttgagttcaaatatggtgtcattccccgatcggggtccctgatccccgacaattttcggcttcccaaacctcggtcccattttctaaaaattttcttttttatcaataggttcaactgttaaactgatgggcacccgtcggatggtcttcttttcgttgccttttatgtacacgggcatcagccaaagcttttggagttccatttatccgacaacagtggcaaacacagaaatgttccagctgaaccagggagtcaatcccaagctgttgttggcactgaccgctattgtccaaggcgtgggccaagcaacatgtgtgtggtgtaaattagcaattggggttcaaaaaattggcaccaaaattattaagaaaaattcatcataccagatatttgactgccgtaaataagaaaaaattgacaaaagtttgtgaaattaatgcagtaaaaagggctttatttgcttgtttgcatgttgccactattctagtcttaaaatgcttttgtacattgacattttctgctaagctggcttcgttttcggcattttggacagtcggacacggcgttttggccgcactaaaattgtcagcttcggtgccgcgttgcaactgtgctcctttttgttggcctacctgaatttacctgcgcacgcaccgctggaaaaaacatttgagcatggcattctgaactcgccaaggcaagcaaaatttttaggaaattttcgttttaactatttatttgaaatattcataactattaacagtttaggcgatagattattcataacctgtggtttgaaatatatataaaatcgcaaacatggccatagaacatagactaaaaattatgaaaatggacatggtttcaaaaatatggacattaatctttccgaacaatttttcattaagaaaatttatagaaaaaattttggcccaaagagcaactaaaaagtcttcgggtttcgccatccaaaaatttttttctggctacgaccagcaggcctctacaaaattcctgaattttttttcttgatgcctctctacaaaaattttcaaaaaaaccttattttttcataacttaagcatcacgctcgcgttggttggtggttttttgctgagttttggcgatgcctgttggaacacgcaggtttttgccacactaattgccaaatatcccatcagagcgtcgcaagcatttgctgtctttaaattctttcaggtatttaaaattgatgatttttttaaatgataaatttttcaacaattacaataatattaattttcgagtgcaggaaaaaattatgatcaaattgcattctctatctttgatcacctatttttacgtttcaaatatcctaaaatttcgttcttaataattaaattaagaaatgatttaggtaatccttaaaaattaaaatatgacctctttacatctattcttttgtaatgcttaaatttagaaaattatgtgatttcgaatatcagatttaaattgcctcaaatttagttgattcacagtttcattaagcatataattaacaaacaaaattatttaatttttagtcacttttatgctgtgctgcatttttctacgccacttcaatttctttgccatggcatgtgctcattttggccattggtttgttaatcggcttaattggctttttgcttgccgagcgaatggtcagacaaaatgatgacgattttggagatgttgtgataccaacgcattttgaggaggataattgattagtttatcattttcaaatatgaatgtaaatagtttacctgtaaatagaacatttttttaatttaagaaaaaataataagcacctttccgccacccatgcgcgcttcttaaatccaccatggattcgaaaacaaaaaatatgtaacaaataaaagttcattcataactttgctcaaattcaaccaaattaatcaatcataaatagtcttaatttgaattctaaactactatattcaacaagattatggccaaaaaattatggcttaagatttttttaattttacaacacccttttttatattatttgaaaaaattttgaaaattatattctgatagagacagttaaagcttttaaataataacgtaaaatattaatttaattaagtttgagctaggtttatgaattttcatgtttcatcttttgttttcaatcccattggcggatcagcatgttctccaggtacaaacttatataaattgcttcctttttgaactaaatttctattttcttccctcgcgacgagcatttgtaatcaatttcattgaagaaatgtggcattcatattattaaaaattgacaatttttaaacaaatttcgtttaattagtataaaatttaaattcaaaaatctccttcgcagcgctgtcagctccgcaatggagaaattgatgtcaaatgttgaccaaaggtcacaaaactcgaccaataaaaaattcaaaaaagttttacaatcaaatggattttatccatgctccaagacaaatttttaacctaccaccaatttgaattcgctcattatcctttgtcgagaataggcaattaccgacatttgagtatctgtaatttttgaatgaggcaaaatgcacaggtaaaattaaaaattcacaattgaagtcgacactgctctgtccaatggtttaaagcttttatgcattttataaaattaccggaactcgtcaaaatatttaaaattttgaaaatttcttacggaaaataagcagaaaattgtaataaaaataaatacttttcaattcatgcaaggaatttcctgaatctataaattgatccattatggtgggactcaacctcagcagattgttcgacattccaatcactgagactcagttctccggcattccaataaccgagatcaatcccaccaaatcttcggaatcccaatcactgggactcaattcgccggcattctactccggaaaaaattttcaaaaaagtgttccgaaaaaaagagatagtcgtttttacatacgaatattgaaaagaaggcgtaaatggctctgaagcgtccataggccgcagaccacaaagtaaaatgggacaacattcataaaaaaggttggcctcaaaagggcccattcccaagctaatttcggaatttgctgataaaatcaaatagcctaaattatatacgcattataaaaaggaaatggcagaagcctcgaatgttagttatattgagtgtcacaaaatctcttccggaaaaaattttcaaaaaagtgttccgaaaaaagagatagtcgtccctagcgaagtctggacaaacaataaaattgcacaacaaatatacctactgttcgagttatgttttatacgagtcagatatgagtttttcctatggcaaggttgtgaaattcctcccaaaaactttcttacggaaaataagcagcaaattttaataaaaataaatacttttcaattcatgcaatgaatttcctgaatctataaattgatccactagaaaagtgttagtagaaaataaaaaataattggagcccatattttcgtcataaattgagtcccgaaagataaatagcatggcaaaactagaaaatatttgtcgatttattgcctattttccatccatgtttgggatgaggaaatgtataaaaagataaactttgtaaagtatttattatcatggaagtcgtcagaataatatcaaaagacttcgcataaacaatattgcaataatttaagttcgttttatttttcagtcaacaacacggccgagagaaattttgatacatcaaagacaacctaaaatacaccgcggtgagagccctagcgaaggctggactataaaattgcacaacaaatatacctactgttcgagttatgttttatacgagtctcatatgagtttttcctatggcaaggttgtgaaattcctcccaaaaactttcttacggaaaataagcagcaaattttaataaaaataaatacttttcaattcatgccatgaatttcctgaatctataaattgatccactagaaaagtgttagtagaaaataaaaaataattggagcccatattttcgtcataaattgagtcctgaaagttaaatagcatggcaaaacttttaaatatttgtcgatttattgcctattttccatccatgtttgggatgaggaaatatataaaaagataaactttgtataagtatttattatcatggaagtcgtcagaataatagcaaaagacttcgtataaacaatattgcaataatttaagttcgttttatttttcagtcaacaacacggccgagagaaattttgatacatcaaagacacacctaaaatacaccgcggtgagagccctagcgaaggctggactataaaattgcacaacaaatatacctactgttcgagttatgttttatacgagtcagatatgagtttttcctatggcaaggttgtgaaattcctcccaaaaactttcttacggaaaataagcagcaaattttaataaaaataaatacttttcaattcatgcaatgaatttcctgaatctataaattgatccactagaaaagtgttagtagaaaataaaaaataattggagcccatattttcgtcataaattgagtcccgaaagataaatagcatggcaaaacttgaaaatatttgtcgatttattgcctattttccatccatgtttgggatgaggaaatatataaaaagataaactttgtataagtatttattatcatggaagtcgtcagaataatagcaaaagacttcgtataaacaatattgcaataatttaagttcgttttatttttcagtcaacaacacggccgagagaaattttgatacatcaaagacacacctaaaatacaccgcggtgagagccctagcgaaggctggactataaaattgcacaacaaatatacctactgttcgagttatgttttatacgagtctcatatgagtttttccctatggcagggttgtgaattcctcccaaaaactttcttacgganaataagcagcaaattttataanaataatactttttcatttcatgcatgaatttccctgatctataaattgatc

SEQ ID NO: 1591 - DNA, 1637 bp, Heterodera glycines
agtgttagtagaaaataaaaaataattggagcccatattttcgtcataaattgagtcccgaaagataaatagcatggcaaaacttgaaaatatttgtcgatttattgcctattttccatccatgtttgggatgaggaaatatataaaaagataaactttgtataagtatttattatcatggaagtcgtcagaataatatcaaaagacttcgtataaacaatattgcaataatttaagttcgttttatttttcagtcaacaacacggccgagagaaattttgatacatcaaagacacacctaaaatacaccgcggtgagagccctagcgaaggctggactataaaattgcacaacaaatatacctactgttcgagttatgttttatacgagtcagatatgagtttttcctatggcaaggttgtgaaattcctcccaaaaactttcttacggaaaataagcagcaaattttaataaaaataaatacttttcaattcatgcaaggaatttcctgaatctataaattgatccactagaaaagtgttagtagaaaataaaaaataattggagcccatattttcgtcataaattgagtcccgaaagataaatagcatggcaaaacttgaaaatatttgtcgatttattgcctattttccatccatgtttgggatgaggaaatatataaaaagataaactttgtataagtatttattatcatggaagtcgtcagaataatatcaaaagacttcgtataaacaatattgcaataatttaagttcgttttatttttcagtcaacaacacggccgagagaaattttgatacatcaaagacacacctaaaatacaccgcggtgagagccctagcgaaggctggactataaaattgcacaacaaatatacctactgttcgagttatgttttatacgagtcagatatgagtttttcctatggcaaggttgtgaaattcctcccaaaaactttcttacggaaaataagcagcaaattttaataaaaataaatacttttcaattcatgcaaggaatttcctgaatctataaattgatccactagaaaagcgttagtagaaaataaaaaataattggagcccatattttcgtcataaattgagtcccgaaagataaatagcatggcaaaacttgaaaatatttgtcgatttattgcctattttccatccatgtttgggatgaggaaatatataaaaagataaactttgtataagtatttattatcatgtaagtcgtcagaataatatcaaaagacttcgtataaacaatattgcaataatttaagttcgttttatttttcagtcaacaacacggccgagagaaattttgatacatcaaagacacacctaaaatacaccgcggtgagagccctagcgaaggctggactataaaattgcacaacaaatatacctactgttcgagttatgttttatacgagtcagatttgagtttttcctatggcaaggttgtgaaattcctcccaaaaactttcttacggaaaataagcagcaaattttaataaaaataaatacaattcaattcatgcaatgaatttcctgaatctataacttaaacgactagaaaagtgttagtagaaaataaaaaataattgg

SEQ ID NO: 1592 - DNA, 1167 bp, Heterodera glycines
  unsure (1)..(1167): unsure at all n locations
cgggccatctgtgctggtacatagacaaagaaaagaacattcaactccagtttntgcacttaaatacaaagagtgagaagagcgaggatcatttttgatcaaatttcattttttcaattttcaaaaaattcaattaaaaatttccatttttatttctctttatttacattttgtaagggttaaggcacttaaaattttcgggttcataactatttatattagggtttttttttaatttcagtttcctttttatccgatcactatttgctttacaagctttggattattgggttttttcattatttttcatccttttatcaaatccgtccgatcagtttaggttttcctttcaatcattttttacttaaattaagtccagatcacttttacctatttatttcctagttcaaaatattttaaaactttcccgtcttcattttttatgatttcgatgcttccattcattcgtttgctacttctttttttaaattactcgttgattttcttaatttttctttcactaaataattaaatttccgtctatttgatttattttaaaatttttcaattctcttccgatcactttttatcagtctcttcctttttcctccgatcaatttggattaattttttgttcatcaatttcctgctaagaaatttgcgttttttctaccgaaatttgtgactaaattcgctgtcactgaatgcagcacaatgtttcttccgatcacttttaatgttccgattgtgcacctttgctcgatcactttttctccaccaatttcaatcgttttgcacacttttcctccctccgccgatcacttcgcccgaattccgatcattctcgaccctcgccttccccaccgattctcgaccagcagcagcacagagtagtgttaattgatgtgattttataaagaacaaaaattagttttgtcgcaatcattattcattttttaattttaattattttcaaaattatttaaattaatttttaggttttaattttaattttatgtctttgatttaaattccgctccataaattgcttcaaaatgaacaccaacaatgacagtaatgacagttcacgaaaatacagtaatgcgaagcaccaacagcagcaatacagtagtaataacaatggtggtggccaccactttcttgtcc

SEQ ID NO: 1593 - DNA, 8271 bp, Heterodera glycines
  unsure (1)..(8271): unsure at all n locations
tgcaggtccatgctgttcaaactgtcactatcctccacagcaatccatcgcattcggcgattgctgttcgctgagctgctgctcaacctcatcgcgttgatgatcaccatcaccaactgcagcagcactacggttgtgaagaagtacaacaagcatcaccaacagcggaggatggcacaaaaaatgccaatggcggtgccgacggcggggatgaccaattactgttactgtccgcattgctcggctcgtcctcgttgttgtcgtcgccggcgtcttcggcacggcatggcgcccagcgctggcggcgtggcaccattggggagcaaagcattgcggaagagtgtagcagcggcacaactgtcagtgccggtgccgttgatggacgtgaaaatgagggagacgatgacgaaaatggcacagattgtggcgagcatggagacgataaggaggataagtgtgttattacacagctgatggcatttgaaatggaaaatcaaatctattttataccgatcattgatcaatgattgggttttattttgatcaattcgattttgaaagttttattttaatctgttagattatcggactgatttattttgagtttttataattagttgaccacaaaattaaacacaaatttaattgaatctgttttctgactggcatcaaaattatttttcttccttaataaataaatttttattttttataaatttttaattgataatttttataaaatacttttattttattaaaatatgattttatcaatttattaaaataattgttagtaatattaatttgaattatttatttaaatttttaaattattttattccaatttgcaccattatttcatttcagaaagagtcaaccgcccctttcggcattattgtcagccgacaaaacgccaacaaagagccaatttgccaatgtcaatgccaaagttcaacaggaacaccagcaacagagaactccggtggcaaagacgacgtcatgttcaacttcgtcctccggcgtttcttcctccccgaatattaatggtcaggatcaatttttcgaaaattaaaaatgccaaatttagttaatttatgggctgaaaatatccctggaatcgaaaccaatgtgccaagaaatcatctttttttacaaaatacgaaccacagacctcattaaaatcttttttagccttttaaaaattttcgaatgcggaaattcggaccaataaaatccggaatcgtatttcagaattttcaatcgaatttgttattataatttgaaaaaaaagttattgactaaaatattgaaaatttgaaatatgtttaattttcaataagtagttaagaatcaaaaaaaaattaatatttttcataatttcatttagaatttttcaatttactgtccaaaaaatttaataatcccaaatttttttggcaaatgtagaaaagccatgattgaccagtttagccccagcctttctgatcaattgcactaattatgttttccccgttttttaagctggaatcagcggctgcagtaatagcagcaaaatttcgcgcttgatcgtccgtcggcattccgcttttcagctgccgcaacgcttcacggcagccgcctcggtggccattggcaaactgtcaggcgcttcaccgccgcccccagcccttctggcaacggcaacgacggcacaaatgcttcatctatacaatgccaacattggaaacaaaagtgctacccaaatgatcactgctgctgctggtgccgtcgacgacgacgatgataatgacgaagatgaggacgccacgactgatcgaccgactgatcaaagtgatgccaacggtagtagtaccgtaccgccgtcgccggcactgtcccaccagctgaccatggcagccgcgaagcagcaactgttgaagcacacggcgcccaaaagtggcagcggtcagttgtttgctcgagaatttgaattttgaaagcatttatgaaaaacgagacttgataaatttcaagcaccgaaaattgcttgctaaaattatactcgttttggggcccgggtaccggattttttttagaaacccgtgaactctggaattttacctgccaaaattaaatatttttatcccgattgccttagattttttttaactcgtcgaatatctaaattttctgcggcggtgcatacatatctcgcgattgccaattagcaccgactgacaataaaatcttattaaatttcaattaaattccggcataaaaaagctcttaaattatgaagcataggaatccggctgagctcatttcaaaggataagggaacaaaaaatcttatgaattctaaggttaacaaatgtgattaaaaaaagaggtgcatttacaattttcccattttccatggtcatcttggaaataaggacgcgtttagtttttccatgttttgaggcccagattcaagaacgtccctaaatccgaggaaaaatctatgtaatccctgttatcagcatcttttttcctgccaattaatccccacttttgctttgattaacttaatcagtcgccgctttttgtgccctgtttggcgatataaaaaggcatttccgatcaccgcttttcctttgacaacatttcgcggcccctttgtctctttctctgatcaccaccacaaaatcacatatttccttttttgttgtctgtcccttatttcggatcattcttttgtcggcatcattcattgatcacttttttcattcgtttatttgatcaatgccgcctttgtcactgctgatcagctactgcttgcgctttcctttctcactgatcgatagattgtcgttatttcgcttcactggtcaccactgttttctctttttgtttgaaccgtacaaaacactgatcggctaccattggatcacttactgttgttgattgatctgtatgtatccccatacgttgtctttcaatcgcagttgttatccgctatcattgttttgtatttcgctgattctgctatttgatcggctttctgtctaatttttgttgcatgctcttttcacagatcacttccccactcttatcaacatcattttcattcgtttatcagttttaattattattattcattctgtttttttcattgaatttgctgattcatttatattgcactccttttgattacattgtcatcctgatcaccccactgcttctgaacattttgtcactctgatcacccccactgcttctgatcaccttttctgccctgtcagttgatcactttggtcattcccattgttactactgatcatttttctcgcattaatcaccactatcatacctactctgatcagctctctcattctgatcatccaattttgcttttctgcttctgctgatcacttttctgtcaccattttgtcgtcgttttgctccttcgcttatcgactgctaaaacggcggcgtcgaacgaaacaaaaaatggatctaccggccgctgatccttctgctgaagatgatcgggatggggtaaaaagcaggaaaagaaacagagagagcgagaaagttgacaaacaaaatgtgatgtatgcattgtttttttttgtgtcgtcacaatcccttcgagcgcgggacggatcagtcccaaccaaaaaatccgtaacatacactccatcatcacgcattaacagatttatggctgtgatctgctaattctgatcagcagagcagatattaaagcggcatttatttttcgggatcagtccgatcattgattgattgataactggttgattcaaatcggattaaaaacaaggcttccatttttggcttggtccaattcaaggtcagtccgcagcttttgtctgcctccaatactgattagacttgattggacatcgttgattcgattcaaatcactttaaccaatcgattgaattctcataggcacctcagtttttttattgtacttctaatcactaattaaattttagtcaattttaatattaagcaatttaatttaaaatatttttacttacttttttattttttgtgtccaattttcttcaccaatttttttaatccatttttctttatttttttcctgttaaaataaatttatttcctcctcttctcatttcgaaggactgattcatccaaaattgcaatgctttaacccattgttattacttcttgacaaatttttttgttaaattttaaatttaattaaaagcggaagaaaaattttgatttttttttcaaaaattacatttttaccgatttgaagtggcaagaaaaagagaagtgataatttgaagtggacaaaaataaacaatttttttacaaatttcgctggttcattccttcttgtgttagttacttcctccttaatcttcaaaattttaaaaaagctaattatcgaaatgacagtcaaaaaactgaattcagcaaaatcgtgtccacgcggaaaccgggatagtaccgtagaatatgttccatccctcccaaattgcgcatccccctgatactgtcccttaattaatttatgtgctccctgatactgtataacagtagtcccatgcctcctgatacctaccgttcccggtctcttaatccttgtcaattggtctccctgagattgtaatggcataaattatgtcattataccctccaattttgtctcccccatggcaccgtccatggtcaatattttgtgtccgtggtgctgtctgagtgtcacatgccccctcacaccattcctagtctaaacccttgtactatttgtgagcctccttggtatcattctcggccctaagttgtgcagcgtcgactttccgaccgtcccatgtacctaccactaccgtacctggtctaaactgtgccgtcctgctaccatccccgcccggtctaaaagccgtgtgcttccccctttccggctaatgggatagtgtaccaccactctttccccgttttgttgtgctgacaaatcggttggagcgtttcaccgttttcatggttcatcagtcagtcggtcggtcgctggtcggtggttgatgtgcacgcccattacgcaatcaatcatcattagccgccgccctccggcagattttgtgggctgtgctttttctgctccattttagcagcttttcattttgcttactgcttgcttttgtttttgatgatgtgttgtgcttttttgtaggtgcgcgctttttaaccccttttttccttttttgatgggtgagaaatttaattaaacgaaatttatggggggtaaataaattaaaaagtgtgaaattaaaaaataaataaataagtaatttcacacaatgggagggagataaagttttaaaaaaaatgttttaaaaaatacatttttattaaaaaaataaatgccattttaataaaaatttatgtgggtaagaaaaaaaagaaattcaatttttgaaatttgcagaaaactattaggagataaactattagagatttaaatgataccagaatttttattataacctttttatccctttgcataaataaattattactttaaagaaatattgacgtgtaatttaaaaaaataaaaataaattttctttgtttttctaataaacgattttgtccttaagcaattccctagaaggaaattaaaaattgaattagaccttgaatagaaatattgttaatttatcatttattaaatgacattgatccacttctaagttgatttcatgcaatatttttttgttaatttggtatttaaatgccaaatttgtttttgattattatttatatataaaataaaaataaaataaaataaaacttcttttgatatttttaaaaaagacttttatttttttttttgttatatatatatatatatatattaattctttttcagctgacaaaattgttgacgacaaagctaatgtgcacgtcagcatgcaacaattgctggcaatgcgcgacgacggcatggaattggcatttgagcgttgcaaaggttggcagggcatttttggaactaaatttcaattttaaaaattaaacaaaattgaattgaatttcttttttcgattattgcataaaattttttttatttaaattttatgtttttcttattttaaccatttaaaattagtttacaaaaaaatgaaaataaagattttttatcattcaatcttttggtcaattttaaattttatcatcatgctttaaactttttgtttcttttaccaatttgccaaaaatatattttttcttaatgtaatgtaatttaatatattttttgattgccaactaaaactaattaattatattttttataaataaaatttttccgccgatgacaatttttgcttgtcggttggcacttttatctttccgccacgctttaaaaatttgtaaaaattatcgctaaaaacatgataaattcaaaaatttttatctaaaactaatagaccatttcttagtcaaataaggtgtggcaactttcaattaaaattccgtaattaaatgtcaatgttttgtttttgctcagcttggtccaaatacgtgtcccaactgttgcaaattgtcaaattgcgcctgagcacggaggaggactatgtgaacaaattgaggcgccaatctgagcaggccaaggcgctgctcgctgtcggcacggcacaaacagtggcagcgaatgttggcaaaatgccattggccggtgttttcgaacggatgctggacggcacaatgcaacagactgtgcacgcggaatgtggtgggaaaattattgaaaaattcagaattttttgagaattgggttattttataaaattaaaaaggattttttttaaatattcaatattcaatttttttattttattttttttaaaccgaaataaattaatttctttcataaaaaaatcgaatatttaaataaacagttacaataaaattccaaaaaatagttatactcatataatttaaataaataaattttatttaaaaagttatttatgtataattaattgactgaatcattataaaatgaaaattattttttaagttcacaaattttaattcaataaataaacaaaattgtgcaaataatttatttattcttttttttagattttttattaatcaaaaaaataatatttatataaacaattacacatttttaatttcaataaatttgatttagatatataaagaagaaaataataaatatatataattagttaataagtataattacatatttgattgaatcgtttaaaatgaaatattttttatttttttgaaatttcacaaataaagcaaaaataaaattggaaaataattcatatattttatttttatttgttttttaagcattttttagatagagaaataaatcttttattttattcaataaaatgaatatctaaataaataattataataaattcaaaaataataccaatatttaattttaaaaaattttatttaaaaatgtataattatatatttgactgaattattttaaaattaaaatttttttaaatgcataaattttgccaaaataaaataaaattatgaaaattatttatttatttttatttttgttaaaagcattgggtgcgatgcaacagcgtgtggttttgacgttggaaaaccggcagaaagaacacgaccaacggagacgcaagctgaaaacggagtgggcgaagcagcgaaagcaattggtaaatattgaataatttttttaatttaataatttaatttcatattagaaattggtttaattaaattcaatttgttcattgaaattttttcattaagataaaaaatatttaaaaatttattaccagaaatcatttattgagtaaataaaatatttttaatttgaaaaatttaaaaatatttttaaaaacattttttgaaggacgtatgtgttgaagagttgagacgtgccaagcaaacacatctgaacaaagacgaacattatttgagggccaaggaggtggaaattttaaatacatttaaaacaattaaaatgaaaaaaatatttatttatttaaatttcttaatgccttgaaaagttttattttttaaatttatttttaatttcgtaatttgtatttttcaaaaactacttgaaaaattttcattataaaataattaaaattttcctttgacttggcataattttttggtattttgccacctgctagatatttgttggcattttgtaattccaattntttgcctaaccataantcctnnggtcattnatcttttttttggcattttg

SEQ ID NO: 1594 - DNA, 1989 bp, Heterodera glycines
gcagcaaggatcaatttatgatccgcaagctcgtcaaggagatggagaagcggctcaagtcggaggaggagtcgcttatccgggtaaaaaaagacaaaatgccaaaattgaaataaattttgaaaataccgggcaaacggcatgtcatactaaacaataatttaaatctatcacatggaaatgaaaattttgtttaaaaaatttccaattatttctgatggctttgtttggaaattttctgcccattttttattttttcagccatccctgacaaatttttttgtcggggaattcctccccgatttttcttccccgaagatcgggaagtaacaccatacataaagcaattttatctataaaaaatggaacatttggcaaaattgcggacacaaggacacaaactatgctttgtgccaaatttggatgcccaggcgatggatggcaacaaactgccaaactaaaaaaaaaggtgtcaaaatgagtcggggtcggtttagtacgggccgttttagtacgagcgcaagtttttggctataacttttttctttgccaacaaaatccaacatttttagtatcgttcgatagccctaagtgtcctctattaatctgaaaaattgcgaaaaattttgttaagcttcaaaaaagttatggccagaaaaactcaaaaaaccagattttgggggattatccccaattcaccataatcattagacaaaaccaaagaccggccagtgaattaattgcttttttggggtatccttaaaataaaacaattgggatttgcggattcttcggtacatacatatttattttgattcatgtaattaattattgggacattttgcgtacaattaattaataataaggaacgcttcagttatatgtatgccaaaaaaaactgctataaaaagagtgttgctttctttaaatttaaacaatttttgcgcctgattataattcaggaagaaattttcccaaaaattttgcccaaggggataaattatttcggattcgaaatttagtgaacccgatgaaaaaccatagatgggggggggtgcttttttaactgtgtcaaggtcgcttgctgatcatggacatgctatttattttacaaattttaatttttaaaaattgaaaaatttcaaattaataagggtgtctccctaagtttttcatcggcgcccactaaataaaaaagtgcctattattctaaggtggaggggtatataagtaattaattaaaaaaagttaaattatttgctaaaagtcatttaaaaatgcaaaaagataatcaattaaaatggggagagaaaaaaattatctaaaatttttgttttgagttttaaatttttaaaaataaaattggcgaaaattttttttattaaaattttctaataataataattaattaataatgattaagaaaagcgatgcggagaacgatgtcaaacggttggagcgtgaattggaggaacgaatgtttcgcattcattcgctacgggtcggtttaaaatggaaaaaaaaattaattaaaaaataatttccgatatattttttttttaaattgctaaaataaaattataatgcttaggtgttaataaataaaataaaataaacttatcaaattaaattcaattcaatcttatcttaatcataattgctgcttaataactttgcattaattttttttaagtaattgacattaaaataattaaaaaagttatattttaaacaattttattactcaaaatcttaatttataagttttttaaatatattttttcctttttaatgcttttgttctttgaatgtaattaattaaatatgcttatatcagagttccattacaccaatattaatgtgtccaaatgtttaaaaaacttttatttttttaattatacaaagccagtcttattattttttgctaaaactttatttccgtgccggggggagttcacaaatttaacaaaaggggggaaaaaatatgaa

SEQ ID NO: 1595 - DNA, 3015 bp, Heterodera glycines
  unsure (1)..(3015): unsure at all n locations
ttttgctaaaactttatttccgtgccattttctttcacaaatttacnnaaaaggggggaaaaaatatgaaaggcaatttttataaaacaaaattttctaaaagtntaaaaaaatttttttttttgaaacttttatgtttatttatttttttcagtttgcaagttaattgtaagcattccttcttcgtctatgacttcggtttcaaatttctcagtttttttaccttagagattcggattgccactcccaaattcttttcttaaattttgaatttttaaactacatatttttaaattttattccctaattatttttccaaggttaaattctttactaatttaaaaattaattttatctctacccctagcttattaaaaatttgccccccccctctcctcctcttttttgctgttgttttgtcccctttttttctttcgcccggccctctacgcttttcctaattggtttttttcttctccctcctccgttttgcctacgcattttgtgccatgccataattttcttgtgccactgtgttttttttctgcgtgtgtctgtgccgaaaaattttaaaaatataatttaattttcccgctttttttttgtttttggcatttttaatgactaaaagggcacacaccgctcaagcgacggcacatttttttcattttggcattgagcacaagtcttggaattaattaactcaactctctcttcctctcattgctgaataatcgagagtttttcgagaaaagagctcccgccgctttcaaatgtcacatgcttttaacatttttaaaattaatttctcgtcttttcatttctccaactttttgtgccgtcctttttttggttttcgtttattttcttgaaaagtttacatactaaatcctttttatgggttggcacaacgcgtttttcgagattttctacctttttctgtcgggatttaagcaaaattccggtctaatcctctctccattctcacttatattgtgtttatgatttcgtaaattgcaaatgttccaatccaaatttgcggaaacaagcaattttctctgtcgagagtctcgacgccaatccatttctgccccatttcagtctaattatctgttcatgtcaaatttttttgcgttgctcagttccgtttcggcatggaatcatcacttgctgtcccccaaccgcagccctttcccccgcagcacaacaatttgacctttactcggcccaccataccgcctccgttctttccggcatcctctcccctccctcggggggcgattttccgtgtgccgccatcgccgcccccgacctcttgacgtggcaccacagagttgaacttagcggaggggagaggagggaatggcaaatgaacacaacaatgggccccttcccccaactcagccaaaatgccgtcgtccgttattttgctccccctccactcaatggcaccctttccctgcccctgcccagtccccccagttgctttagtggggtgctctttgtgcctgtggggcacggcacggggcgggagccaaatgccctccgtccctcctcccgccccggcccgcccgcccgcgggtcccacgcttctccaatttccgccatacgccatcggcgccggctggccttccccgtccgccggcggggttgtgttgctcgtcccccgcggcgcttttgggctccctcgcccctccatgacggggggctcaacatccgcctattattctcattcatattattcactcgcttctcacactggcgcttgccccgtggtatcatccatcggtggtgcacattcacattttgagttcgcgccgttttctttgaatttttcacttttttaagtggcattttatgtatattaaaatcgaaaataatatttttttttagtcaaattaatttttctgaatttttagaaaatatttcctccctaaaaatttttcatttttaaatggcaatatatgcatgaacatttttgaaaattttttttagaggcgtgggggcggaggctcagccctaaattcgcttttttcgttgagttatttgcatggtaatttttaaaaacatttttgtagggagtctaagccgaagacagaggaaaattattttctggggtttttgttagaatttttagaaaacatttctccttctaaaaaatttttaaattatttcaaagacacaaattataatttattatttattaataaattataattttactaacttattttaattgtttaaaatttagtttttcaatttatttttcattttttatatattttttaaaattttattattgaaattcactcattaatatgaaccctaataaatgtttatttacctttttaatgcattaataacatttaaaaattttgaaatttaaatattatttaaataatttaattttttgcgccctttaaatgtttatttttcttatttaaaaaatctctaattttatgcatttgttccaaatcaaaaaatgcaatctttttttccaatttaaaggcaccatccgtcgcttttccaaaaattttggccacttttcacaaacggcggcttttccccagtggccagtccaagcaagccatgcaaaatggcaaatccggcacgcctattattcatattattgtttgtttgttgttccgttcatccccccccccccggggagcaaaattttgggacgggggacggcttatgccaatgccaatgccaaagtccgcttcttccctccgcccgtatttccccgtttttttgaacgcccctcgggaacaatgtgaatgtcacatcgatttatcacaagcttagagatgaagattaatggcttttgtttggctgaagccaagcgaaaataaagccaaaatttacgcggaaaaattctttaaaataatccaatcggcacaacgcacacattggctaaattggccagttttttttgtgattaggcaattaaatttgacgaattctcccaatcaatccttaatgtttggcgaattgtccgtttttgatttgata

SEQ ID NO: 1596 - DNA, 3496 bp, Heterodera glycines
  unsure (1)..(3496): unsure at all n locations
gtgttggcacaggcacttctcaaattcatttattttatgttgcggcatgtttggcggaagcgcttttatgaattgtcagaaaattgcattttctgtgccgcaccggcaccggaaattgtttgagcaaagcaaacaaaaaaagcgcgtgagtaaatgggattgagttttgctgtggtggtggtggtgccgtactttgctgcctgttgcttgacctccaattttaattttattattaagcaaataaagtaaaagcgcgggtaaatacggtggcgctaccgtatgctaccaaccccccacccttcccattttttccaatttttagaaattgcctacgaaattatgtgtgtcattttccaataatttgttattttatagcgccaactgtcgagatttttttaaggccgtaacactttttatttgaaattttggggaattgtttaaaaaatgttacgaataatcgaagaatgccggagaaattaaatcataatttaaactaaacacataaaaattttgcgaaataaaaaaatgccaaaatttttaattttctattttgttgttttccagcaaatcgcttttttcttattccagcatcacactgtcaacgagctcagtgatctcattcgccaatggtgagtaaaatcatctttcaaattttgaacataatttttcggctttggtatactgtatctttttgggatacggtacttttggggtttatgtaaatgtgttatttttttaattgaaattcctttcagtgagctcaccacaattgctgcaacttcaacactgttaaagtcactcgccgatttgtgggaggctggtagatgatatgccaattaatttttattaaaatttcataattgagaaaataaaaattccaataaaatttaaattcaaattttggcaaaatgtacaagaattaattaacttgatatcggccgaaagcctattcatatatttttggaagccatctttcagctcttgctaacgaataagggcacaagcagaactcataaagttattattggtaccactaatagccattaatagctctaattagcgggccagttcatggattttttttatcataatgcatcctttttttattgcagtgccgggtcattttcaccgtttggcggatgttagccgctccaacgccccgggcgctgatttcttgtcttttcttcaatctttgccttctgccgattccttctcttcgtcctgctggtcagtcattctgatcactgattgatcagtccattctccgacccaaaaaaatttaaatcgactcattccaatatataagtaggctcaagctaaatgctgatcacaattaacccattttttgaccaatgttatttttatatcaaacgggttgctgatcacttaaattcgatcaaatacattaagcctaaagctcgatagagaatgtctatcgattctaccgtatatgtatcataatggaaaaaccacccttttcgatcgttagtgccacaatgtattatcgattgactcaaatgaaatgagcaatagcagatcactctgtctgttgatctgtacacccatttccttaactgatcaaaccagcattttgctcttaatcctctttttaaggcgtgaaagtgacgaggtgtcagccgccgcacccactgatcaccacgcccacccctactccaatcacaaccaattgcgcttgttgaacaacggcattggcacaacagcggctaaccaccacaatcataatcatcatcaccattatagccataataatcggcattattccgtcaacaacaataacagcaccgccacggcactaatgagcaacaacggcggcaacgcgtcgttgtcctcgagcagtgccgcctcctccaccgttgtgccaatgcggtccgccgccgcagcttcgtcgtccggcaccgtcacggacgctggcgctgtgccctcctcctctgtgccatcatcgtcggtgtgtcgtgtgcagcagcgccggaacgcgctcagctcgacggacgacgcgcctcctgccaagctgatgatgaccccgtcgcagcacaagcggaaaggcaaagcggcggaaatgagtgagttcagaggcgggagcggcgcaaggggcatgcgtggcacgcgcaaatttttgatcgatcgatcacttattatgccattataaatccgatcttgaatagaactgataagttgagagcaggtgataaaaaaatggcacaatttggaccagaatcaccaaaatttggcggcaaaaaaaatttctttttttcgaaacccaaaatggacaaactgggacactcttatataatttaaaaaaattaaatttttataaatntaaaatgaggacttaaaaccttttttttagctgctcgtctgttcgacatgcaatcatcctcgtcttcctcaacaccaatccaaccatcagacgcagcccggtgagtcatgttacaaatgataaagccatggagttcttttttcaaccaactaggagggaggcttaattgaagggggaggggtggttatttagaaggggagggcaatttaaaagaatacaggtaatttgccaaaaaatttttgtccttcttgtgccaaataatttggcaaaatgttcagatcccatcgacttgctcgtactcggcaagtgtcaaggtgttcacagtgcggacaattgttgatcttcgatgcagtcaagtgtcaatgctggtcagtctaatgacacttaatgatcaactaattagctatacataaatgaataaagcgtgaaactggccaaaaaatttggcgacagtgaggcattttttggtctcattgaccaaagcagatgttccaccattttttacatattttctataatattcgggatcattgactaggctaatcagagcgcttgatagtgttatttcatttctgatcagtcagtcacccattggttttggcgaatatatgatcaggaaattcaacacattgtccttatttcttgctgattagtttaattcagatcgttcagctcatttattgaaactaaaaaaaaacagacccactaaaacccggatcaatgacatgtacaaggattaggaatttttggaactccggcgagggggagggggaaatggcacatttttatatcccatgtcattaagacataaggaatttaaaaaccctaaaattagaaaaatttgaaggggcatgggcggaggggaaataatttttgccaaaaaatgcccctattttcagcggacttttgtcccacaaaaagtgccttggctcggtccaactttggtgtggcgaaaagacggccaaacggctaacggagtgcggtgccgaccggcgcatgtccatctttggcgtgccgttgtccgagtcgttgcgcacccagcacagaaaagtgccgttcattctggagcggtgtgttgccgagttggagcggcgtgggatgcgttgcaaagtgaggagcacaaaatttggcacttggcattttgccattgtaattttg

SEQ ID NO: 1597 - DNA, 7237 bp, Heterodera glycines
ctgtgctgtcgggataggcttggcatttgtttggtcgatgtccacttcttaggcatagtgaacagttccatatctccgttgtggcaattggtccgtttgatgcgacacggggccaatccccgcctgagctctcgttctcgttggcatgtgtgatcgatcgtctggcgaaacgggcgttcgtcccgtaccgctcctcgcttcgtgttccgttggattgtgcacaggttggttggctgtcccgtaccataaatgctctttgaaacggttcccgacctgcttgaacttcccgtcccgtctgatcacgttctgttttgtgatcagtgcgtacttccgggtctttcattgctgccaatgctgactctgctgaccgcatgcaccgtacttgcgccgtcaccgctctcctgaactcgcgcactgcccatttcgatcccatcatactttctctgatccgcaattccgtgagcactcgcaccggcaattttgcctccagcaatgggccaaatgagtcgtcgtccacgttcgctccgagctgctcgagttggcacacgcaccgctcaaactcgtcgatcatcgtcgtcaggctgttcacattgtcctttgtcggtggcaagtgaagaagccgggcccgaattgcccgctgtaaatcgtcagtgtcgccgaatcgctcttttaacaggtgcacaaccaccgggtagttgccgtcggagggagggtagacttcaacagcccgccgggctggcgatccctcctttaagcagcgcagaagatgcaattgtttttcaaacccgggaatgggtttgtcgtccacagctcgcttgaaataggcccaaaatgtcgtccaatcctcgggctttccggaaaaagtcggcggttgcagccgaacagtctcgaatgttgtcattcccgtgatttcgtccctcccgtgcttccgatcatgttctccctcgtctcgagcatgccgtcgaatcgggtatgtctgacgctcccgatagtcgtcgttcacgtgagcctgctgcttttcgatttttggttgcatcagtgccggccgatgggctgttgctgggggaaacgcccccatctcgtctcgatttcgattgatccattctcgcgctgtgttcgtcactctcatgctggcgacggatggtactttggcacgccgctgaaaaatcccgtccaaattcgacatgacgggtgtcgcgactcgtcccattggtcttcggttgtgttgctgtacaccttgtccgccgttctgccatcgtttggccgccacttggaaggatctctcacattcttctatgttccgattttcgagtggaggtggttcgtcccccaccggatggctgttgttggtcccgaatgacccgctcaatcgagaccgcgcgattgcttcttcttcatcctcgagtgctcgtcgcatcgttcttaagtctccgatgtgctcgtccgcaatttgaagcagttcagctggtgttggatggtttcgcaactgcaactctttcgttgctgccggcagtggcgctgtcagtaggtcgtagaagaagtcctggtgacctgcgggttctgctcccgctgctgccattccaatctcgaaatgtccttggaagatttgagttgcctccttgagtcctctctccatggccaaaagtcgcgctgcttggtagcctgcctccccttcggtaaggtcttggtcgatcacttctcgagcctccgcaattcgagcggcgagagtcccggatgctctctcgattctgtcccgcgctgtccgtaccgggatggatacactccgcaaattgcgtgatgggaagggtagcatcccttgctgatttgtcgccacgcctgtcgccatgttgcttcctctcgttgcttcgtttactctggcaactttttgttgctcttcgttcgttgaagcgacgggaccatccccgtcctgcacattttcgtcgtgctgtgcgccgttgcgatggtggccctcattcgctgggtccatgttgctctcgcttccgttctcgaactcgaattgttgcatttgtcgtctctcgaaatgttgagctggagccccctgctaacggcaccagtttgccgttagcttctcgaattcgtgctcgttggtcgctcgtagaccgattggtcgctcgtagaccgattgttggtggctgcagttgccccctgctaacggcaccagtttgtcgccaatctttttttcgggcgggctttggccaaatgcggcttggcccagctgaggcgggattggttcccgctcctcttcaccgctctcgtccctttttcctcctgctcactccgttcgcttgtcgtaaagggaagcgcacccttttttgccgttcgttctgatgggtctgatgctgctgaccgatccgatcagcgccaaagggggacgagaatgggaggggggaggggtgacaaatttggattggtgcttgagagaattgtgcagcaaatcgctgcttgcttaacggcaccaccgacaagattttggtgaagggcttgtcggacccctttgagcagctccgaacgggcgggagttgctcgacaagattggttgtgaagggggcttgtccgaccctttgagctgctccgaacgggcgggagttgctcttcgctcttgactcgatgaaacgggttttgactcccgtttcctgcggcggatgctccggctggcgggagactgagaccgaaccgcgagactccggctgcgggaatctgaactgctcgaacttcgtgacgttcgctctcaacttgatgagcacgggtttcgactcccgtctcctcctgtggatgctccggctggcgggagactgactccggcgatgcgcgcttctccggctggtgggattagcggcgacgaacgggcctgcccttcggtggacggtttggcaccgctcggctcttccttccttctctgccctgcttggtttcgtcgacgacgggaattcgccccgtccctacggctgctccggctggcgggagactgacaccgatccgcgagactccggctgcgggagtctgaactgcttgaaattcgctgacgctccgggccaactcccggattctccaatgccaaagggaaaggaactgggatcgggagaattgggggagaacgacgagggcgctgtcgggaaagggaggggtcaagacgggaatgggcgcctccgtttggccccgcacgagaatttgccgaatgtgatggagtgtggagggtgcttttccctcctttccgagtcctccaagccgtttcagcacgaatttattaaagcaaaacgaataatgaataaaagcgacgaattgatcgaattgggcgatgggacgggggaattggaggaattggtcacaggcagaccgaatatgaagcgaaggggagtggaaggaagagaagagagtgaccccttggcagggggcgcttaaatagacaattttcgaagggggcgggcaaaaggccatgcacgtggacaaattgtgagagagacaaaaaacggacagaaaattctagaagcgaagtgcgaacaagggaaatgggcgcacaaaaattgaatgtgaattggcagatgtaaaaagtgagaaattctgaaaggaaatctgagcacaaagttggccgaagatgagccaaccgatgagaaagatttgaattgtgaagggatgcgatggggcaaaaatgggacaaaggaacgggcaaaatgtgaatggtacgaaatggagaaatgcatatgagaaattggatggaaaaggggcaaaaattaggaatgatcaattttgaatgaattgatgaatcgggactcgccccgttcttctccaagaacatccctcattctttttgcttcgattgagtcccgtcccgttcatttgtgcaataggcggggattgacccgccttctcgtcgccaatgaaaaaattggcgacattgcccgcggcgccccttgacagttgaagctccgaagcgtgtgtccatgagttgtagcaacgggttttcgaacccgttttacgattggcattgcgcctcgttgtgttgaaaggggcattgctcccccaccagcatttgccatggcaaggatagccatgcatcagctttttcgctggcagtccgtagttcacatccgtcgactttggcattgttgcccagcatccgtcatcgcaacgaatctcgattttgttaaattcccgcccactcacatttgtgactcctcgttctgcacactccgtggtgcatgggactcttgggccctctcgaaatggaaggttcgggtccattcccgatgctcgaatggatggttggcagccgaacgttccgacaatgctgatgagcatgatcagcagtgccatcccagttcttggttgaattgcgcctcgttttcgtggtacatgacgttccggggaccaaattgcccggtttctccgagtccttgccgatttcctgggttcaacttcaggtactgcttgaactccttggatgttttgttcgccgcgtacttcctcccccggattgttgggagttcgttcgagttcgttttgttgctgttcgaccgctggtgcttcgggaaattcgcccccgatttcgtctgcctgaactgcttgaggttcgtccgcgccaaacctatctcctccttcagatatcgtcgaattcggctgaaacttggtaggaacattgaggagacttggggccatcgaactatctcccagatattttttctcatgtctctgagccgaatgcgggcgtgccgaatttcccgcttttgattgtgccgccgaaggcacttctgctgcttttccgaaaactgctgacttcttcgtcgtcgttgcgctgccgtatttctcttccgaatcgttggggcccttcccccgagaattgtcgctccgaatttctcgatttgcctttccgtcaggcggtacggcttcaatttctcgtcgtcgattttcaacactttcttcgttactcttggtttcgtttctctcctccctccttgttgccgagggtttgttccgatccctcgtttcgctctgagtcttggctgctcgcgtttcttcttcgtgtcgttcatgtactgcttcgtcagctcggtcgtccgtttcgcccgtttttagccgcgcttctttcagcggccaaattttcttgatcggtcgtctccgagttcgtccgttggccattctgattatggcatttctgttatgctcgctcgctccttttgtctcgactatccatccgatgggccactttcgctggttagggtccatttccccaattggctccgctcgagacgtaataacttcgttcgcacccaaccgatcgggaccaaactctgcaggtgagttgtggcggtctcggctaacaatccctcgcgaattgtttttccgactctttcgttttcgcttccaatttcgacgtacttctccgatttgttgtcgtttatttgttcgagtttggtggatatttccgcatggcatggttgttaggattgataccgcgggagttgccccgctgctcgcttgggtgccttcgccgcacaaaacttgtccaaacacggtgtcaatcacatgcgcgccactctcgattttccgaaatccgaccacgtaatcccagaactttcgaatgccgatcattatttgaggttgcgttgtctgtgtgatggttcgcgggtcgctatcgggtgttgctcccgactcgatgagttctgttctgattggcgtacagatctgaggtacttcggacacctcaatgctctcccatttgccgtcggtccgtttgagtcgtaggcgataagttgctgaccgaatccgctgcttctttcctccgaacacttgaactgtaagcggccgcttgtcgatgggttgcggtccgagttgttgaattagctccgtatctgcgccgtcgacatggcttcccgggtcaagcaacaaagttgtttggcactcgtcttcgccttcctctgcagctgcgatcactctgcatatcatttgctgggccgggagtcggcttccgaaagtggtaaaagctcgttgttccccggcattcatatcgaactcgtctcgattgttctgctcgtctcgtactgcagtgaagtgagatggtcgatccatcccactgatcagcgtcgcatggttctttgcccttcgttcgtgctcagtgaaggatcgggattggccacccgatatgctcttccagcacagaagccaatgatggtcgtcttttcggcatgcgttgcaccggtttactcgttggcattgtttgaataagtgatcggagctcatacagcgcaagcatcgtttctgctcaatgagtctcttcctccgtgcctgtgctgtcggataggcttggcatttgcttggtcgatgtccacttcttaggcatagtgaacagttccatatctccgttgtggcaattggtccgtttgatgcgacacggggccaattcccgcctgagctctcgttctcgttggcatgtgtgatcgatcgtctggcgaaacgggcgttcgtcccgtaccgctcctcgcttcgtgttccgttggattgtgcacgggttggttggctgtcccgtaccataaatgctctttgaaacggttcccgacctgcttgaacttccagtcccgtctgatcacgttctgttttgtgatcagtgcgtacttccgggtctttcattgctgccaatgctgactctgctgaccgcatgcaccttacttgcgccgccaccgctctcctgaactcgcgcactgaccatttcgatcccatcatgctttctctgatccgcaattccgtgagcactcgcaccggcaattttgcctccagcaatgggccaaatgagtcgtcgtccacgttcgctccgagctgctcgagttggcacacgcaccgctcaaattcgtcgatcatcgtcgtcaggctgttcacattgtcctttgccggtggcaagtgaagaagccgggcccgaattgcccgctgtaaatcgtcagtgtcgccgaatcgctcttttaacaggtgcacaaccaccgggtagttgccgtcggagggagggtagacttcgacagcccgccgggctggcgatccctcctttaagcagcgcagaagatgcaattgtttttcaaacccgggaatgggtttgtcgtccacagctcgcttgaaataggcccaaaatgtcgtccaatcctcgggctttccggaaaagtcggcggttgcagccgaacagtctcgaatggtgtcattcccgtgatttcgtccctcccgtgcttccgatcatgtt

SEQ ID NO: 1598 - DNA, 1564 bp, Heterodera glycines
tttaataaaacggttagttttatttcaaattcgaattctttttgaataaaaaaattgacgccaaataaaagtttatttaataataaatacaatattatcattttacttagtgttaataaaaacaaatggtgaacttttgattgtcttgataatttgtgcaaaaaaaaaatcaaacgaattaataatgatatcattaattgataatttaattgatttttttatgggtttttggtctttaaactagtagccaggcgctatttatcatttttatatgaccatttaaatttgttatgcatttagctttatacaaaaatgtacattcccgagagcagttcacgcggtgaggacctcgcttttgctacaattgcttgcaattcgatgcttataacagcgccagcttcaacattttcatggtaaaatgatggttttattgaattacatcatctcattaatcctaaacattcttttggccatctgctatatgtcaaaacattttataaaattaaatgtttgagcaaacaatttttttaaaattattttacatatttttttggaaaattttttgaattttggttggcaaaaatgagaatgtttaggtccattttaacgaatagctgatgcccttttatattgcatttatttgttattaaaatttctgtttttaatttattaccgattttggcatatgtattaagaatttaaaaaattttgcttggcgtactgtatttttattattttttcaagattttttttaaaatttaaatgtaaaaaaaatttagtaaaattaccaacaaaaaaaatttatacaaaacagctataaaattaacaaaatatttaaggtaagtttttttggttttaaggtggatggcctatttgatgccggacaattcgccaatttattatagtgcccacttggaaaagacatatcgtggcaaggacaactttctgaaggaatggatacccttacgactgatcgatggcaaaaagataattcgtgacggttgatccaaatccaaaaattctaacctattttttaattaagaaaaaaaagtgaaattttgattttcatattgttacattatttctgaaaaactatattatattttcatttcatttttttgtgacttctatgttttttacttagggtgtaacataatttttgatacccaaattttttttattaaaatttttttttttaatttcaacaaaacacaatcatgattcaaaatgcccgccattattatcaataatatgttgccattattctggcaagagatcaataccaatggaaaagtatttagggagttagagttaagtaagtaaaaatggtcattttagaggtaggtatttaaaaaaaaataaaaagatacagagccagagaaatagtgattaaatagagcaaagttaggactataagaacacaaaaatataaaattttaattacaaaaattgaattatttgagagccgagactgaaaagtggtctccaaaaacggcatttttcaagaacaccaagtaacataatgttttaaaaagtgggtttggaaattctgaatttaattaaa

SEQ ID NO: 1599 - DNA, 5066 bp, Heterodera glycines
  unsure (1)..(5066): unsure at all n locations
tcaatgttggcacanaatttggcggaatgacaaaagattttctagcgtagcattgaattggcttagatcaatttgaccagtgatactgttgatgtggtcctttagtggcgttatactgtgctccgatggttcatatgccgtaattttattctcattgcttgcactttcacaactgactttatgaaagtgcccaaatatgtctaaaaaccataaatattaatgatttttagtatcattttaactattttctgatttgccaaaagcatgaattttaaaatttttaaccatttttttattattgtcctctgcaaggacaataaaacaaatttagctgacaaattagaagatagatttttctttttattcaaaattacccagtagcacaagcacagcaatgagtttgattttcatcaaaaaatggcggaataaatctaaaaaaataaaatataagatggaggcattttgtaatttattaaaatatgtcaattcagttcttttataagcctttttcataaagttatttatgtaaaaaacttttttttcatttttcttcattttgattaaagcaactaatattataaataacttaaagttgaagtcaaattttaattattgtttttggaaaaacgattaaaataaggagtgccagtttttgcctacacaaaattttgccctacagtctgccggaataatttagttttacttagcaaataaattcattcatttatatctttggttaacttataagaatgtaataatgaaaaagttcaaaaaaccatggcctctttaatcataaagaatccaaatatataattaatgcactaatacatggcgcaaaactttcataaattaaggatttataaatttttagtaatattaaaaaaggcataataatttaataaaatgaaaaatgtcttttattaatattcatatcaaaagagtgagcatccatttttacatttattttatgaatgcacttagtcccatgatgaaggttatcattataatttttataattttaatcgattctgagaattatttgaaataattcataagaaaagaatagaaaaaaaataaaattgtatgaaaaagtaataattttaaggttcctaagaaagacatttttttggatgggttaataattttttcaacaaaacgacttaaattttttttaattaactgaagataacgaattttcaataattgcctccaattgtccgtttttgtttttttgtttatgtgtcgttcatatgattttaaaaatcttattttaatgatcaaatttctttttatttgtttctatttgttaggttttagtttgacttaatatcaatttaaattctaattgaattttagcaacctaaaaaaatatttaaaataatatatttaatcatacaacaattttggcacatatattgtaaaatttcagaagctgaaaatttccaaacaatgatattcattcatggaaaactttccagacagacccatttcctaatgaaattgtgctttcgacgcgtaattgttccatttcctttagcgattaaaaattaataatgataaaaaatattattattattattagagccccggatttttatgtttttacatattttttctgcggcttagttatagtgagagaagctcaataatagaattttctccgaacaatttttaatttagagaaacttataaaaacacatatttggcgttttggcacataaaaaaatatggcacatgtttgggcacatattttgcttatcgaacaaatcacaaggtgctaagcgctcgaacggttgcgtaaaaattttagcttttataattacatatacattgaaggctttttcttgtaaaaaaatttgtgaactgcttcaattcgtgaccggaaaatgcgccagtggaaattttactgtcgtttcaaaattgcatttcataaaagcccaattccctaacaacttaattcgcttttgctgtcatcagatattggaaatttcttaagattaattttttttaagaaaaggcaaaacccggagaaaaaaaaacgaaattttttattcaaaattcgtaagaattatacaaaaaaaatgcgttcaaatttcccatgaccgctgcagtaattggaaataattatccatgttagtactgacagggatttgtcgctgcgtaattccattcacataagaagccaaaattgaaggatcaacagcagccgttgttgttgaacatttcatatatttttggacaaatttcagcgcatttcggcacaaaattgggtggcatctaagaattaattaattaatggtttattcagctttaatttaaaaaatggctcactttattgttgtaaacaaaatcaacaaattgttaattccctgcagaaacagagcaaattttccaattattagcaacaaataaagatcggtgatggtttgtgtacgtataactaagatcataaaaaatgaaagcaaaacgccaagaaaatggaacaaaaatgccggactcaattgtcgtcctgttcggatattttcaactaactgaaattggccaatttaaaaattattatcacataattacgagagattgaatgaataataattcttgagatttttagttgaatattaaatacaagaaataaaaaataaaaaatctcaagtaattaattgttatttgaaattttttagctatgttatattatttaaattacagtcattaaaaataaaatgattttcttattaattaaaaatttttaattgaacttaaatataatccttagtataattatttgtctttcccaattataattcgacctgatatttaattgccatattaaatgaagctgaattttcgcgattaaatcttcttttattcaaagccagcagcaaagtgatgatcttaattttttattttatttttcgtttattttaaaattaataaaacttacaaaaatttccgagaaacttgcaactgtcgcaaaaatttgtgtataaatacaaacattcggcgcgacaaacattgatgttgtagagtaataatatgcattcaaaacagacaataaaatctatgatcaaatttattataccgtaacatttaaatcgcttacgataattacaacacaaaacgaaagggtccaccaatttttgacagtttcatattttttgatgcagaaagtggccacaatcctttcagcaatcaacaaatgtcctgtaaattagtatcaattatatttaaaatttaatttattcagctttaaattaagcatacggtacagtgcgttcacctacctataaagttaccgtacaccagcaagaaataacggaacgcattcacaaaaaagaacagtgccatgggcgaaaacaggccataaattaccgaaaaaatttgaacaaatgcatacagaaatgcataaatggactgggcgacaagaatgaatttcaaattattgtgcaacagcgatgtttggtagacgagtcgccaaaacaaaaagcacaatacaacggttggacagcaaaaagcgcattccaccgcatttatggcgatgcagagaatgtcaaacgttggtttgggaagaatgccagtggcatttggcgtgccgtctttgccaatgctttcttccatttgattatgaaacgggaaatcagcaaaatatggatggaactaaattttccgaattcataaaataaaattaaacaaaaatttcggcgctatattaaaagtggccctttttgaaaattttttaaaaaagtcatgaaaatacatttccgggggggttttcggggccgctgatcacgaatatgacattcatttcgaccaatttcgaaccccggacccggatttatgatcagaaatttttcattgtaatttcaaatctctagacatatgtggtactcagaacttatgagacacatttatgataataacattatataggacagacacactatcctattttcctaatactgccccgatatgctggaaatggatagtgtgtctccttaacattgaattacataaatgtgtcttgggcggcgcgaattcagtgttgaaaagtgaaaatttacgattttcgactttttgttcgaatccgggtccggggttcaaaattggtcgaaatgaatgtcatattcgtgatcagcggccccgaaaacccccggaaatgtattttcatgacttttttaaaaaattttcaaaaaggccaacttttacagtagcgccaattattttcaattttattaatcctcacaaattttaaaaccggcccggcgagcgcccggccaaaattttggaccgggcccgggtcgccctgcaaaacgggcttttttttgaatgggcagcctgggcccggtcaagtaaaaccctaagaatccgagccctactaatcattttaggtattcatattttatatcaaatccttctatttcccgatttccgcaatgaaaaatctcagagtctctcatgaaaatacggtttctgatgagaaaattaatgtactgttcagaggtaccgagcccattgggtgtagtcaatcaaattaatgttttctttcagatgccatgaaaatgtgtgttgattcccacgacgaccttttatttgttgccttgaaggacggacggattgtagcgattgaccgacaaatgaagctggttggggtcaaattggaacgagtttttctattccatttttctttaggttgagaggtttggccattcaataacaaatatgggctgggatgggaaaagccgactcatcggattcgattatttgtacgacgatcagcagttgtgtttacttttggacgatgggaaagtgctgctctacgcaacaaataccaaagaggtaatgagataaaccacttcaaattttgccgttggcatttttctggtttgtttcacaaaattcgccactaattccaaatttcagcttaaatgtgcgatagaactgaaaagaaatgtcctcggctgttcctggagtcccgaccttcagctgctcatcgtcgccaccgactcgcatttgctgatggtttctcgggaattccnagtgatcgcagaggcaccgctccgaccgacgacagc

SEQ ID NO: 1600 - DNA, 1033 bp, Heterodera glycines
atcacgaatctgacatgtattttgtataatttgtaatacctaacccgaactcgaataaaaattgaaattatgaatttttcaaattatgattttttgttcaaatttagattaggaaatcggaattgatcaaaataattgaaggattcgtgatcggggaccccaaaaaccccagagaataaatttttatgactatcacaaaaaaaattttgcaaaacaaaagggtccccccttttgaaaaaattttcaaaaacggccacttttagactagcgcctaaaattgtatgagttaatttttgaaattaatttgtacttttttttaaacacaaaggcatttgaggtgctatctttgtcaatgctattttccatatgataaaagatttgaaaaaataaacaaaagaaaactttaaatttttggcatttcaaagcattataaacccaaagagaaagtgagtgagccctttggtttgttgggtgaaatcaaatgcaataattgcgaatgaaagaaaaaccgatgctcattagtgctaatgacattttgtcattttcgcacctgtcaaccaaattacttggccatattcttcaccataaatgttttctatccctttagagttaattaaattattgttcttaccaataaaaaaaagttattcacaagtttaagcaactctcaaatgtcagctgacctttgttcaaattcaattaattaatttttaaatgaaatattatgaatttatatgattatagaagtgctgaacttatagaaaatgatatttttaatttacaatttttgtttaataattaatttaattaaacaaaagaatgaatggcgtatttaaatatttgtacttttttaggttgcactcaaaatgggaattttattaacttcactaaaaatatccaaatttagttgattaaaattttcagaaatagatttattgattatactcttaattagtgggaaaaaagaattcatttttagattttcttcttcacaaaatttccggtgcaattttaaagttttcatttgtatttg

SEQ ID NO: 1601 - DNA, 6062 bp, Heterodera glycines
ttttttgaattttaaatttcttttaggctttcatcgaaagtattgagcagttcgccgctcaagtcaacgacgtcgagtcgctgtgcgtctttctgtcctcactgaaaacggtggacacaacgcaacaggcgatgttcgccccgttttatcccgaacgccaaccgacaaaccaacagaaacaacagccgaaggcgaacagatggacgacgtcagaaacaccgggcaaagttaacggaatttgcgaaaggatccgcaaccatttgatgagcctcggcgagggggaggaggaggcggggaggggccatttcctgcgactttaccccgtcgtcctttgctgttacgtcatggaaacgccgagccgagtgtccgccgctttggtcaatatgtgcacacaaatagcaaaagctaaaggtgagcgatgaagcaatcactaaacaaaataggggaaaattaatggtaaattcgttttaatttagaaaataaaaatggggacgaacattccgaattgattcgccaatggactcgccatttgttgaatttcctcaaggagagcgacctgtttaggcaagcactgaagacatatgacgtcgaaatcgctctaatggtcgcccaatcgaccaatcttgttagttttatgaaatgtttttgtttaattatttttttaaattcaggatccaaaggaataccttccgattttgaacgatctcaaacagaagacgccctcaacttaccaaaagtaacattttaatagacaatgatttttaactaattgaaaattaacgatgcaaatggattatcaagtgattttcccgcttttcaaccttttacagatttcacattgacatgcatttggaggattggaattcggcactcggacacattgcgactttgtcacaattgcaacagaaagatgttatcgacacaaacgatgaagacaaaagcgaagttacggagggtgaagcagtacaaaatacaccgaattatttggaggaatgccttaagctggtcagtttgtttaaactcaaattaaaataacaatcagccgacaaatatttaaataaaattaaaaaatcttcaaaacccattaatttatttgttaattaaggtccaacaacaaaaactttactcgtccgccttgaaattgttttgcgggagacccaactacaaagtttggaggggaagggggacaaatgaaaaagtaaataaaaacaaaacccaaggacattagcgcaattactgcaaaagaattggaaaagaacggccgtttaagagaggcggcgattttgcatgaaaaagcggaagatttggcgtcagcgatgagatgccatttaaatctgtcgcatttttcggaatattgtcgtttggccaaactgcacgagcaaagcgatgtgaaaacggagagcgaactgcgcaaaatgggcacgcaaatggttttcaaggacgaccatttgggagcagccgaagtgtttttgcaccttgggaaagaggtggtacattggcaaagcccaatcgaacaaattcaaattcaaaatgctttttattcaaattaattacaattaaaatgtataatatgtaaaagacaatttttcccctttcagaaaaatgttgagaagattttggagtgttacgagaaagcaaatgcgtggattaaattgagtgcttttgtgactgaaaatcaatccacgcttcatggtcagtttgattatattgtcaatacaattcagtccgattttgcatttctaaatatttgccaaaaagtttacatttaaaaaaataaccggtgagaaaataaagtgattaaggcattgtcaatcgtgcccaagtgcttatgtccactcgatgtgcgcagataattgaacaaattgacagttggcgggacaccatcacaaaacacacgaaacgattggaagtgctcagagaggaaaagcgggccaaaattgaggcgaagcaaacggcgtccggcggcgacgaccaattggacggattcagcgagtcgtccgtcacttcctcttccttctccgacagttcatccaaagagtcacgctcctttttcgagctttcatccaacgcattgaaaggaggcaaagattggtttaaactgcaaagaatggagcgtcagaaacggaagaagctgatgatcaaagagggcagtcattatgaggacggcgcacttctggtcgccctgaaggacatttatcaacgaattgacacccaacaaggtcatcacaccactcacattccctttgaaggctaaataaaaagtatcagaggggttgttatcataaaacggaaaaacatgcaaaaacaaatattgtttaacttttcgaacgcgacagggagaaatgaaatgcatccaaatacaattagtaatgttgaaatgaatttcatatttttgctcaacgatctaaaatctcagctgccccaaacaagcaattttacattgattttctgttcagacgaactgctcgaacttcttcccgctttgctttccatggaccttgtcgacagggcgtgtcgtctgcagaatgaaatgctcacttttcttgaatttgttgctgaagtccatgcgcaactttggccctctcatttggaggcatttcatttgacgggtcccctcgcattggtgaaaatataacaaataaataaacaaaaatattataaaaattatattgttttttgccagcatttcgattcaaattcatgtgaaccaatgcccaggaaaattcacctgacagatgaacttatgccgccgaaactgcgctcaaagggcacagaatggaaattggaaattgtcaaataataaaaaaaaatttcctttccccagtgaattgttgacttataaaatcaaagttttactatcatcccacactcatttgttgattttgttcaattttataaatccaaatttttatttttaatattttcattttctgatggatttaattccatttccgttttttcccaaattatgttggattttttctttgtcttcctcctattcgaatcaaattgttttgccgatggcgggtgcgaacagtttcagtgccctactctcccttttggtcgtcctcagctgcatcatggtcggccaggtgttcaagccgttgttggccgactcgcgccagggcaatttggctgccgggggttggtacttttcgtctccatttctaacaatgatttgctttgtaaagccttccctacctcactcatttcggcactccatttgccccccccccccctttttcctcagttttgggttcgttggtgttcgccttcgctctgaccgctctctccaacctgaagatggcctctgccggtgcttctgccaagtgtggtctgttcgaatgcgcttttgctctgttcgtcggctgtctctcctccgcctcaatccatcgcatttccatcactctctgtgtgctgttttccgctgttctcctctttttcctcaccggcatttctcacaaacggtacggcaccgatttgccgtcggctgcggcggtgggcggaggcaaaaagagaaagtgagaaaaagtgatcggctaatcaacgagaaatcgttcgttgggtcatttgcaccatattttaatttatcaattttaatatttatatgtaatcatcattaaattatttataaaaaatattgggtatgtctattttatggcattccttttttggtttctaccatttaatttcgttaattgtttttgtttttatccttatttttctcatttactgatttttggtcatttactgatttttggtctttttctgatgcgcttctttctcatttccctttttctcctctttttcattttgtcaaattgcgagttttcggctctcgaaatcccagctgatcagctgcaaaacggtgagcaaaacgcacaaaatttcttcattgtgccgcccgatttgctgccaaatggagaggcgaaggaaaagtgagtgaaaagagctgaaaaatcatttacgaatagtaaatcgtatatttgacacattgcaattcggatttcgaatctgtttgaattcgtctgttgttgctcccccccccataatgccgaaaagtctttgccgattttgtcttccataatgccgaaagcgccccccccccatcttttggcgtgttttcttccgcttttcagctgtttgccggagaatgcgtactgtgtcgggaatgcgctctctccgcagtgtttgcgttgcgactttccgcccgtttgtcctttcggtgactccgtcgtcgtcaattgcactccgtccgctgcctttgtcaattgcgctggtgacggcgtcgtcccccgtgccaatgtccccgccgttgttcgccttcaagcaaagtgccgtttctgttggcaacttgaacagagagaaattgtgtgtgaggagcgaaagaactgctcgaccaacgagttgacactgcacaggaccaaatgcagggcgaaaccgaacgcaatctgtgcgggacggaggcatttcttcaaaaatgtccggtgcgtcatcgatcagcctgactgttgataatgatgatgatccttttccgcttttccattgtcagttgccattggacgagtgggcacagctggcggaaggcactttttctgtccgtcactctcggcggattcggcgtggacaggttgagaaaagtggaaaaagagtggtgaatggttgtgccaatttttcgcttaggttttatttgggccattggaaaagtgccatcggaaaactgtgagtattttttatttataaataattatgttttaaaatatttgtcgaaaataaataaaaaatttctcaatgtttgtctgatttcgaaggttctcgttcggtggtcttggcgtgtggacacttctcgacattgtgctcattgccttcggttacattcagcccgctgatgaatcgctttacatttaaaagaaaaagcaaatcggctttatttgttttccattcagttgtatcaacttacaatttatttattatttgtttaaaattatgccttttttgaacaaaccaaaaattttggcattctttcaactcaaagggtggctaatttgtggacagaattaaaagccaaagggattgagaaaattatccaaattttaatgcttattgaataaataaattaaatgctttttatttgcattaagctttgtccatccgtctcttctgtcgttctttttgttttgttttctctatttaagcattttccccattttttgcctctctcttcgtaaatagcttctccttttcctcctcccctcccgtgacccttccgcccgggggcaatacatttagccaacaattaaccaccacaacaaatagccattgaacccatttcacaacggtataattagccattcattcccaacggcggcacaacgaaagggtgccgaatttggccatttgttggcccattttgggcatttccctcctccacctcctcttaagagagcgcaattgaattgtataaatgccgatgcaattcaatttgccttctccgttgcttctccctcccccgcccccttcgccctccgtcattaacttttgcccccccccccccctctcgtgaaacccgtcagtcccaatccattcattcatccaaagcagcaagggagccgcatctgttgcttactgctactgctgctgctgctgctgctcttttcctgcatagaaatggcgcaaaaaaggcgatggcactttttgttgtcccattttatgtccatgggattgctagggggggggggaagggagggagaggagagaagtccttccctcccccatccatccatttggtcagggaagataagaaattcgcaaaattacccatccgaaaatttggttaaagctttttctgtgccccctgccacccacgcattgatccctctcacatttccttctttttttgcccctcccccttaatcccctcggggcattgatctgtcctcctccgtttctctctggccctctcttctccgaccactctctctccgtccactttggcattgctttgactccgccccctcccccggccctttgccgtgttccgtttcacttccaaattgcccctc

SEQ ID NO: 1602 - DNA, 1887 bp, Heterodera glycines
tgcgacgattcgtcaactcagccaaatgtcaacgattcctcccatgaatgattcgtcaactcagccaaaatgcgacgatccttcaactcagccaaatgtcaacgattcgtcaactcaatgattcgtcaactcagccaaaatgcgacgattcgtcaactcagccaaatgtcaacgattcgtcaactcaatgattcgtcaactcaatgattcgtcaactcagccaaatgtcaacgattcgtcaactcaatgattcgtcaactcagccaaatgtcaacgattcgtcaactcaatgattcgtcaactcagccaaatgtcaacgattcgtcaactcaatgattcgtcaactcagccaaatgtcaacgattcgtcaactcaatgattcgtcaactcagccaaaatgcgacgattcgtcaactcagccaaatgtcaacgattcgtcaactcaatgattcgtcaactcagccaaaatgcgacgattcgtcaactcagccaaatgtcaacgattcgtcaactcaatgattcgtcaactcagccaaatgtcaacgattcgtcaactcaatgattcgtcaactcagccaaatgtcaacgattcgtcaactcagccaaaatgcgacgattcgtcaactcagccaaatgtcaacgattcgtcaactcaatgattcgtcaactcagccaaaatgcgacgattcgtcaactcagccaaatgtcaacgattcgtcaactcaatgattcgtcaactcagccaaatgtcaacgattcgtcaactcaatgattcgtcaactcagccaaatgtcaacgattcgtcaactcaatgattcgtcaactcagcaaaaatgcgacgattcgtcaactcagccaaatgtcaacgattcgtcaactcaatgattcgtcaactcagccaaaatgcgacgattcgtcaactcagtcaaatgtcaacgattcgtcaactcaatgattcgtcaactcagccaaatgtcaacgattcgtcaactcaatgattcgtcaactcagccaaatgtcaacgattcgtcaactcaatgattcgtcaactcagccaaatgtcaacgattcgtcaactcaatgattcgtcaactcagccaaatgtcaacgattcgtcaactcaatgattcgtcaactcagccaaaatgcgacgattcgtcaactcagccaaatgtcaacgattcgtcaactcaatgattcgtcaactcagccaaaatgcgacgattcgtcaactcagccaaatgtcaacgattcgtcaactcaatgattcgtcaactcagccaaatgtcaacgattcgtcaactcaatgattcgtcaactcagccaaatgtcaacgattcgtcaactcagccaaaatgcgacgattcgtcaactcagccaaatgtcaacgattcgtcaactcaatgattcgtcaactcagccaaaatgcgacgattcgtcaactcagccaaatgtcaacgattcgtcaactcaatgattcgtcaactcagccaaatgtcaacgattcgtcaactcaatgattcgtcaactcagccaaatgtcaacgattcgtcaactcaatgattcgtcaactcagccaaatgtcaacgattcgtcaactcaatgattcgtcaactcagccaaatgtcaacgattcgtcaactcaatgattcgtcaactcagccaaaatgcgacgattcgtcaactcagccaaatgtcaacgattcgtcaactcaatgattcgtcaactcagccaaaatgcgacgattcgtcaactcagccaaatgtcaacgattcgtcaactcagccaaaatgcgacgattcgtcaactcagccaaaatgcgacgattcgtcaactcagccaaatgtcaacgattcgtcaactcaatgattcgtcaactcagccaa

SEQ ID NO: 1603 - DNA, 1083 bp, Heterodera glycines
tcaactcaatgattcgtcaactcagccaaatgtcaacgattcgtcaactcaatgattcgtcaactcagccaaatgtcaacgattcgtcaactcaatgattcgtcaactcagccaaatgtcaacgattcgtcaactcaatgattcgtcaactcagccaaatgtcaacgattcgtcaactcaatgattcgtcaactcagccaaatgtcaacgattcgtcaactcaatgattcgtcaactcagccaaatgtcaacgattcgtcaactcaatgattcgtcaactcagccaaatgtcaacgattcgtcaactcaatgattcgtcaactcagccaaatgtcaacgattcgtcaactcagccaaaatgcgacgattcgtcaactcagccaaatgtcaacgattcgtcaactcagccaaaatgcgacgattcgtcaactcagccaaatgtcaacgattcgtcaactcaatgattcgtcaactcagccaaatgtcaacgattcgtcaactcaatgattcgtcaactcagccaaatgtcaacgattcgtcaactcaatgattcgtcaactcagccaaatgtcaacgattcgtcaactcaatgattcgtcaactcagccaaatgtcaacgattcgtcaactcaatgattcgtcaactcagccaaaatgcgacgattcgtcaactcagccaaatgtcaacgattcgtcaactcaatgattcgtcaactcagccaaaatgcgacgattcgtcaactcagccaaatgtcaacgattcgtcaactcaatgattcgtcaactcagccaaatgtcaacgattcgtcaactcaatgattcgtcaactcagccaaatgtcaacgattcgtcaactcaatgattcgtcaactcagccaaatgtcaacgattcgtcaactcaatgattcgtcaactcagccaaatgtcaacgattcgtcaactcaatgattcgtcaactcagccaaaatgcgacgattcgtcaactcagccaaatgtcaacgattcgtcaactcagccaaaatgcgacgattcgtcaactcagccaaatgtcaacgattcgtcaactcaatgattcgtcaactc

SEQ ID NO: 1604 - DNA, 1322 bp, Heterodera glycines
tcaacgattcgtcaactcaacgatacgtcaactcagccaaatgtcaacgattcgtcaactcagccaaatgtcaacgattcgtcaactcaatgattcgtcaactcagccaaatgtcaacgattcgtcaactcaatgattcgtcaactcagccaaatgtcaacgattcgtcaactcaatgattcgtcaactcagccaaaatgcgacgattcgtcaactcagccaaatgtcaacgattcgtcaactcagccaaaatgcgacgattcgtcaactcagccaaatgtcaacgattcgtcaactcaatgattcgtcaactcagccaaaatgcgacgattcgtcaactcagccaaatgtcaacgattcgtcaactcagccaaatgtcaacgattcgtcaactcagcaaaatgcgacgattcgtcaactcagccaaatgtcaacgattcgtcaactcagccaaaatgcgacgattcgtcaactcagccaaatgtcaacgattcctcaactcaatgattcgtcaactcagccaaaatgcgacgattcgtcaactcagccaaatgtcaacgattcgtcaactcaatgattcgtcaactcagccaaaatgcgacgattcgtcaactcagccaaatgtcaacgattcgtcaactcaatgattcgtcaactcatccaaaatgcgacgattcgtcaactcagccaaatgtcaacgattcgtcaactcaatgattcgtcaactcagccaaatgtcaacgattcgtcaactcaatgattcgtcaactcagccaaatgtcaacgattcgtcaactcaatgattcgtcaactcagccaaatgtcaacgattcgtcaactcagccaaaatgcgacgattcgtcaactcagccaaatgtcaacgattcgtcaactcaatgattcgtcaactcagccaaaatgcgacgattcgtcaactcagccaaatgtcaacgattcgtcaactcaatgattcgtcaactcagccaaatgtcaacgattcgtcaactcaatgattcgtcaactcagccaaatgtcaacgattcgtcaactcaatgattcgtcaactcagccaaaatgcgacgattcgtcaactcagccaaatgtcaacgattcgtcaactcaatgattcgtcaactcagccaaaatgcgacgattcgtcaactcagccaaatgtcaacgattcgtcaactcaatgattcgtcaactcagccaaaatgcgacgattcgtcaactcagtcaaatgtcaacgattcgtcaactcaatgattcgtcaactcagccaaatgtcaacgattcgtcaactcaatgattcgtcaactcag

SEQ ID NO: 1605 - DNA, 3636 bp, Heterodera glycines
tgaagctcccatttttttttttgcatttttcgcacattgaacaatcatcgcccaattttgtacactttttgtcacatttgatcaatcatcgtgcatattgaatgtttgatccactctaagtgccttaatccatttatccacacaaattattttcaaactatttgctgggtttattttttaaaagaggaatttggtgtccacttttccagtgtccaattttccatgtttttttcgaaacgaaatttcatcgcatgaaatgctcaagaacaacatttttacctgtcttcttttcaaacagagcgagtttttagcacaataagatacacatatattggaacttttggctcttaaaaaaatatttttgggttttggtaatttccggcacttattttgccgattttttaaaatgattttttttctataaaaaacttttctggcactcaaggttttggcactgcattatacatgtttaagatttttctgtcgtctcctataggcaccggtatttaaaaattaattaataattgttttaaagttaaatgcttaatttttatttttacttatgcctaaataaaaggcgcaatgaattgaaagtgccaatttataaatcacattcatattctagaattcattttttcatcatcttttgttgttgattttgttttttttcaatttttatatccattgcatttttcatatattttcaattaatccttcaaattcattaaaagtttgacatatttgtttcaatttcttttttcgatcccatttccccacatttctcgttttcgtaattcaagtcttcttcatttaccaaattaatctcccaaataccattgtcatttttaaataaaattaagttagaatgaatgtaaaatttaattaattttagcaattattgatttcttaaaaaaaaattcgttaatttttaaatttttttctattgggaaataaatttctgtcctttttctcaattttcattttctacttaaatttcatatttgtttattttttagttggacaaatttaagtaatttatttttaaggtttcatttaattaacaagtttataatttttctggtattgcgttatgaaatttgaaaggtttgttaaagaaggtgatcaaatttgataatgttcaatccatggatttgaaggctttttaggtcgtaggtagatgataaataatttatcgaactgaatgaataaaaaatttctaaaaaatatattttacaatttacactaaaaagttgaagaaatttttttaaagaaaataaaaaacccaattgcaaaaaaaaaatgggaaaattcaacagaacaattcttaatgaaaatgaattggaattaggaaacgacttgaacaagagcgcggattttgtgggcaatcaaaaaaattatgaaaatggcgaccaattgaaagtgtcaaatttgtcatcatattcatctttcagtgatcttctttctatataatcttttgcttttgtcaatgctttttccaatttctccttttcttcgttggcattttcttttgtcttttcgaaaattttttccattttcttctgaaattcttcccaaagattggcaaattcaatttcatttttgtttgatgatttttgtcctttttccttcacttttctgtccgttggtcctccgtttaaaatttcttttcccttttttacattttttagtataattttttcttttctattttttttccattttctaagccaattttggtctttttcttcattttctttctctttaatttcataatcctctaataaatattggcttcaccaatggtggcaattgttttttcgacaattctgggtttcttgcttaataaaatagaaacaaattaggtttttattttttaattttttatataaatacaaaaacttcagcataaatccgaaacaaatattcatataatatgtctaaatatttgcgatatttttcgcattctctccgtttatcttcttcagattcctccccaattttcacagtgccaattctttctggcgcgccaacgattcgtcaactcgacgattcgtcaactcagcaaaatgcgacgattcgtcaactcagccaaatgtcaacgattcgtcaactcagccaaatgtcaacgattcgtcaactcagcaaaatgcgacgattcgtcaactcagccaaatgtcaacgattcgtcaactcagccaaaatgcgacgattcgtcaactcagccaaatgtcaacgattcgtcaactcaatgattcgtcaactcagccaaaatgcgacgattcgtcaactcagccaaatgtcaacgattcgtcaactcaatgattcgtcaactcagccaaaatgcgacgattcgtcaactcagccaaatgtcaacgattcgtcaactcaatgattcgtcaactcagccaaatgtcaacgattcgtcaactcaatgattcgtcaactcagccaaatgtcaacgattcgtcaactcaatgattcgtcaactcagccaaatgtcaacgattcgtcaactcaatgattcgtcaactcagccaaatgtcaacgattcgtcaactcaatgattcgtcaactcagccaaatgtcaacgattcgtcaactcaatgattcgtcaactcagccaaatgtcaacgattcgtcaactcaatgattcgtcaactcagccaaatgtcaacgattcgtcaactcaatgattcgtcaactcagccaaatgtcaacgattcgtcaactcaatgattcgtcaactcagccaaatgtcaacgattcgtcaactcagccaaaatgcgacgattcgtcaactcagccaaatgtcaacgattcgtcaactcaatgattcgtcaactcagccaaaatgcgacgattcgtcaactcagccaaatgtcaacgattcgtcaactcaatgattcgtcaactcagccaaatgtcaacgattcgtcaactcaatgattcgtcaactcagccaaatgtcaacgattcgtcaactcaatgattcgtcaactcagccaaatgtcaacgattcgtcaactcaatgattcgtcaactcagccaaatgtcaacgattcgtcaactcaatgattcgtcaactcagccaaaatgcgacgattcgtcaactcagccaaatgtcaacgattcgtcaactcaatgattcgtcaactcagccaaaatgcgacgattcgtcaactcagccaaatgtcaacgattcgtcaactcaatgattcgtcaactcagccaaatgtcaacgattcgtcaactcaatgattcgtcaactcagccaaatgtcaacgattcgtcaactcagccaaatgtcaacgattcgtcaactcaatgattcgtcaactcagccaaatgtcaacgattcgtcaactcaatgattcgtcaactcagccaaatgtcaacgattcgtcaactcaatgattcgtcaactcagccaaaatgcgacgattcgtcaactcagccaaatgtcaacgattcgtcaactcaatgattcgtcaactcagccaaaatgcgacgattcgtcaactcagccaaatgtcaacgattcgtcaactcaatgattcgtcaactcagccaaatgtcaacgattcgtcaactcaatgattcgtcatctcaaccaaatgtcaacgaattcgtcaactc

SEQ ID NO: 1606 - DNA, 1035 bp, Heterodera glycines
aaatgtcaacgattccaaaatgcaacgattggtcaactcagccaaatgtcaacgatttcgtcaactcaatgattcgtcaactcagccaaatgtcaacgattcctcaatgcaacgattcgtcaactcagccaaatgtcaacgattcgtcaactcaatgattcgtcaactcagccaaatgtcaacgattcgtcaactcaatgattcgtcaactcagccaaatgtcaacgattcgtcaactcaatgattcgtcaactcagccaaatgtcaacgattcgtcaactcaatgattcgtcaactcagccaaatgtcaacgattcgtcaactcaatgattcgtcaactcagccaaaatgcgacgattcgtcaactcagccaaatgtcaacgattcgtcaactcaatgattcgtcaactcagccaaaatgcgacgattcgtcaactcagccaaatgtcaacgattcgtcaactcaatgattcgtcaactcagccaaaatgcgacgattcgtcaactcagccaaatgtcaacgattcgtcaactcagccaaaatgcgacgattcgtcaactcagccaaatgtcaacgattcgtcaactcaatgattcgtcaactcagccaaaatgcgacgattcgtcaactcagccaaatgtcaacgattcctcaactcaatgattcgtcaactcagccaaaatgcgacgattcgtcaactcagccaaatgtcaacgattcgtcaactcagccaaatgtcaacgattcgtcaactcagcaaaatgcgacgattcgtcaactcagccaaatgtcaacgattcgtcaactcagccaaaatgcgacgattcgtcaactcagccaaatgtcaacgattcctcaactcaatgattcgtcaactcagccaaaatgcgacgattcgtcaactcagccaaatgtcaacgattcgtcaactcaatgattcgtcaactcagccaaaatgcgacgattcgtcaactcagccaaatgtcaacgataaggcaactcaatgattcgtcaactcagccaaatgtcaacga

SEQ ID NO: 1607 - DNA, 3855 bp, Heterodera glycines
ttcatattgtgtttgatccaagcattgcgcagtatgacccttccgagcagtacggtagcggcttagagaaggaggaattcgactacttccggggcaccagcccttttaagaggggctacggtgttcagcgagtcatgagggggtgccgctcaaggaggcgttggtcagtgagggaaagcgcggaattgacactgtgctggagaaaggcggcctgcccaaacagtttggaagcggaagaacgggtataaaaagaaagagagcacgtgtgcctggtcatcaaacaataattggacgaccagttgcaaagacagcaagaaaacgagttcgctcagacgcatttggactttactaaataatggcatttcacaaaatcgacactgactccgtgaactcaatcaccaatgctttggactttttccgtatacccccttcaaatgtgagcgtctcgtcttcaaaagtgtttgagcttctgcccagcaaccctctgaccgacacgccctaccacttcaaacttcactcaagccaaaatttcattgacctctccaaatgctatttgctcacagagtttcgaatccgtaaggaaaacgttaatggacaacttgttgacagtagttaaccttcccgacttgtcgtagctgcgcgaagttttcgcgcactgtcccgtgggtttaggggggatttgttttgaagcctaagggattaggggggtttcgcgcactgtcccgtgggtttaggggggatttgttttgaagcctaagggattaggggggtttcgcgcactaaccccagggtatagggggaggggtttcccgcactaacccaagggtatggagttctgtttgatggtgccgtgagtccccagggtttaggcagtttttctttgatggtaccgaatccagattctcgaatctacctgtcaatcattttttgattgacaggtgtgttgacactggtggtgattgaaaaaatgtgcggccggggcccgactttggccgcacttgtcgtaggggcttcccacattagtcctagggtttaggggggttttctttcggtttgtccgctcggaagtgggggttcgggagtcccgacctgtcaatcaaaaaaaggggctctcccgccccatcctaagggtatggggcggtttgttcacttttatgttgccgcccaatggcagattttgtagccggtaagccaaaaaaaaaggtttacgaggggggggggggatttttcttcgtggtgtcaaaatattggattccagacttgtcaatcatattttttgtttgaaaaatatttttaaaaaattagaaaaacgccatggatagagagaatgagcttaaagtgtgaaaattttggcgcattttgtgtggatattgaaatacaaaaaaaagtgtcctaaaaccatcagaacaacgccgaatcacgtctttttttatgtaaccgctttgtgatttatatatgtccaataaaaaaagcaacttgtcaatttttttttttgctgaataaatttcattgtgttaggaacagggaaataaaattattgatttctttcaatgtgcgacagcacgaatttcatcagaaataaatttaaataattaaaaattattttttaaatgagttctaatttaaattcaattatcgatctgagtaaaatgggcgaatgacgaaggaatttgtgtattaacttactttatttttttactttaaaatactaataaacataaatattctcaaaaaattgtctcaaatggtactacaaatgtttcattttttgtgtggtgtgggcccccttttattttatcctcatcccaataaagagcaatttaggcccgcaggtgttgtgagttggtcggagagagggaggtgtcaagagttagagggtgtttctttgcagggttgaaagggattaacacctgttaatcaatgatgtatatagaaagggggttagacccgcaccagtgaaacccaaaaacaaaaaaacaacgaaagattcgatttaaaaaataagaattgacatatggtggtgaaacctataccaaaattctcattttttctggcttcgacacaccaatccaaaaattttaaggttcaaaattgtcatgttttggtgaaaattaatgaacaattcacatagaaaatttccctcggcggagcccatagccgaacccctttgttgaccaaatgttttttgaaaaatcgcgaaaaaaagacatacgaattttaagtcaaattaataattgcacaaaaattttatgaagaaaaacattgtatttaatttatcttggaaaacatttttaattcggatgttctgaagaagccaaaaatcgagtattcgagttcagctcatctaaagcaaagggtctgggggctacgctatcaatcaaacacctatagtgtattctttattaaaattaaaaataatattcattgatatttaataataataatttccatttaaatttaattaattttacattattacacaatttgattttcactttcatgatgtcggatacgcgatttttgacatcacatcatgcaaattgaattgaaacagaattacatcattgttggatagggatcaaagatcactttcccatcattgttatcgactattctctctccccctttctctgtccaacactatttccattctctctctctgcctatctcctccacatttctctgaccccacgtctttataagtgcgtccattccctcactcatggctctccgctccattcattggcattggacatttatttattattttattctcctccgtcgctgcactcctccgacctcatcaatttgtgcatttatttttatttgtgtttattaataaattgttgatacacaacaattttggcgcagtcagcagcagcagataaattctgcacatcatcaagccaaatcaaggctaattctgcaaaatcttcaagccaaatcaaggcatattctgcacaacctccaagccaaatcaaggcataattcagcaagcctaattttggcatttcaaaagcctgagcggcttccatcggacatcaataaaaactgatcacctgggtggtgtaaagttccgctgggtgcggtttaatcaacaatcaaaatggacgcacaacaacttcagcaaattttggacgcggctctaaaaaaatcagcagaagtttttgccgccgcactcaacattcaaaatcaaaacccaaacccagggtcatccacaacggcatcacttgcggcatcaatcaatgcccgcctcgaaaaattcaattataatccggaggttggacagacatacgatgcttggttgaatcgatacggaaaaatcgttcaacaagacggcgcttcgctcccagagcagtccaaagtccaacttttggtcggaaaattagacgaggaggaatacaaacggtacattgacagcattgcccctaaagccaccgaacaattcaactggctcgaaaccgtggcaaatctgaaaaagatttttggtgagacgaggtcgctcttcctccaccgtttcgactgttttcaaattcgccaaagccaaaaccaagacctttcgagtcttttggcacaaatcaattcatcgtgtgaaaacgccgaattggatttgactaaagaagagctaaagtgcatgattctcatcatctctttacgcgacgaattttcggatttgaaacagcgatatctccagcgaatggaagaagcccgaaccaatgggaaaagcatcaccctacaggaattgggcgaagaatgcaaaaagtagaaaattttgaaggaaaacacattaacactcagcacaaaacaatcaacgccaatgccattcgtccaaaccacaaaaagttaaggacaagg

SEQ ID NO: 1608 - DNA, 6107 bp, Heterodera glycines
cacttacacctcatcactgttattgacttttcccctccccctttctctgtcttacattatttccattgtctccctctctgcctatctcctccacatttctctgaccccgcgtctttataagggtgcccattccctcactcatggctctccgctccattcattcgcattggacatttttattattttattctcctccgtcgctgcactcctccgacctcatcaatttgtgcatttatttttattggtgtttattaataaattgttgatacacaacaattttggcgcagtcagcagcagcagataaattctgcacatcatcaagccaaatcaaggctaattctgcaaaatcttcaagccaaatcaaggcatattctgcacaacctccaagccaaatcaaggcataattcagcaagcctaattttggcatttcaaaagcctgagcggcttccatcggacatcaataaaaactgatcacctgggtggtgtaagttccgctgggtgcggtttctcatcgacaaaaactgatcacctgggtggtgtaaagttccgctgggtgcggtttaatcaacaatcaaaatggacgcacaacaacttcagcaaattttggacgcggctctaaaaaaatcagcagaagtttttgccgccgcactcaacactcaaaatcaaaacccaaacccagggtcatccacaacggcatcacttgcggcatcaatcaatgtccgcctcgaaaaattcaattataatccagaggttggacagacttatgacgcttggctgaatcgatatggcaaaatcgttcaacaagacggcgcttcgctcccagagcagtccaaagtccaacttttggtcggaaaattagacgaggaggaatacaaacggtacgttgacagcattgcccctaaagccaccgaacaattcaactggctcgaaaccgtggcaaatctgaaaaagatttttggtgagacgaggtcgctcttcctccgccgtttcgactgttttcaaattcgccaaagccaaaaccaagacctttcgagtcttttggcacaaatcaattcatcgtgtgaaaacgccgaattggatttgaagaaagaagagctaaagtgcatgattctcatcatctctttacgcgacgaattttcggatttgaaacagcgatgtcttcagcgaatggaagaagcccgaaccaatgggaaaagcatcaccctacaggaattgggcgaagaatgcaaaaagtaccaaattttgaaggaaagcacattggcactcagcacaaaacagtacaatgccaatgccattcgtgccaagccacaacaagtaaaggacaaggcagacgcaacaaagcaatatgccaaaccaaaagcggttccaaaaccgtatgagagcaagcacaaattgccaaaccgtccatgccaatcatgcggaagcacaaatcattggcgctccgattgtgggcacagagatgccaaatgcccaaaatgtggtaaaatcggacatctcggcaaagtttgccgaagcaattcttcaattcgccacatccaaacggtgaatacaactgaaaggcatgcacaaatcaacacagtcatcatcgacttaaattgcatggaaatcaaagcagaccatccaaaatggtggaaaataccaatcaaagtgaatggcgcagattatccaatgcatgtcgattccggcgcacaaatcacattgttcacaatccaaacatggattcaaatgggcaaaccgcctttgacgtcagcaaatattcgcgtcaaaaattgcaatgaccaaacatttgcaattaatggacaattcatgtgcaaagtgcaatacatggatcgtccaccaatgaaattgttggcatatgtgagccccgaaatcagtcataatttattgggcatgccatggatagaagctttggaggtgatcccaaaagagattatgcatccaaatcttcatccaaaaatcaatacaatttcaacgaaaaccaacgaaatcaaagacacggagacattaatttcggcgctcaaatcaacccactccgatgtcttcagcccagaattaggtcattgcaccaaattcaaggccaatctcattctgaaaaacggtgcaaagcctatctattgcaaggcaagaccagttccacatggcgctttggacactgtaaatgccgaaattgatcgtctactgaaaatggaggcaataaaacccatcgaatttagccactgggccgctccaattttggcagtcaaaaagaggaatggcaaaacacgagtgtgtatcgatttttccatcgggattaaacgacgcacttgagctacaccgccacccactgccacgtccagaggacatttacaatgcaatcgcaggctctaaatatttctcacgcctcgatttgcgcgacgcttatctgcaattggaattgtctgatgagtctaaaaagctgtgtacaatcaacacacaccgcggactcttccaatgccagcgtttaccgttcggcgtaaaatcagcgcccgcaatttttcaaagtttgatggacaaaatcattacacccatcaatggcgcattcgtctatctcgatgatgtgatatcgccaacacgactctcgaccaacacgtcaaaacgattaccaaagttttcgacaaaatcaaacaattcggtctccgaattcaactggaaaaatgcagttttcttcaaaaagaaaccgttttccttggttacataatttctgaaaatggcatccgcccggacccatcaagagccgaggctattcgaaaaatgccagcgccgcacgacaagtcaactctacggtctttccttggagcgctcacatactacggcaaattcatcaaacaaatgcgcgaaataagaagcccattagatgaattgcttaaaaaggatgtaccgtggaattgggaagatgaacaacaaaaatccttcgagaaagccaaagaaattatgctttcggatttattgttaacgcatttcgaccccaaattgccaatcattgtggccgctgatgcttcaaaaggaggaattggtgcaacaatcagccatcaatttcccgacaaaagggaacgtgtcattgaacacgcatcatgcactttcacggctgcgcaacaaaattacagccaaatcgaaaaagaggctttaggattggtgtttgcggtacaaaaatttcaccgcatgctctacggcagaaaattcactctgttgaccgatcacaagcccctactggcaatcttcggatcaacaaaaggcattccaatatattcagccagccgacttcagcgctgggcgttaattttgtcaaattacgaatttgatattaaatacgtcaacacaaaggcattcggaaatgccgatgtactttcgaggctcatcgcaaattacccgaggccatcggaagacatactcatcgcaaacatctgcaacgacactgattgctgtgttaattttgtttttgaggcaaaaattgagcaacttccgatcaccgcgaaaataatagcggaggaaacagcaaaagacgaaattttgcaacaaattagcgctttcaccaaacaaggatggccacaaaagctgaacgacattaaattgtctccttttcttccaaaaaagggacaaatatccgaaatcgaaggatgtctcgcctacggtgaacgaattatcatcccttcgtcactccggaacaacatcctcaaatcattgcattttgcacatcccggcattgtgcgaatgaaagccattgccaggaaccacgtttactggcccggaatcgactccgaaatcgaacgagtggtcaagcaatgcgaggaatgtcactcagccgccaaaaatcctacaaaagcgaatcttcagccatggaaagcagcaagcgaagtttttgagcgaattcacattgatttcgccggcccatgtgctgacggccaaacatacctggtattggtcgatgcttactcaaaatggccagaagtatggcaaatggaaaggacttccagccaactcaccatctcaatgctaaaatcattcgtgcatcggctcggaattcccaaagaaattgtctccgacaatggaagccaatttcgatccgccgaatttgcacaattctgcaaagaattcggcataaagcacacctttacgccgccgttccacccaatgtcgaatggggcagctgaacggtttgtcgacatttttaaacgatcaatgaaaaagtgccgtcaagagggaaaagattggcttcaaaaagtgcttttggcgtatcgcacgacaccaaacacggcactcaacggccattcgccagacgaacttttcctaggacgccgcatgcgcacaagaatcgcacttgtccatccggaaaaacaaaaactccagccaccaaacttggaaaattttcaacaattccaagggcagtacatcaaaaagatggaaaaccaattcaacataaaacatggagcaaaatcagccattttccaaaatgaggaaccaatttatttttggaatttgaaatacaataaagccacttggcttccgggaaaaattatcgaaaaattaggcacatctccgacgtatcgcatcttggcaccgacgcttggccgagccattcatcgtcatgccaaccaaatcaggcgacgtttcccaattgaattggaggacaatgatcaagttgaagaaaatgatcagacacaggcacaaaatccgccgcactcgccgatcgcgcataaaccgcagacgaatcgccagcaaacgcccgccgctgagcccgtgcatttgcgccgatcaggaagagccaaacaagcacctcaacgactggacctggacccgtcaaagcctaaatacggcttaatccgatcatgaatcccaaatcgagggacattcgacttaaggagggaggtgttggatagggatcaaagatcactttcccatcattgttatcgactattctctctccccctttctctgtccaacactatttccattccctcactcaggctctccgctccattcattcgcattggacatttttattattttattctcctccgtcgctgcactcctccgacctcatcaatttgtgcatttatttttattggtgtttattaataaattgttgatacacaacaaattcaaattaaaaaaataaattaagttagaatttattacaaaaatgtaccttataaagaagtaagagaacatttattaatgaaaagggttataaataaaaataaaactaagctatatttgcttaaataagtttattaaattttttggtaaataagctttaaagaaaacatttatattttagatataaatgaagtcgaatagattaataaaaatggaaaaaagtaaaaaaaagaaaaatttgaatttgtttaaagggatgtattttttattttgtgagatcccgaattaatgggtgtattttacaaaatttttagcggttttacgccaaaattactatttttaccattttagtctcattaataaaaatcatcattttaataaatttatgaaaaatttaagtcgttggcaatcaaaatacataaaagaaacaaaaatttataaaaaaaaagtaaagcgaactgaatatacaaataataaaaatttaattaaaatatattaatacatatggaaatataaattaattcaatatcataaacttgcaattagcctgtcgtactttcgtgcattgggcttctattgctcttcgatgctctgtgcgctggtacatttttttttaaattttaatgaatttaaataaaaaatcaatttctttgaccaagattttaaaataataaattcaaccaaatgatgaaaatgaattaaccttgaatacacaaaatttttaaatacaataaaaaattttaaaaataaatatttatagataaagcaattaattgaaaaacgcagatttgtctaattatttacaaattttaactataacactaatgacgacatagttcatggtgtatttgaaaatgaatttatatatgccaaaaaaaattctttaaagataaaaaacataaccaaaaaataaactacctttttgaacgaaaggaataaacatttaaaatgtaggagaagctcacatacttcatggacaggatctcgggacatta

SEQ ID NO: 1609 - DNA, 1005 bp, Heterodera glycines
acaattccaagggcagtcatcaaaaagatggaaaaccattcaaacataaaacatggagcaaaatcagccattttccaaaatgaggaaccaatttattttttggaattgaaatacaataaagccacttggcttccgggaaaaattatcgaaaaattaggcacatctccgacgtatcgcattttggcaccgacgcttggccgagccattcatcgtcatgccaaccaaatcaggcgacgtttcccaattgaattggaggacaatgatcaagttgaagaaaatgatcagacacaggcacaaaatccgccgcactcgccgatcgcgcataaaccgcagacgaatcgccagcaaacgcccgccgctgagcccgtgcatttgcgccgatcaggaagagccaaacaagcacctcaacgactggacctggacccgtcaaagcctaaataccgcttaatccgatcatgaatcccaaatcgagggacattcgacttaaggagggaggtgttggatagggatcaaagatcactttcccatcattgttatcgactattctctctccccctttctctgtccaacactatttccattctctctctctgcctatctcctccacatttctctgaccccacgtctttataagtgcgtccattccctcactcatggctctccgctccattcattggcattggacatttatttattattttattctcctccgtcgctgcactcctccgacctcatcaatttgtgcatttatttttatttgtgtttattaataaattgttgatacacaacaatcatattcacaatttttcgtcgtatttacgattttctcccatcttataaaagatgatcctaaatacgatgagacgtcgtgaaatgatgggaattgaaacaaaattttacacgatatgacatcatatcggagatacgacgggaattgaaataggccccagggctatgatcttttgtccgagattttagaaaatgtacagaagaaatacgaaaaat

SEQ ID NO: 1610 - DNA, 2110 bp, Heterodera glycines
cgcctggcggcgcagctgtagcgtttcggtgctgcttcgtttaagttgagccatggtatggggagcattttaaaaaaaaatttggcgcgattcgacaagtctgaagggtcgaaatgggcgcgcgcccgagcccgttttgcgccatagacagttatctatatatataaaaacgagggggggccgatttcaaatcgctgtagtgggcttccggaagcccgtaaaaatattccgtaaagcccggggagtatatgagcttcgaaattttgaccccaggtaaaaatccggaaaatccggaaatgttccggaatccggattctgacttttcaaatccggaattccggaattttgagcccggatttggattccccgggtccgaattagcggggaaaaaatgtttgccagttttccgggcccccggaaccggtccgaaaatcaggaaaagtgctttggcattttccggaagcccacctgacacttttcggggccccaaaagtgcctgatccggaacccgcaccggtccggtcaagaacaactttttgctcagtttttcaagggctttctccctggtcgggtccgggctccgctccctgtctttggcacccgtcctgggcccggcaccccggccgcagggcccccagccgcgccccccggcctctgtcgatggtcaacgcaggcggagcgtgtcggtgccagcggcttatttgtgcagctcgaccagctctacgcaacggtgtcgaaggcgtccggctgcgactgctacgagcggagaaaattggcgagaaaggagcgagaaattttgaaaatttgaaaattaaaaaatttgggggtgccacagtttccgcagcacattggcgttaagcgggcggcattagcataaatttaagcaaatttaattagattttgaccgcggcgcatgtttgcgcagggccttgggacggagctgggcactaatatttttgaaaatttgggccccggaccggttttcccagttccgtgaccgggaccctgacggggcctaagtaagctgatttagcatcagtttttaatgctctttccattaaaaaaaagcttattaataaatattaaatataaaaaaggttattgataaatttcgaaaattttgatttttcaataatgagccgaaattttgaatcgattttttgagtcctttctttcttctgtgctatttgcttttattgcattttttaatagcaaattctttgctctttcgattgactattttaaatccgggattcgttctcggggtaacaaattaaaaacttgggcacagtgaaaattatttttttgcagcattttggggtgtcgggaccggccgaactgcctgatcccgaatccggaacctgtttttggttccggattcgggatcagcgacctcgaaaaccccaaaaaagatgttttccggaagattttgagtacaaaatttgaaatctgaatactcaaaaggggggtggtatccattggggaaatcccaaaatggcatccggtaccgtagcttggctccggaaaccggtaaatttatggaaaaatatgatgattgtagagaatttttttctctattttatcagctttatcccgaatccgaacccctagattaagccgagaaataaatttttgaaaaatttttcggattttcgactttgcccctaaaaaaatcatttttgcctattatgagcgaactttttttagtgaatttcaccggaaatgcccatttattttaaaatttatttttaatgataaaaaaatcatttttgcctattatgagcgaacttttttttagtgaatttcaccggaaatgtccatttatttttaaaatttatttttaatgataaaaaaatcatttttgcctattatgagcgaacttttttttagtgaatttcaccggaaatgcccatttatttttaaaatttttttttaatgataaaaaaatcatttttgcctattatgagcgaactttttcttactgaattttaccggaaatgccaatttatttttaaattttttttaatgataaaaaaaatcatttttgcctattatgaaagaacttttttcttactgaattttaccggaaatgcctaaggagttttaaatt

SEQ ID NO: 1611 - DNA, 3713 bp, Heterodera glycines
tgctagggagtcaaaatttttttccccgcacgtctgctgacctgtaaggcttggaaaaaaaattgccgtctctcgccgggcgctttgcgctgagatataacttttcactctccaggccccgcccaacacctcccccgatggctaagtgttggacgggccaaacaaatgtcagaatcgtgttccccaccccaaattacccccggatactgattttcagaccattcggatgaatatgaaaatttcgattttgcttatcatcatatagaaaaaaatggggggggctcactgcaaatgtggtcgggacattgcgaattctgcacctatcgacccaattctttttgcgttagccaactgatctcccgctacaactttctaaccaggccaaagacaacaaaaaaatttgggaactgagatatgctaacttttttttgctaacttttcgaaaatcggctcatagcgcctggcggcgcagctgtagcgtttcggtgctgcttgcgaaaagttgagccatggtatggggagcattttaaaaaaaaatttggcgcgattcgacaagtctgaagggtcgaaatgggcgcgcgcccgagcccgttttgcgccatagacagcaatcttttgaaccatcaatgctagggagtcaaaatttttttccccgcacgtctgctgacctgtaaggcttggaaaaaaaattgccgtctctcgccgggcgctttgcgctgagatataacttttcactctccaggccccgcccaacacctcccccgatggctaagtgttggacgggccaaacaaatgtcagaatcgtgttccccaccccaaattacccccggatactgattttcagaccattcggatgaatatgaaaatttcgattttgcttatcatcatatagaaaaaaatggggggggctcactgcaaatgtggtcgggacattgcgaattctgcacctatcgacccaattctttttgcgttagccaactgatctcccgctacaactttctaaccaggccaaagacaacaaaaaaatttgggaactgagatatgctaacttttttttgctaacttttcgaaaatcggctcatagcgcctggcggcgcagctgtagcgtttcggtgctgcttgcgaaaagttgagccatggtatggggagcattttaaaaaaaaatttggcgcgattcgacaagtctgaagggtcgaaatgggcgcgcgcccgagcccgttttgcgccatagacagcaatcttttgaaccatcaatgctagggagtcaaaatttttttccccgcacgtctgctgacctgtaaggcttggaaaaaaaattgccgtctctcgccgggcgctttgcgctgagatataacttttcactctccaggccccgcccaacacctcccccgatggctaagtgttggacgggccaaacaaatgtcagaatcgtgttccccacccataaaggaacaaattttttttttttggtctgctggccaaaaattttttttggctgggaaattgaaattttggattttggttggtttttaaaaacagaatgttctaaataatgaaatgatcgatcatatttttttgttgtagtccttttattttgattactatatcttctttaggcaatgtgaggttgctctttgtcagtatgctattggattctctctatcttggttcgttcaaaagatatgtttcttgcgttcaagttggtttttgtcggaacttctcatactattttttcaataactcgtgaatgcgtaaatgaatttttggtaaaatagacctaaaatgtttgcatttttcatctctttcaagagactatgtgtgcattacgctgcgttttgtttaaatgatgtttgggtgaaaagtctaagagataaagttttttagttgcaaaattaacttatggttagagatgccatcggaaactattaaagacatgataatttttttatttatttttcataattatactacagggacattaacttatttcctgccagaggctttttttccttacgagcctttggtctaatttttggtaccttgaatttttggtcactttttgttctcggacctatatctcgaaaactgcagtcctaccttatatttttgaatggcctattttgaagcccttttcgagctctttcgatacatatatgtattgcttaagaaaatatttctctaaatgctttttaaaataaaaagaaattacaacgaattaaagcattttttgaaagaaatgttaaaatatgtatatctgcggaaatttacatttaaaaccgattattaaaaatttcgtctgttgtttattatcaatattggtttgctctatcagaatatgccaataattttattctatcttttatataaaaaaagatttgggtatttgaatagaaaattcacggaattgagactgtgatgttgaattgaaataacttttgtttaaacaaagatattatttttattaatagataaaaattattagttttagttatagatattttaaagagtggtaggtttggtcttcatagccttgcaaaaattggtagagctttagctgagatatttattggcttccactggccatttgataattttttttattggcatgcactggccattagacaattttcttttattggcttccactggccattagactattttcttttattggcttccactggccattagacaattttcttttattggcttccactggccattagactattttcttttattggcttccactgaccatttgataattttcaaatgttgcaccggtgatacgcatgttctagtagctgctattgcacagccagcagagcctttgcactgatgccacgcatgcccattcgccaagccctcgggttccaaactgctcacgggtgccacgcatgcccattcgccaagccctcgggttcccactgctcacggcgtgacaagcatgttccggtacacgcatgcccattcgccaagccctcgttttccaactgctcacgggtgccacccatgcccattcgccaagccctcgggttccaactggtcacgggtgccacgcatgcccattcgccaagccctcgggttccaactgttcacgggtgccacgcatgcccattcgccaagccctcgggttccaactgttcacgggtgccacgcatgcccattcgccaagccctcgggttccaactgagcacggatgccacgcatgcccattcgccaagccctcgggttccaactgttcacgggtgccacgcatgcccattcgcaaagccctcgggttccaactgttcacggatgccatgcatgcccattcgccaagccctcgggttccaactgctgcaagggtgccacgcatgcccattcgccaagccctcgggttccaactgctaacaggtgccacgcatgaccattcgccaagccctcgggttccaactgctcacgggtgccacgcatgcccattcgccaagccctcgggttccaatgctgcacgcgcgccacgcatgcccattcaactgagcacgggtgccacgcgcatgtgccggtagctgctgctgcacgaacatccagacacgcatctttcggtagctgctactgcactaacaacctggacggtgcacaccttacgcatctacacctcgaacggctagggcgcggctggctaaactgaaccgcgcatgccctcggagccggctagtgtgctatatatataa

SEQ ID NO: 1612 - DNA, 2562 bp, Heterodera glycines
gttcacatttttaggcaaaagtctatttttttcctgagctccccgtggcctgaaaagcacgaaaaaaatgtttttttgggctgttgttaagctacttttcgagttattagtgcctattttctaggcttttatttttagcgcctaaaaatttttgaaagagcctatttttgcctattttggcgttttgcccaaaatttgttaacaaaaatgcaataaaacgaaaatatttatatttacatagaataaaggaatctcggaaaatgaatccgggaaatgcacatttatgctcatttttcgtcaacgggagaaattggagcgaaaatccgtcgaaaattcgatgctgtcatcgcaaaaaacccgggctttgatacaatttttgatattggaaaaattctttctggtcaaaaaatctatttcgatatgcctcccaatctgatttctctttacaaatacgctccattgacttcatgtgatgtcgaacgatcttttttcaatttacaaatctattttaactgacaatcgctcatgtctatctcccaaacatcttgaaatgctacttatttgcaatgtgaatttcaataatgatttggttaatattgtttactttttggataaaattttacgattttacacccctaaatttgaggatttttagtgcctattttccatttttttattgcctattttgggggttttttagagcctaaagcctacctattttggcggtttttagtgcctataaatgtgagccctatatattaccatgcaaagtttcaccagctggtttaaagtttaaaaaaggtaaatttttaaaaaattaacacaattaaaatttttttgaatttggtagactatttaaagttgccaaatatacatataaaaaaaaatgcacataaatttttctaaattgagggtaattatccaaagtttcttcaaattcgtaaataagagttaaaaatctcgaaaatagctaattttacatgaaaaaaatacaaaataagctaaatttttaattttgaagaaaatttattaaaaagtaaaacttttcctttgaggactttttttcttaaatttctaatttttcattttcgaaaaataaaaaatttagttttttgaaaatttttggtccaattcggtcaaaaaggctgcttaatagagtgtgccatttaaataaaggatttttttagaaaatgccgaaatatccacttaaatcacgaaatatgcattcaaaaattcatgtattgtaaatttcgtcctataaggttcaaactaaattaaaaacattttttttgcccatttcatgggtattatggcgaaaagttataagcaataaattttctaaaaactctttttttgagtttttttctgccaataatttttttgaaaatgcacaaaattttttttgaaattttgaaggctaacagagagcatttagggttaccgaatgataacaaaaaattaaaatttggttacgctttttcatgggttttcagttttggctttccatagttcatgaaaaaatatgcatatgcatatactttcgacgtggtgcgacttttggggatatgcaacttggggaccgacatttggggacccgacttttgggacccgacacttagggaatccgacattttgggatggggatcgaacgtcttttggggatcagacatttggggaactcgacatttggggaccccgactttggggattttattaaaataaaaaaatatttaaaattttaattttatgtccaaacttagacaagtttatgtccgctttagtcagagttaattccctttgcaagaaaaaacaaaataatatttttaaaattaactctaattccggactctaagaaacagaaaatatgacctcggcattttgttgctgtacgcaattagacagtaaagtcgcctttaactttttgaatgcccttgatgaatttctgttcccgttggcccttgggaaaggcgttttaaataaaaaatggaaagggtttactgtaaatactaaaatgtattgtgatttgtctattgtgttgtggttagtatgggctcaaaattctgctaccgccacgcggtgagtccgaaaacagagttatttagaaaatattattttatttttcttgcaatggaattaactctggctaaagcagtcgtaaatttgtctaatttgagatagtcggatccccaaaagacgttcgatccccaaatgtcgggtccccaaatgtcgggttccctaagtgtcgggtccccaaaagtcgggtccccaaatgtcgggttccctaagtgtcgggtccccaaaagtcgggtccccaaatgtcgggttccctaagtggccggtccccaaaagtcgggtccccaaatgtcgggtccccaaatgtcgggttccctaagtgtcgggtccccaaatgtcgggtccccaaatgtcgggtccccaagttgcaaatccccaaaagtgggtccactgcgtttcggcgctcccgtttcggcgctcgcgtttcggcgcttcgcgtttcggtgatcgcgtttcggagatctcgtttcggcgctgccgtttcggcgc

SEQ ID NO: 1613 - DNA, 2838 bp, Heterodera glycines
tttactatataattattaattgccaagaataattaatataataataaatctacttgaatggacgaatttgagtttttgttccttcgaatcattatgggaacaacggaattcatctaaaatatttgtataatcgtatttgtaaaagatatatatttctatgttcgagttttatgtcatatttatatttcattttcctatgcctaaacgtaaataattacaatgattgcaaaatcaattttattttaaataaaaaactaaatttacttgaaactcccaattcatttttccatttgtaaatgctgtaccgagtgacgcccaatccttttgcaattgcatgttcgactttactagatgtatttattttttcatcctttttgaattcggtcttcattttatgaaattgatggacgagttttagtttttcttcattcgaataattatgggaattacgtacacctaaaataattatataatcatatttattaaaaatgtatattcctatgccaaaataataataaactaaatttagtataattgatattgcatctacctaaaataataaaactgtttttttaatattattaattgccaaaaaaatcataatttttttcaatttataaacgaaaagggctttgaatacccaaatcttttgatgttgttttttttttgattttactaatattttttaaatttttgaattcattcattttttgaaattgttccacttaaatcaggaattggatcgaaatttttcaaaatcagaatatcgtgcccaaaaaataagattttggcgttttggggaagaaataagcacttcatatatttgagtgcaatagggctcaaaaaatcagagaaattatggcccggccccagaaataacgcttttgtgggtcctgcggtgccaacagacgcatgccgaaaaattttgaaattttgtctagtttaataacagatttttgcccaaaatggacaaaaaaaactataaatttaaatcttaacattttaatttcactgatttggacccacaaaaatcagaacatttctgagaaatcagaacagacccaatccctgcactaattctattttttgttttctttgaataaatacgataaatttcattttattttttattaaatttttatatctaaataatataaaattaaatttacttgaaagtcccaattcttttttccatttgtaaatgttgtgccgactgacgtccaaatccttcgcaatttcttcttcgattttattgtatgtcttcttgtcacaattcttaatttcactccttctttcatggaatttattaattagttcttgtttttgttcattcgaataaatttttgtccctaaaattatttaatttctttcttcttaataaataaataaataattaatttaattaattatggtttgaatatgattatagaatttacttttctcaactacccccccccgcccaattaatttttggacttatttttagagccaattcttaccaatacttattttcaacaccaatcccgggatgaaaagaaattttttgaatcaccggaaggaccgggattatggacaaaaaaagaatacaacatttatggaataatccccggtaaaaatcccaatcctttgcaatcctaatagctctaaaaaatgccctgaaaaaattgcatttaattatttcaatttacaatttgccgttcctgtttcattggattcaattaatgggttcttttcttcaaaatttaacggtgtttgatttggttgctcatcagcagatggagaaccctaaaattgtcttcaaatgttttacaattttgtgcaatacctcattaaaattgtcatttggcactgattgtgcataaaataaaatgaaacaataagaaaaaataaataatttgaatttcattcttaaacaaaaatttaattttttgttgcagaatttctttaataaaaaaaaataaatatattttttaataaaataaaatttaatttaataaaatttttttagtttttcctgaattcattgcaaaaaataaaatatatataataaaaatgtacaattagataatatatttattcgaaaaaataacaaaaaaatatattaaagctaatccaattttgtccaataaatcgacaacgtcaatattttgtttgtatagggagtcaaattttttcatttttcattagcgattcgatttttatttaaaaaaatctgcaatagaagtgacaaatgtatgtaaattaactttaaaaatatttttaaaaaggccaaatttcgtcggcaaatttttacattttccatttttcacacctaggtaaaaattattccaattttttctcaaaatatttcattttgcataattaatttaaatataaatattttttaaacaatttctaattaataatttattaattttggttttatttaatttttattttcacataaaagtttaatttaaatttttaatttgcctataaatttttatgagacttcatttcttttattagtcgaatttcttctttatgattatggattatgaattttttctttaaaaattatattactaaatcctttattttatttgtttaatttttcacaaaaaaaaaatttcgtgactaattaaatatgaatttcaaaaaacgtaaatatgtttaaatattttgcaataacaatcaaattgtttatttccacaagcgaacacataacacaaatgtgaaaaaagcgggcggaaagcgagggcgacaacgacgacgacatcaaaaaattggggaaaattttaaataaattttgaaaattttttttcatttttttggcggcatcaaattcatcatgttcag

SEQ ID NO: 1614 - DNA, 4031 bp, Heterodera glycines
  unsure (1)..(4031): unsure at all n locations
gagaggtgttttttctctggcactctccctttattggttcatctctcgttttttgaaacgctgtctaagtgtataaatatgcaaaaatttgcagtcaatgcatcattattttcttcacttacaaattctgccttctgtgactgttgttcgcctcccctttgctcatctgtgacgacgacacttcgtgaacgaacatgacggacactgcaaatcgacagcaacgaagccgaggacgaggcgggagacgtccacgagcggtaagacagttagccggagaacacaattctgacatccatttctaacccctgacccggattcgaacaaaaacgcaaaatttcaattttcgacaaaattaaaattatgcaacaaaatgcacgagataaaacggagaacatgtttctgaacgcaagacatagtgtatttcaggcatatttgaactgtttttgttgcatgacttgaattttgccgaaaactgaattttcgagattgtttgagtccgagttagggattcgaaatggacttcatacagcgcccccgaaaacccccctaaagcatcacaaagccgctcattccttttttcctcttttatgggaccacttaaacttatgattaccaaaatttgacataaattttagtcaattttcagcatctgcgcgacagtgccaagaaaatcaccaaagcgtccattcttcgtctggcccgacgtgccggtgtcgcccgaatcaacgcaaaagtctacgacgaggtccgtgccgcgttgcgctcgtacttggaaaccatcattcgagacgcgccaaattttctgttccatcagggaattgaaccgaagagacaaataaagaaagtaaaaaggtttagccacttgaccacttatgatatgaacacatgctaaaaatgaaaataaataatttaatttatttttatcaaaaatttctgatccctcaccaattcccttctcttttctcacccagacccccattcttaccagtgcttatttagtcccgccgggaccgggactggcaaaaccgggaccgggatttctgtttttccaaaaaccgggaccgggatttctgtttttccaaaaaccgggaccgggacctgaaaaaaccgggatttcccgccccggtcccggtcagctcaactctacttaaaagaaataaattaataaaaaatagatataagaagcatataaaaatattttattaataaaaaagtaaataattagcttttaaatgtgattttaaacattttatatacaattagaattaattttaataatttttggaatttaatatgaatgataaaaataatttttacaaagctttgtcattataagaaacatattaaaatatttttcctattaattgttatattaaaaaaattttacctattaattgttattttaaatattttttgcatatagattaattatttttaataaagaaaattaaaaaacattaattgtaatattaattattaccaaaaatgtaccataatttattatttttacccagttgcaatgctgcgttttcctggacgaaagcctgtccgaccaacagccatgcttcgctttccgggtcgaaaaccaactcggcctgaaaaagtttttaaaattatttttttaaaattttattttaatttattgcctaatgcggctgttcgtttgcccattgcagattctcgaaggccaatctcggcaagatcattttcctgctcatttccagtctcgggcagaagactaaaaataataataataatttttaaaaattgtttaaaattttttaataaataattaatttgataaaatgaaaatgattaatgtttgaaaaatgtacatattaaaatgcactcattttatttaatttatttataattttcgattattgttttttgaaatttattcaaaattccaattaattttttgctactgttaattttgaccgttcctttattgttatatcaatatcgtactgagagatttaaaaagcattaataaaaaaaatttcatatttgtattgttttttaaataattaagtaatgtaattttattattataattaattatataattaattaaaggtactttttatcgttaattaaaaatgaattaattaatgggaatatttttcgttaattggttaattaattatttccattaccgaaaattgatgtgacggacgacattgggcttggcttgaattggcacattgtattccacttcagacggtgccaaaccatatgacggctgtttttcactgagcagcaacaaatcatagcgtctgttttgccgatcgtgtgcataagcaccggagacgggaaaggaccaacgttttcctaattttcattttttaaattttttaaaaattaaaaaaaaaatttaccaggccgaaatgacagacggccaagcgtcattgaacgcttttcaaagccgggctccacttcatattccgtctaaagcattttaatcatataactggtcgcatttgatttgtataccctaaaaatctaaggtagaaccctttttttttagtatacggtacattatacaaacgcttggcaacactatttttctttggtatttgcaaatacaatgtaatatttggcaagttactgtaccctgattcatatataactgtatataaaaaaatgaatactaaagtttgacaactctatttttctgtggtcttcttaactaatacaatatacgaattgacaagctacagtaccgtattgaaataaatgttatactaatgtctaaacaatacaatttttctttgctttttgcaaataaaatatgataattgacaagttactgtatacggatttatgtattatttgtatataaataaataaaccattttaacttgatctacatgactaactgcaccctgacttatattattgtgtagaacaatgactaattctttttaatcatactgtacctcccgctgttttttctatttaaatgaataacaaaaatttgtactcagactaggcacctacagtacctcctcctgttgtccgtcatatgaaatgctgcgtgtcggacgaaaaatgccaaggcgtgccccgttgcccgtggcaatggaggccaatgatacggtattagccaagccagaaatcagcagcaatacagcggcgccagttggtgaacagcaagcggggccaagaaagctccgaattgccattttcatgctagggaatggagctagagaaactaaaatcaaaataaaaaaaaaatttttctataaaatgatagttaatatttttaattaaggcaagtgaaaaattgttaaataatgaaaaagacatttcattttatttgggttcatttaatttaattggttatttaaaattttgtaatattaaaaactatttaaatgaaataaaaagaaaagaaaatttaattgttattatttgattattttaattaatttaatttttaaaagaaaattcattttaatgtttttaagttttttgaattaaaaagataaaggaaggaagttcaaaaaatgtgtgttttttatgatgataacctatgaattaacgcaaaaaaaaattgcatgtttcttcccaaattcaccgttgccagggcgctgaaataagtcataaaaatgtaaaaaaaaaaacacagaaaattggaaattttatcaaaaaagaatttttatcccaaaaaataaagttaaaaaaaaatatttatttaaattgatggaccaagaacctgttgaattctcatgtatattaatcaaaatttgtcctcaatctaatggcttaaaaaattagtaaagaccgacttattgaaaaaagcctgagcctggacctggaattccatgttagacctggacctgnatttcctggacaaaaagcgaggtccagaaaaaaatcctggctctttgaggcctggatccaggcctgggcctaggttttttaataatgcttaggaacatctaatatctaatttacaaaaataatatgtttttttcatatatctaatcattattttataactaaaagactaggattagttagct

SEQ ID NO: 1615 - DNA, 3401 bp, Heterodera glycines
  unsure (1)..(3401): unsure at all n locations
gcaaactatttagccaaattnntatntgggtgagtttgtcagataaatggaaaattttttgaaatatttttttcgtcattgtatttcatattccggaagtgttgttgaacactggcgtcataataagtaaaaaaaatgtcacgctttacatattatgacaaaaaatatatttaatgttttaaaaaatattatttaattcgttaaaatgatttttttttttgaatgtctgtctacaattatatttagcatgacgcaatcttttaaaataaaagaaaataaataatataattattcatttatttaagaatttcgcactttacataagagttattaaaaaaaacaatattcctaattagagggtaataaatcatctaaaactttccaaatttcctattaataaaaccttcttaagcttttcatattatgttttcgaattaaacgttaatgaatgaattctttaattcgatataaaaaattctgaataacaaattaacttttcaccaatacagttaattataattaattcattaattgggtcatttgaatatcatttgtgcattccgaaaaagcaagcgcattctttgccactctgaagacatgctccgcctgggcaaccaatactgtcacaagcaccggccttctcattaaatatgcattgcccatttgccaccatcatgaaaagcatgcccataccaattaaaatgtgcaaaatcatcattaagacgctgtacaatgacaaattcttcattttaatatcctttaaaaaatcaaaattattgctttttaaattggacaattgagcgccatagtcatttttatttattaaataaataaattttgcctacgaatttttgggaaaatttttcatttcttaggggtatatttttttaaattttttgggatcgattcttaggggtgtatttttcgtttttttttgctttggaatttcaagaaaaaggtcaaaataggtacaaaaagtgcgaaaacgccaaaataggtgctaacccctcatcttaggtgtctatggtcattacttttggaaaactaaatttaagctaacttatagcgatcatgaaaaggtatttttctgtaagcatcgggcatttttaaatatttttccnaattctaactgaaagcgatcaattattgttaattctgggcattgatgcataaaaaacaatttcattttatgagattaagatgaataaaatgaaattcaaaggggctaaatccacttttatattttccgaattgccgtttttatttttaatttttaaatattaatttttgctttaattattcctgtccatccctttccctcataatatttgtttattgcatcattttttttaatagtttttacacatattaatcccttagtatttatttgtttttattaatttaaaccattatttcttctatttatttctttccatttttttgcaaatttgaaattctatacaaaacccatttaaatataaaatctttcattattaatttacaatttttttttctaaattttatataaagttgagaattataaaatatatgggccggttattaatgtaaatttgtttttaaaaaatatatacattagcagtgtattcatcgccagagctgtataaaaattttctgtggttatggatttattgattcagaaataggcgtatttcaatttgccaacaaataacggatgatttgctttattaattggttttattttttcattaatatcattattatgagcatgaataatattataaaaatatattaaaaaaattcaaaactaatttttataatttaagatgaaatataatttttattttttcttatatttttgcgttttgttttatgcactatcagtgccagatgaaacttttaatgaggtttgaaagcaacttttagaaaatgaagacatttacaaaattttaggattcacaatctgctgggccatcaaaacaaacaccgaaaaactctgaaaagaagccactaattgaatccaatgaaacaggagcggcaaattgtaaagaaaaaaataaaggttaattagtctagcagccatagtccggttaagtgttcggtttttaaaaaacaaatcctcccgacttttcattatcccaataggatattggtgaaaacaaaattggtaagaatgaggtcgaacaaaggaaggtcgctaggttccatggagtttcgaatcaaatggggttgaagtgggggggggggggtagagctcacccccccccccctctcttcagatgctttcaatgcctcggctaacgaatggcgcctcgggcgtgccctctccctcgccatgttcgcctccctcgccctcatccgccgcttcctccactctctccgccatctctgcccgttctctccccgcacttttcctcggctctctctgtctctctgccgccctcctctcaatgctcattgtcctccgcccttccgctcgtgctttttcggtgctttcctttccaaacttttatttttaaatgaatttactcatttacgtctttaagcgaattaagcgatggatgaagcgaaagaaaggaaacgaatggaaagcgaagcgaattggggggaaaacggaggacggacggagggaaagcgaaggaaaagcgaagggaacggcggagggatgagcaaagccaatcagtgatattgagacaaatgcaaaagcaattattgtgatttaatatttattaattcatagaatgaaaaaaacaatcgtagccaccgaagggaaaaaaagcattgctgcggcgttttgtgctgtctttgccgaaccgttgcacaaattgccttcgcacgtgcatacctccaattcccctaatttatatattctaattatgtgattaattaatagcttttccgcttcacctttgctgcttttgatgtgcgtacagtccgcccttaggcgtccctccgcgtttttggcacaccatcgccacacgtgcccatctccgccttaaacaatgaaattcaatgtgagtgaacttatgaactatttcaattttatttgagttacctttttggtggtcgcgaaaccaaagtttgaggcaaattccatcggaacacaactgactacgaacgcggttgacgaagtgcncgaaancggtctaagaatttacaaattcagaactcnagtcgggaggacaccgcccatttggacaagaaggtatcgccgcgccggaatnttatgggatcgaaacccattattanatggttgaagcgatcagttcgagagttatcggctgagagttctctctccaacttctctccaattacctcaaagggatcggaccatttcgccgttctcggcactgtgcgcacttgctccagccaattgtgcccatttgggtcgtgcacttctgccatcagccgaacgggcgtcg

SEQ ID NO: 1616 - DNA, 1344 bp, Heterodera glycines
gcatgcgaaaagtaaaaagaaatctttcaattgctaaacgatggcatgtggcataatgggtacgcgtccgactacatttttcctagcctggttcaattccacgctatgcaaattatttttcccgttttatttttgcattttacgcaaataaattgccaaggaatctagcaaatttagttccgaaactccacggacagctactagggaccttcctttgtaagcaaaaaataatgcgggatattgggaaaagtaaaactatttacaatgagaaaatataaaataattaattatatcataataaccagggaacggatttttacgctttcaccttttttctttttgcgaatagcatatggtgagataagcgcataaaacacattttcttcgaacaattttcgatataaagcgactttttaacaactattttaacatttttgcttatgaacaaaaaactttttatcaattaggaaaaatgcattaaaaataaataaaaatgcacccctgagaatcgtttttttttcaaaaatacgcccctaagaatcaaattttcaaaaaaatttattataaatacatccctagcgatcgagttttcaaaaagcaaaaatactggccatgattttggcggacttaaaaatgtttgatttataattattcaaccgaaatggataatgaatgaatgaattttggaaaattcacacatttattgacatgtttttccaatatggttggcaactttttagcaactattttgccattttaaattctataattatattcaaaccataattaattaaattaattatttatttatttattaagaagaaagaaattaaataattttagggacaaaaatttattcgaatgaacaaaaacaagaactaattaataaattccatgaaagaaggagtgaaattaagaattgtgacaagaagacatacaataaaatcgaagaagaaattgcgaaggatttggacgtcagtcggcaaaacatttataaatggaaaaaagaattgggaatttcaagtaaatttaattttatattatttagatataaaaatttaataaaaaataaaatgaaatttatcgtatttattcaaagaaaacaaaaaatagaattagtgcagggattgggtctgttctgatttctcagaaatgttctgatttttgtgggtccaaatcagtgaaattaaaatgttaagatttaaatttatagtttttttttgtccattttgggcaaaaatctgttattaaactagacaaaatttcaaaatttttcggcatgcgtctgttggcaccgcaggaccaacgaaagcgtttatttctgtggccgggccatatctctct

SEQ ID NO: 1617 - DNA, 12016 bp, Heterodera glycines
  unsure (1)..(12016): unsure at all n locations
attataataataaaatcttttagccaatgttgagtgcgcatccgatgccgcctgttcagacgggggcgggggtattggaggtaatgggcgaataaaatattgataataaataaataaataaaaatgcatttcaggtcactgttcctgtgcagcttggatcaccaaggtcacgcgacaccgatgctggcgacatcgacatcaatgtaagaaaaaactttattaaactaaataattctttacatttaaatataattcatgattttaggccaatgaagtcgttgagcggggccagacctcacgtgagcgactgcctcagcgacgtgccgcgcaacgggttggtttgcgggtccgattcaatttgtccccagaagtagaagagatcccgagaggggaaagacaaaaaccctatcccgcccgtaaaattaggttgcttcccaattttgacatttcacccattcacattgaaaaatcccttgactgcccaatttgcatgtgcctttttgtgattggggatggggccacttctcttcattgctttcatatttttcacacgggttgtattgttccttggcttaggatccaccgaatttgtccaacttgtaaatattttttgccatgaataaatttttgacttaattaaaggcagggagaccgattgaagaatgctttgtgattgagcggacaacggcaatgcgcaacgcgccacgtaacacccgaggcgaaatttgtgagctgcgctttctgccgctggaggatgctgagcggcctgaccttttgatggaggcgctaatccaacatctgctggatcgagtgctagagggtcagccgcgcccgtccctgattggcctgcaattccacccgccgggctttgatcgcccttatgtcatccgtcttcgaccacctgagcagaacaacgctgcgacactggcggcagcgattgagcgactaaacgaacagtcggcagcgggcattgatttgttggcgggaaggacgatcaccaaagtgctggctgtgtggccccttgaagcaattcgcgcggacccacagagcggaggtgagctgtccgtttattaaatgatgcgttgtttatgacgaaaacgcaggcgcatgcgaccatgccgcggaacaccacgtctcgcataaagtgcagtcgctgatccgcgtcatcaaccctgacgacaggctttgcctggcgcgtgccgtccttctgggtctgagagaccgagagacgagaatggccggtggcggtggccgtgcagcactttcggcgtacgccattcgtcaagaccaacacggcgcggatgctgctgatctactgaccaatgccggcgtcgccctcaacaaacacacgtacacgcttgatgacgtacgacaacttcaacaatggctaaacaatcagcatggagtggggcaaattcggctcgtggtgttcgagaaagagcaggagtaccggatagtgttcaaaggcgatgggtatgttaattattttttagtggattagtcaatgatatattgaagaattgccgcccgcttcatctctgcattttgttggagcgcgcgcattacaactatattgggcgcagtgagcagctgttcaaagtccccggctactgcattgactgtgagcgacgggcggatgcgcgttaccatgcctcggggtgcaaagttgcgtgtcgcctctgtctccgctttggtgccggatacccgtgcaagtcggaacaagtaagtattaatttgttgtcaatcatgtaattattttttcaaaaaaagttgccaaacggtgaaagcagtgcccgtcgttgtaacgagtgtggcttcgtcttcccctgcgacgactgcttcaactaccaccttgtcaaccaggcaactgacccattggacggccgtggtttgcgacagcgtcgtacgctttgtcagtggcgacgattttgccgagactgtggccgtgttgcctatcttgggcttcaccagtgtccaccacttggccaagccgatgagggagcgcaattcaggcggctgttcttccattcctttgacaacgcagcggcagacccagtggaacaatttttggactacctgacgcgtcatgggccaaaaaatgcgcatacggtgtgcatcgcgcacaacggcggcaagtatgattttaacctcgtgctagaggcccttcaccgtcgaagtatgccgcccaaacgactatgcacaaccggcctgaagatctactcgatgaagctgggcggatacaaccaaaggcggatcaccttcaaggactccgtcaactttttcgtctgtcaattggatgcgctggtgaagagcttcaacctgccacaacacctggcaacggttaagcccttcttcccgtacatgttcatcaagcgacaacatctgcttgagaggctggaaggacttcccgggcttgactactatcaaccggacaccatgaaggcagagaaaagggccaaacttcttcgttggcacggcgaaaacaacaacaacggcaacagatttcagcttcgtgagcagctgatcatgtactgcaccaacgacgttgccattctgcgcgagtcggtcatccgttttcgtcatctgatcgaagagcatgcacaaggccttgacccattcattgtggcatcaacggcggctggtcttgcgcttgccacgcttcgtcggtgcttcctgccggcaaaccatctcgtccactcaccagaaggcggctacctgcgtgggcgccgcgcatcggctgagtctcagcggtacatccgcttcttcgagctggagcaccccggggcgcaagtgcaatgcgcgagctggtccgtgggggaggcgcacattgaagacacgggataccgcgttgatgggctttggcaccgccacccgccccttcgtcctctcgccatcgagtggatgggttgcttttatcatggtaattttttttgtcttgtttcttttctttttcataaccaacaaaaccaaggctgcccaacgtgctttcccgagcgacagcagcaactggcagcggggcggacagcggaagacttgtacgaacggacggagcaacgcctttttgagttgacgaacctgcacggatgtgaactgcacgtggtttggagctgtcagtggatggagcgtcttcgtcacgacccggagctgaagcgcaggtacgatgccgtgttcgtcccctgcccgctggacccgcgcaacgacgcactcaggggaggccgcacagagccgttcaagctccaccacgtgtgcagcgacgacgaagagattctgtgcatcgacattgtcagcctttacccccacgtcatggtgggttttctgtgaaggtgttcatttcttacggataaaaaaaaaattcagaaggccaaccgcttccccgtgggcaacccacgggtcgtgacgcgtgaagtattgctccatccaccaacagcaccacttccgtggacatctccggaaaacaacagcttccgagggctgctgcttgtccgagtgcttgcgccacgcaacatccgtgtgcctctgctcggctaccgcacaaaggatgggcgcttcacctttccattgtgtggctggtgtgccgatcgacgacagcagcggccgtgccgccacggagacgacaggcgctcgtgggtgaccgcctacacgcacgtcgaactcaacaaggcactccagctcggctatgtggtcaccgacctatttgaggtagtcactcatttaaaaaaaaaatgttgtgcacgaaaacacaaattaggtttgggactacgacgagtgggacggcacgctgttcagcagctacgtcaacacgttcgtcggtctcaaagtgcaggcgactggttggcccgaggggtgtgtcacggaagagcagcgtcaagcctttgtggaggactttgagcgcactgaggacatccggttggactcgtccaaagtggagttcaaccccggcctgcgcctcattgccaaaaccttggcaaactccttgtggtaaagatttttggcttttaattttgaaaaaaaaaagagacctacagggggaaacttgcgcaacgtgtgggccagacggagattcgctacacgcggactccggccgagttccataagctgctagacgaccccacgctggacaagttggactttgtccacgtctctgaccacatggaccgctgcgtcgtgcggaagcgacccgtgttcgccaaggcgccactgacgaactgcctcccggtcgctgcattcgtcacatcgtacggccggcttcagctgtacagctatatggagcatgttttggccatcgacggtgcggagctgctctactgcggtatgtttgtcacaaaataaaactttctgtggacattactatgttttagacacggactccatttactacgtcaacaagatgggaggcccgtgcgtagcggaaggagaagcgcttggccaaatgaagcgcatgagcacagcgcccgccgcatcgtcgaattcattgcgggtgggccgatgaactacggcatccggcacacttcgcgggacggcaccgatgaacgaaccaacctcaagatacgcagcttccgcctatcgtacgcggccgagctgctgatcaattttgaggcgatgaaggacctgacgctatccacttacaacatcgacggacccatgtgagttcattaattaaagttatctttgctagtcaaatttttttatagcgatgatgtgttggacaacgatgacccttacgtgtacggcggcggcgaacaccgtgccatcctggtgaatttcccgcaaattgaccgcaatgtgtacgccgacctcttcacacgcgcgatgcgcacaaagattaccggccctactacgccaagtgacgtgtttgcccggggatgcagacacgccccttggctatgtggaggatggactgccgaacgatggacaacggacgcaacgacgaaagagaaatttggttgatcacgaccccacccagccagggcattccgggtggttctgatgttatgatttattgtgattttatttatttttgtaatatttcctttaattaaatatttattcattatgtttaaatttgtacaaaataatgtgaccaataaattacgcacgaaaatagtttggtataatattagacaaattggtaaatgactggtgcaaaatatcaagagactgggcccccgtgacaatgatcttccccgaaatataaactaggcacgtgactccattcaacaatttacaacgaagggctgggaaaattgttgggtcatagatgccacccagcgtgttttgcagtcgctcaacactgatccgttgggggaaggtttgaacaccgacaatgttgaccacacgcagctggtggatgtccagtgtgatgctctgcgtgtgttggatgcgccacaaaacgcgtgccctcattttactcgcactgcttgggtggggcactccggtgaggaccacacgggccgattggaagaccagcgcagccacagttttgcccgctgttgtacggatgcgaatgatgatagcgtgaaagcgcctggggttatactctgtgattgcgccacgttgcgcaattgtcaaaaattgctctcgagttaggggttgaacatttattttaaaaacaacagtacaattggaaattgaatacatctacaaaacaatggacaaaatttcaagagggaaaaaagttttgtgatctccgcctccaaattcaacgacgcacggcaaattggggtggcgcaaacggatgccgtgttttatgtaatagtgcatccggaccttcaaatttttttttgcactcacaaaaaataataataataaaaaaccgtgatgccgaggtagcctcggtaggctggggccgagtgggtgtccaggatggacaggtcattacagcacaccggaaaattgctcacggacggccgcaggtgggcggtacgcagttggacggagcgcaaatgctccacaatgtcccggcgtttctcaatgcttttgaagagcacatgcagctcatgggcactgcatttgaccgcttgcagaggtggtccacgagcgggacggggcgacggcgttcggcacacgtacatttttttggggtgcctaaatttaaaatttaatctcggattaaaaccaaacagcttgttgatggcgactcctcaccaatgggggccagcggctcgcgcttcatctcctcgtcaatgaggctgatccagctgggatcctccgcctcctcctcttgctttttcgttgactcttttttctcgttgttggcgtcctctaaatccatttcaggataagcgttgtttatccaatcggttgcaagaattaaatccatttttttaaatctattaaaatgtaaaactataaataaaaagaaaattccattaaaaaaaaataaaatggacgccttccaacaatttaaaagggaggatggacaatttcgtcatccattcacaatgattgtgtctgggagcacaggcagtgggaagtcagagtggataatgcgtctgttgcgaaatgtggacaaaatgatctctacccccattgaacgcgttatttatagctatggcgagctgaacacaaatgtagtgaatttacagcgcgccggcaaagttggcaatgtgccagtcactgtacacagcggcgtcccacgagcggaacaagtgcgggagtgcgccaaaaaagaaaaaaccttactggtgctggatgatttggtggtggggatgagtcagcaatatttagacgcactcttcacccgtggctcacacaattggggcgtcagcgtaattttggtgactcaacacctgttcaacaaagagctgcgtgtggcgcgcacaaattcgcactatctagtgttaatgcgaaaccctgcgggggctttgcagatatgccaatcgccaaccacctcttcccgtcaaggactgcccattttattgaggcctaccgggacgcatgcgcgaaaatttttggctaccttttggtggacatgcacccagagactccggaagagatccgccttcgaacaaatatatatgaacaaaaacaaatagtttacatgccaaaatgagaaggtcacaaatgctagcaagaaacgaattctttttggagacactgtgtagttctaaaaaagcgaatacccttattcgaggcgcatccgatgagcaacttttgtgccttgtcgaaatctgcctaaacattctaaagggacgggtccctttgcgtcctcggcatttgaataagctgaaagctcatacacaggtgcttcgccgtctcgctcgcacacgctgctctcgctcagccaaaaaggttttgctacagcacggagatggcctccccgctattgtggggctcattgcgtcaattgctcttccgcttattgcggatgtcattgaaaattataaataaggtgcaacaaggtaaaaaaaaattagtaataatgcagcatacaaagcgctatttgcttgtccccgaagaaatttatcagagtttggcagcaccgccaccggctgacggaacaccaattgggctggtccgcacccgaattaaacaaatcaaaaacgatgacggcataaatgaggcggaacgggcaatcaaatatgagcaggaacttaagcgtctcaacaagctcacaagggacgaggatgaacgtcccgtgggtgttaaattagaaaatttgagtgacgtggttgacgccatgcccaaaccagtcaacgtcagaagaccaattgttgtcgctacgcggcgccatctcaaggttgggcgtgcgcgaaaagaaaatgttgaacaactagaagatgatgatgatgatcatgatgatcatgaccatgaaactccaaagccatcgagttcaaataaacgacaacccacacaaacggaaatcttaaaattaatttataaaaacgcccaatctcttggagtgtctgaggaaggacaggtcttgagagcgggtgggcgaccgtttataaccagcagtgtttatgacattgttagtcacctgctgaacaaggacaaacgtgctcaaaacaaagagccaactgcattcaaagaatttgttgaaagggcaagacagatcccgctcttgagtaggcatttataaaaacatcacactgaaatttaagccatcattatggatttgaaaaagcttcgcttgctcgagtttttgtacaaggacctaagttcgcctgtcgcattcacgagcgttgaatcgctgctgagagaggcgcagaaaagtcaacgaaaaattagtcgaaaagatgtccaaaattatttagccagccagcgtacatacacactgcatcgtcaggccaagcggcgctaccgtcgattgccaacattggcacctggcttacacactgaatggcaggccgatttggctatatttgaccgacttgctaaacaaaaccgtggctacaagtacttgttagtctgtattgatacccttagtcgacaggtgtttgtggagcccgtaaagaccaagacgagcgctaacatgataatagcatttggtcgtatattcaaaagatcaaaatatatcccgtggaaggtgttgacggatcagggaaaggaattcactgcccgcgcagtacagcatttcttccgagctaaagacgttgaacgcttttgtatgctcacttcaccccaatttcatgccggaatggccgaacgtgcgaatcggagcatcaaagagcggctttatcgctactttacggagcgtaacacgtacaagtggattgatgttgtgcaagacattgttcgtgcaattaaccactcgccaaattcgagcattgaaatgcgcccagcagacgtgaactttaaaaacgcagaagcattgcgacaaaaattacatgatgcagctgaaaatgttgtacgacgccagccaaaataccgtgtgggagatcgcgtgcgcattgaaaagtacaagcacgtgttccaaaagggctatctcccacgcttcaccaatgagctcttcactgtggcagaggtacactctgagcgttcgccagttgtttatcgattgcgtgatgaccataatgaaattattagtggttggttttacgcaaatgatttatgcaaatcactagaagacaaacagcaaaaaatgtatgaaattgaaaagattttggtgaaaaagaggcagaacggtgtggattatgcacttgtgaaatcgaaagggtatagcgctcgctttaatagttggattcctgcaaattcaattaccgagaaagatatataaaaaagcactatttaataaatttaacaaaaatgccttcaaattctttttatgttgttgttccgtcgaacaccaatattgaaggaaataggacaaattctttccgagtgcgtttaccgtgcaaactacaattcaattcggaatgggaggtgggtctggcggtgattgtgtatccccactcttggccttccataggcaccgtggagcaacagtttgttcaggttgagtggcaaacgggaaatacggtgcggattgagcttccatcatcaaatgtcaccaacccccatgagcttggcaaaaatttgtacagactcctgggtgagggcagcgatccgttggcaaaaaaggtacgctcaacgcagaattctttcatgcttacgataaacaaggctcgtcggtggaacagagaagagtacattaagcgaaagaccaaagaaaaacggggcgtccgtgacgaagagctgctcctacaggccctgttgacagatactgggacagtggttgacctcaacatcatgacccacggccttctggcacgggaaaagcgtgcggaaaccagcaatatagcgttgagaatcccagctgacgataatgattcatatcaacaaaaattggatgaatacttttctagattaagtgagaaaaatttgagcattcttgatgaattgggcatgacaaaattgaccgccgaaatcaaaaatttgagcgaagaggaacgtgcgatccttgaagccacaaaggaaatgggaacggaagcatggattcaggcgtatcgtgaaatacgtcttgtctgccaatttaactacgacgtcaataaaaatcgctttgttttaaacactgacccacggtacgttaaaaaggtcaaagtctcgcctcaactcgcgtacattctcggtttcaacaacacggaatttatgcaggccgaaaacgaggcgaggtttatgccggacatgagcgggggtgtgtcatcctttcacgtttacacgccagaccttattgaaccaatgatgattggcgatgtgacggccccagtgttgcgcattgtgaccatacgcggagaccccgaccaagtgattgaagaacaattttttgccatacaatatcacaaaattttattaaaggaagtttctgaaattctgattgaaatccgtacaaatagcggaagtttgatgccattccaatacggaacttgtacattaactttactttttagaaaaatgtcctatttttaaaaaaatgaacacgttggaaattgacaaaacattggcaagaaacaacgtgactcgccactactatattggttcttttgcggcagaccaaataccagccggagcaattgtcaaatttccacattgtatggtggtgaatcttgaccccagcacctcgcgtggctctcattgggtatgcatttattgcgcttctcctttgcgtttggagtattatgactcattagggatgtggccaccacccagtgttcttattgtgaatcatttgtcacgctacaaacaaattcaatataattctcttccccttcagtctgccaactcaagtgcgtgtgggcgtcatgtcattttctttttgtactgtcgatgtgttggaatgacctttgaaaaaattgtcagctttttgcactttggaaagcagcaaccggatacgctcgtaaacaattttgtaaaaggcataattttcaaagaatataaataatgcaaaaacgtcagatttaaaaaaaatgcatgttgattttgatcctctacaagtggattggtccgcattctcgtccgactgcgtgcaatatggtggatacaacatttataggggattgccctatcagcgtggagcgggagttggcgcagtgttcagaagtcttatgagatatttgctgccgattggaaagcaaattggctccgcaattggacgtcaaggaatggaaagcggaaatcgagtactcaccaatgtgctggagggaaaagacctcaaagagtcgctcgttagtgaaagtaaggcgggactaaagaatcttcttgaaaaagcagccaacaacataaacactcaaaagggccaaggttttgattttaaacgttataaaaaagactcggctcccaaaattggaaaaataaggcgaaaaaatataaataaacttcaatcctcttttgggccaccaatggttgtaaagaccaaaaataaacgtctgcgtgttgactcattaggaacttactaaaaatgacttgcccacaaaaaatcagcaacagcagtcccttagcaattaacagtggcctaaacattttctcagttccaccgaccaatgtgtctgttgtgcgttctttctttcgtcaagtgcttccgctagcaacaatcacacaagaatcaccgtacctgtttcgtctgtacagtgacaatttgtggacagatttgtctcggatctatgtttatctcgaactgtccattgaaaaaccgggagcaaacgacaagtgggttgcgatagaggatacggatactagtgtctctgccattcaagggattggtcaaacatttgtccagcaactaaaagttacggttggtaacacggaagtatacgatagcggaaatttatacccatttaaggcatatatcaccaatgagttaagttttccaataaatgccaagaaaaattttcttggttcaacagggtattatcacaccgtanatcaagatgattcaacagacgatgggttcaaagagcgttgtaanatttttaagggtggaaaaatgcgcaatcctctctcgtctcgactttgatctgngaaaccagagcttatctcttaa

SEQ ID NO: 1618 - DNA, 1712 bp, Heterodera glycines
agggtattatcacaccgtaatcaaagatgattcaacagacgatggttcaaagagcgtgtaaaatttttaagggtgaaaaaaatgcgcaattcctctctcgtctcgactttgatctgggaaaccaggagctttatctcttaaataatttggatttgctgttcacaatttacaaagccaaagatgtttttcttttgcaaactttaaaagcaaatgatgtaaccaaatatcgtttgacagttcacgatgtcaagatttatgccaaaatggttgaggtccaaccctcactaaacatgagcctctacaaaacacttgaaaaacaacccgccacatacgcagtacgcaagaccgaaatcaagtcgtcattcatcagtgtcggtcgatacgaatttgagtataatgtcttcagcgcgaccattcctcggcgcgtgacaatcgcgttagttggaaattcagcatttcatggcgactacaaactgagtccattcatgtttgagccgtttgatttgcgtgaaatttcgatacattccggtggggtggtatacccagctgttccttataaacttaatttttcaaaggatcactttgtcagcgcctttgttgacatgtatgaggcactcggaatggccaattcagaacgttcatttgacatttcaatggcccagttcaagaaaggatggaccttttttctgatcccattgacatccacgcttgacgacagctgtggatttgagctgatgagaagcggtacgacaaacgtacgagcaacattcaattcaccaattccacttggtggcgtggagatgattgtcttgggtgaattcgaccaaatgattatggttgattataatcggcacattgtgaccgactcaaagcttggataaaatataaataaataaaaatgaaaaatattattatataatgttaaaatgaataacaccaatacaacaaaacccaacatacaaattttgaattccccagaagagcctaatgaaactcttttacatgtactactttttcgcattatcttcttgcatttccggtgtttttgcttatttggttcgttttaattcggtggcttaaaagtcacggtcacttaacgcccagcgaggcagagacagtaatgcatgagatgaaaaatatcccccgacacccaccaatatttttcgcaacaaaatgatgcaagattagagaaaactgacagtgaactctctctctctcttcagtatgaccaaatcgataatgagtcatgctggcggaggattctcaaagcgactcattttttttcatctttcattttacaaaaatgcctccaaatgaaaattctgaccgtccctttcaacaacccgacaatgttcaaccagatcaacaaccgcatcaacaacaaccagatgaagacaccgagttgcgtgcacaaattgaagacgcggaggaggatttgctcttgaattggtggcgtgaagacccaacaattgtaagcttttttttcaatttagcatagtttttttaatttcatcacatttttcagattcgttttctttttggacacagacgcgcccctgccatcgaagctgcgcttcgtcaacgcgctgaacgtgaggccgagatcttgcgccaatatgccgagaatcagcaatgagaagtgaccgatcaaaataaatgtcgtatgtttttcacatttttttattatggttataaatttttattaaaaatat

SEQ ID NO: 1619 - DNA, 4066 bp, Heterodera glycines
attttcttttgaataaattattgtttaacttaaaaaatatttatccatttttttattgtcatttttccatttttttttcttattttcagtttttcgctcagcgccaacagcgacgaaacaatttcattcagcgtaaaatttggcgatgattggttttggatgattgttgatgagaaaatcggagggaaattgaggacgagtgaccttgacgatggtaattaaaataaagaaaaaataaaataaattgaattttaaggaacaaatacaaaattcaaattaatccctcaaacatctggcaattttgtgattaaggtttggaaactaaattgacaaaaaataaatattgttttaattaataatttaaatttaatatgtttttttattgtatttttaaggcatccaatggaaaatttgtgagctgcagaagtgaaaatcactggttagtggcggacatggaatcaccaaagagtctctatgaagaatttgtgttggatatggtcaccaaaataacagataccgtaaccgctcgcgtacctctaaaaatacaataattctttcaattcttttatcctttgcaccagaataattaaaataaaaaaaacaatgtgtgcaattaataaagcaactgagaaaacggtacgatgaataaaagtttattggataaaatttgtttttccaagtttttcaatcaaaaaaagagagcaaatatttattattgttaaatgattattcatcggtaatttggtgtttaatagcctctaatctaagcaaatctgcaacttctctgctcatttcattcgtcgtccgcccaaaaaacggaattttcccgctccctttccttttgggggctttggcttttcatcttcttcctttttagcagaagctgaaatattgttaaggtatttgaaacattatcaaagttattctttttgcaaattattttctttattttcttttttctttaccttgttcttggccaggttcctcttctaaataaatattacatatattgaaaatatttaaaaattatcttttaaatttacccgaattcactggagcaataatgcccatcagtccgatgatgagcatcaaacatagaacaaatgttgaaaacaacttcattataataatgctaattgaattccttaaatttaatttaaaaaagaaaagaaagcatttttattgtaaaaataataattatttttgaagaatttatgcatttgagcagtaagaaatcgtttatatttcaaatgaaattatgaataactggttttgaattatataatgaattagaatcaatgacagatgcgcaattttttgaactgacgattttttttgcatcaaaaaacaaaattagtaatttatttctttcgtcattattattattttttgtttttctttatttatttttttccaaaaaaatatccattgtcggttattttagattattaatcgaatttcttcttcaaaatattaaaatgaaaatgcctaaaattggttatttttagggtcgtcgaaattaggctgaagagactgttgtactacactcatcatacaaatacaaaagccattttgttgaaattttgtaatctctttttatgtgtaatatccacttaaatttccaacatatttgggattgaatttgaaaaaagttctcttctgtagatccatttctgcgattttcacaccatcaaatttctttgacatataacaaacgaaaatttttttaaaacatcttttttagataataaaacttttttttttgtaattatgttttaaatattgaatgttatgtttatattcctcatttttaaaattgggcccaaaaagtcaacatatttattaaaacttataaaatgtaaaaacttgctttttatttcggatattttttaatcaaaatggattcgataggattaatatcagtcaaattgcgtttttcaaattcgatcatatgacaccgctaagttcgacttcggcacactgttcaatcagtgccattttgatacgttcggcgtccaactcgggtcgctcgcataaattggccaaaacataggcatatttaagcgcgtacggattctaacgaagacaaagtattaatgaaaaaaaggaaaaaatgaatacttcgctaaatttgaagcagaaattgctgaacgtgtgcaccacctgaaatttaatttaatgatttgtttttcagttaattaaatacaattagtgtattaattatttatttgacgtttaaacaccagtaatcgcttgaggtggacccaagcaaaatgtatttatacgtaattgtttgacaaaatctaattttggatcatttttgaattaacaatttatccaaaaaaagttcaaaatcctcaagactcgccaaaagctttaaatgcgattttttacctttaataattattgaaaattgatttttctatgtttttcttttaggttttttaagttttttatatgagttgtatttgctttgcactttctgcttcacctcattgtgacagtccaagtcgcgaatttgttgcggatacgtcgtcaaaatctgtcgccggttgttcatgtcgtgcacaagttggtgcacaatttgtttaatcgtttgctcgagaaagcttcttttctgtgatacaatatgtgattgaaattttaataacctaattagttttccgcaaattttttttaaattttattatttaatattttgcgttttccaactttccacgccacgcggagattgtgctgaatctgcttagactcattctgacggcgtgccatcatgaacatgggaatgtctcgagaaggaaacattggaaatttgtgcggtgatggctaaacgaaaatttcaattccattaatggtttaattaaaaattaatttaaaaagttcaaattaaattttaaattgcccattaattaattcactgggcgttcgttgcgcttttgcgcctgctctttgcccataaactcagaaacgtgttcgtcctgaatttgcaagtcgccgtagtgcatcacgtggcttttgttcgtttcttcgcgcacaatgccaaattgtttccgcagagtttcggtgcgtaaattttcctgaaaatttgaaattttcccccaaaaataatgactgaaatgcctggtccgagtcttgcatccaattcactgaaaaaagatcgcccaaacaatttccgggcaaaaatttggtgtcgcaaaaacagccccagctcgattcgtcgccattggccgcggtgactgcgtaaacttaattgactatcattataattattattactattattattaccattttaattagtctatcttatttattggttttcaaatattttttaatttaaaaaatacacttttcaaactctgcgccaatgtgtggtcaaacattgagcccgattcgcatgcttcgagataaaatgtcaattcgccgtacatttttttggcatgcatttccttcagtgtttgagtcaattgtttaaccgttaactgaaaaattaaagacatttgcacatatcaaagatagttgttatgcaaattattcctaattcattgttaaaaaattcccgcgcaaattacggtaaattcatttaattgtttacagtacgtcggctgctgggaatccgataactccgaccgcgccatggtccgagaagtacacgaacactttgtccttttcagtgctgttaaggtggaattcaatttatgatttattaagtattctttgtgtgaatctcaaataatgtttttaaatgcttttaattaattgttttcgagtttaaaagtaaaacacataaaaagcggacaaaatcgtatgtgaattgcatctttgcatagttgatcattttactgtttgctgctttttaaattttgttgttttttttaaattttaattcaataccgaaaacagaaatttttcgcgaaatttttgaattttaatattgaaactcagtaaatgaaaaaccaattgtgtttataatgttatggctatttgttggtaatctcatggctgtcagatttgaacaaaaaaatttggaggttcagaaaaagtcgaaaaaatgaatggtttctaa

SEQ ID NO: 1620 - DNA, 4337 bp, Heterodera glycines
aaaagaaaatgatcgtgtaatggcataggtaattatttttgtgctcaaatgggttttgttttgtgtctctccgttggtctctctctcccccccccctttttttttgatttgtccgtcaatttttgctgataaattcggcacaaacaaccttctctttctctcttatcactgcagatgaagaaaagtgatgaaaataatcacacggacaaatgacagctgaacaaaaatggcgagtgatcagagaaatgccaaggcgaaaatgaaaaatgaacggagaaaatgccaacaatttggcaaattaagtagaaatagtagaaaaaagcaaattaatttaatttttaatttgacacacgaccgaaacgaaatgtttttcccatttgattacattaggaaatttcaccaattaacattaattaccccgttaaaaggcaattaaccttggatatgatcatttgatcggcaataaattacagtccggtaacgaaaggcgattaaaaaaagtaaaaaacttctcatttctttcacattgtattttaatagaatattatcaaatttgctaattacaatcaattccagttaaatatttttcagttaagacaaaaaattaaaatgacaaatttaaaataaaaactaaaaaagagaaaaaagggaccaaaaaaaattaattcaatttacacgcaaatatattgtgaacaaaagcaaaaacaaatgggcacgcccaagtgcctcgttagctcagttggtagagcgtgagacttttaatctcaaggccaggggatcgagacccctacggggctgttacttttttcaattttattcttcctaatacaaattgaaaatcttgaaatgcataattttctttttttttttttttgaaaaaatattcaaacataaaaaccgcaacaaattttaaattaaaaaataatttcttaataagttcggctaaaaatttgctttttcagcattttctcagcaaactttttttttgtcaatgcttctttaatttacatttaatatgaatgacataagacaaattaaaattgaatatgcaaagacacaatgaatgcattaacgtaaatggcattgattaccttttgtatttacgaaagcgaatacaataaaaattatacacgtaatagcctcaatgattgcaataatcattgcataaaacctaataatacatatattcatcaaataattttaaattattttcaggattatagcaatgaaaaaagcattatttaatattattttatatgtgcatctaattatagaaaaaacgtctggaaacgatgtgaatgatgaagcacatttaaatggtaattaatatacataagaaaaaacgaataaaccccggaaatttttgtttaaaatttttatttttatttttttgcacaaccacagaaacagacgcagaagatgaaaagatgataaatcagtacaaaatgtatttgaaatatcacgaaaggttgctgaaattggatgcttatgggttggaggtagaaaataataacatggacgacgacacagaagcatttataaagttcaaaattgaagcagcaaattggcacctaaaagcgttgacattggaattattggaaaaggcatcgcaaattgcaaaaaataaccaaaaaataagcaaaaatgaaaaggacggacaatcacagctaaatgaggcattaaaaaagaatgtggaggaattagcgaaacgcatgtcaatggaaacaattgaaaaattggtgaaaatgcatggggaagttgagacaaaatgcgccaaaatgaaagatgatataatcggcaaaatattcaaattgtacgaccgttacaattttgtagtcagaattgtggtcatagtggacaaatggacgacggacaaaagagcatggagcaacattggacatgaaaaacgcatcaccgaattatttgaggttcattataaagggggaagaagggcctaaagccccaaaaaataaatggaaattcccgatatttcaaaaatattccctaaaaggtttcatatccgttctcgcaattggacgaagaagaattgagcaattcggaggaggttgtttttcttgacacttccgtcgctttcgttggcaataaatataaattgcgaataattcatgccgaaaatgtgaagaaaatggtcaaagagtcgccagtttttcgcgattttctctgtaaaaactcagacgattttgagacaaatataaagccgtcgctcgaacaaatggtgggctcgtccgaactaatacgacttgaggaccaattccccgaggctttgagaatcggtaattttgaaatttatgattaaaaataggtggatatgtccgggaatggggggggaggtcttggatataattaggaacaattaatttcttgatcaatgactgatcaataattctatggcttatggttgttcttccccaccttatccagtttcaatttcttcctaagaatgctgtgtgttaatttttattttaatgattttttgtaatctcttcaaattttaaaatttggcccaaaattcaccattttctccacaatgtttcaaaaatatccgccgctgccttacggcagcatcggactccattattctcttaaattttttagttcagcaaaaaacagcaaaaagaagaaaatatgaacaaatctcactcaaaattcaaaattttctcggcacagccggacatttgttctgattagacttttaaatcggatatatatatatatatatatatatttataatgtaaattctgaaccacacctgtatttttagttttatttattttatttcatcttttgtattttgtgcataatgtaagggtattaatgtgccgtaaagaaaattaattaaatattttaatccataataatcgtttacgaccacccatcatttgttcgtataagggcaatgattaagaatttaaattattatagacatgcttcaagtaaaatagcattaagttatttttttagatattatgagccaacagactttgttagaaatttatcggcaaatcctttcgccggcaacgaacgaagaagcaattgacgacgacaaatatggaagcaaaaaaatgttagcacgaaaaatgatggcaatgaccgtccaaattatgcgagaaaatgaaagccaattcaaaaaacaaaacccaaaaaatgggaatttgaaagaaatttttggacgaaaaatgaaagcaattttggcaaaagcatttgacaatttattctcagcaaaatccctttgtgagatggtcaaatttattagctttacgcgcgaaaaacgggcgcaaaagcaattggaaacggagctgaaaaagtgggagatgaacaaatgcgaaacggagcaggagcagaagcagaccatgtacgagttccgacagaaggagctgaacagtcgatttaagcaggacattttggtacttttggaggccggcggtgaacagaagaccaaaatgggcgaaattttggcaaaagacggtgccaaaagtgggttagtcgagctaatcgagtggaagcagtacaaagagttggacgacggcggatatttgcttggcatattcccatcaaatagttggctttttagggaaattcatttattttcatttgtttaggcttccaaaatgacgaaaggcttttcaaacattacaaggaagcaattacacacaagaaaagctcagttgtcagtgtaaagaacaaaatgtcggcagatataattgtttttctccgttttcttcatgtttatataatggcggaattaaatttgcaaattctgtggcataaaatgcacaaattatttgagtttgaatatgacagactctttagggaggaggacaatttggtaaaatttttgaaaattgagagacaattggaaggaatgataatggaaacaagcgattttttaaagaaagaaataaaggaaaagcaattgaaaaatgcgacaaaatttgtggatgaaaacttgcggaacaaatgggaaaagaaaatggacaaatgccaagggaaaagcgggccaaatttggccaaagggagcagatattcggagaaggagcagctgatggaaaagttgcatctgagggaaatgctcaatttgttaaaacagaaaaacagcaacatgaaattggaagagagtaagccaaaaaaaaacgaaattttaaattaaaaaattacccgggtgctgggtcatttcgcgaaaaccgcaaatatttcacaaaagagaccgagtcacatcagaagcatggggcgcggacataaaaatcccgcggtcgcggattcaattagccgcggtcgcggatcgcgcaaaaaaattgccgcgaatcgcggatcgcgc

SEQ ID NO: 1621 - DNA, 4525 bp, Heterodera glycines
ttcctttatttgttgatcgcctcgatactatttcttttgacataaattgcacagatttcgactaaaaagtaaccaaaatttagggatttttgggtaattttttttaagaaaaaaaattttttataattgtgaagcatatgctagagataacattactcccccgtttatgtatggctacagaaatggccgcttcaatatttttacatatctataaaaatataaaatttatcaattaacaaatcacataatgtcatccccaaaatttttaaataaattaattataaattttctttttgtttattctgcgtttaaaatattcatgtgctttgttttatttgattgtaatggtttgtgtgtcaacggttaaagcccaaaacacacataattttttttcaaacagggacatcgtactgatgtggcccggtctcttttattaaatatttgcggttttcgtgaaatgacgctgtgcctttacccggactaaaaaacgcgaattcaacacagactaaacatataaaagtttaaatttcagttttgctttctaaaaaccctgaaggtataaaattgtttgttgatgttgaagaactttatgcacaatggaaaaaattttttgaaatagacaatataaaaatgggaatacatttgttaaaaaatggggaaggaactacgaataattggatggaaatgttagaaaatattacaaatcaaaatgacaacgtaagaaaacaaaaatataattataataacaaaatattacactaattatctgtgttgtgtttacataattaattattaattaatctgaatctaattaattaagtcttacggttgccccaagaaaagcaaaaagcccgaggaattagcagccattgacaaagcgaaccaagtggaaggtagacataaccatattaagcaaatattcaaacagattttgaatgaattataaaaaaacgatttttacagaagagatgataatgaatttctttgaatattttaaattggaaaatgaccaaagggaaagtgccgacaatgaaaaagagtgccactcaattgaaatggacacattggcatggcattttaaataccagatcaaatcactcaaaggcacttccaattggaagaaaattgaagaaattttcagcgacaaaaacagagaaattaaattgtgtcgaatttacactcactttgaatacgtcactaaacgtgagaagggcattctctacgcagaatttgccgatgtttgttatttttaattaatagatttaaaagattaattaactgtttttttaatcggttttctcccaatacttaggagcaaatgctttccgcccaaaatgatgagcaattttttgagtggctaaaccgtaagtgctccactgatgagcggcttttcgttgccaatgccattcacacggtctgctccaatcgtttgcaagtgcgagaagccaatttcatggcatttcgccatttgctgctgagttcgcagcaattccgtgcctatttctgcaaattggccaactcatcacaaaataattacgtggaaaacaaaatttatgacgccgaaatttggtgcgacgatgggtggacgaaagtgtgctttgaagtgcaaaagattggcgaagtgaaggagaaaatattagcactaatcggcgacgagaaaatgcttttgttggaggcgcaatttccggaagttttgaaaattggtgggcatttgaaaatgaatggaataatttgtggcttttcttagatgccataatgctccaaacacagccatttctctacaaaaacattttggcacacaaatcgcacaccgacgaaaccaaattttggtcggctcggcttggcattgcgcatttggtgcaaatggtcaacgcaatgctttccaattttgggctttcagtctctttcgaattcgacattaaatatgggttcaccgtaaaaagtcgcgacattttctgcgaggcattcaaacatttgacacaacaaaaattccacggagggattggacggactttgtgcgcattggtccaattcaaaaattacgcgcaaacattttacgaagtgttttcggcagcaaacgatcgcttgaacttagaagcaattgccaaatggaggccaaaatgtgcagagaatgaggagcaggacaaggcttatcaggtgggcactgatcaaattaatagggacgagttgagaaaaactttctgatgggggaggactccgaagagtttcccttttggatgtaatttttcaaaattaaaaagcagttggcggaaaacaaagcgtaaatttaatatttttcgacaaaaaattgaccagctttgttcattttgagtctatctaaaaattttgcaaattttaagaaatttgttaagaagatttatacaaattttcataaaatgcacccattttcaaataattttatttctggggtccctccccccctcactttcccctatttacgttaaaaaagaaatgggtaaatataattgtcataatttgttaatgctacattttttaatgggaacgaatttagcaaatgaccaaaagccttgctacacaaaacggaacaatgctgaaaaatttaatcataggcaatgatgaatttaaaaagtttgtacaaaacacgcggggtgcacgagcacgaattggaaaattgctggtcagcgcagaggagcaccaaaaatttttggaattttgtggcgaaggaattcgaaatgaaaaaggtatttaagcgcacaaatggtgattggcttataccccacatttgcgcctcggattttacgttcccagcagatcccaaagaattattttaacagaaaatcatttgattctacatattatctcaataccttggcttgctcagtgcctgtcaaaatgggatttcagtttaaaataattcaatttttgtcccagtgggcttataaataattttttgatatttttgccaaataaatcaaacattcgaaagccattaaaagaaaaagctgcctttataagcataaaagaatcaggaaataattaaaataaagaatggatttttttatctgttaaaaattccgattatttaaaataatatgtgttaaaaccccttcaaaaaatcatagaaaaagttatccctaaattttttttatcgctagcaaaaaatcctttgttttcctcctcttcaaaaatgtttcattgtaatgtatttttgaacatattttttgtgaatcgcttcattatccaaaagagcactaacttttctccactaattatcttctctctaattgatggctctgcgatttttaaaaaacattcttttgttgctcgcgtttaaaagtataataattaagtgtttaaatttgtttaaatttttattatttgccacaaatatagcattttcagtgttcactgatcaatggcttatggaattgtatttggaattcttgaacaaatttgcaataatggacacagaaacacaaatgagatactttttgtcgttgtcctattcagtttgggtgcgttggatggaccgccaaattgacccaaaaaatgcaaaccttccgattggactgagacaaatttatgagcaaatttggaagaatcaacgcatacagtatgaacaaattgcgtatgataaaatatttgacgtaaattttgaggaattgtgtttcgaatttgcactgattttgaaggtatttgagccgttgaaaaaatttgttgaaacgaaacgaaacgaaaaaaatttgagaaaatttggcatcgaaataacaaaacgaaatgatgacaaaaactcaccacaaaagcagtacaaagagcacattgagaaaagtgagaaactgttggagcaatgggaagcaatttggacaaatgcgaagcaaaacattcgaatttggaagacgacggaatgccaaacgacggaatgccacacaacgcaatgccaagagggaaaactcaaaatggcacgaccaaccgaatggctacaaacattacattttgacacattgatggattttctggagaacaaagcgatgcaaagccaactaaaaaatagtatttcattaataaaaagaataaaaagattttcggatttataaaacaacgaaaataaatattaaatttaaattctaaatttattttgtgtcaattaaacaaaggtttgaaaaaacgacgagaaattcttaaaaaatggcttatgcaatttatggacaaagaaattgttgaaaaaattcaattggcaattcaattaaataatgaacaaattggagaaatgagaaaaaaacaaaaagagaaaaaagaaattagtgaagaaaaacagaaaatttatgaagaacatttgggaaatttagaaaaggaattggcggaagaagaagaaaaggagcaaaagaaaaaggaagagaaaatggcaaaagaaaaagagcaaaaggaaaaggagaaagagaaagtggcaaaagataaagagaaaaaggaagagaaaatggcaaaagaaaaagagcaaaaggaaaaggagaaagagaaagtggcaaaagataaagagaaaaaggaa

SEQ ID NO: 1622 - DNA, 2135 bp, Heterodera glycines
tttgaaaaaacgacgagaaattcttaaaaaatggcttatgcaatttatggacaaagaaattgttgaaaaaattcaattggcaattcaattaaataatgaacaaattggagaaatgagaaaaaaacaaaaagagaaaaaagaaattagtgaagaaaaacagaaaatttatgaagaacatttgggaaatttagaaaaggaattggcggaagaagaagaaaaggagcaaaagaaaaaggaagagaaaatggcaaaagaaaaagagcaaaaagagaaaaaggaagagaaaatggcaaaagaaaaagagcaaaaggaaaaggagaaagagaaagtggcaaaagaaaaagagcaaaaagagaaaaaggaagagaaaatggcaaaagaaaaagagcaaaaggaaaaggagaaagaggaagtggcaaaagaaaaagagcaaaaagagaaaatgaaaataaaacagcaaaaaagaaaagcaaaaaaggaagaggaggaaaagcaaaaaaaaagtgaaaaaagcagcgaagtgacgaaaagcagcggcaatttgggaaaatcggcagaagcaattgggaaagaaagggggaaaaatgaaagggatgccaattccatcgaaattggggacgaagcagaaggggatgaattggaagatgtcatggcaaacattggcttaaaaggtaaaacaacccgaaaatggagtgggagtaatttaattactaattagtaggcaattaaaagcaaacaaaaacctaatgacaaataattttgtttacaaaaatattaaaaagaatggggggaaattaagcttaaagacaacaaaatttaagattttttgcaagagaattatttaatgacaaaatacgacgaattcttagaggagccaaatgaattacaaaggaaaatcctcgacattggcatttatttttacgagatttcaaatagaatttctgccgccgaaggaataaaaaaggctatttttatgcttaaaaaaagcgaaattgaattcaattataatagggagaacgaatttaataatttaaagcaaaaatgggaaaaaatattgcaaaaaaatgcaattaaaacaacgaaattgagccgaattgagtaccaagatatgaaaaataatttcaaaaaattatgaaaaaaaattattttggcaacggaaggaattgaaagtgccaacatagctgagataaaaacggacaaaaacaaaggagaaaacagaatttaaaaacacaaaattccaaatgcatcgaaataatttggcaaatgcaataatagcacgaaacgaaatgggaaaaagtggccaaaattgggccaaatgggacgacgaaagacgatacaatgcgctgattttgttgtttgagaaggacacacaaaaaaggacgatctgttcaaatttggtcgcccaattcggcacacatttggagggatggcggaaaatgagggaacagcagcgaattggtgggaattaattaatcaattatttaattgattcattagtgattagacattaaattcaattaaatttagaccaaatttcgataaatgagcatgtgaattacacaaacagcaaaatgagttgctctaatggagggactgaacaaataaaaatgaccaattcacattcatttatgctgccccaattaaaccagcaaatattttttaatgataacaatgatgaagagcatttaaaagaggcatatgaaaatgtattttaaaaaatttatgaataaaatcatttagttggaacgaattctcattgaagagcatttcgtgctgacaatggacccaaccaaagcattgaatgagctaaaagcagttgtgtccaattgggtacgatataaatcattttgcattagaaaacaattagcaaaattaattaatttcattagaaaacaataaaaaattaagtaatttcattaagtcgcaaggagaggcaaagcttttggagatcggctccttaatgttgggcacaaacacagcaacttcggacgtggacataatttatattgtgccacaaaagacaaccaaatcggaggcaatggacaaattctttggcacttttcaatgcgatttgtcaccgcgaaagtgcgaggacaattcgctgtattgccttctttgcctggtcaattaattta

SEQ ID NO: 1623 - DNA, 1425 bp, Heterodera glycines
ttaaggaacataatttattagtgatttaatggagatggatttttatttattttggttttcaatttttaagggtttcgctaagaaaaataaatttaaaataggaattggtctggtgtgacttcatttaaaaattaaatattccaaatgaattgatttgtaaatttgcaagcatatgtgttttaaaatttgcaggttgtttggagcaaaatgggatgtttcatatgaatgagtcaacattcaaaattgtacaaaagtcgatgagagaaggtgcttttgcttttgtatttgttgaaaaaacaaaccattggattttcagcttttataaaattgcgtcaaattcaattcccaaatgaaaataattggtcccaattgttttcaccttcaaaattcactaaaaaggcaattaattaattgttcactaatggttcattatatttcattttttgattaagtacaaacattatgccgccatttgttgcgttgtcggcaatttaattcatttggcacaattttgtgactttgttgagcgcaacattcggtttcaattattgcatttcgacactgtgactgatggagtcaatttcacgcatattatgacggaaaatgacggggaatttaagtgcccaaattcaattttaatgcctgtcctaaaacaaaatcggtatttatatttttatttgaatatataaataaatttttttttgcaaaggaatttttcactgcacaaagcgtggctagtgggaatagaaatggaagagaaaacagcagaacagaaacaaaatttaccatcagaaaaagaggagggacaaagggaccgaatgataagccatttaaatttaaaatttaatgagcaatttaatgaaaaaattgtgcaaaagtatttcgaatctttgaaaggatgctttcaacgggtttcgctggtttcgaaatatgtcgatgagaaggaattggaaaatcagtgattgatttaaacctgttgattcttttttgattaaatgtgcatttttggaatacccattgtaataataattcatttgttgtcaaaaataaatggtgatgcattttgcaaaaattaattatttaaaaacaataagaaaataattaagcacaaaaaagtatgcatataactaatcgatcttcaattattatgatgtaagttaaattgttattatgaactaaataaatcatttgagtatttcaagagaaaattcggcgctacttgtaaaatgtactattttgaattttatcaaaagtaaaaacaaaagggaggacccttttggtttacaaaattttttaatgtatgatcataaaaatttggccccgggtatttttggggttcctgatcacgaatctgtcaactattttgaccaattcctattcctacctaaatttgaacaaaaaatcattaatcgaaaattcaaattt

SEQ ID NO: 1624 - DNA, 3073 bp, Heterodera glycines
gatgaagaactgctcaaagaacttgaggagatggacgatgtgataagcaacaaatataattgcaacccaactaaaatgtgtttaaggaggatctgagtggcaaattgctcgacgcgggtattgtgccggcacatagtgtgccaagtgttgcagacaaattgccaagcgcaccgaaagagttgccaaaaaagacggtggccaagaagcaacaggaggatgaggaccttgccgaattggaagcgtgggcaaatgcgtgaggagagtcatattttcaatccgatcagaaatgctcttaccattcaccactgacctaaccacgatgatttagtcgtatctggattgtaacatagacacaaccccgaaaagttcaatttgcaattttttctggttatttagagtttaacaaattttgataatagcgccaagccgcataaaaaaatctacggcattaaaaccaattctacaagggacctgcctagtcatttcttgatacggcttataagtttttttggactcaaatcggcaaaatgactttgacacacatttgcttttgatcagattgtatattctgtttcaaattaaggaaataaacactatttctaatcgtaagcatttgattttatcgttgttcaaatatagaaacttcattcccgttggtcaaattcttcattgtctccatggtctggtgtgcccgaccttccactttcgtctaactgctgctctctgtccacccattctacaacagatttgtgctttaatgatgacccttccttcgtcttctgctcgatgttccattgcttccttgtcatattcttacagtcaagtgctgttcgatttcgcgttcgccacactctccgtttttggtgctgttgtccctctgtctcggctgtcgctgtcgtctttcgatgttcgttggccttcgactccacttcctcggtttcatccgtagctgtttcggtaaaattcactgcttctctccggaggatgcttccggtgttgtcctcccaattggtgcctcccttacggctccttcgcctttgtctcccgcgcccaatttcacttccctgcggcgccgttcgttgcttcaacataaacacatcgttggatgcattgcgtgaaaatggagtcactgaaggatgagtaccgaggatttaaaattccaaacaaatgtgaatgggcaccaatgccacgctgtcgcttaaatgtgcatccatcctctgtcattgtcggcaattcctctcggattcgcttccatgcttctgccagctcggtaaaccttaaaatgttaatgatttttttaaaatattcaactacctatataaaatcagaccattgggcctctgtttttttagcgaaaattgagcgactattaggcaattggtatatctgacggcgaagttttgcaattactgtcccataatcatcttggtgcatcacatgtttttctgcgacattcaataaagaaaatataaatcaattaaggcataagatattcagagaattaaatggactttgtcactcaccaaattcatccattctcgtccggggttttagctcgcccaacaaaatgtaattgacgtttaaatcggcacaaatatgctcataaatgccgaatccaagcttggccattgtcagtccgccgttaacgttgaaagaacttgtctcaaacatggcattcaacgtgcgcatccgttgggacaccaaaagaggctcgagatcgatggatttggcacgttggtgaaggacaactgaataggaaaacaatagaaaattttttgaatgaggatgaatttaaaatgccaataatcacccaaattcactcgtcgtgcttcactttgtgggaaaagtattgggtagaacagctcaatgcgcatcaatcgccgcacaatgctcaagtcgatgaaccaatcgacgcaaaggacgacggaatggcaaatggagtacagaagcaaaagcaagtggaggctctaaaaagcatttgataaaagagaaatgacctttccattcacataaaattttacttccacttcaattgcgtccaatgcctccgcccctttgacacgtcgcgcacggcaaaagtcctcgagaagtggagcacaatttaagggctaaaaaatttcataaacattttgtattaaattttataaattattttcctattttcgaaactttacctgacagtccaaaaagaaagtgcgcagtttgggcacaacatacactgagacttttgtggtttggtaacgacacgcctcaacagcttccctcgcagcaggacgaaaaatgtactggcttaatactggtaatggaaaagcctttgaagaaataatcacaaatttagccgaaaaccaaaggcaaaaagtattttaagactaaaaattcggtaaaatttgactttcgtttcttgtactgtagtgatacattggctcaattcacgcattgtacaatgcttcgaaatccaaaaaaatccctgccacccaccggtacatatccaccggattgttcccggcgagcataccttaaaataagggatgtgcaaatcattagaaaaccttacgaactgaggatggtcgacttgccagtgccttaaattctctatcaaatgctgttttttctgaattccttcaccttgtgccccaatcgcaccaatgaccgaatattttgtgttggactcaatgagaaaatcctgaacaaatgagcaacagtcactttcttctacgagagattgtcgttcaccttcacagcgtcgatcagttccatttcatcgtcaatcagtcggatcgatgcgtccatttgggcttggtctttagatttatcatgattagtgagggacataatattttattttttggtgaaaaacggttacaaatcctgtagaataaccccctaattacccgtggttgcccctgcgtcttttgccgattgtttcgccactggagatggcactcccccgctttttgcgatttctgtccgaactgtgtttaaagcggcagatgagagaccatcggcactggtatttgaggtcggcacttccgcaggaacattggctactgttgtgtcgttggccttacgatgg

SEQ ID NO: 1625 - DNA, 9877 bp, Heterodera glycines
  unsure (1)..(9877): unsure at all n locations
aaaaaacagcaaaaggcccagaattgcaaaaaacattcgtttccattgcgtaaattgctattacaaacgggcatcgaatgagaccgtagctcaaattgtggaatttagggcaatcgtcaagaattgcgtgtcccgacgaaaacaacattaaaaatttcgcaggtaataacccaccttcgtcgcattagtagcaatgtttttcatggcttgctctcccaagcgcagatcacatgcaatcaccacactatctttgcttctcatggcaatcatggagccaccatgcaatcccataatgttcggcatttttacaatagaaagacaacggaattctgtaaaacaaattaaaaaagaatataaaattgatatttaagaaaaaaagtgaatggaaaggaaaaatatataaattcgaacaatataagaacaaagcattaaacttgaacaaaaaagaacaaattttctttttcagaaaactcaaacctattatttgtgtaaaaactgcaataaggtaataacaacgtatgaaagtggtgatgcattaacagtgaaagcattacaataacaaacaccgtcaaaatttaagcaatgtaaaattccacggaataaatacaaatgaaatgagtttagaagatcctttctattgccctcaaagactgtaatgtaaattagtcagaacatttatccctggcgcacttgggaggcaaagatttcctgccgcactcttcgcaattgtttgaaacgtgacatttctgcaatggtcggcggctgcaacaccagcggcttctctctgttctcatatatcagcgagtccaacgagcgcggtctgtacaaacaagagaaatgttcgtccttcataatgccgtctaattccgagtcgctgtaacgtcgagttcggcccatcagtgccattcctgaatatgtgaatgctccttttacaagaaaatgtttaaggtttgcttaccgtctaagatcatctgcattttatccacttgcgaacgacggccaatctttttgtttttccgtttcggagttggaagttggacgaaatcagaggacttgacatgggacgccaattgcattatcacacttcttaactcatctcgcttatgcttgattttaaaagttggataccagcggcgaaatgagctgtgcctcgatataaactgcaattaatccaaccattattgggttttgcatggttagtgtcgcttttatgtcatgaaaaattttctatgattgattgaagaaaaataagcgatagtttaatgcaccaccatcgtcaataaatttcacttgcaaaaattaaaatcagatttcaaaattgatgacaaaataaaattcgagttaaaattggtttagtaaaaataacaattattctaactgtttttttttgatgccaagaaatctatgcttaaacctccatctaattgcgtcaaatctttgatttttatattttacagtatttaaaagatgacgattatcaataacttaagtatgtgataatgatggttgtacttaaaattgttttatattatgttgatcagacaaacttttggaggattgctgaggaataattgcgcaaaatgtagcagaaatagtccacagtcgatgaagttcttctgctggggcagcatcgtcggcacaaccacgtccatcatttgcttattgaaataagtcttggtgtcctgtccgagtttatctgcatattccaagtgcaaatattctccgagttggtccctaactgccaaatgtttgtcttcagctgggtcgatgagctgaaatattaccgttggaaatatattttttcgaattgccggcataaggggtaatatttgcaaatgataacgcactgaattgagcacgataagatgcggcactggtgaataatgacttgaagtaggaaaaatggattcattgtccgtggtattgagagagcaaatgccatgtcggacgtttacaattattgccaaatacctaaatgcaaaatagtgacattaagcaaaactaaagtaccaatgaatgtcctcattgatcggcacaataatataatccatgtcaaacagattgacttttttagtccaattcttcactttttgaaaattgctggtgacctaaaagtggtggttaatttgtttgaccaattaaaaaattcattttaactcttcgaattttagtagttgcagtaaccgtattggaaggttttccaccagctgggggctgtgttaaacgagtgaaaaagaaagtgttgaaaatgaaaattctcgctctcctctcctgtgggacaaggctaaaaagaaattaaaaaaccaaatgagagtactgaccaatgatgaatgtatttgaggtagaaatcgatgatcgtatcattgagcatgaaattcctcgacaagtacttcagatcggcataatgcacagaacaggaatctcttccggttggtggaaatgaaaacaaagtgtcgttggaacgtttatcggacggactatctttaacctaaaatgagcaagtcctttccaccaaaaatatgacgaggccaacctccgactcattttcctcgtcgtcaatcaaatgcacttctctctcccttttgccaacctttgctgaaccgctggttgtagtttttgacattctgtgactttgcaattggggtgaaaattgcgtttgcaggtcttgcgaagtgctggggggcgtttgaatagagagaaaaggaggtgcgcttctgcagatttgagagtttccattggttggcggagcctttggcaatttgagtgaccgtggcagaaatttattaacgctcggcgattctaaacaaacaactgctaaaaaggacaattgtttaagcctaaaatttgaatatttggggttttccacaatgctcgctttacctagggacaaatattgggctactgtagtctcaccaaataccgtcggactgtgattattgagactcggcgtttgctgttcattgtataaatgatttggtacaggttcaagttggaaaagcatatcaaatgtgtcttgacttgaaataggtaattgcgtagaaagagttggagacaattgggaagcaacgacagtcgtaacggcggcagatggagaccgaagggatggaatggccaaaaacgcaggtgaagacttattgtgagaagctgaagggacaattactagagcagtacaacacataaaaaaaactattatatttcataaccaatcaaaatgaaatgctaaattattttgttttttaataccgttagcgcgtatttgaggagaagcggaagactgatgagaagtaggaacactcaaaacaaatgaagaaggcaaaggagcttaacgacggaaaaatcacataattaagtgaatatttccataaatacgtttcgatcaaccaaccattgattgtaactaccgcgctgggctgattgtgagggagaattggaagggccattacggtgtacgctggcagatgacactttggttgttgctgatgcacttgtccaacttgaactcgaagttggcattcaacattcaccggcgggtgtacattcggactgtcagaaagagtcgaaacgaccgacactcgatgagaaccaacgccattctgattgttattgtcgatcagtttgagctggcgttgtttaaagtcggatcttgcaataccttaaatgtgattatgttggtcaaagcgaaggattgtaactgaaattgaaaattacccagcaatttattcagtgttttccactgagatgaagagatcacatctaaattcagactaataacaattttgtaattagataaattaagttatatgagtgggttatcaattacagtagacacaaactgaccaataaatgtaatgggaatgtcaaaatgtttctttttgattttgttcatttgctgaataacataatttcgatggtacgcgtccgctctatgaagaatttcgtgaagacggtgaaagaatttcaactctttgttttgaatggccaacacaataaatcttgaaaatgcgactgatattgtgtaaaataaaaagacaaatagaaagaaaccaacttatccttggagttgcttgtgtagctttccaacccaaagtccgtaaagccagctccttctcggtcgatgtaagtttggatctttctcgccatgaaatcattgacgaagaggaccaaacccgctccctctccttccgaattatccaaaaactataaataataaaaagggaatatatcccattaaattttattcaagaaatcaactcaatcagaaaattttttcctcaacttcactcatttgaagtggccaatttaaatgacatacttcaactttagtaatgtgtttgaatgaaagggaaagcatcagcgtttcttttcccttgtccaatggcaatgtaacaaattcatgtgtaagttcaatttgtttagttggtgcaaaaaaatatacgccaatttccaccgatgaacagttaatctgagtcaattgaaaaaataaactattaaaagataagctaaccaatatttcttgcactgaattcgctacatccattgaaattgaaagatggaatatctaaaattcacttatttcttttttttagcaaaatttgatgatttgtgatgataaaaattaaaaaatcaaaagaaaagcaaagtcaaagttagcacaaacatttaataaaatggcgttctgtttgaataccatttggcctttaatgttgcgttggcaatttagattttcttctttcaagcacctacgttcgctttgttccaaaaaactttctgggaaaggagtgtggacatgcgatgccgataagcgccggccttatccaagaaaaatcccagcctgggtccaggtcgaactctagttattataggtatatgaactgtctaatgttatctgcctcccacataaaaaaatacgaatcgggacagtaaaatcggccaatacgtattgggtttttggtaaaccgggtttttaccataaaaacacattaagaaaacccattcatcattcataagttgtaaatatatgacttccggcgaacaaccctgctttactttaattcatgtcgcgaacgatgttgaatttccatctgagggacaattgaaggacaaatttgagcatggtaagttatctaagtgcgaaattcaaaaagtatacttaaaatatgcgtttttagaaatttgaaaaataatttgaaaaggaaaaaacaattcaggtgacacaaagacgaagacggatgcattgaaaaagttaattttgatgattcaagcgggcgagaaggtcacaagtcagctgatgatgtacgtaattcgtttttgcctgccatcatccgaccattatctgaagaaattgctgctaatcttctgggaggtcgtgccgaaggtgctttttgttttttattagtttttgcttaaaattgtcgtatcatttgttcgtaaaatttgttaagacaaatcaagagggcaaacttttgcatgaaatgattttggtctgtgacgcgtaccgcaaggatttgcaacatccaaatgagtacatccgcggttcaacattacggtatttttacaatatgcaaaaaaataccgttgttttgaattataaataaaaatctcaaaaaaagtgcgctggcgcacctccttatgcatttgtgctcctcttcgttgctttcaaatgacaccacaaaggtgtaatttgtcctgtccccgcatacaaattccgatggagggttgcatatttcattaagaaaaattaggactataaatttcagaatattgaacctttttctttcgcattcagattcctatgtaaactcaaagagcctgaattgctcgagccgcttatgccttcaatacgaaagtgtctggaacatcgtcattcttacgttcggcgcaattccattttggccatctatacaatctacagtcagtttttttaactttccgtttttgcaatccttttttaaattatttccgtttttgtcgaatgcaatcctttttcatccaaaatatcttttgattttagaaaacttcgattttctgattcccgatgcgcctgaactcattcaacaattgttagagactgagcaggacgcctcctgcaagcgtaatgcgttcattatgcttttgcatgtcgaccgacagcgggcattggattatttgtcgggttgtatcgaacaagtcgcacaattcggcgatatcctccaactcgtaattgtggaactgatttacaaagttagcaacaaaataaacaccaaattttgcttctctacacaatccttttaaggtttgccataacaatccaggagagcgcaatcgcttcattcgctgtgtgtataatttacttcagtcgcagtcgggcgctgttcgttatgaggcggccggcactttagtcacactaagcacagcgccgacggcggtgaaagcggccgccaccgcatacatcgaactgatcgtcaaggaatcggacaacaacgtcaaagtctgtcttgggttgcgaaagtggtacattttttaaatttttcagctgattgtacttgatcgactggtcggtctgcgtgagatagtgccaaacgacaaagttctgcaagagttggtcatggacatccttcgcgttttgtccaccaatgactacgaagtgcggcggaagattctgcagttagcacttgagctcgtctcttcgcgtaacgtaagtcttttcagcaatttttcaattggcctatattaagtttaggtgcatgaaatggtgatgtttttacgaaaagaaatcgacaaaacgaacaatgacacgcaggaggacaccggacgatacaggtaaaaaacgcacttttcaaaaggaattctcagtgttgtgtccgtacacaaattaattcgacccggtcaactcttaggcaaagactggtttttggaaatttattaaaattcaaaaaggtttaaaagaaatgtgaaggttcaaaattaaataagcaaagtagagttaaaaggttttagtgagtttgatcgcttcaggcagggaacctgagatgggaaaattatgggtagaatgacctgcctttcgagatgggaagagttcttaaatagtgccacaaattgagaagaaaagagcagaaggacattacataggaaagggttgaatggcaatgcgaaggaaatgcaaaattaggccaatggaaagggaatggaattggttaggatgattgacggccagagggacaaaatgggaaaaggaatcaaaaataggaaagaaacaaaaatgcttttaaatcgaaaacgcagacacctcagagatcttagtaaaaaaaacaaaaatcattttgagatgacaaaaatgaaattattcccgttattctttttaattattattttaattgccaaaattggatcagcaaagaataaactgcaacaaaaatcatttgaggaaatatttggaggaaaatgggaagaaaacttggaagaaaaaaggcaaataattgaaaaattctataaaataaaagagaaaataaagcaaaaaggaagaaaacacacagcaaaagaatggagtaaaattgaaagaaaaatagtgaaacaattggggacaaatcggaattacattcaaaaatggattaaacaatttgttctacaaaaattcaaattaaaattggagtaagccatggaacaattaaaaaatggaagaaacaatttgacattcgatatatgagaataacggagaaagaaaaaatgaaaatttattggcaaataaaaagagaaaatccgaaaatgagtgacaaagaaattgcaaaaattatgaaaattgatcaatcgagcgttttaaaatggagaaaaaaaattggagaggaaataaacgaaaaatgaaaatagttgtaaaatttaaaaattatggccttttgttgtctaccttattttatttttattttgaccacatcaatttttgtattcaccgtattcttttcattctcataatttttgtattccattcaaataaaggagtaaaaaaggttagccgacatttgcggaccgactttaccaaagcatggaagtgaaacacgtaaaaattttccttggtataaaatcctgaactgacttttatgtgtattaaaatagcgaattttttcgctaatttcactacgtgtagagaagcaagaaaaaaatttccacttgttttgggacttctaagataaaataaaattctccaattaaaacagatcgccttgcatcagcttaccttcactaatttcaatttggggagtatttaattttttgaaaattcaaaaaaaaatttttttctttattttgacagttcaatcgggaaatactggtccgtaaatgtcgatccgcaatgtggcactacggtaaaaaatgcttgtaaaatgatcatataattgctattattgctattatggccataaaactctgaaatcacgatttttaaatttaatgattataacaacttgaatatagaacgaatatgcataatcgtgtgggaaaatatgctaacaaatgctggcgttgagtgccaagatgcaaatatctacaagctctttcttatagcagaattcgaaaatcgcaaatcccgctgcaatgtaaagagcctgtcctaatcattttaatttttcaaaatttatcgaaactttaccatatagaacaagtttttaaaaacaaactttactgtcgagatcaccactgtcgaaaactaacagcaccgatggaacgacgagttgtcgaccctacactggacaacactgaactggccgctctcaaccgctaaaattgctcaatttcagaaaaataattaaaattttgtaaaaaaaaaaagaaaaaaaaatgccaccatcgatagaacacgaaaaacaattttgaaagggtgggcacaaaataagaatcattttttatttgtaaaataaatgaaggaaaaatggcgggaaaaaaaattcttctactgttcttagaacaattcttctccaaattgtttcttccattttgaaatgctttttcgactaattttcaatgtttttccaatttccatgtcattcattttcggattttctctttttattttccagtaaattttcatttttccattttttctttctccgttattnntactgcgaatgccaaagtgtttcttccatttcttaattactgaaaggctaactccaattttcttgcaaatttcggcataatttttctcccattctttttgcgaatattttctgttttgtttaaattcatttttcattacaatgaatttttgcacaattttgcgtttttgttcatcagtttttgatttgtgatatttataaagtccaatttctttaatccattcataaattttgtgtcgatttgtccccaattttttcgctattttcgaattaattttattccattcttttgttgaatattttcttcctttttgctttattttttcttttattttataatatttgccaattatttctctttttttgagttcatttcgtttttcttcttccctttcttcccatttttctccaaatattccatcaaatgacttttgttccaactttttcttttctgtttcggtttgatcaattaaagtgattaaaaataaaattaataatacacatatttgcatttttaattggcaataagtattacctaattatcaatgtataggaaatttttagcttaatgaattatttattaaatgaagaaaatgagaatttattgcttttaaatcgattacaaaaaacagtacaaacacaaaaaaatcaggacaattatccaatgaatgaatgattcatcaaaaataagaaatattttacattaatttacaataataaaaaaaatcatatttaattcatatcctcagggcaaacggaaaaataatgacatatttaaaaaattcaaattgttg

SEQ ID NO: 1626 - DNA, 2157 bp, Heterodera glycines
agaaggaaccaaaattattgtcagtagagtaagttgcatggtttgtgtttggaaagttgcgagttgttttcatatgattattaccacttttgggtgcactatttaaatcgctcagcttcatgttcaaccaaacacatcccttacacatcaccttaacgcctccaaactgatcagtttcaaaagcataattgttgttgttgctgatgttgttgtttttagtggactcgaaaagtttttgagaacagccgtaacaaagattgaaggtcagaatatatttcttacgtacaagctaccataattgagcattctcattgacgctgttattgttgctggtgttgttgttgttgttgttgttagattcttccggcatgttttgctgaacattattaaaagtattcatttttattttgcaaaaaatcttctgattaaaatgaagttttgcatcatatttgcgtgcttttatatagcgaaaatgtacagtgctgcgcgctacgtgaaagacgaagttacggtgctcttacgcacatataaaagcgcttgaatgtgcacaaaatctcacttgcgtgcaatgcatttgcttatcgcattctcgcgcattttggactgttcccctgaagaagtgggcgcgcgaatttgtgctagcgttgcggatcgagaaaaattgttgaaggaatttgcgcatcgtaagctcatcactacatactccgaccgtaatggcttcacccacacgccttctttgctggactcacggaagagggcgccgactcaatgcttgcttatggtaacctgaggcgcccctacaatgtttgcgttgtggcccattattactcgcggcaccgcattatgctaaagtacccgcaattcccatgcgttatcgagaaatgttttggtcaaagagatgatggacccttgcacaaatattacccgcttgaactggtaaaagttgtcgatgactgttttccgcctgtgtacgcgaatttgttgtctcaaaaacgtgatggctcaacgtcatcatcatcatcctcgtcatcattgccgcgaaatttcctattgtcttcttccgatgatgttgatgatgacgaccatgtttttcatccggcggccatgtttcggctagctctacgcataaaactcgattggatgcacaaaagttcattggacgcataaactgtacttgagccaaaaaaaaggggggggggacgaaaaacgaaaaatagtcatggaaagtgccgagattccgggagacgcgagagcaattcactgatggacgactcatcacaaaattctttgttttccggctcaaaatcccaattttagcagggttacgaccttttgtaaaagtatgggtatgggttaggatttcatttagacaggaaattgaaaaaaaacaggagccggatctaggtaaattcggtaaaaatccgttttttcgcgatccaattcctggcgcagtttttaaaatattcaaatttcgaacccccccctgacccggattcgaacagaaaactttcggtaatagtgccaattgtagcctccctaaacccataatccagactcgaattcaaacccaaacagaaatctcttggaataagtcgaattcttagaattggggggactggggagaaaggtcagtccaatcgccatcatccatccccctgctgcccttgtggaacctcccaaatttcctcaccctcccccgccgccctcttagttcaacaaaagcacacagcacactcatctcatcagcattggtcttgtccattctgctgctgctgctgaatgcagctgctgtgggtctcccccattcaaagcctcgctcaaagaaagatattggggggatgtaaagaacacagataaatcgcggggatatgggggatatgctaactgatggggggaaaaaaaaaatcgaaattggcactcggaatcccaagataggagcacttttccatttttacctccccctccttccctcgcccttctaccacgatttttgtttatttttttggcgttctgctatatgtaggtaagtaaataaaaaaattaaattaataaaactaaatggaggccgaaaacacaaaaaaatttacctaccaaaaagatcctagttataaaaaattttttttttcgctaacccggatgaatcatcattattatcat

SEQ ID NO: 1627 - DNA, 5692 bp, Heterodera glycines
caaaattcaaatacaacaacatttaaatggcttagtctaacattgggatcacataatcacatcaataatctcaatcaaccaatcaatcggttcacttctgctgtttctgatcaccagaaaccgtcaagaagactgaaaaattgcggcactggcggcggcagttcaatttcatggcggactcgcttcaccagcttaaaaacaaaaatgtgaaaaagtaaaaaaaaaaaatcttcagcacgacgtcatttagcgtgccgccgactcgcctcccccagtacagatcatccacccatcccaccactgctcctcccaatttcgcgcactcaaccacgcccctccccacctcttaattagcccccccccctcacctcattaattattaatcaccccccccccgggccggcggcaaagatcaaagggagaaaaaacccattaatcattttcacaccctgcgatgaaagctggacactaactacttggattaacatggaaatttgagagttcgagcttttgttcgaattcggttccttcgttcggaatttttagttttgttttcttgctgctggttcattttgtagttaataaaagcctaactgttaaaaaattaaaagtatttaaaaaagattaacaaattatttgaatgcaatttttttttgcatatccactcgtacgaaaacggcggtacgaaaatgtcccccgtacgaaaacggcggtacgaaaacgtcctggcccggaattcgtaaacaataaacaaaacgccaaaaaagtttacattgttattaagatgctttatctttttaaacagggattaattgttttacgccatttgaagaacaatattttcattgtgttattaattaatatattttaaagcatttagcacaacagaaaaatggcaaaatattatgccggccgaagaaaaaataaaaagaaggcagcaaaaggcacttcaacaatgggaaaataagtttggccaacttgccaagagatcccggacgacgggccgccaaaacatcgccggcaccgtctcccatgaggcgggccacgccaaaataacgtggcgcaacagcccaaggaaatttttaaaggtttgttcaagcatggatgtccgggtgcacttcatcacccccccccccgtttcgttttcattccccaaaaatttaaaaaaatgttggttgaacaattttttagaaaatttttgaaaaactaagcaattcatctaaattttgaacaaatggaaaatttaaatgcattttccgttattttctcatataaaatatttggggttcttgaaaaaatccctttttgattaagatgaaaattttgagctcgagagaaggctggacgatgcatagcgggccagaccccgagacttacacgcggagggaaatgaagcgccttatggtgctggcggtagcggggaaggttgccgaggtgaaggcggtcgggcattcgtccggctgggaagaggacgagaaggattggtgccgcgtcgccagaaaggtaactgaaaaatgaattgaaaatgaccagttcaaattggcaaaaccatgcgtttcggtctcaaaaaaaatttttttgtaaattttctgactcaaaactttgtttaaaaatacatggaaacaaagcgaaagtcatcactgtttcaataaaatataatttcaactatttttggattaaaaatggaaatttgttagagcttttgttcgaattcggattagaattggtcgagagggatgccgaattctcgaaacgtgtttttagaaattacaaaaaaaaaaaaaaaaaatttctgggaccagtaaaacacattgttgccgtttaattgcagcctcaagacttaaaaaagtgaaacaaaaataaataaacttataatttaagcttgccatgacgtcgacaagatgggcagagattgaaggggaggaggagaagagggcgtttgtcaagcgggaggtccggcggttagagggatgggccatgagaacggcccggaaggagttggacgccgaatggccggatgttttgcgggtaagtgccaaaaaaatacaaaaaaaaattaatgctaattaatgatgctcctaattcagctctgtgacctgctgatggaaaggaagaccgccgggccgaccgacctcagaacgtttgttcatttttgttaaagaatttaaaaaaaaatagtcaacgggaatttttttgaaaattgctgctaaaaatgagcaggccgatcaaaaaaaacaggcagacgaaggggaaggggggttaatccaggaaattcaaaaacaatgcccacctgatttttgctgccactccaaccacgacgcgttcattccagtcgttcaccaaaggacaccttaaaattttttatataaatttaattaagaatatttggcgcatcgctgtgggaacagaataatccccagcacgccgattattcgtatgaggggacggatggagaggaggatgatgaggaggaggaggagggcggtggaagagaatggggatgaggaagagggggaggaagatgaggaccagcagattgaatttgtgtttaaaaaaaaacattttgatttttttttgtttgataaatttttgttgtgttgacagaaagcttttttttcccaatcggcggtgttcggttccatgccagccaacacattttttttgaaaaccatattttaaaattttgtttttcgtttttttgcacaatcaataatttaaaaacaaaataaaaaaggacgcacaaattcagaaaaatcttttttttttactccaacccctcacactcaaaaaacttttttacccaccgcccggactcgtgtctggattccattttttcaaaattttatcagacaaaaaaacactgctgcaccttcgtattctggagagacaaagagagggggtgaacttcatttccccccgtcgtttcccccccccccgaaaaaattaaaaaaaaaatttccaaacctagaaatttttcatcaaaaaattcttagaaaattccttagtaagaaaatttcaaaaaaaattttttgaaaaagagtgcgagagagatagagagagaaaggagcagagataaagaaagtaagacagagatagaaaacgtgcgagagagggagagaaagaatttattttctgtcatttatttttgcactttctgtcgcttacctcctctgctcatctgtcttttgcctctggccaccaccagcttcagcgcggcccctagtacacattgatgaagccgttccaacgcaattccaaccgccacttgcgctcgtcgacaatctgtgccgatacaatacaaaggaatttttagaaataacgatttaccatatttcctatacccttggaaaacttagtaaaaaaaaattgatttgcattttcaaactttcttttttttttatttaaaaaaatttgtgttctctcacccctttacgcaccatttgacaccgaaaaactttttaaacaaattttcattcgttaattttatgaggaaaactaagtttttgtcaagaaaaattcaatcgctcaaaaatttaaaaaaacggagggggaatgtttttgaaccttccgtcgagttaaagccgcagaaaaaataagtaaaaacctaagaatcccatccctacttatttcacactgacatcaatggccaatttcactttgtcctcgtttttgtcgtaagagcctttgctggggtccatcagttccttaattgttcataattggccaattaagcgaattttcactcaccacaaatgaaatgaaattcgggaatccccacgttcccctgtagtgattacacgcaagacgcgctacggcgcaggcgccacttttggccagcgacaggcgcaacagttggcggtgcgcttgtgcgtgtgcctgtccgggctcagggcctaaacgtgcatggggttggtttgtcgacacattttttaaattttcagaaaaattcaataaatttgaaataaaaaaacaattgtttatgttaattgatttattgttttctccttgtatttccaagaattccttttcaatgaatgccaataattcattcaatttcaaaaaaaaatttggggagaaaggaaaacgacggccggcaaaaaatttttatttaaagaaatgcaaattttattttcctacttggatttacaaggtgcttgccgatttggtcatgtttctccatttctataaaattaaattcgtttttcaaaaaaaagtattcaattttctcgccgtatttcttttgttgtttttaaatggaaaaagtggaatccaatttaaatcaaaatgtaattaattagaaatttggttcacggcctggatttctttttgtttttgtcaggaaaaaccaggccaagtatgacatctagataaagtcctatttcgacacgaaaaacattgtttcggcaacatttcgaattgtatcggaaaagagggaagcgaagaattccataggggcacgttgtgaccaaatttttgatagaccatccattttccggggatttggaaattcattacttttgcggtgagtgtcaattgtacatattgtaattccttaattggcataattattattctcgaacccacgactaaaatgaaacttgaaaaaaaattggagtttgacttaaaattttaaggttttcttgttgagctttttttgcaggtagggggtaggtggtgggaaaaaatccacaaaaaaattatctaatattttcccatttccaaaaaaaaaattttcagacggattgcgcgcgtttctgttttcaatgaaaatagaaaattaaattaaaataacaatcaataagggaggcctctcgcaatcaccgagcccaaaattttcacaatcaattaaaaaagtataaatgattctgctggcttaaatggcgcgaaattcatataaaatttggtttttgtagcgttgtattttcttttatgtacacaaaaaatgggaaaactactgaaaattttttaaaaatgaaacctgtaagaaaaaaattgggtttgcttaattttttgagttaatctggataagaaattgaatctttgtttttttacgaaatttaatactggaatgtaaacagaggatgggtttacggtagttaccgggatggtagcataccaaccccggttcacattcactgcagatgaagggaaaccactgcatggcaaaataaatggaagtgatcccaatcccctccccccctctacccgttttgatctattttcaactttttatgcataatttgctgtccttttctttgcccatcaacaacatcataatgttgctggatcaacaaattgacaagtttttgggatacccccctatttttcgtataatttgctgactttatgcccccatccccttttacctaaatgtttttagttattatttgcaacatttccccttgctatgtcaaagggtggacgcccccccccccctcattcgcttatcggcattttcgctcccccaattttctctgtgtctgctattctcatctcttcccctctctttcacactctccatctctctccctctcacactctctcttattttccactgtctgcctctctccctctcatttattctctctctctctctcatttattctcttctctcattttgttctctgcctgcataatatatgcatggcagcatcattcgccgctgacgcccccccccctctcacttcacaca

SEQ ID NO: 1628 - DNA, 3734 bp, Heterodera glycines
tcctttcagtgctttgttccattcagctctctcctacctgtacgtcttggtcagtttgggccttccgcttcatcagctctttgacgcccctcaaatcgctgcccttttccgcttcgttcagttgcttctccaactccgtcagtcgcgcgtttgcctccgcaattgtctcttccaaggatcgttgctggtccgcttgatccaatctttggcccttttttcgtgccatttcttccagctcggcccaattgtgctccaatttctcgaggatgggtttagtttggtcgggcaatgctttcccttggcccacaatttcatcgcccttctgaaatgccattgcttccatggtcatatctccggcccctccctccctcaccctaattagtcgtgccatttctgctcggttcgcggccaactcggccacgaatgcttcgtggcgcatgatctgtcgtttgatattcggcttgctcattggcaccgtgccgtcgtctcttggctcttccgcgtgcccttccccgctgtccatcagtctccgcttctctcccatccacgcggcaagttcttccgcgtctcttcgcagtcccacaattgccaatgcgttttgcaattccgtccgtcgctccgccgccctttcccgcactctttcgaaacccttctgcacctcttttcgttggcatcgaattcgttctgccgaggcgtgccccaaactgatcaaacgattggaggcatttgcgaatgacagcaaacgctccttcaaaagcaatcagcaattggcttaatcccaaaaacaaagcttaaaccgacctcttgcgcacttattcgtgcttcgaactgttcatgagacttcagaaggttttggacgccttccactgagctaaggacgacttccaactccaagaaggccatgtgaccgcgattcaatgcttcgatccgttctgcctcccgggagaatgccttaaccaaccgtactaattgctttctttgctttcttcgctttcattcccaattttcttccccccttttctccatttcccttccgccctcattttcgacctgtaactccagcaactgcttgcattccgtttcgcgcttcacccattcgctttccaacgtccctttcgcttccgccaattcggccaatcgcttttccactccgttcgctgccccttttttcattagacgccctccgagttcttcggcataagaaaattcgtattccttcgcctgcatttggtctctgattttggcgtgccggtggaggacatcctccgcttgagaatgggccgagagaggctccaaccgaatgcaatcgctggtctttgccgtccattccaacagctcccttaatcagtgagtgagtggttggctgtaagtaagctttcagcttaatgagttatagtcatttgctatccctgctggccagtcacttcccccccctgtgactgcgtttgttgccattgccatttgtcccactatttaagtcgcccctcccctcacccatccgttcagttcagtccgtctcacctcaccgtccgctcgaatagttccctgccttggctttgttccgcctcttcgatgcaccgccgtgccttggtcagcagttgtccgtacattctgtccaattcgtccgttctctctctgatcgcctgctgctcgctttgcttctgctcctccattatttcttccgcttttcgcctgagtgcggtcattctttccccgagtggtctcaaatccttttaatgtttcggtttgtccctcccttttttttgcattccctcgcccactctttctaagttctgaaagcgtctctgtacgatttgcagtgttcgcatgtccgcttctccgcccggcttctgctccaacagtgcgctcttctccgtcagccaatttcgcatgtccgcgcattcgtcctgaaactgcgccagccgtgccgtcctctccaattcgttctgtttgccattcatcgctttttgtaattggttccacaggtgacgcatcgctttctgtgccgcgtcaatgtcctcactgcgcgagtgttcctgctcgagcagttcgtctgctgtcgcgtccaattgtcgcaattggacggagccttggccacggatttcgtcgcgtactttctgcaaaattacaatacaaataaactttttatgtacagtctcagtcagtcgatcacattgaatttgtcttccacagctcgcgatgtgttcgatggcaattggctctttcaatcgcttggcacactcctcgcgcccattgctcaaagtcttgacattcggcgaagaatttgaataatttcagcgcctcttccaatagttttctgcgtcgttcggcagttgcgcacagtcgacgatagtcggcactcagtgcctttcggcggtttttcacgacggaggcgccatcgagaaattcggcacgcgatttgggggaagggcggtgggacgaaagttggctgacggtgatctttgggcagatagtagaactaattaagagggtgggggcgcaccttctcttcatccggggccaattcgcagtaattggccggcacgtacccctccacgccatgccgtgtcagcacccgccaccagtcgcggttggtgccgtcgatcagtgccaactcctccccaccgagcacttcaatgcctttgccgttgtacgggtacagcaccttggatgcattttgcaaaagccagcgcatggtccatccgttaccagtgcctttggcacaacaatttgctcctcgagttgctccgcttccgcctgtccgtcgtccgtccgctcctccgcctttccctcgccgccctccgcacccaatgcgaattccatctcggacatgccattggccaattgttccaaccgggcaatttccgctcggtacgctccgatttccttctccaattggcgatgccgctgacaaaggcattcggccgtactctgtcaaaagcatttcgtttttctattagcactctttgccattcctcccacaatgtctcttccgatgtcgtccgagtgtgccaacggcgccttttcgcggatccaactgtccgcttcatttgcgtcttggaagaattgggccaaccgttccgcttcggtcagccaatcggtcaacgcggcgtttgtcgtccgcaactcttcccacgaccttcaaaatccgttccgtgcctttgccctccctcccttttcccaccgttgcaaagtgtcggcgcgccattgcacttcccccggcactcccaacttttccccatccgaaattagccttttggtcctttcccattggctttgcatttcagtctccaaagatttgtgcaatcgttgcgagtcgcgcaaagcagaaaggtcgcgcaattggagaagggcgaagcaggcggagaggcgatcggaaagccaaccggacaattcatcgaagtgttggacgaacttaggggaaaagcaatggccaattaagcaatgccaaaatgattaagcaatgccattacttggacgccccgttgttcatagtctcttttccattttcctacctgaaaaaactcgcgcgtcttttgcagtgccactcgccgttccctggcgtcccttcgcagctgatcgtactgcttgccgaccgcgttcagtctgagctgcaccatctccaacgccgcctctctgtggggcggctgagttttgctgctaagttcggcctttcttcgcaatttcctcagcatttcgccttttgccgataagtccgtctccgccagttcctg

SEQ ID NO: 1629 - DNA, 2869 bp, Heterodera glycines
  unsure (1)..(2869): unsure at all n locations
caatcggtcancgcggcgttgtcgtcgcactcnnttcccacgacctcanaatccgtccgtgccttgccctccctcccttttcccacccttgcaaagtgtcggcgcgccattgcacttcccccggcactcccaacttttccccatccgaaattagccttttggtcctttcccattggctttgcatttcagtctccaaagatttgtgcaatcgttgcgagtcgcgcaaagcagaaaggtcgcgcaattggagaagggcgaagcaggcggagaggcgatcggaaagccaaccggacaattcatcgaagtgttggacgaacttaggggaaaagcaatggccaattaagcaatgccaaaatgattaagcaatggcccattaagcaatgccattacttggacgccccgttgttcatagtctcttttccattttcctacctgaaaaaactcgcgcgtcttttgcagtgccactcgccgttccctggcgtcccttcgcagctgatcgtactgcttgccgatcgcgttcagtctgagctgcagcatctccaacgccgcctctctgtggggcggctgagttttgctgctaagttcggcctttcttcgcaatttcctcagcatttcgccttttgccgataagtccgtctccgccagttcctgccccttcatcagttcgtccacttcggccatgtgccgtcctttttctcgaagttttagttgcgccccgagactgtccaactcctcgcccaatgtgtccaatgcctcgacgagaaggctgagctcttccaacctaagaagaggagggtccaattggccatttatggcgagtgtttgcattgatcattcccctcttctcttcactctttcatggctgcggctaaaaagtgccattttctcccaaaatggcaatgccattttcgatcagagggactcggcattgtgttcatgagaatggtcgacctgtccaactccaactcgtgctcttccaacatcgtcagaaatgcgttccatcgtccgatgatttccctttctctctgcgcaatctctgcgcttccgtggaatcgttccgcctgcagttccgcgctgagttccttcagcaactgaaagcgttccttcttgggggccgcctccgtttggatgtttcgcatcattcgcttccccgtctcaacactttgcgcattcggcgaacatttgaactgtccgaggacgacggaactgaacgaattgatcactgatcagtctgttttatcactgataattcggtcggtgccttccgccgattgctttcgctttcatttgccttttgcgcttacatttctcgaagccacgcttcccgtacatcggcctttttgtggaagagttgggcgcggtgttccaatctctcctgcctctgcaactcttcgatcagtgcgccttgccttgcgtgctccgccttttccaattcgctccacgcgccctccaaatcgtgcagaagaaacccctcggggggcgcgtaagccctgcggcgcgaagcgtttcgctttgtttggatagcgaagaaaagggcctccaactgaaaagggaaatgatgtgaatcataaaagtgccaatttttcgcaaaatgccaaaaattgcgttggtccgtccgtcactttgcccttcccttcgcacgccttttacctcgcccttttcccggtacttcggcggcttctcctcctttcggaatcggttgaattgcgccaattcgtctcgcaactccgtcaaattgttggggaagtgtcgggcggacaaccagctgatcgaccgtcgcacccaactgatcagctcgctggccaactgctcgtactcctcttgcatgccgtcctgctccaccaattctccgatcactttggccactcgccttgcgccggtcatttccgttttttgtttggcgaaaaagtggtagaacagcgacacgtaagtgatgatggacctttgggggaagttcaaactaaggccaatgccaggccagaaacttctcgtcggggtgcgacacgttcacatcttccgcgtccagcagtggcgaaatgtccaaatgcttctccgccacatcgaaggccaagttcaaattgcctaaatcacaaaggcatgcccaattcccccccccccggtccaaccgatcgtttcctgcgggttcagtgcgtcgaagtcgagcagttcgggcctgaccaacgaaagtaaacccaatgagtcgccgccccatccctttagcacctgtgcgcgtggatcagtgcgcagaaggcgagtccgctgcgccagctcgagctgaagttgtccaccttcacgttcgggtagccggccgttttgcgctggcaccacagcaaaagcgcctctttcgcgtgtttccgttcacccgattctttcgtctgcaaaaaattacatttttatggacggatcaaaagcacagaatgatcagtcacctcaatttcgatgttttcgatggtaaatcggagaatgattgtccaaattaagcccaaaatcaatctttcgtttccgtccgttatatcttccgccccaatggttttccaactaaaaaccaacagaatattcctcccaatttctgctgattaatctctctaattgttcacctgaatccgtttgtactttagaaaatccaaacatctgagaagtttttccgttgttttccgttcgttctcctttttcttttacctggttcaggttttcgatcttctgaactctcattcgtcctctggttcggttttcccaatttttctccactgataatctccagaaatctgagcaattaaatcacattttngtttttgctgttgccatcatcaccaacttcatcaagagaattccatccganaaatcgctgaaacaatcgttgatctccaga

SEQ ID NO: 1630 - DNA, 670 bp, Heterodera glycines
gcccagatttatggggagaccgaatctttcgggaatagcttccctatagcctgtactttaattatgcgttggatttctgctccccataattgtttgagtaccccaaacggacacttgaaaaaatcgatttttttgttttcggggcagtccccccgaaccgatgcgcccagatttatggggagaccgaatccttcgggaatagcttccctatagtctgtactttaattatgggacggagggagcggcggatgggtgcgccatgcaaagggaggcgttcccccactgcgcgggtgtgctaaaggtcacccccccccctttgctgttgtcgtcttcgtcgtcgtccactcaccacatcagcagcagtccttcgtccgtccatcaaatgtaatgggatgggtggtgaatgaggggggaggggggcgatccggtggcgacggaatgaggcgaatgggggggggggaaggagagcggagagggagtgacaggcaaagacacctcgggggagagggagggggagggaagagattagcgcaggatcagagtggggacaatttgaatttgtttgggtgccttcacaactccgctacgattcaatcagttcaagcatttattcgttgttctgtcgtcactcgcccaagaaaactatttttagattaaatgggattggaca

SEQ ID NO: 1631 - DNA, 3136 bp, Heterodera glycines
ggaggggtccaaagccccatctgccgcattaccccccccccccccccggtcaaatgaatgagtggaaggaccctttcccgcggatttacccatttatctgttcccttagaatggaatgtgaatggcttctcttctccttcctcattatacaacattaactggaagtgagtggaattgaggaatttagtgatcagatggaaattgggatgggcgagggaaaccgttaaaagcatttaggggagggaggtccttttaaattcagtccccattaatattgtagaaaaaaaaacaactattttgttatgttgagatatgtaaattgagtgttatggatttgttgtgacaatgaatggggcggggggtaattagcataaatagtggtgatagtccgccggtggtttttgttttgtttggtccgccggcgatgtttctgttgtactttttgtcaaatgcttttcaaatgagttgcgattaatcaatcagcagaagatgaccaccccttcccttcccttcccttccattcgcttcttatcttttgacgtccgttctttccattcttcaaattcttccaaccaatcatttgaatgttttcattgaatattctcttttgaaaacaataactaattgctgtgtgttatgtttggatcgccaaaatttaaatgcattttccatttcaatgggacggataaaaatggacattttgcatgccataatatcccttaattaagggagagttgagattctccttttcaaaaacttttttagatactaaatttgtttagtttagttggaaatgacgcgagttatggctgatcaaatctattatattaatcggcagttagccccgcccaccgttcaaaacaaagaatttttcgacgcgatttcttttcccttccattcttctccccgagggtgtttgtttactgtttccctccagcagtgctcattgattttgtttaccattttcaatgaatgcaaaattttttatttatgatttttgcttacatttttgaaagattttgaataattttatttcttaattttattgaaaaatgcactaaaaactaccaaaaaatagaaccttaaaaaatgctgatttatttaattatcgtcaattatataaactctccttcgcgggattttgtgaaaattggtgaaaatttagaaccttttggtatttcggaagagaagaaaatatgtctaaatttttcaagaattttttgacccgaccttttttctcccattctttccaatgctttttactaattttactccatttgcttattgtttttgtttactttattcaatggttacaaactttttgatttgttatttttacatgcattttaaaatattttgtatttttgtattttttcatttctttgatttttttccttaccaattttgggattatctaaatctacctcctttttttcaaattttttgaagtttaaaaatcaaaaaatgtttcaatgggattttctggcatgttgaacatgagtctgacatttaatttgatcaattttaacatgaattcgatttttcaaatttcgtttttttcttccaaaaaggaataaagtattatttaagcccttttgtacgaaaaatgccaggttcgtaaatttaaactcgacttttgctcgaattaatgttcgggattcgggattaaaaattgatttgacttttaaaatttaaagaaccagggatgggccccaaaaatttttggaagtccatacttcctggggtcaaaaatttttcgtaaatcgaattccgatcccaaaaacataggaaatctgaagttaagttggaaattttttaaaatatataaaatataacaaaaaattttaaacattttaataggaaattttaaaattcttaaccaagtaaaagatgtttcaaaaatgcttttggtatatcaggttgaaaaaaaattcagtgattttcagcaaaaccttttttcatgttattttatattgttttagaacatttttgagaaagggattattttgttcaccttttttatttcagttgaaattgtacaaaaaggctaaaattcaaaaaaaaatttgaaaatttctgtctttttttgttacaaaatttcggaaatcggattttcgtgctatccttgctacgtacgttgcataagagagagagagagagagagcaagagagagagagagagagagcgagagggaaatcatcgagaggaagacaaagtgagagagaaggaagagagagagagagagcgaggagagagagagagagagagcgaggagagagagagagagggggggtgagaagcgagaaaaagggattgagagcgagagaagagaggaaaagtgagttagagggcgaggggataagagaggaaaggaggcagagagagaaaagaaaaagagagtgaggaggataaagagagagagagagaggagagaacagaggaaaagagagagagcgagcgagagggaaatcaatgagaaagcggaataaaagagggatgaaggggagacagtgagaggagagagaggaagagggagaaaggaaagagaggacagagagcgacagggagtaagagagaggggagaaagataggagatcgagaggaagacaaagtgagagagaaggaagagagagagagggggagagagatagacagaaagatagagacagagagagagaaaggggggggggtgagagaaggaaaaaaagagattgaaagcgagagataaagagagagaacgaagagagagggaggagagaagagaggaaaagtgagtgagagagggaggagataagagaggaaaggagcagagagagagagaagaaaagaagagagaggaaagaaaagagagagtgagaagggataaagtgaggagggacaaagagagagagagagagagaggagagaacagaggaaaagagagagaggagaaaatataggaaaagagagagggaggaggataaagagagagagagaggagagaacagaggaaaagagagagagtgggagagaggagagaacagaggaaaagagagagagagggaggaaataagagagaggaaagtgaaaagaaaatagagtgaggaggacatagtagagatgaggagagaagagaggaaagaagagagagagcga

SEQ ID NO: 1632 - DNA, 4080 bp, Heterodera glycines
  unsure (1)..(4080): unsure at all n locations
gagaaagagagatgaggagagaagagaggaaagaagagagagagcgaaagggaaagggaaatcaatgagaaagcggaataaaaagagggatgaaggngagacagtgagaggagagagagagagagagagagaggaagaggaagaaaaagaggacagagagcgacagggagtaagagagaagggagaaagagagcagattgagagaaagacaaagtgagagagaaggaaaagagagagcgaggtagagagagatagacagcgggagagagagacagagaaagagagagagagagagggggtgagagaaggagaaaaaagggattgaaagcgagagataaggagagagaaagaggagagaagagaggaaaagtaagtgagaaggcgaggagataagagaggaaagaaaagagagaatgaggagggacgggacaaagagagagagaggagagaacagaggaaaagagagagagagagagagagaggagatacgagagaggaaagtgaaaagaaaaagagagtgaggaggagaaagagagatgaggagagataggaggaaagaagagaggaaaggataaaatgagagaaataaaagacgaaaaatatcatatatatcgttagttgaagcaatattacaaaatgtcttggtttttgagcctaaaatctgattttttggccctgatggtctgattttgaaaaattttcgatcaacccctggttaaaggataaataagtatttggaacatgccgaagccacaaaaattttcggaaatcgtaattacagcggtaaatttttgcggaacgcggaaatacttaaaaattttaataggctaaattttaaaattattaccaaataaataatgatttaaaaaatattttcggtatatttgagtgtttgtatgtgtcactgtttgaattagtgtggcgttttgtttgagttttgcgttaaaaatgagtttgaaaagagatgaaaagaaattgttttgaaaaagaagagaatataaagaaaagagacgaaaataaatagttaagaagaagaagaaggcaaaagaaatagcacagaaaaagaaggtaaaagatttctcctcctaggatgtagaggttagagggagggatggtgggaaatagtgcactgtatgactgtctgtctatgcgggcagcggcagatgggaggggcagacagtgaacagacgcgtgctgctgtggctgctgtgcagcagcagtctgttggacgcgtgcgtggtgtgtgggagggagggagtggggaaaaagagagattaagtggaaaagtaaaagaaataagagaaaagaaatgaaagggagagaacaattgaaaatttgtctcgcatctcttgcttatttacatcccattttttattttaataaaagaaagggaaatgagagtttttttatttctgttttcgcttcagtgagaattttcctatctttcttatataataaagttgagtgtgtgtatgtgtgtgtccattgtttgaatttgtgtggcgttttgtattggttttgcgttaaaaatgattttgaaaaaaaagaaatgttggttttgtttttttcattttcgttttgtcagttttgcaaaaagcagtctttaaaaatgttttctcttcttttttaataaaaaataattttatatgtttattaataataattaaatcgcattgaatgctttcaattgcatttgttaagagaaaaaaataattagtttttgttattaataaaaagcatttggaaatgaatgctcttagtacttttgtaaacaaaaagaaaatgtttttgtaaatgaattcctttgttattggattaaaattgatttgattagttatgaattaatttatgttgtgagtattgtttttgattatggcaaactcgatggaaatgttattgtttttgatattgcattgaaaaagttttgattcaagaatttgttttgaactttgaaatgaaaataatttgcattctttttatttttgttttgtaaaaaatatttgtgtattcgttcattctcattttctttaaatgtttttacttttttggtattttgttgttaaaagaatacgtttatgtttttgatgcgatgtttggttatgattttttcattttgatttttctttttacgctgaaaaagaatttcgtgatattttcgtctttgtctttgctgtggttttttgttgtttttgttgggttacgtttagataagtcgattgtttttcacacaatgttaagctgttttgaggacataatcgcgatcccatgtgggactttgttagcgtaagttattttgtttttaaaatttaattggttgttatgtaatttgaatttttaagatctgccactggtgttattactaaagtgatggaatcggagaaaaaagtcagcgttgtcttggtgtgcggatctggagaaaattttgttgttactgaatttaaacaaaattctgcgaacgctcttcaaaagtacctttcagttggaaatgtaaattgttgtcataattttaaattattttgtatgtttaaggtgctgaagcttcaatctgtcaaagcccaacgcttcaatgagaaatttgatggtcaaaaattttttcaaactccttttccgtttgagtttgttgtgacaaagcactcgaaaatttgtttggtcaagactgaagttttggtggccgagaaatttacgcagcttgtggcgggccgtttttatagtaatgcattaaataaaaatcttttaaattttctttttagaaattaagtgtgttttaacgactccgttttcattaattggagaaatgttcgctgctgttgttggcgatttctgtgggaagcgcgcggatttatttatttcgggcgaaaaactcccagaaatgtttgggcaattggacagcaaggaccagcttgaactaaaacgttgttttgtcaaaattgaaggtttttgcctaattgattttttgtttatctatgatttaattattttgtagatgagtgtatgcagcttaatgttttggcttctgatgttaatgtgtgtggatgtaaagtgacgattgatgataagttggtcactccggtcaagagaaagagtgatgaagcaattttgagtccgcaatcggctaagaaatagtgtgtttttttgtttttgtttttttttatctacacataaataagtgaatgtttatgtttgtatgtttattgtgaatttattttggatggtgtttagctagatttttgtatgaatttaaaagtgttgtcagttctatgtttgtatttgtgtgatgttttggatattaaaacgttatgtatgtgtttgtgtccgttcatttatgtggtgtattgttttgtttttatttataatgtggcttaaggatttccacaattaattgtgtttcgtaatttaatgaagttttaataagaaaatttaaaaattaacgttgaacaggtctgtttaagttcttggttagttatataatttgattattgatcaattttttttttcattgataaatcttaacatttttttctattttgttgaatttgcaattttacctttatatttattaattgtgttgttaataagcatttgttttttatatagacctaaaattacacgatattatattgcagtgatgaatttggcacaattttttgtctggtgattgagagaccggaagaatatcggagaattgcttaatttgagtcgcgttgcttgaaatgccagagaattgagtctcggtgattgattctggtgggttgagtcctggtgattggaatgctgttgggttgagtcccagtgattgaaatgctggtgggttgagtcccagtgattgaaatgctgttgggttgagtcccagtgattgaaatgctggtgggttgagtcccagtgattggaatgctgttgggttgagtcccagtgattgaaatgctggtgggttgagtcccagtgattgaaatgctggtgggttgagtgccagtgattgaaatgctggtgggttgagtgccagtgattgaaatgctggtgggttgagtgccagtgattgaaatgcagaattgagtcccagtgattgaaatgctggtgggttga

SEQ ID NO: 1633 - DNA, 1212 bp, Heterodera glycines
ttttaataaaaaaatttaaaaaattaacgttgaaccaggtttgttttaagtttttggttagttatataatttgatttttgatcaatttttttttttcattgataaatcttacatttttttttttttgttgaaatttgcaattttacctttatatttattaattgtgttgtaataagcatttgtttttatatagacctaaaattacacgatattatattgcagtgatgaatttggcacaattttttgtctggtgattgagagaccggaagaatatcggagaattgcttaatttgagtcgcgttgcttgaaatgccagagaattgagtctcggtgattgattctggtgggttgagtcctggtgattggaatgttggtgggttgagtcccagtgattgaaatgctgttggtttgagtcccagtgattgaaatgctggtgggttgagtcccagtgattgaaatgttggtgggttgagtcccagtgattgaaatgctgttgggttgagtcccgttgaagttggtgggttgagtcccagtgtttagaatgccggagatttgagtccattgtttggaatgccggagatttgagtcccagtgattgaaatgcaggagaattgagtgccagtgattggaatgttggtggattgagtgccagtgattggaatgctggtgggttgagtcccagtgattggaatgctggtgggttgagtcccagtgattgaaatgcaggagaattgagtgccagtgattggaatgctggtgggttgagtcccagtgattgaaatgcaggagaattgagtgccagtgattgaaatgcaggagcattgagtgccagtgattgaaatgcaggagaattgagtgccagtgattgaaatgttggtgggttgagtcccagtgattgaaatattggtgggttgagtcccagtgattgaaatgtaggagaattgagtcccagtgattagaatgctgttgggttgagtcccagtgattagaatgctgttgggttgagtcccagtgattgaaatgttggtgggttgagtcccagtgattgaaatgttggtgggttgagtcccagtgattgaaatgttggtgggttgagtcccagtgattgaaatgttggtgggttgagtcccagtgattgaaatgctgttgggttgagtcctggtgattggaatgttggtgggttgagtccccagtgattgaaatgcaggagaa

SEQ ID NO: 1634 - DNA, 1308 bp, Heterodera glycines
  unsure (1)..(1308): unsure at all n locations
gaatttttttttatcaaaagtttctaggtatgaaaaaaaaattnagaaatttctgcggcgatattttgtctcggcgatatttcaggcaccgatatttgtcccgtctcctaaatattgtgcttttcccccacccattcgagtcaattttttcaataaaatattttttattttcaaaagatatggttttccgggtcactcattgatcagtgatcacgaatccccggcatccatttcgaccaattccggatcacagacctggagtcgaacaaaaatgcgaaaatgcaaatttttgtttttaccagtttctgtctgtgttcacgaattgcttatcattgcgtcacttttcttcatttgttttttgtttttaagttcgtcgcctgtttccttgccctcccttctgtcttatgctggtgtttctctgctgcgatctcatccaatttgctgatcaattggacggacttttggacttgcgtcaactttcgcgcggattacactgaagtgccgttggtcactttggtgagttttgaaatttggagggattttcaaggtcaggaaatcgattctgacagtcattttgaccaattccgaacctcggctcttgattcaaatggtcaaataaatttgagttttagtgaaaattaatttttgattgggtaatttgtttaaatccgattttagggttcaaattagtccaaaatggatgccaggatgagttttccgaccctgaaacctctaaaacatctttttactatttttttttttttgttttttttgcattctgaacacagttaagtgtaccccatttttaagatgctcagcatcgtcatggtgtgttcgtccgtcgtcgagatgctcttcaagaacaagcattcgctggcccttgaatgcttctacatctgccggatgtacaaacagctgcaggaacagcagaagaagaacaagtgcggaagtgccatcgtgtggacgactgaagcagagacggatggcaacgatgctggtgccaacaaattcaacatatatatatctagaataaatcaggataatctattccttccataaaatgctgtgaattcttttcattttaggccattgtcgccaccagcgtataaagaagaagaagcggatcaaagcaatgaaaaggtgtgctcgacgattcacgggcccagtgatcagcggaatgaagaagaggataatgaagaagcggatcaaagcaatgagaaagtatgcagaacgattcacgggcccagcgatcatcagcggaatgcaaaaggattatgaagaagcggatcaaagcaatgcgaaagtgtg

SEQ ID NO: 1635 - DNA, 1700 bp, Heterodera glycines
gaattacttcaaattttcagttgactaagcgagccatcggcacgggttgaaaattcttagctaatttaaaagttagcgtcaacaaacagagttagcataaattcacatttccaattaagaattcagaaaaacaaatcattgccacaatccaaatcaaattggacattgttcaaattgttgtcctccgaattttcgtctttcttccgctgaaccgccgccttctcccaaattgggtatcgcttcaatatccaaataattatcgtcttctttaatcagtgtcagggagaaatgcctaaacaacaaattggaaaacaataatcaaaggcaatttcaatcaatcaatcggtcgtttaatgaaagagtgagtagtggtccacacacctccttgaaattgttgatccattcaagctttttgggatccgaagaatgatcagcagcagagcaatccaatcgctttggttgtccgtcttttctcggcgtgtgcagccatttggacaaccgggactggtcccggtcaaaaccgggacctcggtactcagttgtcagtgttttggtcccggtcccgctctactctattttttcactaatggtactcaaattttactataaaagttccctggtttcttcttcccctcctcattccgttcattcgctcattcatttttaaccgaaattttccccgctcatttttgttgctgcaaaaatgccttcttcagcacttcggtacgtttattatttcttttttctgtcgtttcgcattttcttttgctcatttttgttgccaaaattgcaagatgaaaatttaaaaaagttccaaaaccaattttgaaggttttagcttcattggcctcaaaaaatatgaaaaattcacttattgattccctcactttgatctttgaccctttcattgattcatttgcccaattcatttttcagtttgtttgccgtgactttactgttggccagctctggaagcattctttggtccttttttgatcatgtcaaaagccttcgaactcgcaaaaaaatgtaaaaattaaacaaaaaatttaaaaattttgaaaaattcttcaatttttcagctttatctctgccgattgttggcttctggtgttcgactttctttcgccttctcaacttggctttggaattgcattgatcagccgtcgatttgacctccgagtggacgaacatttcaaaacacgcaaatggaaattgaacaaacaattgctaatccaatgggacattgaagaaaatggcacaaagaaaatgcaaattgtcgaacccaatggaaatccattgccaattccgcaagaaccgttgccgagcaaagtgatcggattcaacggacgcattaatatcatgtaaaaaatgtttagatcagcgcataggcaaacccttggcttcgggggggggctgaatttttaaaaaatcgctttttagggtgtttttttttcaattttagaatcctgtctgaattagggggggggggggggtaagagattgtttgaaattttcaataaatttgcccatttttcttgaaattttttatttttttagattggaatttattttctggcacttttcaggtacatcgatcaaagtgtgctcacttttctccgccgcttccatccttctttcgccgccgcttatacagtggatttggacattatcaccgaagacagtcgcatttggaattt

SEQ ID NO: 1636 - DNA, 2962 bp, Heterodera glycines
attttctggcatttttcaggtacatcgatcaaaatgtgctcatttttctcagccattttcaccattttttcgcctccacttatacagtggatttggacattttcaccgaagacagtcgcattttggaatttctgttgctcaacatttggccaatgttccgcgcttcaattcgtggtatcaatttgaacgccatcacttttcgtcgcatgtgccaattggccccatcaatgctcaccgattgtccagcacttcgttatgtcgattccgaggatgccatttttcccgaatttcttctgcccgatgatgacaatgcccatgcggcggatggccaagcggtggcaaaatggctgtttacgcctcttccggatggtgcgtccaagcggatgaaatgtcttgtgaatttatcggtggatcaatggacggcttctatggaacagctcagaacggtgagcatcggaacgggcaaactcagtctggccaactcagtctgagccaactttaagcgtcaatataactttttaagttgttgactgaaagaatatccaacaatcttgatatccattcgaaagctcttcacaggctcaattagtctactaaataattacagagaatgtcaaactgtaaaaaggatagaaatagatggagacaaaaaaaaacttcgaaaattctgctttttttttttgcggttttcaagcgacaatttttttttgttgtgagctgcttaatcacttcgaaatagctcagaaacatcatcttctaaacattaaaaagcttctcgattgatacccaatgtttgttaagtttggtgaacaaataaaaagaattaggtataactttttgaactttgctgattgtgtgagacgggtttggccagactgagtgccccttatattcttcctctatttaaatggtttttcaaatgatttttgtcccattttcaggcattttcaaatgcttcttcaccagtgactttccacattaacttgacgctttcgtccactttggttggctccgttgtgccattcttcatgatgaacgaagcgactggggaacaattggcactggaacaatatgacctggatgactttgagctcttccgttgcccaattgaatgggattgggaaaattggaaaaatgagtggaaagaatcgtgtgctgctcgaccgagacggattagcttttggatcagagacggcggatttgaagaggggtgaacaaccatttaattaaaatgatcaatgctttttttcctgttgttttatggggtgcactatctcaattccccctcattgtttccccccgagaaattaaaaaagaaatttcgttgctaacttagaaattgttcaagaaaaaatcttagaaagttttgattttgagccgaagttatgaataattttttgtcaaaaatttttcatttaatggttttttgactaatgtctcccagcacctttgaaacggacaggggatatgtggcacaaaaaatcaaggattgttaattggttggactcataaaatgccatttggacccataaaaattgaatgagcttaaaatacaatttaaatctttatttttcagtcttctcgaggccgcttctcctggaccgagtgatcagcagcagtagaaatgaatgaattaattgatggttaattgatgcgattatatgaccgaaatgatatgttggcactgtgccatttcaatattatattgtataatttgcttgtatgtacctatttgtcctttgcttgttttccgtaaaattcgttcatttccattttattttatgtgcatgtgtaaaatcattgtgatatgtaatcattgttaaaaaatgatttgtgataaaatggatttgatttctgaattttacaaaaccaggcgggatattcatacaaagcatcttttttctagcattatctcttccaaataaaaatctgaacaatttaaatttaatgaaaaatttgttggcgttctattttttcaaatttttaattgagcctggttttaatgacaaaaataaaattcattttcgcgttatggccattatttttggcaaacagaccattttaatctcctccatccctttcaaatcggtcaattttgttttttttttaccaaaaaaatggccaagtaattgatccatttgagccccttaaataatattgtgccgcggttgtgtgaatttgcgcgcttttattgttgattttcattttaaattttgttgcttaaaacgagaaagtcgaaaattgaaaatttttattttattttttgcttttttatgtgtatataaagacgtcaaacagaatttttcattcataataccgcaaaaatgaacaaacggtaaggaattttttaaaattccaaatttttgatttaccctaattttttccatgtttcagttggatttgtggcgacgtttggatggacattctcccatcttttaatcgtccccaacttggtctcaaaatggcattgctttccgaccgtttcgatgttttggtggacgcacattttgatggaaaaagcgaattgacaatttggaggatgatcagaattggcaaggacgaaggaccaaaagcgaaactattagtggaaattaatggctattttgtgcaatttccgatgccgaatcgtccgttgcctaacaaaattcgttttcatttccttcttattcgagtaatttgaatttttaatatatttaaagcatttttatatgtcttcgagctacgattgatcgattctgtgctcgcgatttctccgctccgaacggagccgatttgggacgagaagtggcaccgatttgacgttgtggccgatacggaaccgaggatgaacggcggatttgggatgttatggccgagtgaaatttggccacttttcgcgacgaaaccgttcgccgtttggactttgacggtggcgatgatatggcggattgcgtcaccgcacttcaccaacaattctcactga

SEQ ID NO: 1637 - DNA, 3952 bp, Heterodera glycines
caattttcatgcataactgttttgataattgtctaatcgcaaagcaatagcttagaaaaagcttctaaatagattaagctttcgaacgacaccaacaatgttggatttggtttacaaagaaaaaagttaagccaaaaacatgctggcgccgaaacgcagtggacccgggaaaaataccacctaacaaataacaaacatttaaacattttttaaaattatgcgtctctaccgcacatattagaagggtccgtggaaacagagaaagagaaattatgaaaattgctttcagaaaaaattgtcaaatttattttattgcctctttttttatggtcgtgtgaactgcaatagagccaattttcctgcattcgggccacctaggaattccttgaaattttcaaaatttttgccaaaaacttaatctgtgcttgtttaaaaaaggattttccaaatcaattacatcaatcaattgaaaaaggccaaagtgtgctaattgcagcaaaaatgaacaggcggtaaagaaatttaaaattaaccttaaaaattttaattttccattttttcccatgtttcagttggatttgtagcgacgtgtggatggacattcttccatcttttgaccatgctcaacttggcctcaaaatggcactgctttcttatcgtttcgatgcgctggtggacacgcatttcgatggcaaaacggaattgacaatttggaaatggatcacaattttcaaggacaaaggaccaaagccgagactttctgtatggattgctggcaaatttttggattttccgttgccggatcgtccgctgcccaacaatgttcgatttcagtgccttcagattgagtaatttttttcaaaattgttgtttatgttaaagcattttttattttttcagatacattgaccactctgtgctcacatttctccatgccaacaagcacatttgggacagaagtggcaccaaattgacattgtggccatacagaaccgaggatgaacagcggatttgggatgtttttatccgtgaaatttggccactttttgcgacaaacattcgccatttgagctttgctagtagcgttgatttggacaatttgcgtcttcgcacttcaccaacaattctcactgatcttgatcaattgcactcaatcgattctggtcatctgtgccccgatggaattgctgattttgatgtgctgaatccaactgctggccaagtgttgtccaaatggttgcacacgccgagcaaaaatggtcaaccgaagcgattgcgttacagtaattttccactgaatctcggatgggtcaacagcttcaaagaggtcgtctcgccagaattttcgtcaatttgtttttgttttaccaatttttgtgtgtaggcatttcgccgtgccatcacttcggtcagttaccatattcaactttatttgtttacgacaacaatgacaactgaaccatttgaattggtgaatggacggaccaatgagaagctgacactgaaaccgagcaaagaatacaatttggttatttggctgttgcaacggtgcccaattggggagacgtcgacggcgccagttaaatgggcagaccagcatgaaaattcgggtgccaatgccaatttgaacaatatcaattttagtctgtggattttcaataaaacaattgggtgagcagccaaaacagcatttgattttgtcgaaaataaaattaattaattttaggccattgtcgccaccagcggaagaagaaaacgaagaagaagcggatgaaagcaacgaaaattaaattatatttgatgaaatggtcgatctcaatttgatgcttattttctcgcagaaatgcttttgtttgattctttcgtttgaatttcaaaaccattaaaaacggtcttaatcgctgtaaaaatgatttttgaaatgagtaggaaacatagaattagggggcgcgtttgcccttttctaggctgaaaaagtgccggaattgtagtgccaaatccagcccgtgactcaacaactgtccacgctataaaaagcgctcaaacgcattttaaacgattttttattgcttaaatctagggttggtcgggaccgggaattttgggaaaaccgggacctttttggttgaataaccgggcatatatttataaaataaatccttgcagaaattgcccccctctggctatggcccctgtttttctgatccaaatgttactatcatcaattttcctaaaaattacgcctgaggcaacaaatttttggcgggttctattttctgttctgtgcccattttccatgacgtaatcaaaaatcggcggatttgcttaatagtacaccacccaacacaacacaacggcgacgatatacaactgagatccgatcagtcattcattcattaatttccacgcaaaacaatggcgcaaattcggcgcattttcgggcggccgcgggccggcgacgccgagctatttgaagggcacagcgcgaagcggtgcgcgaccctaaaatcctcttgcgccgccgccgattggcggcggagtgatgtgcggggaaggacggcacgagatggtcatttctgtccctgccatctcagtctcagcgcatgaatttcaagttgtaatccattttaatgtgtaaagttgtccaagcaacaaatcctaaaattttttgcacttaaaaattttcagtaaattctggatggatttgccaattaattgaaattttttttaaatttcgcgatcaaatttttaaaaatttcctctccccgcaacgattggcttccccactggaccaccaaattttgtaaagcctgcttcctgctgctgtcatacaattacctgcctaaactttagtgatgcttgataccaaaattttcctgagaactcaagacttaaccccgggattcgcaaccgagacgaaaaaacccaagttttttcgagtcgagactttcaagcttcttttaataaattttataaactctcaagctcctgactgaattggcttgggcagtgtgttgcattcaagctagggggacagctgcgccccatctgatcagtttccacatgaattaattaatttgccggggcgctaatgtgacccagaagaagacgaagaattaggttgaattgaactgaacaacaacaacaacaccatcgcaataacaacctacctaagttgggttgtgagctgatctcaaggttgattattggatcaaccccattaatcccggagaaaactcccgaaggtaaaatttggtggagaagcaagcatcatttggatcatttttgtgaattttgtaacattcgggttcgtttaaaactaagtttttttgtttagctgaatttatttttcgggtttttggtcttagttatagagtttttttggttatttataccctttttagtcacttaaaaaatcagtttttcttgaacaaattctctcaaaaattccaaaaaaaagtaaatttccgatggcaccagaccctaaatctcgtctataaaaattttgtaattcacatcccatttttcacaaataatttccttaaattttcgtgaggggtaccgttaaacaaactaaaaacataatgccaatgccacaattttcattttttcaaaatttgcccccacccctattaaattttccattttaaaaattcccccaacacaacaatgccttccttcttccccgaaattgatacccccccccccccccacccatccgcccaaaccgccaaggaatgaatcctttcccaaatggccaccgccgccccctccaaaaagtgtcagaaatttaggtggatttatttccttcaacaaccgccacaaatccggttttggaattacttttcatttcttccccgtacaaaagtcatttgccccccccccccgctttttcacctccggcgctggcatcggcacctcgtcttccaacatcgaaattcacccataaaag

SEQ ID NO: 1638 - DNA, 2680 bp, Heterodera glycines
ttaatcagtatgtctttgatccggatttatatgattcgtattacatcggccgattattatatgccttacttaatctgtgattgttaatttgataatcgttgctaatcagtgcactcagtccgacattgacatcatttgctgattaactttgatcagtgaaatgttattggtccttaccctgatcagcctgttgctttctgatcatggaatgattaatttttcgattttacttttatgttcagcaaaagctatccgcagatcacttcttatcagttgatcacgtgggttatcatcagaggaatcagaaaattgatcaatggcaatattcaatgctttctgctaattgatgaaccttcgtctaattatgcaatttctaaaaatctaaattttcgattttttttttgttaattcccgtttgggcctcaaaatgttatgtaaattttttcataaattatataccatataacaaaatttgtcttaaatttgatcaaatttaaagccacaaaaagcaacccagattaaaaacactaaaacaattattttcccccctaaaaaattgctgccaattatattcatcaacacctccacccaattttcatccttttttgctgccgttgttgttgttgtcgtcgttggtgttgttggcattttatttattgcccataatttcatttgcatcccgcctcgcgcagtcctccgtcgatccgtcgacggacggacgcacggacgacctgtgcgatggatgacccaattttcgcccatttttgttttatgtttttatggcgctgtgccgcccgcgcccaattcatcaatttcaatttgtccgtccgtccaccgttcacaaggcgcttcctttctctctccttcctctttttgcgtctttccgcttcttttcccccaaaattttacatccaaatgaaaaggaaatttttttgttcattttcaaagcgcaatggatcaaagttcaatgatcaatcaaaactcactttttgtatgtgaaaatgccatttttttgcatggcatttgtgtgccgtaggtgcaaaaaatgcttgtcatatgtacaatgtacaatatccgattttgctgattgaaaatgccaacttttgtttgtcataaataactgtgtgccataggaagtgaaaatgctctattttattcaatttttttttaaatttaatttttaaaatttcttcaatgcttccatcggcagcaattctcttaagcgcaccttatcaaaatgttaatttgacttattttttaataatgcctttttaatgttaaaaataaaatttacaatttttaaattattgaagcgcttaatccctttacgaaaaaatgaccaacggcgctgtggaatggccttcgcatgcgattgccgagccaattttgtttgtttaaaaattaaattaattttaatttttttatattttaagaaatgatttttattattttgtaatatgtttttaagtatttaccatgaatattttaaaaaaacttaggagcatcattgttcaaatcaattttcgcccattttttgcacaggcattggattggcatttcacgtccggccaacaaccaagcgcaagcgcgtgtgctgcacaacgcactgcacaacacggtaaaaatccaacatttaaatttgtttttttttctctaattttttcagctaaatatttcgttaataagattttcactgaaatttttgggagaaagtatcaaaaaatgataattgtcaattatttctttaattaattaattaatttttagagcactaatttgcccgcgctttcttcggttgccttcctcttggacgtgtacatgcccggccaatctgatctgctttttgcgcttttgtacgttggcgccaaattgtccctcttctgatcatttaaaaacgccaaatcgcatttcataaattgaaaatcccaaaattacggaccaaaaatatgataaatgaccaaatgtggacagaaaattgattattttgaaatcattaacatttttggcactaatgccataccaaatttgtcaaatttgcaattaattaatggggagacaaaatgctaaccccgaaaaaggttcccaagcattaattatgcttttagtctcattggcgtgacaactgcagtttgcttgctgctgttactaattgtaaggagcaacgaataaagaaataattttaaattaattaattctttaaatattttggaggttttcatttaaaataattaataatttatttatttttatttttcgggtgtttttatgtatttaaaataatttttttttattattttgtgtgtttttatttaaaaataatttaaaattaattttattttcattccaggtatttttcattttgtgcacatctcgtcggaatggcatcatcagttgtggcacttcttcttcaaatgaattcggtgtgcgtgcttcttcaattgccccgtccagcgcctcgggggtggacgcattctcaactgatgaggtaacgcaaatattttttttcaacttttatagttttttatttttatttttttcaaagtttaatatatttttcaatgtttcccgaaaattttatatttttttaatattttggttgtttaattttttcgacatattttttgttgcctaaaaatgggactgaattggtcggtttcaattttttctctagaaattaaaa

SEQ ID NO: 1639 - DNA, 10650 bp, Heterodera glycines
cctcccccgccctttctctcccttctattttttaccataggcccttcgctcactcacaaattgggtcgtgggtggcggcacaggaaagcgatgtgatgcaattgtgttgcagcgacagaacggagagtcggccgacggaggcaaacgcatggcatccgatgcgggaaatgttgttgccgtccagagaaagggagacgagcgacgcactgtgggccaacccgcgcaaatccgagtcggagatggacgtactgaaaagggagaggatggagtggcatgacggagaaaagccagtgaagaagttaaatagaaagggttgaactgaaccatcattcatcattgggaaacggacatgttattgttgtccaagtgcagcgagcgcagtgcgtccaaatcggagacggacaaatgggccaagtcggacagggaattgttgttcagaacgagccgttccagcgccacatttccgcgaatttcgacctgccaatggggaaaatgttagtttaaattgacgcggtgaaatgcgcgataaaaatggctaacaataaaattatctttaccctcgtcaaattgttgttgtccaactcgagcactttcagtgccttcaaatgcacaaaagcatccgcgtcgatggcattgagtcggttggcggtcaaagtgagcacctccaaattggtcagccctttgaaggtgttcctttgggaaaacggggacaaattgacacgcaaacaaagcgagaaaactcccaaatggactcactttgtaatccgcacaatgttgttgtgggccaagttcagcacgcgcagtttggccaacggttcgaacagtccgtcctccaaacgcacaatttggttgccggccaacaccaaccgttccaagtgggccattcgggcgaagtgcgagcggcgcaattcgaccaacttgttccagccgaggtccaactcgcgcagctcggccaagtcgacgaaggcacgttcctccaaaccctgcaaaaaaagattgacggatttgggactcaaaattggtcgaattagcagtcataaatttttattaaaaaaaaaaattcgttgcccttcaatttgacgactggaacagtgaactaattaaaaaatgccttgagaatgttgtggcgtaaactcagcccgcgaagagtccgtccgatggtggcgaaggcgccctcccgaatcagtccaactcgggaacgttcgatggtcagccgatcggcgagcagctgaaaaaagaggatttgtgaaaatgaatgggaagtggacaagctttacaatatttaatttatacaaaataaaacacaaagcaacgaaatgtacgccacaaatggctttatagttgaaatgtcatttttcgaaatccgatttaaatgcgtttggttgcagggattcactaggtatttattaatttattaccctccccccccccaatttgttgcaacgcaataaatccgctgctcataaataattaacctgcgtgaacattggcttcgggtcgttaggcaaaatgttgatcagtgagtcccaaatgtgcaagtgcggcacgcgagtgccgttcagtgtttgcaacgctcggaagacggcggtcattttgtgccgagtgcaaccgatccaaaattggtcgccgttgcccttttggtgtggcgttggcaccgttttgcccccaattggtggcggaacattcaaaatgcattggcaaacctaaaattaaaggagggggggggaataaatatttctgacgcttttcggtatttaccgacgcctcgccaggcttcacaacatttgcaaaggcaatttcaattggggcacatggactaattacaacgggggatcggcccggcgaaagtgttgtgggaacggcaccattagcaattgtcggaaaggaggtaacatttgcatttgcgctgcaaagaccgccaaacggtggggaaaggacgaacaaagaaagccaaacgaagaaaagacccatctcaatgatggaaaattggtggattaaagacattcagcagagggttagcaataagcagcaaaatatgcaatcagcagagaggaggacattcagccttggcttattagtcgaagctgcagaaaaaaaagtaatggattttatattagccatagggatttttaagtaattgatttattaaatccgcgaaattaaaattaaaattaacgatttgagaggttttatcgaaaaatatggagtttgtttttcgggtacaattaaaaaacttggggattaaagggagcctgcgatgccagtaggtgccgctggcgaaactttttaaatctcgaataatttaaaacgcaaatgttaaaatttcaaccgttcatggtgaagcggtaaacacaaaaaggagtatccttatttttcaacgcattgtagatgaagcgatattcaagaattggtaaatttggtgagcagtggggggggggggggagggcctttctctctcccgccggtgaatgttttgctgcttcccactcattcattgcctcagccgtccccgcagccaatcgtaccaggcgccgccatctttgctccctttctctctcattttgtctgcccctcccttccaccccaacactctttccttttcatttccatttttttttcaattttaggctgtttttatggtacttccgggttatgctgcccccttcaaaaaaattccaaaattcgtaatttggggttttcaaggttgctgatcacgaatatgatatttattttaacatctgatgactttttaatcatagatttgacaaaatatctatgattttagaagagtgcaaggaatgatcggaccccctccccctgcccagtttttgccaatcggcgacagaaaagcgcataaattaacacaccatcccagaaatgagctcctgtaccagaaaagatttgcatgtgtggctcagtggtttttgtaagatagtaaagggacaaagggtggtggttcgagtccgttgtgcaacatgaatattttcatttatttttgtccaaaatattaaaaaatcacgatatttgggaattatttttgaaggtttttgccaaccaaattggataatcttggtatctttcgaaagctcttgataatgagaagctttttctaagcaaatgctaagcgatttggtgtaccagagaaaagttatgaggctctaaaattttgtttttcttataacttttgaaatagagcattaacaaaaataaattcagcattaatagatgcagaatttttttctctaacgatatgcaaaatttcctatggatctaacatatagaaaagaagctaaacatagcgaagtaaatgttgtttttcctaataataaaaatattagatagtacgccaaaaggagacaaaaaattagagaaaaaagataatgtttttctctggcactctctatttattggtacacatctcgttttttgggatggtgtgttaattttacaattttcacacataaatattttttgccactgtcggaggaggcaatgttcgacgactgttgcttaacgaaattgggcggtcccagcaaacaaaatcattttaaaatcgaaaaattatccttaaagataggaagcaatttaaaacaagtaatccaacaatgatacataaaaatgtgctttttttattgcgctttcaaaaaggattacatatgtacgtttttcaaatttatttttatcaaatccttcaaatcagttgttgttgttgttcgtgaagcacgtctgaatgtgtcttttgtccggaccatcctaaatgcgtaattatacaacaattgtttttttgtttgctaaattcaaagaagcaaaggcttcgacggggggagggggtaggaaagccacgcaataaaaagacattttggccactgggtctttcaaatttacagggaaaaaattagttattacgtgactaccaatataaaccccggaaaaccgaagaatacttgtacatacttgagacaaatgacttaacattggacgcctcagtctgcaatgcacgaaccgaaagaattttgtcggaaagcactatggaccagtgatggtattccgagcccccaaaaattttcggaataggaaacccgagggtcgaaattttttcggaaacagaaaatcggaatttccgaggcccaaaaatttttcggaagtcggaattctgacttcaaaaaaccttcgggcttgaaacgtccaacgggtaaaaacgcattggtgttcaacaaaatgtttactcatcttaacaaagaattttgtctaaactcttcgagttagtcttttgcagagcgagaggaatcatttgctaaatattttgttgagcattaaatcgttttaccggttggaaggttcggcccgaaggcatttggccatttcagtcccgtgtccataacacggcccaaccgccaaaattcttcggttcgggaattacagaccgagtcgtcgagtattatatcataagccgaatttagtaagttacaagcattcttcagttttaactgagtccacccgccccaggttatgataaaattttaagcagagaactcacaaagaaaccaacaagttggccaattcggacctctccgcttgctttcatggtaactcgtctgcccgtaccgtccacatactcagccaccacttgcttaggttggccagcagcttcgtctgcttctgtaacaaaagtttaaattgaagaacccaaaaacaaacaacaaaccaataatctgaacaattcgcacttttataattggtttgctcattttgggtcgaatttatggaatagtgattatgagcgtttgtttttctgttctgcgattttgaaattgtttattatttttctttggtgttttcgttgtggaaatttttaaaaattattttgccttgaattttgcgctgacccacaaaatgtccaggccacgaaatgtccaagccacgaaatgtcctccaatagagtaaaaacccacgaaatgtccaaaatttttcaaaatttataaaaacaaaattttttagtgttttcgggtcgctgaatacgaatataacctttatattaccccttgcctaaccttagggcccatccgaataataaaaaactcaggtaatagtagggtttgtcccccccctttttcaaaaataattttttttttttgaaattcatcaaaacgtctttcctgtggttttcggggtcgctgatcacgaatatgacattcatttcgaccaatttcgaaccccggacccgaattcgaacaaaaagtcaaaatttaattttttaacaaaattcacatttatcttccaaaatcgattcaaatggatggaatggccattaactgaccgcctttcgtctccaacgcatttgtattgccgttccatccatttgaatatgagcaattttgtctaacactgggcttgacccatagagatatagtgtctaactcagctgtctgttttttcattggcgtattgttcaccattaactattaatagtgtctaactcatacagtgtctgccgtttcttcacacttattgtttttttaactttcgcttcgaaacttaattttttttataatgttaggcaatttttgtcaaaatgatgatatatgtgtgcgcaataaccgttattctaaatcgatatttctttgtttcaccaaaaaactttgcttctctcacactaagcttgagttaagaattaaaatttactcaaaatgaaagggaagcatttaaaaaaccaagtcgcagaaaatgttacacctattaaaacatcataccattttcatttttggtacccgaaacttttattttacttgttaagtatagaagggaaattatttctatactaattgttttattcatgcatcaaaaatcttttatatagtgtccatcacagttactaacaactcaaaaagcgctttagggctcccagtcatgtggtgttggggagattatttactgtggttattcagatggcaattttgtttttatagttgccaaaggactgtctaagacgcatacaaaaagcattattaattttgttttttccatgttctttgtcctttttcatgcctctgattcagccctttttgcaggtatttatcccttttatacaattttttttttcgaaatgcattaacagaaaaaaaagaaaaaataacgaaaaacaaaaaatatatagccttgaaaggaagacctttttaaatttatctcctgtgaattctttggttatcaaccgtcgagcttgtgctaatacacataagagcactttaaaaaatggaaaattccaggcaagccttgcctaactccgtagtggaccgaattctatccaaaattgtgttgcatggaagggtgaaaattatgcaaataaaatttaaaaatacaacgccgcttgcggttaacagtcaagggtttgtcaccgtaaaagattaatgataataagaaaggcaagagttagactcctacaaacaattttatgatttcttaggcttcttattcattggtaggaaataccaaccccactctaaacgacaattaaatgattgaatgcataaatttctggaaagaattaaaccgaactttaattcgattggtaggctttcttccactggacaaacaccatattttttctaaagaaaattttacaataatacaatatacgtatctgcaattttttatgttggaaatttcgaatttgataattttgtcgacgttgagtcccaattcaacaaaaagcagaagcacacgcaacaatcgtaatagtgtcactttcattcattctcccatcaatttaggttttggcttaccaaattattagtgcatcataaacttgggagttattaataactgcctttggctaataaagtcatgttgagggataaatttaattatgacatttggactaaggaatcatggaaacaaaaaattaattgactgtacaaaactgctcaaccctagctttcctgattcagaaaatgctcaaaagcatccttatttttcactttaccaatattgaaaaattgaccctaacactaaaagttaacaaggaaacatcaatcaaatgagcaaccacaagaagtggtgcttggcactttgaataaggaagctgaactctttcatattaatttattacgccaaattctgtaaatttgtggatcaagaatcataaaacttgatgactttaaaagagatgattaaattttatttcctttgggagtgcagtcatgaatgagcgaggcatggcttggcaaaaaatttgctgcatgagaaaacatctattatgccaaaattggaaatggcagtacattctaaaaaatctctgtacatcggaagcaaatcttttgtggattaatcaggtgccaaaattgaaaaatgacaaccctgacaatttccactcgaaaatatgtacattttcatttattcctcaatctaattttcatcatatcatccttattaaatatatttatgatctctatactcatctgcgcctgacaaatcagtgtaattgagctagataaaatgccagtccctggttgaaattttggttacgccacccgaaattgaaattgatcagaaaaaatgaaaattagaactttgttcttattgactgtaaagtgagttatttctatttttacaatgacattttagcagctggacttttcggtaatatttcgagctaaaatggcaggaaatacttttatattaacccgaacctaagagagattaactttggtacaaacgcattctcgggtcaccagtcatgaattgcttttcagagcatagtcaacaaaatgacagcacagactttttgtttgcactcagactcaacggcccaataattacgctacagttaagtggatacagaagaaagttactgtacagccccaatcaatttcttactaattaaaacgcaaaattatgccaaaggaattgcaagcaatcaatgcctcgcggcatgttaacttatggaaaatttaagacattctttgcgattgtagacaaaactttcaaaaaattatttagataaagatgaaataatttagtatgctgttggaagaaaaaaattaaaatttttcgtactttgcggcaaataatttcaacataactccaaacacacaaaaattcgttgagggaagagtggaatccttattaagtctagtcaacaattattaatttaaaggacaagcgcgtaattgagtttttaatagggcttattccatgtgttaacgtccctcttgggggaacagtcaaattggtggcaataaatctgccaaatagaaccaagaaattttatcaaagcattttttaaaagaataaattaatttcgttgaagatataaataaatttttgtacatttggcaattcaaatatgactaggcgcattaggagcttcttcacacctagtgctacaggtaaatgcatggcctcaacaacacgacaaatgcagtacaatactgagatggatgaaaaagcactttggagggctgttcgcggcaggagtttgagtctaaaatccaatgggtcacatcattcgggattggaattaccatttccaagtggtttctgtactcaattttttcaaaagcaaattggagtcttatcgaggaggatttaattgaatttgcgcatcaaaaaagtaaaacatgaagtttaaaaaaaatattttctaattattttacagtcaacagagaatgtagcacaagggtggaagaagcaatggctgcgcctttggaagacttcgattctttgattgacgacacggaatcagcaagcgacgacagcattaaatgtatttgaataattattttatttttaatttatcatgctttaagtcgatatttggaagcccaagtctccagggagtgtttcgatgccctcaattgtttctggcacttcacagtcgtctcatcaatcacaaattcatcttcaattagcaattcctgatttgtttatactggcccggattgttcattcaattcccgccacatctgtgtcatcggaaaggctgttctcgtaacgttccctaattttctaaggtttcgcgccccttccattttttcaaaagattgggattatttttgtccttttattgtaaagaaactttggaaatgttggaaaataattgcgaaattgccaaatgtttttaggggccaactcattgactgttagcccccgacgccgcaagcgcaactcggagatggtaaagcatatggtcgtgttgggcttgtcgctgggtgtttcgtattttgggctgacatcactgaaaaggacgcttgagaagtacctccaatactttgaccaacccgtgacaatattcggaacggctgtcttactgtatctcagcacactctacgcggtacggtagaggccatttcagagaagaaaaagccacagcggaagaagaaactgtgggcagatatgattgattgtccgtctgtctgaggcccttccccagcattttaaaaatatttagcatttaaattatgaattttggaagaattgtacggtaaagaattggacatcgaagacgtacaggaactttacattgactaccgtaagcaaattgcccaaacaaaaggtagagaagataggcgaacgaggatggaatacggtagttcgtcgaggaacgcaaggcacagtatgagaagggaggcagcagaacggagacggtagtaatttggaggaaatactgcgggaaaatgacaatgttggggacgaaatacaaacagattatgaggaggagtatttgagatatgtggaaaaagaaagaaagaaggcggaaagaagagggaaaagcataaaaaaggcaattaatctaattaaaaaataaataaaattacaaaatttatttgaaaaggaacgaattaaaggtaaggccacccgactgacaatgccggacttttatgaataaaagcaaaaggaaaaggagaagcagaggaaaaagacacacataaaaagggaatttcgatataataaatcatttaattatattccattgaaaatataaatcattgttcatcttaaagaaatattagggcatttttggctatttcaaattattacataagaatttaatgggaaaagtgaaaatttttggaatttttcacttaaaaattagagtagcccgtgtatggagccgaacatccgaatttttcagggcccgaatctgaacacggacccgatttttagaaattcaatgtcgggaacccgacccggtaggtcggtttctagacaccccgtttcagaagaaacaatacacttgaatcaatagttttggggaaatgttcttggtaccccacattctaatgattgtgattcagtgatgtttatgaaagtaaaaaaaactgtttttaataataaatcgattttgcgcttttggaattcctttaaaaataaatttatagaactcatgctagaattcacaggtggtcagatggttgtgttgttgttttcctttgggttcattccctctgtcggcaatgattaaatttcttccaatttgagccttaacgggcggtcgttgccttaattgggctgcactagcgactgattcggtggcattgataactaactttctccttctgagccgaaaagaataaattctatcatttttctaaatttgagttggcaattggcaggcaacattaagttcagttaactgagatcgtgcatttttaa

SEQ ID NO: 1640 - DNA, 1136 bp, Heterodera glycines
tttatggcatttataaggtgcccccaatttggccgcaaaattcgctggaacatttgtggcccagcccatcggccacgaattcgtccccggggcccatccgtccgggcgaccatgtggcgtcgcagtcgctccgaatcggacgtctccgccgcgactgaagcggccgaggcgactgcgagcgccgaaagcggcggcggcggctgtggcgacgcgtcggcgacaacaccagcgacggacaagccaacagcacacggtaccgctgctcaaagtgccgctcaacgaggccacccacgtgtgcgaacattgtggccaggtgattaatgctgctcaattagttaattggctcattaataaagccattaagtaaatgaaattaatgatacacaaacaattaatttgatcattaattaagcgaatatttttcttgaaacataaagatggcattggcactgtcttaaaattaatcacttatttattttatttattttttcaagaaaacaaaataaaaaattcttaggctgaaggggacgggctgtggactaaatactagatccaggaattttgaaaaagtcgggattgggatttggattggcatcaggccgagataggattaccgatacttaagtcctggttttgccgggattactggattcaattgatcaggatttgcatggttccagggcttctcaatgcatgatcggctcgccaaacacatcgccagccgtcaccgggaccgatcatcgtcaatgaacgacgagaacagtcgggtccacaaatgcacactttgcccaaagagttttggccgatcggatatgcttaccaggtgagggaatgaaattaatttttaagaaatggtaaattttttttatccgacacgccaaattttcaagaattagcaaaaatttctcaaatccgcccgggccattttggataaaaacacacacaatcattttttcttttttcttttggctgattcagattgatcagcattttttgatttacaaacgatttttctaattaaaatttggtggctcttaaataataaatttggtttgagaaaccgaaaaagttcccgaaacaactgaacaccgagagttaatcccgagactgaaaagccgggaccaatatcagcaaaa

SEQ ID NO: 1641 - DNA, 1631 bp, Heterodera glycines
tccaatttcgtttttttaaaaatatggtttcatgtcaatgtaatttatatgtatgtaattagcactttgttgctgtgttttttcattttccagatactcccagcaattcaatttcaatttcatttcgatttatgataatataattccattattatttaggtgtttctccaatatttgcttctatatttttccttaaaattattcaatcaatttgtaaaacgtggcttttattattatattttttattaaatgaaaatatatataattttttattacttttttgatatttaatatttctgtaacttttttgcttcatcccccgtcatttgatttcaattattattatttatttatttttgaatggctcgggttcgcttctgctactttttccgcttcgttacggtcactttttgcttttggtttacggtaattgttgcgcaacaacaaacacaacaagttggtttgacatctaataaatcaattttcaaatatatataaacatattaagcaatttgatcaaccgttttccgcatatttgggaggtgaattcgaaacaaacgcatggaaaacgaatggcatcaaaaatgggcagccgaccaatgctcaatcgaccggaaacaattggggacagacaaattgtaaaaaaaaaaagttaaatttaaataattatttttaataattattggggagggtaagtgcactttccgtttcaatttaatgatacggcaaacaatagcatattttaacattagtcgaggaaaattcaattaaaaattaaaagggctaaaattttgggtgacaaaaatttcgccgaaataaaaaaatcaaatctttaaatgaacaattttcagcagtgggaaatggtcagcagaatcagctgaaagggttcggcccggaattgaaagacgtcgctttggtggcgggcgacaatttgaagcgaacggcgtccaaaacgggcacattggtgaaaagggcattttcaaaccaacaaaatgggggaaaagcaggtgaaaacaaattgaagaattaatttaaaataggcaaaatgattggccaaaggcataaaaagggaaatattttgtaaatggttttggaaagtcaaaactcgaaattagacaaatttagaagggttttattataatgctttctaattaattttaatagaaataaaaacatccaaaaatgcagaattggttaaagaagcatctgaaaatgttttgaataaaagtgaagagaaatcaaaatcgaaaacggaaggatcaaagaatagcgaaaaatgggagacaaatagtgaaaacggaagaacaaatggacaaatggcaattaatgatacaaaaaaagataatgaaaatgatgaaacggaaaatgatcaaaatggtaagcaaacggaacaaagtgatcagaaaaaagaaaaatatgaacacaaagcagcagaagatgatggttcaatgattgagaaaaatgagaaatcaaagacaattggagaaggatcatcaatattttcaaattaatttgctttaggttatcagccaatcggacgacatggctcttcttctggccaaggctcgtcctctttgagcagcaacagtggagggagcagaagggcgagcagttcagcatcagcaggacgg

SEQ ID NO: 1642 - DNA, 3358 bp, Heterodera glycines
ttcttgtctatgtgtcaatgtttggctatgtgtcccaatttattttccgttatttccttattgtccggtactttaattaaaaataatttatataattaagcaaaattaatcaacgtaattaagcggcaaaaccatttcggctctgaattatttctgatgcttctgttcccatttgcttattgcgtccatttgttcatttgctattttccgcctgctgaacacggactaatggaggataattatgttgcggaaattctcggcattaatctcgacgaacaaattccgttggcagctttttcctttaatgtactgatataaaatgtacttgagcccagcctgggattttgaaagtatcggcactttggtttagacaattgacgggacctggctgctcggtcaaaaaagccgttttaccgggcgccccgatcccggtcaaaattttagcgcggcgtccggaaattttttttaattttactaaatacttgaaagtatatcaaattttcaaaaaagtcttatttttgtctttaactttgaactaaagtcaaaatgaccgggacggggctcgaatttttaccattaaatttttgtattctttagggtttacaacaaactgttggcttatgttacattatcattttgtgcacttttgcttttctcttaatgttcacattggcttatcacattaaaaagtatttggacaatgagtcaaaaatatggtaaaatttaaaataaattttaattatttttttcattttcaattttgaagcgcaacttcttattgttctttattgaccagaaaaaggattgtaatgaataaacaaatttctcggaatctcctcatccaggtttaatattcattaatttaataattgtatatatattttatttattattttctaattttttggcttttaatttattaggctttggtgcccgtcatcatttattttgacgttctttttctgctgattctttctttatttaaaattgacacaaaagggtgggaacatttgggtatgtgcaaaactcattaactttttattgcaataattttttgtccatttttaaatttatttattttacaggaaagtgctttcttaaaactgatcatcaaattagcactgtaaatgtttagaaactgcagcaaaagaaacagcatccagcaaaatgggccatcagtgttataaaaagagaaaaagtcgatttacctaattagcctctaattattttttagatttcacttatcacatacaccgttaaggcctcagaatccctgcgtaaactgggattctgatcaccttggattccgctgggggctttaaaaaaaaacgggcgcgaagcgcccgtccgaacccaataagatttaataaaacgggcgcgaaacgcccgtccaagctcaacaaaatttaaaaacgggcgtgaagcgcccgtccgagaaggaaattacgcgaaccactttatcccagctaaagaaccgactgttcacacacccgctagttatacataaatttaattttatttaaagaaaagaaataattgttgtataaatttataagaaaagattatcttttgatgaggtaagtgaattgaatgattggtgccacgttttccttttgcatttccatgtgattccaaaatgggcacttacgaaggccttttcaattgaataatataatacattaggaaatatttcaaatcattgccttttctttgctccaaaaatggcgccgttttccctttcgcttttcccttcggtttgccttttcttttcgctgctctttcccatagaatttgccgcttcctccgctgatcaacagaagagtaatttggacaagtttttcacaaaatttgcggacgaattgccaccaaatgagcgatcggcggacactttggcactgtttgccgaaatggacgaggcagacgcactgctcactgaccaaatgtcaaaagttattccgccaccgcccagcccggcacatccgacatttcaggtaagattattttgctaattttaaatgcaaattgtagcaaaagtttatcgtcaattgtccagtaaatccctttttaggtaaatattaatcataaatctaaacaaactcaaaattgctcaaaatatataaaaatacgaattaaggattcgctttcgtaatatttcccccctttagactctgtatttggacaaaaacaaaggtccaaattcagcagaaaaaaacagtgcttttcaaagtgatcccaaaagtgccgtcgttcggcgactcaaagggagcaaattgtcaaaattgcgatcgcttttcccgaggacaaaattcatgaagcaaacggaaagaattgtgaaagtgtatttgaaactgaaggacaatcccggcggggggtggggcccactcatccaaaaaatgtttggcgaaatgattttggccaagaaattgggaaagggcgacggcgcgtcattgcgcgccaattgccaattggcactcgaactgatcggagaaggggacggtgccaccgaagcaatggtcgatcagttggccaaggcgaagccgtacagcaacttttggactctgacgaaacgaacgacaaaagcgattttgtgccttttaaaaggcaatggcacggaaagtgagcgacaacggagcaccgaagacattctgagaatgctgaagacatttgcggaggacggtgaatcattgaaaatggtgcaaaaaggtggcaaaagagaggctgataaagcgggagttatacgggattcccgctaccggaagatctcaaactcccggctcccgcccccgtaaattttgacccaaatacgggagtaaaaatacactgctaagaactgagtttttttggtaaaattcatcatttttgattgaaaatctgttaaatataaagccaaaatttcaaaaacaaattttcccggcggcgcctatcggcaccgccggcttccctcctcctcctccctggtacgcaaaaagttcttttcaaaaaatacggcgcaaaaagttgtttaaattaataaagggaggcgagaatacaaaataataaattttttgttcgaataaattaaaaaataatttatttgaagcaatttgaaaaaattttctgatttcgaccttaagatctgatttttttattaaaaatattagcactagtaataaggtttctcctgctgtcgctattactcaatttcgtgctaatcaaaagtctttgccaacaaaattggcctttgatcttggtcaatttttgttttcatagtttaatatataaaattttttcattctaaatatgatttttctgcccaaaacatttgattggtcttccttttcgattacattacaattttaaaggaagggaaaaaaccgac

SEQ ID NO: 1643 - DNA, 766 bp, Heterodera glycines
cttccttttcgattacattacaattttaaggaaagggaaaaaaccgacgacgccgtcgaaaacgccaattgaccattttggtgcttttcgggattattttggcgggtgtagccatttgtgcaatgatttgcaaattatttcccaaaaaaggcagtgccgaaggatagcgatgcttttcaaaaaatgcttgttgttttcctatttttgcatgcataaagagtgatttggaattttccttaaatcatcggtcacaattttaaaaatgtttacaaaaatgaatgtatgaattgagttttggtttgacaaaactttttggaaaaagattttaaaaacgaaaaaattaataaaattaaaatttgatcaaacggtgttaaaggaaaagtaaaaatttcgatttaactttcaaaaatatacggttttagcggtcttggcaattgaatttcgaaaaaatttttcgctcaattgttgggaagaagccgggaattgatagaatcgcccaactttgtcagattcttttaggaaaaaaaaactaatttttttgacgtttttgcattttcccagacttttttgcgtgttttatgatattttagtcgactttgtggagacttttcgtgatttaaattcccatccctaaaattagtacaaataattaattcgacttcgtctagagtttgaaaaaccataaatcaatttttaaatttagcccacccccaccgaagccattagtatggctacggctacccgacttttgagggacccacgcgtt

SEQ ID NO: 1644 - DNA, 4946 bp, Heterodera glycines
tttagaaaatcttattttataggtcatgcaatggagttagctctggctaaagcagtcgtaaatttgtctactctgagataaattttaaatgttttaataaaatccctaagtgtcgggtccccaaaagtcgggtccccaaatgtcgggttccctaagtgtcgggtccccaaatgtcgagttccccaaatgtcgggttccctaagtgtcgggtccccaaatgtcgggtccccaagttgcaaatccccaaaagtcgcaccacgatggctacacctattaaaatcaggcagcgaaaattgcgcaaggccaaaaattaaatcaaataataaaaatatcgaaaattcagagcccttaataaaaaaaatcaaaaattaatttattaaaaattaaaggcataaaaagtacagtcattataaaatagatgaagcaagaaaagagtcatttaaacagaaaaaatgtatgccattcatccgtcgttagctgaaacttgttgaaagaattaaattgctaaacataagatatggcatgccaactacaattttggaaagaccaaacactttgccacatgatggtggcaatacggaaccggggtcggggtcgttttcgtacgggccgttttcgtacgagcacaagtttttggctataacttttttctttgccaaccaaatccaacattgttggtgtcattcgatagccctatgtatcctctattagcctgcaaaatttcgaaaaatttcgtaaaggttcaaaaaagttatgaccagaagaattcaaaaaaccaaattttccaacttttttggctcgaactttttttgaacttgacaaaattttttggaattttgcaggctaatagagcatctgaagagctctcgtatgataccaagattttagctataacttttttctttgtcaaccgaatccaatattgttgatatcattggaaagctctaagtgtcctctattagtatgcaaaattaaaattttgaaaaatttagtttatgttcaaaaaagttatggccagatgaattcaaaaaaccaaattttacaacttttttggccataaattggttcaaaattaacaaaatttttggaattttgcaggctaatagagcatctgaagagctctcgtatgataccaagattgttggatttggatgtcaaagaaaaaagttatagtccaaaaacatgtgctggcgcccaactgaggtagaccgtggcgatactcaaagaatatgctttgtttacacctttaatcaggcacgcatccagaacaaaaaaggtcactttaaaaaaaacaatggaatactgaggtccggcggtaccgataggggccgccgggaaaatttttgggaattttaatgagatatgataagtagaatttttaaaaatttgctcctttttcttgaaaattttaaatttttcattttggacatgacccccccccccgcctggatatggcctgcctttaattaagcattaatgggcataatgatggtaagggtgacaatgccatgccaaccaacaatgtacggaatagtacaaaaataagaatatttaaaaaaattatttaaaaaattagagaagatttaattaagatttggcaaaacattggattcattcgatgctcagctgaaatgtccgaatttgcattggttggagcacaacattttcgatgtcaattgttgcatcgtttagcaagacatttgcggccaaccccatttctttggctccattcaaaagaatccctttgaaaagtgtctgaaatgggtaattaactaattagttgattaattaattgtttttattttcattaccttcaaattaacagttgttgcttcggtctgttcttcctcatcttctcccctctggtaaatgtgctccaatctgagcagaagttgcttgttcgtcaaatgtttcagtgtcatcaaatttatattttgcggaagactttcaccaaaaaaggaaaactaaaatttaggaaaaatgcgcgcaaaagaaaaaaaattgaaaaacacaaaatttagtgagtgaatttaaatttgaatatatatttttacgccagtcttataattgtgcacaaagtcggcccaattgccgtggagtgaggtgaatgccaaaactggctgatggaacatttcaaatgcccactggcgatgtgccgcaaaggcggaaggctgtccggcaaagaacagccaatgtttggcacggatgatcagaccacggccatcttcgccctgaacaagaccattgggcaacagtacagcatacccgcttttcactaattaaagtgtaattaaaatgaaaaaaattgccggttcatccaatggttcgtccacgccccaattgtcgtcccaaaatgagcgccggtggagctgagagcatttttttaaaattaagtttaaaattcaagaaataagatcaccatgagttccaattctccgtcccttaagcttgtcccgccatgggaccgatcagtgagaatggccatttgtgtccgctcgtctctgatcatcagtcggctgtcaattgggtagtaatttgcactgatcggctccgaattcgactcaaatgagaaccattcgttgtgatttcttctggaaaattttaaacaataattatgcatgggattaagatgaatttagttctttcccaacagtcacattcatttaaaagtccccaaaatttgtgaaaaaaccattttttccctaaattaaagctaattttcatgcgggtacaccgccctatttcatttctattgaatgtttctaaaaatcatactgatctctagttgatccatttcattgcctcattagccactgttaattagttgcttcccaccctcaccttctctgcatcatttgtcgaccgtttgaatccgtccagaaaattccgttcgatttgattgatggcatttgatatttggtcacaatttccatggtcgttagattgctttaagaatattacaatttaaacacataattgatgtttattcttttttttattaaggctttactcttggtccttgtgcaatggaccaattaaatattcgaactccacgaagggtttgtccatgtaaagtcggacaatttgggagagccacggctgcacaatttgacgtgcctcgtgaacgaggtcattctgtgattaaatgtacagaaaaattaattggattcttttattatgcccttttttgtgttgctaattaagttcagttgattggattcagccgatgcgagaaaaagggggatcagcacattaagaggacgacattaaatacaattgaccaaaaaatacattaaaaaatatccttttgggcaaatttcttcaaatttgtaaatggttcaaaaatagttttaacattttgcttagacatttttttcgtttttttctttttcaaaactttataaaatcaatttaaaaatggttttaagtgtttttgatatgacattcaattttattgaattttctatgtaatttaatttgaaatttaataataatccaccattcaaattttcattaatttgtgttaaataccttaacaaattgcacctcagccgttttcaattcatttgccattttttcgtttggcctaaatttttttttacaattttaaatttgcgcatttcgccaaatattccccagcaccggctaatatttgaacttagtttccacctgaacacatatgccccggatgtctgctgctgcttttcctctccttctgcgctcctccgcccatttgcccccgtgtaaaatgcaaatttttgcgagaaatccattttgacttggccaattaaatcctcaaacgatgccaacagtccgttgccgccaaaagtgaggctaatgtactgaaaattaattttggcatcatgttcatttcaaaactcgcttttgacctgattcgaaatttggttggattgcgccccatccttaagcggcgtcgttttttgtgcgtttttctcctttgaattcgctcttttattgcttctttaattgtaaaatgcaattttgaaaaaaattgaaattatttttaacttaaattaattaattaccttttaattgattgatttaaattttaaatatatttttaaaatacaagccttttttggcgtaatgtcgtgtccacgtaaaacgcctcgtagccaagccctttgatttcggcataaaacaccaattcccattttgagggccaaaatttcctcattggtatttgataaggacgaacaaatgtcggaatgacctgaaaaatgcgaatatagttagataaatttgtccataatattagggatttactaatttaattaaccaaaattcaagattttaaatttttaagtttcaaaataatttcaattttgtttttgcctgtgctatgatgtgctgattgtttctgtccaaaacccttgcatttggtgcgtttattggcactcgaattggccctgtgtatgttttgctgttcccattgaacacgacgatcacaaactttttgttgttcctgaaaaaaaaattggaaatttttcgttaatttattttcgctttttttacacgctctccgcgcaataactgtcgttgattcgtctgcaaaatttaagtgttagcgcatccgattcatttgaattggcgttttccgaatttgttgccaatttgctgaatgcttcgttcaagatttccttgaaattaacaaatttttgtcagttaattaattattatgcattttaattatcatgccacaattaattgctaattgttttatttggttttattcacctccccaatgtcccatcccttccaaaggcgctgttcataattttgtgtcaccgcttcttttgctgttcccctgtaaaatttgtattgaactttgtaagaacgagagtctcgaacaaataaaaataaaaattaagcaataaatattcgaaaaagacaaatgttaggcttatccttacagtatatatact

SEQ ID NO: 1645 - DNA, 1492 bp, Heterodera glycines
  unsure (1)..(1492): unsure at all n locations
cagtattttgatcgactcgcgcacgcttttcgcatagcacgagggcgtcgagtaaaacaggcggatgcccgtggaattggtctaaccaatagaaaaattcnaactttaaaaatgaatttaaatgcctaattaatttgtcacccctaaaaaatttaatggacgatttttgctttaatcaaaagaaattctttcgcacattcaaaatttaattttcttccttttaataaaattttgaaaaatttaataattattatccattttttaaatgccttttcaccctttcgtttgccgcattaatcaaaatgtccaaattggtgaaccatctgttggcactcccatagctgaagtcgccgcccatcgtgaacatcacgtggttgtgccgttttgtcttcgcctttcaaaatcaattaggatttaattaataattttaatttcatttcaatttaatttttgtttttatttttgcctcttccaccgccgcttctaaaaatgcgttcactttctgctcaacattaaatccctccaattttgggtcgtcaatcattggatcgtcatcacataacacatcaaaacagaagcctttcggcgccgaatatgttccactcgcaaaagcaccggtaaaaagcgaattattgcctaaaattacaataaataaataaataaaataaaataagcatatatgtatttagagggaataattgcgaaatcgattcataaaaagcaaatttaacgaaattttaaaaaaggtcattttaatattttgaaataaacaaacacaaaaaaaccttttttaaatttggctactaaggtaattaatttactgaaattaaacttgagaatttttaagtttttgcttccacagattttaccatttaattaatgtgccattttttccctattagctcttctgtttttcatgacctgtatcatctgtgctccacatcatttccaaacttttgttttcaattcgaaattttctttccaagtaatgcattcgggcaaaaagcagagcctcgtaacccatctaaaattattaaaatttattttcttaaaaataaattattgacgtaccattgagaccaaattagcgtgttctcggctgtgtccgaatgggtcaatttgccatgccactttcgggcgcccgcaaacgccttttcaaattggaaatgaatcttttttttcaaatttaaattatttttaataaattataaatacaatccaaatgttctttaccgtatttctccgacagtttgcccagtccgagtgcgtattgatccaccaattcgtagtaatgcgttgccgcctcgtcgggctgtgtccaaccgcctaacaatcgcaaaattaaattaaacaattatttctttttaattttccaaacctccaacaaattcgagttgacctgaataaatgcaaatcatttttaatttaaaattttattttagccatttgtaaatgccgtacttccttatttgcctttttttaaaacttttct

SEQ ID NO: 1646 - DNA, 6204 bp, Heterodera glycines
ttcacctcaatggaggcggtgccaaggtgtgggagccctcctaacggcacacagcacgcgtccgcgttgatgggtgccctggacacgagcaaccttggaattttggggggaaatgggatgatgggaaaatgttggaatattcaatgggtgggcagggggggggagggaatgtttattcccacaatccgtcagagagagttggagacgaatggattggaccacccccattttcgtgtaatcagaaaattttttgtattatttgaacaactgtctgtacaacaaaggtgggtaatgtgatttgaaaccgcgaaactcgaattttagatcattattcaaacaatggaattcaaaatttactctgctgaatggaatttttttcgagttaggcgtgatgacgaaaaattttccgagtttttttaattatacggcgacgaaatattccggccattcggcctgcgccatttgtgcatttcctttcccctacagaacgccgtcccaacactcaatgtaacgcaacaattgttttgttaccgtaatgacaattttccaaaaattttaaatttcaaggttttccgaaaaaaattccagaatcatcaatagttttttttcctaattttttttgaaaatatctcccttcgtactcacttgtacgctcgctgcaccacctttgtgcgtgccaccgggtccaaattgtgcagactttcgcccctgatcaggtccatttcggcaccgtccgcccgcaacgactgcagcgtgtacagcaacgtgcgcgcatgttccgagtaccgctgggcctcgccctccacaaacaaattgacattttgcagctcatcaatgaacgagtccaacgcctcgtcgctgagtttgcccacctcgaacagcgtaaccgcgtggtttttcagagtctgtttgaatttttaaaggatgaatttttttgaaaattttgtgccaaaaattgtttaaaaattggcaaaaaatgggggggggggaatttccggtggcgacaaattgtgaaaatcacaaaataatattggattcaaattgttaaaagcagcccgagaaaacttataatttttttcggctgtgtgctgtaaattgtaagaccaaaaaattaagggtctttgatttatttttcacattttactcatttttttgcgtcacaatagacagttttttgttggatttcgtctgcaaaaacataaatggtttgaaagaaaataattaagatattcgtttaccgccgacaaattgcccatcatcagaaaggcggtcagcgacgagtcgaaaatgaacgcaatgcgtttgctgcccaattctgtgacgggcgtttgctgctgctggaggacaggcgaaatgacccgaaaaaaaagatttttttagacaatttattgtacaaattaataattgcaaacagaaacagaattcgaaatttaaatgaattttttttacaaaaaatgagcaattttttcggaaattttttttaacaataaatttcaatggtttattcaaaactcactcactcgatggttttgcggtggtcctttgagcgcattttccaccgccgtcacaatgtcgtcgtcgtcgtcggtcacttcgtcggtgcccgtggcatttgtgccatcctcgccggtggtgctcaacaatgccatggacagatcagcaagctgtgcattggcactgatgacggacagttggtcagaggacggggaggccaaactggttgtgaataatgaacaatggaaattgagcgaattttcagattatgaaagatttcagcgaaacccaaccaaagaaatgcatattttacagttccggcattttttttgagtttaatcgaggcttcttcataattaagtttttttaatttcattgtcatatccccaaaattcgggcgaatcgaaaaaccagtaagtaacattggaaagcatggcattttttcttggaattaaaattcaaaaaggtcaaaccgtaccccgaactggttgtgcccgtggtgtccgcattggcatagtcccccgtggcccatgaggcatgcaggtgcacattttcaatgccggtgacgcgtttgcgcgcaaagccaagtcggcaaaaaacggaaacggcatttttcaccaagttaatgtcaattcctatggtgtcagccaactaaaaacttaaaaaaattgaggaaatataatttgtggacccaacccacctccatcactgatgtttgtccatcgatggcgacaaaaattttgtacaacaatgtctcaaaatagtcgccttggacccgattcatcacaaacccgtcaagagttggcactgaaaaaattatagaaaatcaaaaaagtggataaaaaaaaccgtatttttcaaaaaaaaattttttttttttcggagagaccaccaccataattctaatcccacaaaattttaagttatataaaaaatacaaaatcgaccagaaatgataaatgacaaaaaaagggaggaggggttgtttaatattgactcaaaaccaaaatgacgtgccaaaaacgtagtcatcagacccaattggcacttccaaatagacgaggccacggctcaacaggcgcagaacaatggctttgtccaacagaccacagcagacggaaccctcgtcaagcagtcggtcgatgatcaactgctccggcgaactgagcatcttcagaaagcattttttgattcaaaatgattaaaataaatatcaaaaaatcgaattgaaatttatggtaaaaattttttgaactccttgaaaaagtattaaaccgttttagttttcgactaatgactgcttggattttgaatttcaatgaaaccaaaattgtgatccattatatttaaacatattttttagaaattcacttttttaagaaaaattgcaaaaaaaaaatcgtaaaaaatttttgtaaattttcactcgaatgtccgcctccaaaatgcagccgaagcacagctgaaaccatggctcaatgggcgcaaaattgcacggcttttggggcagaatttcgcgcactggctttgcccgtcgaaacagtcgccggttggcccggttttggttcatcaagtcaatgtactggttgcgaccgatgcccaacatgcgcatgacgtcaactgttaatcaatcgttaaagggagtagcaaaacttgatatgaaaagctaaatttttatggaaaaacaatttaaatagactccaccaccccctattttgaaaaatttgtgacaaatgaatgaaaaatggggttacatggtatgaatttccgtcatttttgtctgaaacacacaatttttagtgcaatttaaaaaaaatttaccggcagtgaaattcgggatggaatcgtagctcttctcggcttgcatcacctctacaatcatgttcctaaacagtctttcttttgagtcataaagcgattaaaaagcgcaaaatttcttttcgggaacttaaaaatttaaaaaataattttttacaaaaaaaaaaaaatttttgaccaaaccgtacgtgtaataagtgaacggagtgatgcgaagttcgcgcaccaaaatgtccgacaaatggtaggggtaaagcatcatccgctgctgactgtagctcaacaaactgtcgtagtactcctcctgagagcgcttcacaaaacgaactaaaaaattatgttttaattgcctaatctttaaagtccgacattttgaaaaagcctgggttttctggacaaaaatcccaaaaaacgcttgacatggcatggacccaggcggggaacttgattttttggaattgatttaaaaaacaaacaaggaacaactaaaattatctaattggcaatcacattaaaacccgggttgccaaattaaattatattggactattatttcttcttcttctggtaataaagggggagcgtgtggaatgagatcagtgtttccggttggatgcccttgtgcagcgacatcacaaatgggtccaccggatggaacagcacacgggcgtaggacagtgttcggatggcactgatgcgaaagtccagccgggtgtgaaggcatttggtgcgacgactgaacagcctgaaaatgggggaacgaaatgttttggattttcaacaatttatgttcattagggctgataatgccggacagattagcaaaacacgggtgccggactcaactaatggcgaggaccagtcgaaacaaaaaattgttgaaaacgttttggcaggaacaaatgaccgattcgaaaacgaattatccagagtagctggactaagttttaatcccgggattctcaaagtgagtcattgactccaattcgggattttagcaaaaaagcatccccattcaattggcattttgtttgattaaaagcatatggcattttattgaaacaaaaaatcttaatttaatggctgatcaggagggtagcgacccgtttcggtcatattcagcaatttgtcatcgtagctgaacatatttgggtcaagatatggtgaagtgagcaaatattgcgtgttcggatagggaagagctgccaaaaaccgtcggcgaacatcggaagcgggtactgaattggtgcgcattcattaaattaatcgtacatggacaaatggattgatgtgacagaatgcccaacgaagcacagatattcgatttcttaaaaacttcgggttttcgaaccggtccggcatgccggacggactggctgatgtacggaccggtaagcagggaagactgcttgagcgcctcgtgttgggcccgttccgcaccgcaatgctccatggaagtggggaacattgtgcgcacaatgtgcccgttgcggaactgctcgttgtgccgctcgaacgcgccgaacaacgcctcggaggagcggttgaacacgccgacaatgcgccccactcgccactcgaacagcacaaacatatgctggtaatgatgatgatgatgttggtgattagcagcagcaaatgatgacgaatacgatgatgatgaagagggagggcaaaaggaggaggaagcgaattggtggtcgtcaaaatcatctgtaaaatgttttagcattaataattgaataaaaaaaattccgtaaagtatattttataataattgagtaaaatgctataaatgattatgtgcacatttgttcaattttaatcacagttataaatgcatgctaatttgaaatgataaaagatttgttaaatcgacgaaaattgacacataaaaaaatcaaaaaaaaaaaaaaccgaaaggcgggaataacaaaacaagcaattatcaaatgatattctgcgagcaacgtgaaggggactggaacccaatctccctcattttggtggccaacgccacagaccactaggacatgaaaatcgttttcgttttcccttaccgtcgcccttcggctgctccattcgaatcagcagcagctcgggcccaacaaattgcagcttgcgcattttgacatgtcgaaagaggtcgaaatggtgcaaaaactgttggacttggcccttccgttggaactctctgtacagaaaggtgagaaaacgctgacggaatgctgcaaaaaaaagagcaaaaataaattaattacattttaattaaaaaatgggaaacggaaatttgttcgaaaaatgattagattagactaaaacgggttgatcaggtgcaaagtatcggaaaatgatctcgccaacaattggtgtgcgaacaaaagagcattgacaaatgacaaattgtttttgagacgtcaaaaaagtataaaacgactaaaaatttgcacatttaatgcatttcatttcgaaataccaaaattttgggggttttcataaatggcatacattttttggaaaaagcgcgccgaagacgcttttcgaaaagcaaaaaaaaaaggtcatcggcgggccgacccccctttgcaaaatttttttccgaccccacccccccccccttttttatgtatgataaatggtcttcaaaatccattttttaggctcagattatattttttattagtgccgcaaaaatttttaaagagaattgtcaaacaaaaaaagaatgacagatgatgtatatatatacaactgccctctctcggcatttttaatttagttaaagataaatattttaatatattttcatttgctaccggtgaagcagcgctccgtccgcgcactgatcagctgtgccgccccgctgatcagctggtcgtcgggaagcacact

SEQ ID NO: 1647 - DNA, 1008 bp, Heterodera glycines
  unsure (1)..(1008): unsure at all n locations
cggcagggtctcgttgttctaaaataataattgaatatgcaatgtacgaacaataggaggagtaccccctgttaaatattccatactttttcggaaaaatccaatgaaaacaaaatgaaattcaaaattttttatttcccccgaatttctttaaaaaaaaaatttaaatacattttttgggacgggccgatttgtttgttctccagggttaaccccagggatttcccggaattccgatttccgacattttttgggtcggaattacgattcccgaaaatttttggggcctcgcaattcctatttctgaaaattttggggcctcgcggaatgccatccgtgcccccctcccatctccccgacccaggcacccgcagaatggtgcggaagttggccttggactcgggcaccggcacggaggcggagacgacgaggaagcgcgagtcgggcgtgcacagggcgcactcgcgcgacaacggaccgccgagctgcgggtgaacggcgagtgggggcggcgggcgttgctctgccgccgccgccgcagcggtcgctggcgaagcgatgtgccgaaattggacggtttggcagcgcgggaaaacggcccaaaattttgtaactcttacaattatggcgtttaaaaagcaagcgcatttcaattcctatactccctcaaaaatttcaaatcagaaaattattttaaaaaaatttttaaaaacaaattttttaatggattttcaaaagtaaattctcacgatttttttttcaatttcttccatcaatatagatgtagaaaagttaaaattctgcatcaaaaacggaatcttttcaaaaaatttaaaaagatgggttaggggttcgcccaagcggaaaaggtacagcagacgcaggccgtagccataaaaggaggagggggggggggggggggcgaatggggtgggaaacccngaagattttttttgctttccgggacaaaagttaaaaaaaaacactctctcccagtgttattttaaa

SEQ ID NO: 1648 - DNA, 4682 bp, Heterodera glycines
  unsure (1)..(4682): unsure at all n locations
ccgtcgcatttggaccactttctgctacagttggcggcgtaggttgacggaaattgtgcttttgcccgccttccgtttgcattttggcgtttcgtccgtcgtagagggaacacaaaaattaaattccttaaaaatttcattccaatgcatgccttggagaaatttcggctctaatgcactttatgagtccaatcaactgacaatacctgctttttatacaataactttattcatgctcgaacaaaccctatcgttttggtatcattcgaaagcacaaagtctaaagaaactaaaatatataaaatcttgttgaaccagcgtcatcaaaaaaactcaattcaaaaaagaaagtcaaagacaaccaattttcataagacaaaataaatacatcagagagaaaaaccacaaaacttatcaattaacaaccaacaaaaaacccaaaagaaaaatgggaagggaaaaattttaaaccaataaaatgccaatacaatttaaatataaaatcagagatcaaaatcaacttaattactacagctttttcacgtgcgtttaataagaaaataagcgtagacgacgccgagcagaagcagaaacagttgaagcgaaagcacaaccagcggggacacgcccaagtagagactctgtggcacaaacaaacaaatatatggtggacaatactcattttcctatctctttaatttaaatttgctgtggaaaaatgttgcattgatcagtgattaataccaaaatttagtaattaaaaaggagtcagcacccggtaaattattattcctttttcggtattttagcacaacatgctgccacatatatatatatatatatatttattattttttggtcgaaaaccgctacaaattcctgctttttcgccccggcattgaaaattttgaaaaataacattggagaaaaaaatttttggcccaaagagaaaaaaagccttcggattgccccctccgaattttttgtgttgttttggctacggacctgcaatcaatgcacaacaacaggaacatcaacagcaacaaacaaacccaccattccggtgttggcacaatggctgcacagtgtgaacacggcggtggtcacccacgcggagggccgtccaattttgtagcagcaccggtgaaaggcgtcccaactgcagacggtccacacaatgttgaacagtgtgagcagggcacaacccaacgcatagaacaggggaaagaacgcgtcggacgggtgcaaattgccggggacggcggtgacgccaccgtcagcagcggcagagagaagaatggccgggtcagagtgatggggctgaaattatcaatttttcgacaaaaagagcatttttttaataaatggatcaaactgaaaaatttaaaaggtattttgttgttcgacggttctgctagagcctcaaaaaaaaattttttttttgggggggggggggggtaaagtattttattatgctcaccaatggcactgcgtttggctgtgccgttgctgacgcgtccgttggttcggccatggtacgatttgcctgcacagcgcccggcaggcccacaacgccgtcgtcccaataggcggccaacacgttggccagatgaaacagtgccgcagcggtgcccatgccgaggccacagacaatggccaaaatgtgccgggacgagtacagcaagcgcatgctggacactgtgccggtgcggttcgcatcggcggccatcagtcgggccaaattgctgaatattatgagaaattacgaccggtttacattccgccgagtaaattttcccacaaatttttaatttaaataccatagggctaacctatgtcccttttaaaaataaggccatgttcgaggggttgaaaaacaaaacgcgctgcgtcccgcccaaaaacaggacaaccgtccacattaagaacgtccagtatttggaatatggaaaatttgttggtaaccaaccaaagaacttttgtttcgcttttaaactcgagttatattaattgctattccacgcgtaaaatacgtttaaaatttttgaaaacccatggttttcgcacctttgcgttttgtacaacaacaggtagaagagtgcgcgcgccacttcttggaacagaatggagaagaaaatggcgaccagcaacagatgttggccgaacacggcgaaaacgacggcggacaacagcagagaacagagccaaaagaaggcactgaaaatggggcacatttcattgttgttgtattgtgaatccgttttcacaactccggggcgatactttccaatgggaacattaaagtgccgagttttgatggaaaatgcccaaaattgaaaacccacccgagcacgaagagaatgatgcgcaacgggtcgggggcaacgaaacggcgaaaaatgaacagcgaaggcgtaaaggcgacggagaaacagcacaggacgaaggcgacacccatttgtcgtcgtttatctgtttggctggtttagctaaaaccaaattacagaaaaagtgagaaaaatttgaatttaattggaaatgaaataaatttgcacttttaaagcaacaacaattaaaatttgaaagcaacaacaattaaaatttgaacaatttaaatgatctaggaatttaatttttttattaagagtatgataatacaattttcaaagatggagagattgaagagctttcaatgatttgctaatttgtaaggtcaaaaaggagttttgtagtaaaacacatttagcaaatattcaccaggggcttaaccggagtttttttagatttaattccaaatttaaaatttttgggggcctccgattaggcccctgatatgtaccatggattataagggttgggtataaatttaggtatatttaatacatcatacaaaaatatgtctgttgaaaattggggtgtgaatttttaaattcgcatttcacggcacaacccgactagtaggcgaaccccggacaagaaaaacatggtgtacatgaataacacacattgtgaagggtagaaaattttttaaaaccgaaattttcgagagacaaaattggattttcaaaaaattagccattcgtaaatttggcaatacacaaaaaaagagagaagtcacaaaatttgcatgcaaaggatggggggcagattgtgttgagtacgtcatttttgaagaagtcaatccatccgataaaaaaaataacggaattattttttttcaattaatttttcatcgtcaaaatggcctattaactaaattggatggaaaaagcgtggcggacagacattacaattgttgtaaaatgaagaaaatatggagagaaattcttaacaggaaaaaaatgcttgacgcgtaatcaaatgtcaaaagtaaaaaaatttgatcactttttggctgttgatcaacccaatcgatcaattcaattaccaatcaatttgtgacgactgatgggcagagggagtgactgactgactgatcagttcgtcagttcaattagttcactttggcataggacggcggggagaaacgtcgacgcaaaaatttgatcacgtaaagcggaaggcaggaaatcagcgtgatcacggtggtcttggccaagaactcccaggacagcacgaattggcggtcaaaatacttgtcaaagatgatcaacgaggcgccgtacagtgtcagagaaagggcctttaaggggggggggggaatgacaattaccaagaccaaggtaaacaagggaggttttgtttacctgtgctaccagcattgcccagtgccaagtgtgcactgtcatggcgaccctaaaaagacaaatacaatatacctggggaaaagggaatgatctgcggggaaatctggggacgggacaaaatcttgccgccgaaaatttttttaatcttttcaagcctaatttttcaaaattaaacatgaaattgaacatctccaagatttgttgaacgggtacacaattcattcattcccctcacattcgtctgtccatgccaatgattcgtcgtgacttacatgatcaactcggtgatgatcaaagcggtgaaactgatggaaacaatgtgaattaagtcatcgtcaaaggcgtacagtgccccgtacattatgatggcacctgtttttcaattataaaaattaattttaaaaattacaaatggacgaacaccttggtacagactgatcagcacccaaatgcaaaatgtcttgtaggacagtgaccgacccttgcccaactctttgtacagttccggataggtcagtgcgttttttgccgtcacatccgtgtccaccaccagcgagaagacgggaagcattgtgtaagcggtggaataactgtaacaattagagtaaatgaaaatttgggagtgtaaaaaaataagaaaattccaaaattcatgggatttttgtctttgaatacctcactgtttattgctagttatacaatatattaaaaaaatacaataaacttacgcaaccatcaaaatgccctggtacagagacactgacgcgaaataaaacacgcaagagaagatggcctagaattttanaaatcgagaattaattagcctgccaattacaaaataaataaacaaaaaactatgcatatttcccaacaatagaaattttggaaaaacgaaaaataaatggcatccattttctatcaaataaacgttacgac

SEQ ID NO: 1649 - DNA, 2527 bp, Heterodera glycines
  unsure (1)..(2527): unsure at all n locations
aatttttactttgttttttattgaataaactccaaacgtttaagctaaattaaattaatgaaaattttcacatcaaattttcttcagtcatttcaaacaattaatcattttggactaaatgatcgaatattatagaaattcagatttacgtttcacataaattttttcggcgcgctttttccaaaaaacttttggcgaagaaaggggtccggcggtgccgataggcgccgccggggaaaattttgaaaatttgagtgtaatttattaacagattttcaacaaaaaatgataaaaatgtgttaatttaaaaaaaaactatgaggaatcatattttgtcgataggaaagccatgagtatacaaaaagaaaattcaaaatattttaattactgtagaggaattgaacaatgggaaagaagaagagaaagtcaaggagactagccagtaggccatttgcacaactggcagtgttacttttaaagaatattaattattattttttaattttttcctttgactccaattttcatcactaatttttcactcagacccccattcttaccagtgcttgtttttcccaattcccggtttccctaccgggaccgggacctgagcttttcaaaacccgggaaccgggacctcggatgaccgggaattcccggcccggtcccggtcccgtggcactctagttttaatacatgtatttacatcggatacatttgaataataaaaatgttatgaattttttatttaaaaaagaaacaaaacttacgcaaccatcagaatgtccggtacagagacaccgacgcgaaataaaacacgcaggagaaaatggcctaaaaaatttttacaaattgagaattaactagcctgtcaattacaaaatagataaaaacaaaactatgcatatttcccaccattaatccaggacaaatgtaatttgaaagaaatttttaaaaaacgaaaaataaaatggcatccaatttctatccaattcgaacccacgacaaataccacctacctgcatggtggagatgattagtccgcgatgcatcacaagcaacagacgacaaatgtgatggaattgagtgatggagaagtcggccgcgagcgaggcttgttttcctggaatgggaaaaatttaaaaaatttcttttttggggggggggactactcccaaaaattggttaaaaaacgactcgtcggtaaaaaaaatctaagtaccttcgttggcatcgatgccaatgccggcgtgtgccgcttggatcattgacacgtcatttcccccgtcgccaaccgcggcaacacgggcgggccgtcggtagcgcttgagcacgttgacaatttgcgctttctgttacggtgagcagcaacagcacacaacagcggtgcacgagcagaccaactcggccaactccgcctcgtagtactgcaggcacatgttcagcgcagagccggacatcaccagtgcaacgtcacttttcctgttgtgtaacataataagattcgaacaacaagaaaaagggagagaaaatgatagaggggagatagggggagagaaacaaagagaagaaaagagcgagagaagtagagagaggcgtcgggtgagaagaagtaaaaggacaaatggggtaacagagtataggaaatgaatgaaaatagggagagaaagaatgaaagaaagggggaaaggagagagatgaaggaatgagtggaagagaaagggagagaaaaaaagggagggagggagagagagagagagagagagagaaagaggggaatgcggaggagacgagacagggagagaaaaaaaggaggaaaggagagaaaaaggaaggcgtgcaaaagacaaacagtgaaaaagtgtaccacaatttgaaaaaggcacaacaatgctaaacattgtccaccacccacttgcgcaatgcgttcagttcgttgtgtgcctcggtgcggtcccgcacttggccaaacacgtgcacattgtccgtcttggagaagaggccggacgatttggcaatgcaaattgcggtctccattttgtcaccggtcagcatccaaattttgatgcccgcgttgcgcaacagctccaacgaagtggtgacttggtccttcaaagaagggaaggggtgtaaatttgggatcgccattaaaaatgacgtatttcatgaatagccccgaagtcctaggggtgtttattcaaaaatatgtattaacaaaaaaaattacaattaaatttctgtcaatttgtttttgtataatggctggacctgcagtcgatcttcgacccctgtcaaacacaacagttgcaagtcgttttcaagccgtcgcaccaccgaagccatgtgttcagtgcggtcggtgacattcattttggcccggtgatattcccgctcaaaatcggccaattgttccgcggtcaacacttttttggccacaaccaaagtgcgaaggccttaatggagggtgaggggcaattatgaattaattattaatttaaaattaattgccttctcgtgactcnntaga

SEQ ID NO: 1650 - DNA, 2599 bp, Heterodera glycines
  unsure (1)..(2599): unsure at all n locations
ataggggccttctttcaccggcatgtcgaactgatgacttctctatctctggctgcttttgttgtcgccgtcctttattacatttcttggtcccagtgccatttttaggctccgacgcgtcctttctcttccctccaaaatttcccggtgttttgtccaagttttggccatcaataacaaatgttttgaaaacgatcattggagaattctcgagcattgaagcgggtgagaagtctacgatttggttgctaacctcgtcgatcattttgaagcctaattgttttaaggcattcgtgccgaaaagcaaatagtagccaaaagctgattgcgcgacgaataaattgatcttcgtctctaatgctccacgccgaatgggaagacaaacaacaccgtaacacttcacttccgttccgcttatatcgataatgcggctttcagagcgggcgatgacgttcttttggcttactttatccatgatttgtgagaagaatttggctgaaattagagaaatttgggatccgctgtccagcatggcattcaacttacgtccatataccgaaactttggccgccaaaattttaccaatcgccgagctttcttacaaaaagccgcctttttcctactcattcgttgttttggaaaagaatttctcaatttcgggatggtgttccaaatttacggctccgacaaacagatttccccttttcggcagtttatcattttgctgaaagtgaaaattttgcttcatgtgtgatgctgtaaattgatgttttgattgtccttgtacgaagaatgtatttgttgtgccgtacaattccgaaaaatgtgtccgactctgccgcaattgtagcaggtgacttgcctattccaatttaaaggcgcagcgttagcccctgaaccttggtgttttgcgatttgatttcggttctcttgaaaggaacaaaattttggtggagccatacaattccgagagacgtggccattttggccgcagttatagcatgtaacccggtatgacggatttgagccaagctccggtttgggccaattatttgagcgattatttggtgcataattattggctggacccgttgagtttgtcattgggcgttgatactgttgattaggccgcagtgcacttctagcagctaactgagttgcttcagctcgtgcggcttgcgcgataaactcatcaaatgttgcgcctggtctacgcgtcatttcaagagtgatcgctaactcagtgttagacatggcccttataaagtgcatgattgaatactcgtcgtattgttgttcggttagacccggataagcacggcgaaccaatcccgaaattctgtttcacagctcatcgatactctcgttcggtcgacgccgaattcctcgcatcagttggtcaaaagacgtcaattgttttgcgtcagtgttgtccagttgtcggatgatcgctcttttaatgagctgataatcatgacggtttgcgtccacagctgaattgaaagctctctcagcctttccaaaacatttggagcgtagcgctcgcaatcgtttatcttcgggccactcttctgtagcaacatcaaattgcttgaagaaagcattcaccgaatcagaacctctgttgccgtccaggttcggaattgcgttgagtgtcatcgtgtatgaaaaaccgtcgaggcttcgaatggcctgtgccatcatgccatcgaataccagcccagggtgaagagatcggtcattctctcggaattcatttggcatatgcaatgagtcggcgtatggctgtgctcttcgcgtaattggtggtcgttgggcctcatcagagattggccttccgttttctctgcggccaatgtcctgttcgccgtgtctcgccaattctgcatttccgtcttgtagcaccttgacttgaagcagaaggcgtctaatttcattttcatccatttcaattccgttgttttcgttgtcgaattggacatttccttcatgaacaattgatgaattggtccggcgattctgctcaaagttgtgttcggtcatccctctaagcggcggcaataaaatttggcgtttcggagtccaaaagttagcaacaatgcgctaataagtcggtaccacgtcctcacttatcgcagcaatgcgttagcagtgggacgaaaatcgttgaaattcgcaacaatgcgttaaacagcagaaccgcagcaatgcgtatgttctgtccgcaacgaagaaaattgcagaaccgcaacaatgcgtttgttctggacgcttctcgaatcggcttctcctcagcagtcaaaaatcccacaatgccggcacagctaactcttcgccaggagcgccacgtgctanataatgctgtttgggtcggggcctattcactgcttttcatccacaatatttccaaagtggagacaattcactttaatttaaaatcagcaacaataaaatggggggggaaagtccgnaggataataagacaaaataacaaatacaanaagtgcactgccaacagaatgaattgaagcgaagacgggggaacttttctgctggaaaggatggcaaatatcgattacatagagagtatagacagaca

SEQ ID NO: 1651 - DNA, 2649 bp, Heterodera glycines
  unsure (1)..(2649): unsure at all n locations
attcggctttttgtttgaattcaggtccgggattaggaattagtctaaatgggtgtcatatcatgatcagcgaccggaaatcccctgagtgactttttaaacataaaaaaccagtttttgcacattttgatctcacaaaaataattcatttgcactttgactttttcatcttcattctttattttttcgtgcaattaactttctcgtttttcagcaaaaaagctattaattatggatagaaaagcttcaacatcgaaaaggaaggagcaaacgaagaaggcgcgcaacgaacaggagaaggtatgaacggtcagacagttttttttggtagcaggggagtttgtatctcattttttgcaaaaaaaaattttagaatttttttcgtttaaacgtcttgaaaacaagtaccaggcggttttctaggtcgctgatcacgaatatggcatccatttcgcccaattcagaatcacgtacccgaattcgaacaaaaagtcgaaagttcgagtttttcaaaattcgcattattactctaaaattgattaaaacaagctaaaataagtcacatatcattgaaacatccattttgttcagattataataaaacaattttcgaccttttgttcgaatttggtttggaggtttggaataactatattcgtgatcagcgacctcgaaaaccaccacaaaattgacactttctttaaaaaaaatttccctcgcgccaccggactccaaatttttttaaagattaatcttaaaattctttaatgaccaatattgcatttacaggaagcctctgactcggaagacactgactacgaaagcgacctcaacagcaatttgacctgtgtgcgcgatggcaaatttgaagaattgctagtccgcgttcgcaatgcactgaaaaagcggaaacagccaaaaattgacagtctgcgggtaagttaacaccaatttaatatctgatcaatgtaatatataaattattaatttttttcataaaagtatttaagcttttttgggggacccgagcatttcgacactcgttttcgccgactgtttttttgacactcattttttgtgttctttttgccgcccattttcggcgcacgggtaaaactatagatggtgggcacttttnnggaagaaaaagtcgttaaaacatgtgttcggggtttttctgggtcgttgatcacgaatttgaattcattttgaccaatttcaaatccttggtccgaatttgacaaaattcgaaaactcaaagtctatttttatgtttgtatctatacatatgactattttttgacattgcaatggttttgacaacatttagcttgttttgatcaacttaagaacaaaagtaaatttttaggatgtatgattaagcagaagtaagcgattagtaaattcaaaaaagtccgaaaatattttaaaaaatgtcttcgagaggatttgaatccgagaccccattttggtggcgatcatctaacagattattgcgacaaaaattaacaaagttaaatttggttaaagaaaagaatgatcaactacctcatttagcagcatcaaagttgtttgcaaaaactttattcgatttcaaatttttggtgttatttttttattgtgattggctcgcaataaattaaacaattgaattttttaatttaagtgtatttaaatggtccaaaagtttttttaacaaattcatattttttgggcttattttttaaatatgggatttagcctaaacctgttttaaaaatttcttaatttggctctatttttcggattgataagttctcaaatttaggacatgttcaaagtgctcgaaaaattctcgaagcggacaggtaaaatatagaaaaatgaaattttatttaaaatgaatttttattaaaaaaataaaattttaatttaaaaaaatgaaattttaattaaaaaaattttaagtgtgttttgctgattatgactcacgggctgtacgacaccatctacggaattgtctgcggctccattgatacgcgcgatgctttgctggatggagacaagtgcccagcgcttaaagataaaccgaaattggtaattttggattttcaaataaatttaaaattttcttaattgatcaaaacaaaatttttacacatgtaatttatttaggtgtttgtccaggcgtgtcgtggctgtacgtttattatttttcataataaccgaagagtgcgaaaggctaaaggcgctaatgatgtgagaaggacgttcagcgcgtccttttcttgtacaaaaaatctgggaaatgaaaacgaaggagagagaaaaaggaaaaggaaatgctggcggcctttcttggaaaaaaatcgacggcatcagcactttatgtccccaaattgttaaaaaaagcaattgaatgctatataaattgtaccaaatgctgggaagttgttgtcaatctttgattattttggaaagttgcataatcaaaaataattaatattaattaataatttacactagaggtagagcggagaccgggaccaaaacacggacaactgagtacaactaggtaccgaggtcccggttttgaccgggaccgggaccagtcccgggatttttcccggatttcccagccaaatattcccggtttttcaacccgaaaag

SEQ ID NO: 1652 - DNA, 2931 bp, Heterodera glycines
tcattgaaatcaagacttatgaattgttcataaactcaaatttattttaaaaaaattcttgaatttttgcttgggacggagttggcgggacggagttggctcgggacggagttggcctgggacggagttggcgggacggagttggctgggacggagttggcgggacggagttggcctttttgtattgggacggagttggcaggacggagttggctctggacggagttggcctgggacggagttggcctgggacggagttggcgggacggagttggctgggacggagttggcgggacggagttgacccctaccgttttcgtgtgagtacctgtttaggactgaaattggtcggatttgtgcaaaacatccatgtttcgaatcccgaacccgaattcggacaaatttcttaactttttaatttttttatttcttgcggctagtatcttctacagtaatttgtcagtttggtcggatgtgcgtcaaatggaaaaaataattaaaattttatatgcacgaaaactgaccgaaatatgcgcataaatatgcaaataaattcgtgaaatatgcacaaaaaatcttaaaaattaggggtgtaaaataatttaaaaaattttattcctcataaattttatcggttgtttttgtaattgcaaatcaagaatttctcaaggcagtgaaactcagtgttttgagaaagaaattccttgaaaaatgaaaaattctttacatttgaaaactattaattaaaataaatttcagaattaaattaaataataatatgattaaatttagagtagagcgggaccgggaccaaaacacggacaactgagtacaactgagtaccgaggtcccggttttgaccgggaccgggaccagtcccgggttttttcccggttttcccagccaaaaattcccggtttttcaccccgaaaaggtcccggttaagcccaaaattcccggtcccgctctactctaattacaccgaacatgtgttttagtaatgctggaaggtcccccttttttccattaacacatggaatcattgttaggaccagaagtccaaacaacgaatgaatttataatatttttgaatatcagttattattgttctgaagaaaggagagcggattgagccgataaggtgcggctgtatgagttgaccaaactcaggggataagaattcgaaaacggtaaaaatatacagagacaatattgtctatagaacagaaccaggaatctcagatttttgcaatgtctccgcatgcgcataagattttaaaaacttggatgatccaaataatagctttaattcgctcctgttggccctggcaaaggcttgttcttttttatactgatataaagtcgggtcctcaaaagttcaaaagtcgggtactcaagtgtcaaatcctcaaatgccgcaccacgctctctctctatctcccctctctttctctttcctgcaacaacctctattagaacagcccaaaattgataaattggcattttgaccacaaaaaccggaaaaatttccaaaaaaattattttttcgcaaaattttctcgagaatattgaataaatttaaatatctaaaaatgaataaattaatgtcaaagataagcaaaagctaaaatttcgcatttcgggttattttcgcttaaaattagtaaattttagctttatcgtgttttaacttggaagccctgcttaaaaacactcaattttttgaaattttaattgaaattttaattacatttagcaaacctgaagaaatttgagaattttaccacaatttggaaaaaatagccctattataacggagtccggacaatccgtcaatggacaattcgtcagcaaattttttgagcaatgattaaaaatcttgcgaaaatgattgttaaatttaataaatataatttcttatagattcttaacatttctaattaccgtatatgctctaattatagcccatgggggattatttttcaacctcctcagaatacagaggataattagagactgcgtgattaatagagactgtgggattatttttcgactgatatcattcgccgaagggcggcttcactgttcatagacactgacatcaaggtgagaaaactgctacctatactactaaatgaaaattttctctaggcatcagttggatggctgcagaaatttctcaagaggcataatttcgtgctgcgtatgaagacatcagtttgtcagaaaccgccgtccaactatgcagaagctgtggcaaaattcatcaattttgttgaacaaagacgaaaggcgaaaaacaattttcccggcggcatctttgcgatggacgagacggccgtttggttcgattgcccggacaaccgatgcatagacatgaaaggcgcaaaagatgtaataagtttttgaaaactatttagagctatttcctcaaattatgtgacagtggtggccaccggccatgaaaaaatgcgagtgacagtgtgcctaacagcccgcagcagacataagctcaagccctatgtgttgataaacagaaagcgaccggtgccgcaaattatcaaccaatttgctggaaaattggtgatcaatttcgatggctctgtgtggatgaacgatgacacaacggaggactacctgcacaaataatcggggcaaagctgttcgttggcgaacgcctcttggtttgggatgcgtttggcagccacaagagcgagagaacgacgaaggtggtgaaaggattgggagtggaaacggtttttgtccctggcggttgcatcaaattcatccaggtaccaaagcatccttctcaatgaaattcacttttcttccctaggctcccgatgtctttcacatggtacttgactggatccaccgatcgtggcaggaaatcgccaaagaagtgatcatcaaatcatttgagggtcagtt

SEQ ID NO: 1653 - DNA, 6721 bp, Heterodera glycines
cacaaaatcgctacgaaattcctgccgtttcactgggatgttttgaattttacccagaatcgagatcgggaccccaaaaaaccatagagattttttcggcacgagaatggacaaccgaatttttgatagtcagaactcgctagggagggacacgcgagaaaaccaaaacaaattggaaaacaaagaaataatccatgcttattgttagctcagttagtaacagctagtgctgctcgagagtctcggtctcgagtctcgaggcttgtggtcaagtctcggtctcatagtccagtctcgaggtttttattatattaaaaaataggaaagattgtttcaaaagaggcggaatgtgcaattgtgccaataaaaaaaaattccaggatgccatggaacaggcgctgacgaagcacattcggtcgctggctgacttctcggcacagcagcggacggacgcaggggtgccattttacctggaaaacccggcatttgccgggttttgggggtccttgccgggtttttgccgggtttttgaagttgccgggtttttgccgggtttttgggtttttttccggctttcctattttcaattcatttatttgaattttattaaacattttgccaaaattaagagccaaatatagttttcgttaatgttcaggtttattttattgatttttgatctcattttctagtctgcagaatgtcccaaaaatctatttctgatttcatttccaaagttacatttcaacaatcatcttcaactcaaatttccagcgctgaggaagcaatttcagatttagccgtttctgtctcgagtgatgaatttggggtgatttcaacaaattgactttttacatagcaaagttcagatcacctctccaaaaaggaagaaatattcgcacaaaaagcctggaggaggaatatcaaattatgaaattcaaggcagattccatccaaaaagcaacaaaggaaatgacaaatttttttgcaaagcctgtgatctaaattacaaaatacacaaaatgggcgaaaaaataatcacggaccacatcaaaaccaccaaacaccaaaaaaatttggctgaacttaacagaagcgtgcctttgaccgattttgtcaagcaaaaatcggtagttcattttgggactcagtaattaatctaattcaatataattaaggctacagaagagaaacgttgtctcgccgcagaattaacactgcctaccattgtgcgcgattttacgcggacgcacatgaatatttgggcaattggtcacagcaattctctgagacggatgaaattattggagattgggtcatttcgagtcagagccaacaagtgaaaaagttcgaaaggcgtataggcatttctgtggggcatcaactgacgaaatggatgctttgtttggtgagatcgctgagttgaaacaaacattgaaggagctcgagggcgaccggttcaacaggaaaaacgtggacgaaaaatgggcggctattttcaaaaattggcatgcctttgttaaactcgctaatttcaatcaaattcaatgcaaatatttcatgtcccaatgctcacaattactttctttcattgccaaatttgctcaaacaggtgaaaagcggtgataaatatgttgtttaattgtttttgacgttttttacagtgaaaaattggcttaaaaaactgccgggttttttgccgggtttttgaaaatttttgccggggttttcaactggttttcgagttttcgagatggcacccctgatcagcagcgaccgccaccactacaacgacaccaaacagtacaacctgtgctgggctcccggacaatcggacagtagacaatccgacagtaaattacactaaaagataataaaatgccgtcgccgaagaggaccgattgtgccgtatcaagaaaaaaggaaaataggcaaataaattgatgagtttttgtaataaccctaaaaatcaaacgatatgaatgtgcgattaatactgtaagggtgtggaaagttcctgatcgatttcagattttttttgatcgcattcaaagatgcaacttttgacctcgcttcttcagactccattaatattgaatcattcggacaaaatgacaatgattgtttaaacgaaaataattgaagggtaaaaatgtttttattcatacaaaacaaaattgtcgcaaaaaataagaatataacagagttaattttaagactatattaataggggtaggaattttagttttgttactttatccagaaataatggtttttgacatacaaatgcgtttcaaggaaattacagaaacaggaacaacttatacaattcatcatttgtggtgaataaatggtgtgcatacatctcaacatatccaaagccggaataatttaaaaattgattcgtagataatccaattgggattacacaggcttttgaggtccaagtgcttatgtggaggatcacaaaactgcggaatcgtgaatgttcggttaagtcgcccgtttgctgctcaattgttgcgatcatcgtaccaaggtcaaacagtttgtcattttgcctgcaataaataaataaataatttttgcctttttctacaaaattgccaatttgattgttaaaataacgattttcaccgtataacagattcgatcgcatttttttttcgaaccaaaccattcgagggcaattgctgcccttgcctgggcacctgttctgtggcgtaatatcacaaagttaatcaaattaaaatgctttaaatatgcgcaataggcagatggacaacgaaaccaaaaattggagatgtaatcccagttttgcgtaacaagaacttgggacacgcatcttaacaaaatgaatattatgatgagaaaatctgcccgattcattgattcttaaaaaagaaaagttacctatcaggtaattttagcgacaaaaaattttgactatgcaattcgggattcttcgccccaacacatgatcattatttggaattcatgatacaaactccaaaatccagaaccagaaacggatcacaaatctgaactctggtttgcccaatttcgaacaccggaccataattcgaacaaaaaaatttttaatgtgcggaaaaacttcaaatgcattaagcatctatttatttgatgcaaaacaattgttaaaaaaacgcagtttgcgcgaaaatttggtctattaacgcgtattttgaaaaaatccatttaggttcgaatttgtgtgcggggttcggaattgggcaattccaagtcagattcgtaatcagcaccatcgaaaaccactggaaactgattttaagcccaaaccaaaaaagtaaaattagaaaaccccattctccaggattgacttatttttttattaaaagtaacttttttgtttataaattgcattcatatgaaattaccctagtggtcctcttgacaaaacttcattgttgatgcgatttgcagtcgtgttgtaggcgtacgggtcagtaatgtctttggtaatttcacgtttgatattccttatgacttcttctggccacgcgtcactctgcggaagaaacgaaaaattttgttaaatggtaaaaatgaaacgccagaaaaagatatgaaatttttataatttttaaataaattctcattttaattactttgaggactaagacaaaaaaaaaaaattttttggtagtttctgtttggaaacaaggaaaattaaagattttgaaagatttaccagaaatttaaaatcaaatatatttaaaactattaataattttattaaattcaataaataagacttactaattctttaccaatccactgtgacatattgccagtgatgtctcgtacatatgagccaagttcatcaagctgctctttaacttgttctgccgcaccagagaaactcaaattggcacaaaagcctccaatcaatgcctgaagaatgggttttacatattataaaagcccaaaatttgatgcatttatgtttgaaatgtttaggtggctttttataatttacttcaaaatttttagaaagtgttccaaattgtaaaaacactatggctcaatcagggctgtacgaaaactttaaaaaaaatttcgtaaacgaaaacgaaacaaaaaagtgccaaaaaggtgagacaaaacgaaatttcgtttagcccttggcccaatgacagtctcgcaaattttgcctaaatttaaatttcaaacatttttctgcaaattaccattacccattctaaatttaatgaaacgaaatataaaaaaacattttaaaccgtttttctcaaatacttttccgcaagctactgtaaattatggaattcaaccaaagatcaacaaaactgacatttttaatgcaaaccgttaacctaacaatcaaattttccgttttcttacagtttcaatgacgtctattgtgactgactcggacaaacgcagcaattcgttcctttttgcggcataactctcgtaaacgcttcgaagaaggcaactgcaaaaagtgacaattaaatagtttttaaatttcaaaggaaatttatattgttaataattacacgtcagaaaacggtccagggacaacggcgaaaattgatctgatcaattcatccaaatcgaaatcaggtccgtccttttttgtgaacactaaaatgaaattatttaaaacaagttacaaataatttgcatataaaatgaaaataattttattctaaatttatttaggcttacattcgcggaggtctgctagagtttcatttgcttgacccaaagataaactctcaaaactttcgagcaccactaaaatgtaaaaatacttgaaaaatacattaaaattgaataattttgaaatcagtatccgatttcattataccataaaaaaaattttaaaatatttttcgtttgttattttaagaaaactattaaattatcactcatccaaatattacgtacctatgtatgttgtaaaaaaattttcatatgatgttgcatatttttgatcattgataatgacgaacacctcatcgaagacggacttcacttcgctgatgattggcagcatttctctcgttttttgctttttgcaattgatgttgactttcgtattgatgaactgaaagtttggcaaattatttctcaattattcttcaaacttttcaatttatgtttatttctgacttagttaaattaaaaaccaaaattaattgttttgttttttgtatgaatttacttccaaaatatccaacggcgtaaactgccaacgggtacacgccgcgacaaattgttctttgtgcgtttttgttttcgcgggattaatcacttttttaaatattttggtcaagcgggctagcgggacattgacaacctgttaaagtgtcacttttttgctcaatgggttacggtacgtaatttgaaacaaatactgtgtcgtaatgattcaagtcttgggcagatcttagtgaactcaatgctccctcaatgaatctgccttgagcttcgaattttctgtcaatgtgctgatgtaaaaatgcaagagacttcagaacagggtgttcgggctaaaaaaatcaaaatcaaattcattttccaacttcaaatttaaatgtaaataccatcaataagtaaagttaatttaatcactataaatttatttttgatttaattaattttctcaccgggaaaaccgtctcagcaaaagcagcaagaatgctgccagctggtcctgtgagctttaggaaattttttgctttttcacttattttgccgagatgagccaaggtgtcaaaagaagcgccggacaaaatgttgtactcagttgtaacacggcgcataatgaccattgctgaacgtataaaagagatgataaattgaaattatacacatcctactgtaattcttcaatgcccgtatccggaggtgggggaggatggtgccccctcccgcccccgcttgaaaagaaaaatgaaaaaaatttcaagaaaaattggtataaaatttaattttcttatcacatttcttaaattttcaaaaaatttcccggcgatgcctatcggcaacaccggacggactccattgtacagtttggccccagaatgataaaaatttgtcatttttcaaaaaccaaaaaaactgacgatcttcgctgttggtgtttggtgaaaagaacagcacgagaatgaagagcaaaaaagcctcgaaaattttctgaaatttcaaatcattgaatttttaaaaaattaatattatccactaaatttcaaattctttttttttaaattttcaatgtgtgtattctctaaccctcatgactgttatttgcttctctgctccacggcaggaaaatgtagtggatttgtggattctgtatttgaaatcaaatgtatatattaaataacaaatttgtttattcattaatatatctttattatttatccatttaaaattataaattatgtaaattggctgagtctcatgtaaaaataataacacaaccgccggagcttggcttctttcggatgttgaagccagccagaaaatttaatcaaatgaatttaccctaagaatgctaagtaacaaacgaaattattattaattaaatttatatcaactttattttattctttaatgttttttggtaaatttatttataaaattattttttgtgaaattatttacctaatggtcaccaaaaagcgaaataaacagccgataatggtga

SEQ ID NO: 1654 - DNA, 2453 bp, Heterodera glycines
ttgtaattttttgtgataataattcgtgaaaaatatgttctctatggttttagggatacgaattttacatccatttcgatggattccaaatccctaactcgaacaaaatttatttttgtaatgaattttcggttattgttttgagttctttgatgggattcagaatttttgaaaaggagaacaggttcgtgaagcgaccccataaaactcccagaacaagtttacaggactagacgacagattataaaaacaaaagggccctccctccctctgttttaagtaaaattcaaatgtgccacttttaaagtagcgcccaatttttattcaaattcataaagaaaagttttggccatcccatttttctgaaattggcccaaaatcattttgtaaatgtttaaaattcggtcaacatcatcatctaaaaaattgccaaaaagcaaattgtgcaatactgaattgtatagtaaaatgtgtcgtaattttcaggctgttgaagcgcatccaaaaattgaagacggacaaggaacagttggcccagaaatacgagcaggaggaggagtatctgatcaacgatttgatgcgaaaattgacacaggttcatatttttatttttcaaaaactcatgtttaacgggtggttggggctcggttcaactttttggcgaaacactccggttttttcaaaaaggaccattttgttcatgagtttctccatttctttggttttccaaattgaatgcatttattatctttcgatagagccccaaatgttctctatttatctgcaaaatttaaaaaaatctcgttaattatcaaaagagatatgatcaaaaacttcaataattggttttccgaataatttttgcctataacctcgacggaattctttgaaacatgtccaattcgaacaattatgaaaggagttattagaaaaatgcccgtttgaaatcgcccaattgatcctttacgggacgactacgtaacaggacaaaaagttgtcagccaaattgaattcttggacaataacttttttctctttggacccaatttgtcattgttcgaaagagtttgagttcttctggccattaaattttttttgaggtttgacagaataataatgaacaccttagactaatgaacaaacaaagaatacttaatttaattgacaattcatccgacgaaattttggggtgcaccggggcggctaaccccctccccaaattttagaaattgcaaaagtttttcaaaacttaattattatttataaaatttttaaggttttttttctaacatttagtgtattttcttcctttttttgcagttggaaggcgaacgggacgaattggccaatcggttgagcacggaccaaagctgggtggtggcaaatctgttgcagaaaatccgcaaattggaagccgaaatccagaacaaccacaaagtaacgaagggatatatttggcgaggacactccgtctcggtttagcactgacctcatttttcacgcaaatttttccataaggggggggggaggcaaaatcaggcccgtatccagaaaaaaatcacaaagtttgccattttgggctcaaattttaaaaaataatggttcaattggtcgcctggaaaaattttttggaaaatttaattcaatatgataagaaaatgtgcaaaattttcacaaaattctgtcaggttcaagtctgagttttttcaatccctgatagcctaaatagtattgaaaatgatattaaatgattatgaccgataatttgatcatcagtgttatgactgagctgtagaccattcggccgaatggtctacagctcacaatcagtcacaacaatcagttagttttttgaaaaaatcagtaattattcaaacgacataattaatgctatttcgtctatcagggattgaaaaaactcaaatttgaacccgtttttagacataggcgcaaatgtcccccccccccctagcgtgttaagacatttgtcggtctcgatgttagaggtctgctgaacatattacattggctgcctgactaatagatgacggacatgttctatttgtatctatacgtttcattttataatgatatttttcctttttatcgagattctcataaaaatattttggcattttcgaatttcttgagaaaatccttaactattgtgtaaaaacaagagaagaactactgtccctaccacctgagctttttgagaaaaaattcaatatttataaaatggatctcaaccttagtcatttgcatagcaattaaaagtgattatttataaaattaattagccaacttttacatcttaatccttttataaaggaaagcacctgacttggactgcttaaacatagtgcactggaatttgtcaactaccacaagcgccagctgagcagaatttacccctaaaggtgcacgggtggactcccgcaattttcttcccc

SEQ ID NO: 1655 - DNA, 1297 bp, Heterodera glycines
ttttcaaaattgggcttgtcaaacccccactagagctctaaagttgatagtcagtctaccaactactgtagagatctgagatttcctaataatgttctccatccctttgggatttgtttcgctgatattgttttccttctcttcattgcttccagttgggtgggggttaggaaatttttttctagaagacttgaatcggcttattagaaagagcattaaattcgattaaatgggatggaaaataattttctgaggtttttattttattggagtcgaaaaattgagccgcaaatatcatttttggctgtggccgcaaatgtcctaggcgcaaatgtccgaccgcatttgtcgggccgcaaatgtccgattttcagcaggccgcaaatgtccggaccgcaaatgtcctacaaccccccccccccccctagatacgggcctggtgccaaaataatattttgaacggagaagcaattttataaaaaaaattttgggaaagcgaaaaagaatgattgggaggggattttcaaggaaaaatgaagcttttaacaactattaattttatccccataattcaaagaaatatgaattgcaactccataacaatgcgtttttttccaaacataaatttttcatcatgtgataccgttttttcatttcgtattttcagcgatttttgaaaatctttgtaatacaccataaatttttcgaaaaatttttcttgtaattttctgtaaaaattctaagatttttttcttgcataattttttttggtaattttttttttttgaattttcgtgggaaatggcagggacggaggaaccgcaatacacccgggaggggcgaggtattcgtaaaatgcaaatttctggcccaccccaaccaaacacacatttgggtgagattattgaggcccaatctccaaacacaaatcataaaatttgaaattcatttgcctttttccagtctttggagcagttgcgccgcgaaaaggtggacttggagaattcgcttgagcatgaacaggaggcactgttcaacacattgggcaaacggtgtggaaatttaaatctcatggaatttttttatcaaattgttttgtggggttttgagcttaatagataaaaatccaatcaggccgtatccagataaaaaatttcggggagggcaccgaacagcttcttttttttttgctcttcgggctatatatttttaccagtgttgttttccaaaaaagttcagcgccggagccacaaaaacaggcaaaaaagacaattttcgccacttaggggtcaaatgg

SEQ ID NO: 1656 - DNA, 7814 bp, Heterodera glycines
  unsure (1)..(7814): unsure at all n locations
ttctttcgcncacgtttcaatggcgttggtggacaaacatttcaatggcaaaagcgaattgacaatttggagaccaatcgaaattcgcaaggacaaaggaccagaaccgaaactttatgtacaaatggatagaaaatttgacaaatttgtgccatttccattgcccgaccgtccgttgcccagcaaaattcgctttgattctattcagattgagtacttaaaagcagagctatgacattaaaagcattctttccattttcaggtacattgatcactccgtcatcgcttttcttcgttcaaatcaccaaattttcgacaaaagaggcatcgatttacatttgtggcttccttcacataccacgaatggccaactaatttgggacatttttggtcgtgaaatttggcccatttttgcgccaaacattggtcatttgaccatttcaaacgctgagcatttggacaatttgcgtcgtcgcatttcgccgacaattctcaccgatctcaaccaattgaattcaatctattccggtgctttgttgcccgctgcgtttggtgatgattttgatgggccaaattcaacaatttctgctggccaagcattgtccaaatggttgcacaatccgagaaaagatggccaacccaagcgattgcgttgcgataattactacgaacaaacggacttagattggatcaacaatttcaaggaggtgtggcccataatctcgacaaatcactgatttttgtttccaaattgtttagcattttcttcgtgccaatgccatttcttccgtcagttacgaaattcatttttatgttcatgtgccgtcaatacaaatggtgccatttgaattggtgaacgaatggacaaaggaaaagctgacattggccaaagcaaatgaaaatgaattggacaaccgatggataatgaaacgatgcaaaattggagagacagcggcggtcaattgggaagacggaaattgggacaacaattgtaacaatgtgttcttttggcttttcggtaccactaattgcattgggtgagcaataaaaaggggatttgtttttatacatatccaaatttgagatttgcgcttaatttaggcctttgtctccgccaccggcagaagaaacgggacaaagcatcacaaattggccgtcttttgctggcaattagtgatggacaaaagaacaaaaaacacaatgatgagcaaggttttcggggacgctgatcagtgatcacgagtccgtcatcccatttcggccaaatccgcggattcaaacaaaaaattttaaattttaaaaattcacatttgtaaattgttgagcttttaactatgttttcagcgcttaatatacctaaatggctgtattggaagagtttcaaaattttacattgaaaaaattgcatgaaaaactggctttgaatgacaatgattttgtcgaatggcttgagcatttgggactcttgcattcgcgtcgctcatgtccttgatgtggtggaaatacttcgattgtagcagttggtggaaattggcgttgcactacaaggaattgtcgggcaaaaacagggttcttggttcgtagtgcgacttttgcggaccactatttctcgatagaactgtctaaataaagaaaaaaataataagaaattttaataaattcattattccaaattgaattagtgaaggtaagctgatgcaaagcgatctgtctcaattggagagaagtcttatttgacataacttttttctttcttttttatagaatttctaacttataattaaactgtgaaaattggcgaaaaaaattcgctaaattaaatataaaagtcagttcaagaattttatagcaagaaaaattattatcgtgtttcacttccacgctttagttaaccgagagcttaatttttttccggcatgccaaaccaattaaattaacaaacaaaaactaaaatagtttttctttttctcaaaaattgtccgtaatttgctgttattaaaactatgggtccaaaattaaaaatgagcaactacatactatatttatctatggaaactaaacttctttaaaaaaatgggttctttcgatgttgattgcaaacagttgatcgattactcttgaagggcgatgttcaacttggtaaaaatcacaaataaaactacttagtcactcaatttttgaaaaaattatttttttttgttttttttgacagttcaacccagaaatagtggtccgcaaatgtcggtccgcaaatgtcggctaacctcttggttgggactttttttgaaggtcttaacttgatcaaaagatacacattgggtgtattggttctattataaggttcaaaattgtcgactaagcaagtttttgaactatcatgtttcgcaattttatccatgccaataagcatgttttttatttatttcgtgcatttaatggcatttggttgcataaatgtgaatttttaaaatttaaatttttgttcgaattcgggtctggggttcggatttggacgaaatggatgccgcggattcgtgatcagcgtacccgaaaacctttggaaatgtattttcatgacttatttatttatcgaacaaaccacaaggtgctatgcactctaacagtggtgtaaaaagaaaaaagtgagaataaaaataaaacataaatggcagtcaaaaatcacaaaaataagtgtcaaatcacagaataggtgtcaaattaaaaacaatagacataaatgaaacaaatcacacctctcaatggggaaaatatgcattattgcttaattatttcttttgcaatttctcggaattttttggggtcatttatttccataatatttttcggtaataaattccatgaattaataaccctattaaaaaaattattttttgtttttgtaatatatatcctattttgtaataaaaagggtttgcgaatagcccgtttagcaacagcaaaaaagttagatggtttaagatgtgtatgtttttttattattttaaaagtagttgtaatatcattaattttgcgcctaatttccaatgtcttaattccgcaaaactttaatcttttttcatacggcatggggacaagcccacattttttgaaggcttttcttgtaaaaaatttttggactgcttcaattttgtggacattttcttttttcaatggattccaaatttctgtggcgtattctaactgtggtctgatatagcttttatatgccaaaattaatgtttcaagcctccgagtttttaacgctcggagaagctgataacaagaaaaatatgaattttttaaaattttattaatatggtcagaaaaggatagtttttgatcaattaaaatgcccaaatcccttacacattttgtttctggcaatggttcgccatcaagaaaataaataaattttgtgttattttcacccaagtaaaggaccattgttttttctattgatatttttagtccattattttttgaccatttatttattgcctcaagcgcggaagataaattctctctatttttatcatttttatgctcaatataaattttaatatcatcggcaaacattttaataccaacatttttaggcaaattattcggaagatcattaataaaaataagaaaaagcaaagggcctaagacactaccttgtggcaccccactataaatgttttttgagttagaatactgttcagagattttaactctgaatgaacggtcatttaagaaatttttgataaatttatgaatcttaccattaataccgatatttttaagcttttgtagaagtaatttaattggaacactatcaaaagctttagaaatatcaatatatattacatcaacacaacttttattttcaatcgatatataaaaatcatttaaagttgatagaagttgtgttgtggtggatctttgtctcaggaatccaaactgaaatggactaaaaaattgatttttattcaaaaatttaagtatttctagctttattattttttccattactctgcataaagtacaagttagtgaaatggggcgataatttatgggattatctgtatctccttttttgaagacagggataattatggacgttttccatatttcagggattttagatgaatctaaaattattctaaagagttcagttagtatgggtgccaagggtaatgcgcattcttttaataatatgtaagggatgccatcaggcgatgtcgaatttcttctagggagtttttttaataaattccaaatattatagacattaaattcaatgtctgtgatctgattagggttttcatggctgagtaagtcattgttattttccttgtacaaaaatgacttttgaaagacatcagccaataaaatacatttttgttcattccgaaaaataatttgcccttgttcatcaataagtgttggtattccggtgttagttttaagccgatttctaacaaatttatagagagaatttcttccatttgaaataaatttagcttcattttcacaatataatttgtggatatgttttttgtactccctgcataatattttatatttaattttaagctcacggcactcagcttttccttttagcatgctatgggttcgggctttttcccttactaaagtttttattttttcatcatgttttttcttaatagttgttttaagcaatttcatgggtacatttttatcaaaacgcttttttaattcagtggtaaatatgcagtatttctcatttatgtctgaaactgtaattgggagggagtttggcccattaaaaagaatttcttggttgagtttagtaaaatttttctggcgtaaatctctgataaaaattttttgactatctgtttttggaatagtttgatttatatcaaaccaaacagtattatgatcagaattagaaaaaggggagccaacttttacattataaatgagttccttgggttgactaaaaaccaaatctaaaatattattttcccttgttggttctttaacatgctggaaaagttgattttgtgccgtgaactcaattattgttgttgaaagtttatctttttttgttattttgcattcagaccaattaattgaaggacagttaaaatcgccacatataattgtattttttgaatttgtttcagaaataaatttcagcgcttttttggtgttgctaattgtacagctgggcggtctatagatgataaatatttgaataattttctgtaaaattaatttaatgtgtataatttggcagccaaatttagttccattaaaaatagttttaaatggtattttatttgagactattatggcacatccacccccttttgtgggacggtttgcaaaaattgggttatatttccccatatatgaatattcagaaattattgtattttccttcaaccaagtttcagttataaaaattagtcccggttcttggttttccattaaataaattaattctggtaccttattgcttattgaccttgcattaatgagtgtacaggagaaatattggttttttgctatttccgtattttgtagtggtttgttcgatgacccctatgcattattttcccgtgttttgagagggtgtgggtttttcaatgtgataatggaaagatcaacgacaatatatttgaacagtccttcggacttattcctttcatatgcttgagtcctaagctggtataagacttgcagttccgaacgggtcagatcccgacggaccgtgatattttgcggaaaattttggtgttttttaagtgttttgcgaaaattttttatgaaaatatcacggtatttgcgttcagtgaatgggattttgacaatgcggggctttttgttcgattgatcggaacccacaacggtccatggatggcgatggacatctccagcgttcaaatgttcagtgattccgcattcgtcagtcactttttgcaccaattcattgacattgatgccctcgggcactttctccagcaccgcccgcattgattttgccttgatttggtcggcgtcgaggatggcattgttaaccatctgtgagatggaccccggttggagatgagaagattgacgaacaaagtgagggggttgaccccactgagtggcgctgttgttgatttggtcgtcaccagcatggcactggcattgatttttggttttattgaccaaattttgtaccagtttttccaaattttctagccgttcgaggaccgagtttaagggtgggctttggattgaatttatttgctgttcaaggcgatcaagacgatccaaaatgtcgtcagattcgttgagatttggggtagtgcgtctctttttccccatttgtgaatattttgtgaggaatgaatagtatataccaagatagtttgtcaattaagaatgtattatttaacaaaaataggctgtgccaagtaataaatgtccaaatcatttttctccccatgcaaatatggcataaaaatcacttctcagcggacagaacgaaacaaaaaaatgcgagcacaaatatttcaaaagatggcaatctcaacggaaaatacacccataagaattgaccccaaaaatttcaaaaatacgcccctaagaatctaccgaaaatttttaaaaaatacactcctatgaaatgaaaattccctcaaaaattcttaccacattttttttttcttgacaaattttgatttaaaaatgttcagtatttgctaaggaaatagtttaatggaaatgtacctcatttgcaactgcaactagtgaataaaaattatttttacttaatttttggctaagaattatgtcactatccatcactatttcggactttttgtcactatttcttctttattttggcactttttcgtcactattttagtttactattttgggatttttcttcactaaaagttgcttccctacacataaccaatgcttcagctcaaagctcaaatctgacaatgttcatatcctcatatttttcgtcttcccactgaaccgccgccgtctccccaattgggcatcgcttcattgtccattggctatagtcccatccagatggcttctgcaggcccgtaaagaaaaaaatttcgggatgtgcaacagaacaaaaaaaacatgaatttatggccgcttcggcaaaaaacgattattttttgccatttttgaggttaaaattcaaaaaaataaggtaaaatggaggtccggcggtgccgacaggctctttatgcaggggcagatttttaccccaaaactacttatgggtactgactagagcccggaaagttcaaatttgctgatcccgctgcgggattggtactgaaaatttttgcgggacggcatcccgcgggcataaatcccgcatttaaatttgcgggatcccgtgcgggattttggaaatttcaaaaaatttagaattaaattttaaaaacccaaaaaactaaatatacctgggcattttaaaaaagaaatttttagaggctggcggtataaaaagttaacaaataatctaaattatatttacccatgtcctatttgtctacttaataggtcagcagcgataaatgagctctattttggttggtaacatgtgatttcgtcagtgagtgatttcgtcaatacggggttttgtagtagtagtaataataatttttttacgaaaaaattataataattcaaaaattaaattcgttcaaaatatattaaataatatgtaaattcaaaaattaagattatttgctcgattatcaacctgttttcggcccggtctacttacgatataagctaaacataatttgtat

SEQ ID NO: 1657 - DNA, 4080 bp, Heterodera glycines
  unsure (1)..(4080): unsure at all n locations
ctgtgagttttccatcgcccactctctctctctctccgctttttccgttccttctttgtccatcataactgatcggaagatcatattgtccattctttattaacattgttcgccaattctcccatgtgcctggatcatcagctgactaatgaatgacttttcttttcttttccttttcctatttaatcgctttctccgccccattattttccattatttttgcatttgccatttccgttctttctttgccaatgaatttcccctcgattttctccgttttgtctcttttgcttctttttgcggacttttcatggctcgccgtttcttctcccactggtgatgcttttccaatttcaaatgctttacctaattttctttttaaaaatgccttcaatttcagacccatcttatcgtacgaaggcacaaattgatcattcgggcaccaaaaaagtcgttaattctcgccactctcccgcgccggcgccgcacagccaacggaaggagaagcagggcaaaaaagagaaggccaaaagcagcagcagcagttcatcggcggaggaggaaggaaaaaaacacagaaaaaagggaaacgggcgacagatcgtaaagcattttggaaaggggaagaaaaaggacgactgatcaaataaataattgattaataaatgaatgggtgattagtcggctaattgatcattcattcgacggctaaccgtcggctgatcattgacgcgtgattttttggcctggaaaactgggaatttgcccgttttttggggtttcagaatttattcaatacctaaaattaacagaaaaaattttttggggcattctgttataaaaaaaacaattaaatttttaattgcggtggcgcctgtcggcactgctttacccccccccccccgcgcccattacaaaatttagccgattaaacccgcggccaaaaaatgatgatttctgggaaatttttattttttggtacaaaatctgttaagaatctcctaaatttcaaaaatctttttgtcaatcggtgttttgtgttacggggccggggaattctcggctcggtgccgtactcccctaatttctaccaaattcaattctaatttttcatgtaacactactcacttctgctcaaattacaatattccaataattttgttaatatatgtattaaagtggtgataaagtgctgtttgaatgattttacgtttttttaacttgaaaaagcggcttaaaaattgcaagtggcactttccatgtcccttaactcgtccctcctcctcttccggtcaaattttttacaaaaataaagcatacatttttattcgatattttaccattttttaatttctgtgagtgattgtttaaatagggaactattagaaagaaaaacggtggaaaaaagaagcgttaattaaacaaagaaaaccgcccgcagaattggaatgaattgtttttcaaatgaatggactgacaaatgagtttaaaaaatgtaatttaaatgaattgcgcattgaattcaaaaggacaaaaaattaatatttttacgctaattgccccgcccattttttgcgaatggaactgaaaaactcagcggggactgtgcaaattcgccgagcattttatttgtcgattcaaaaatagctgagcaaatgagcaaaatttactatcaaattcatttttaaaaattaaatttgcccgaaggaattttaaatttaaacgaataaattgttcaaaaattatagtgaaaaatttaacaaatgattgtactttttctgttcatctcttcactaatcgctttgtcattttacaatttttattataaacgacgcaattttccgccaggtaaaaaatacattaaattattatttaatgtaggaatataattttatgtaattagatattaaaaagcaaaaaaaaactgtttggaaaactaaagagtgatttttaattaatatttttgtatagttcaaaaatattaaaaatgttattctaagactaatttggcttttgtgtatttgtgcccatttctctcttttttaagaatttattgtccaaaaaatcaaataatattattttatttatatttttagaacatacatatttcggggtttttgtgcttaattcataaattttatcttctttttttttacatattttgcgacttttaataaatgaaatttgcattatcctaaattttaattgtttttaaatgcctaaacttccaactcatcaggcccaacccctttgccgatttttggcaatttgatcgcaattcatttgtcgggtgctggcgaattggcatttaaaaaatgggcgaaggaattcgggccaatttacacttattggataggcgaattgccagtaaaagttttaattatcatgctttaaatcaaatttatctttgaaggttatttgtgtggcggcctatgaacaaatggtgcaaattttccaaaaagacgccgaaaattatgccaaccgatatatttttcccattcaaagagtgatcaatggtgcaaaaaattaaagaaaatattaaatttaaaaattgaatatttcggacggacaacccgcctttggcattttgatttcaaatgggcaacgatggcgccaacaccgccgtttcgcacttcatgtgctgcgcgattttgggctgggaaagaatttgatgcagcagagagtgagcaaaaaaaaaggggggggggttatggccaaataatctacggataattacaaactttttggctcagtcaaaattaaaaaatataaattttaaatgccttttgccaatttccattcggtgattaatttttgatgactaaaccaactttgaatcgttcagatttttgaggaactcaaagcaatgtttgccaaaatcgacctgaacattgatcaatcggaaaacaatgagataaatttggccgaatttgtcgaacattcaatcgcttcaattgtcaaccaatttctttttggcgtcaaattagacgaggttttgtttgtttattgctgtttaattactgtaattatttaaatttaattttaattttaatgataaaattgtttaagaaaaatgcggcggacttttacgaaattaaacaaatgatggacgaacattcgggcgaagtcggcggtcattctctgttttggatatacattttgtggccagatttactgcgcaatgtgccatggttccgaggaaaacgttggatttaattttaatttcaattaattaatttggtattttaagggttacaattggaggaaagagtcgtcaatttccatcgatattttgagaagcgaatttttgaaagacagatgaaaatggaaaatcctatcaattttgagaagccttcctcagattacgtggaggcgtatctgaaggaaaaggcacggagagacgccgcgggggaaaagggacaccaattcgagtggggggggggggcgggagggcggaatgccaaacagtgccatttgaatttggcaccctttgaggagcacttatcagctggggatgatgtgcttcgacctgtggatcacgggacaagtcagttttgtaaaccgaaggaaatcccggtttaaaaaaataatattttaattaaaatttgaaactttggctttttttacaacctaaggaaacggttgtgtccgttttgagttggggcattgcccttctgctgaacaatggcgaaccgttggtaaaaatgtgcgaagagattgatcagctgatcagcagcgaaaccgtaacagaagggcggcggccgcggatgattactgtagcggacaaggcaaacctaccgtacacttgcgcagttacaaacgtaagtgcactggcgatacagtaagcccaagcaaagactttacggtagtttaaaatcaaagccaataaaaaaatcaatgcacttttgaggaaattctccgctgtgcgaacattgcgccacaaaatttcattcggacagtcgccagtgacgtccgattggccaatggttttgtcctcctcaagggcacttccattctnccccaaatttcggtcgttccagttaagaaacgggtgaaatcgcttcaaataaatatttaccg

SEQ ID NO: 1658 - DNA, 1025 bp, Heterodera glycines
aataacttctccgcacctgcctaaggcaccatccgaccaaaatgtatttcttgtcctaaaatgaaatcaggaccccccacacaaaaccggagttcaattccggaaaacccgggttttactctcggtaatcccaccccccggcctcactgatgccaatccccgacctttacaaaaattccggcctctagtaattacagaattgaaattgaaccgatcagttcttctgttcagacaatgcatgggcgaatcgatggcacgaatggaattgttccttttcatcgccaacatttttagccgatacaaagtgaaggaattaatgattatgtaatttgggggaaacaaacaaaagggaaaatttaaagcacaaatgacaagaaacaaagcagccaatcgagtcaattcaatttttaatcaatgccgttaattaattaattagttaattaaaatgtcctttaggtctctgccggctcagtccctccttcgctgaagcgaattcccagtgcggtcgcccattgcgcgccgttcacttgtaaggttgagaaacgaacgaaattttgaagatagaggcccaaaatttaaatttgcgatcccgctgcggaagcatttttttatcaattcaacatttaaaattttttaatgaatggcacaattacattgagaaattagaatttgaaaatcattttatggcatttcaatttttcgtttggcgctcttttggcccaaaaagggcattggaaagtgtcaaaagtgctggtaagacgagcaaagtgttgagcaggcacaaagcaatggtcaaacacatcaaacggacaaaaatctgacggaaaaattaattttaaaaatttaattagttaattaagagtatttatgaattgaacccgggcgatgtaaaggtccaccaaatagtcgaccaacacacacagacacgtgctgaaagaagcttgaatgctgggcaaaccgaccgatcgaattgtgtttttgagtttgtgctgaaaagtgaccgattcgccgtttctcccctggag

SEQ ID NO: 1659 - DNA, 6696 bp, Heterodera glycines
caatccccgacctttacaaaaattccggcctctagtaattacagaattgaaattgaaccgatcagttcttctgttcagacaatgcatgggcgaatcgatggcacgaatggaattgttccttttcatcgccaacatttttagccgatacaaagtgaaggaattaatgattatgtaatttgggggaaacaaacaaaagggaaaatttaaagcacaaatgacaagaaacaaagcagccaatcgagtcaattcaatttttaatcaaggccgttaattaattaattaattagttaattaaaatgtcctttaggtctctgccggctcagtccctccttcgctgaagcgaattcccagtgcggtcgcccattgcgcgccgttcacttgtaaggttgagaaacgaacgaaattttgaagatagaggcccaaaatttaaatttgcgattcagctgcggaagcatttttgcatttgttttatcaattcaacatttaaataattttttaatgaatggcacaattacattgagaaattagaatttgaaaatcattttatggcatttcaatttttcgtttggcgctcttttggcccaaaaagggcattggaaagtgtcaaaagtgctggtaaaacgagcaaagtgttgagcaggcacaaagcaatggtcaaacacatcaaacggacaaaaatctgacggaaaaattaattttaaaaatttaattagttaattaagagtatttatgaattgaacccgggcgatgtaaaggtccaccaaatagtcgaccaacacacacagacacgtgctgaaagaagcttgaatgctgggcaaaccgaccgatcgaattgtgtttttgagtttgtgctgaaaagtgaccgattcgccgtttctcccatggaggcctaaaaaatatatttaaattaatgaaaattaaaattgaaaaagcaaaagggaccggaagtgaggtaatggtaggagaaatgggcaggcaaatcgacggagaagccaatggaaatgatcagagatccgatcatcagctgattcagcgcctcccccgtccaactgagtacgcccagggtttctgaatttgtctacaatttagcaaaacactccaaatgcccaaaatggcccttgtttttcaataattacccgttattattgctgcgatcaccgccgtggaaacgattaccgtgcgccagtcttggagcatcgccaggcaaatcagcgccatgcagaccaaagtggccacggcggattgccaagtgtcggttggcatattgtccatctttttgggggtaggggagacgttgaaaataaaaaccgttcttcgaatgccaatgtttgtccttaccaagtccaaaaagatggcctcgtcgtggtgaacggacgcgtcgatttcctcgccgaatttgtccaccgttcttcgccactctttcaacagttcgacccttcgcgaccatttggtgagattttcgttgtgaaatgcggtggtgaaaaagaaacggtccacggagcattgggaatcgctgaaaatggcacaaaatgaaaaatttgcattttctggcacttttcgacactgctcaggcgaatgaaccccttccaatggtcaaactcggggctgttcagaaactgttgcaaatgcgcacaatcgaaggcagctaaaccattattattttgatttaaaattttaaatcggcacatttcccaccatttggcgttttgcctccattcgccgttttcctcccgcccccggcattggccaacagtcgttcttcctccgcattatcccacagaaattgctcaaactctcggacgaagtaccgagtgctttttgcgccccaactttcgggcagtgcctccatttggcccaccaaagtgtcaattttggccaattgggcgggcgacgaaagattgccgggacggccgacgaaaacgacggccgttgtgtaggagggaatgatacgctgttcccgaacattgtcaatctgcgaaaaagagcactcccaattaatggtgaattaggacagattaattaggcaatgggacaattgagtcgagacggaatcgggaatggaagccaaagacaaacgaattaaccgacagaaaaaacaattaaagtcaattagagggaatgaacaaattagccacctcaagcaaaggcgaatcgcgcgcatagagctgtttggaggtcatattcacttcgaagttggaaatgccctaaaataataaagggaaaagggcggtgaatgaatgaaagggaaaagcgaacgatggcacaaaaagcgatgaaaaagacggagcaaagggcgacaagcgaagcgacgatccgatgggaaagcagcgcaacgtaagcatcgaccactttcgaaacgaattccttcgctttggcgtggaattcgaactgccaattctaaacagttgcaattggaatttgaattttgatttcatttccaatttcgtttttccttttaccctttccgttcccttttccttccgcgtttttctctcaattattgccactgttcccatcaccgcgacaaagtaagtgcactgaaacagcaaattgatgctcaacgcggccatgttggccaagcacagcaaagtgatttcgagcgacccaatgaaacagccgatggcatcggccaaaatgttggccaatgccgagacgagaatggacgggcccgtgtccatcagcacctgcggggggagggagggaaaggcattagtggcattaattactgtggtatttcatttgcattttgttttccattttgcatttcgattgttttccatttcgttttgagtgttattcaacattcattgacctttgccattgtgtccgccactttttcctcaatttcgtcgtcactttgtcccgcctttgtcgtccttttgtccccctcctcctccctcttttcctttgttattctgttccacgcgtgagtcatcaaaaaggcggcgtccacgccgatggccaaaaccaaaaaaggacaaacgcacagaatggatgagaagcgcattccgcacaacagcagaaggccaagtgcagtcccggtggccataaaggggcaaatgcaagcgacgagggccaaggaaacctggggaaaatggggaatatttggacaggaaaatgggaggggggggggacgaatgggaaaagtgggaaatggggctgggattggaaaatcttctatctgattcgaagaaagtcaactttttcccaattgctgaaatttactggtcagttaaactaatgagtgaatgccttgtggacggtcgcctgttgaaaatacgcggcggacaaaggaatgctaatggccgtacagaaagccatgacggcgaatccgaagccaaggtacggcagcatggacaagctggcacggacgaactccgcctcgacataactttggcttatgctcatcacatggatcaaatcactgcgaaattcgctgaaagttaaaaatgatcaaaacaattatagtaattgattgaacgaacttctcgaagaacttggacactctgatcagatactgcttcatctcgtcgctgctcagccccaacagtgtccgttcggctcggtattgaagggcgaccatctccacagaagccatgttggtgatttttgtggtcaaattgtttttggcaaagttaacgccgtggaaatggggctgaaattaaaaggtgatttaaaatttaaacccgccgatggcctttgtttgcctgaatattagcttttcgcccccacacattgatgttcggatagttcagacttatctccgctgcttgcctccttcttccgtttgggtgacgaatcctttctgaaatttttaaacactaaaaatttgttctaacaataacacgtcatgtttggagtgtgtttgtgtatcagtgaaagcaatttaatgatattgttaagagtgtgcaaatgtagatcaatttcacaaacaataacaaattgagtgactttccttgttaattatttacacatcataaatttaaactttttatctgcattctcatcaaatgcgagatcttcaacgatttcaatttcttcttcattcttaaggcatcgttcaatgattgaaataaaattattagccatttcaatctcgacaggcgaaatagttgaatcattaaaattattcgaaaaatgtttttgaagtaaagaaataatattttggggattaacttgcattataattaaattatctaaatatgtaattttattaaaaacaataaaaaaaaatgtttgcgtaggggggactcgaactttccattacaaaaatgaaatcgtgacacacaaccaccctgccaaccggtcgctttttgcttctccttttaaatttaatataatataattattaaatatttaaagcctcatatctcggcacagaagcttattccgcagctagaaaaaaaatttggcaatacaacccaggggtggtctacccacctacaaagtttcatttggaagttccaccatcacccgaacactctcctttgtgaggggaatggcactttttagaatttacagattcaaacaaatttttctttccgcgcccatgaaaaaattttatttttcattttttgaaaatttatccgaataattaaaagcattcaaatggaaatattaatttaaaaaaaccggtgcttcaaaaaaattttgaaatttaaatttctaccccaaatttttcgaaaattcattgcgccaggggctgataacaaatattagaatccggaattttgaaaaatataggaacacctagaattcctgcaaaaatccctctgcaaggttctaggagcatttttgaaaaaaaaatacagactttcagacaaaaaatagttcgggcggaaggggcggggggagcaaatagcaaagttaaaaaaaagatcactaggcagatatagtaatagtactagtaattgccgacccacactcacttgtacgggttgggataggtggcacggcatttgcgctgtttgggcacattgtgccacactttggccagccgaaccatcgcacccgcgtccaacagtccgtagccaaacgaatgcgacacgttgcgcccgatgccgttcagtcgccagtcgccggcacgcaaattcaccggcttcgccgttcgcacgacaatgtgctggaatggaggggggaaatgaatgcacatttggtacagaaaaacaaaaaaatcaaaactgaagccagaaaaaagttacggaaatttcagagaggcgaattttattttatttatttattttgctctttggggctaaaagttttttttcctccaatgtttatgttcaaaaatgtgcagcaccggggagcaaaaactagaacttcttaagccatttcagtgaaaaatgacaattaattgcttgtgtcattttggagttatatttcaacagtatgacaaaatggcgcgaaattttggaaattttaataaaatttgtgaaaaagggttttggttgtaaattcaattttgtgacagaatgaacaaaaggcgtcgaaagagggaatgggaatccccctcacctgcaggtcacgccatcccaagttcgggttggcctccagcgtcagtgcggcgatgccggcggccaacggggcggacgcggaagtgccggtgtgcgacttggtgcaggagtggtgcagatccgtggtgacaatcatccgttcgcccgacgaaccgcttgaataggcggtggccagcgttgagctgcacgcctccgaatacctttgcggggggggggggttagagaattttggattttttgaaaaaacccaattacataccatgggattgccccgcgttcggtggccgacgaaatggaaagtgtgtggatggaattggtgtacccgtcacaattgcatgagtctgcgtctgtcaaaaaaaaataatattttttttaaagaatggcttggaccagggcctcgccgagactctaccgaatcctggccccaggtttttttgggacaacaccgggaccggaagccctggcaaaatgggactttcagtaacacaaatcccggcccgtttccataccatttcaaaattccggttcatcctgtttgctgtgttgcgcgagattacgggtttttagaaaattacgggttacgggaacatttttacaaaacccggtgatgaacccaacaaaaaattacgccgtaccctttcccccgttgccggatgcccatatgaaaatggagcctttgccctgccgtccctcggtgatgccgcgttcgaacgcgctgcgcgtcagcgtggcggggccgtccaccgtgcgtccgtcgtcgtccgggccccagctggccgagtaaatgtcaatgtgctgcgagttgtggctgagcgaagtggcctccaccgcgtcggtgacatcgcctgcaacaaatgatgggaaatagtaaaaaaaaatggggcggtgaaaatttcgaaaaatccgtttaaaactgacggaaaaaatacaggaaatgatggctgcattttcagtttattgcaagcatttcttttttggattttttgtcagttcttctactctttggtgacttttttctttatattttttgctctctcgtcactaaactcacagccattcaaaaattcattgcttttccagtggccctaatttttcgaacttctccttcgcttgcaatttccagtccatccatttttaattttgggttcaaaaaatgaaaattttgaaatttaaaatcgaa

SEQ ID NO: 1660 - DNA, 2688 bp, Heterodera glycines
aataaaatatttatagttccgataatgattaataatctcattagaatatttattgtttttataaagttaattattttattttttcaacattcatttaatcgagtttgcaatcaattattttattattaatatttattgtgcgttggctaattatatatttttagcttaataacttaataatatgtcctacattaaaagattgttagtcaattttattttagtcgtattcattattttatcatttaatctctttggatttgttaatttattgcctattaaatttttgaataatttctcttattttttctacacgttgtttttccttaatttaattatttgcttattcaaatcaagaaatcctttctcgagatattttctaattatttgtaataaatccgaataaatggacgaattttgggaggaaatttccaaatgaaaatgaatggggtgaggagtagtgatgctcgagagtctcggtctcgagtctcgactcgagaaaagtctcgggtttttttggtctcggtctcgagtctcggtctcgggttttcaagtctcggtctcgattttcgagactcgagaccgagaccgagacttttttacacccctaatgattgttggcctttggtaaacttctatttttataaattttaggttcttttttgttcaagtttgttaatatatgcgtggtccagcgggttgtgttcttggttttgttccttatttttgcgttggatcagttcccctccaagtattattttttcttctcatttttcaaaattaatgttttttttcgatgggagttcaaacacaattttaacaattaaaatcgtaaaaatgtcatttttggacaaaatccgttaacaaattgcagtaaaattttaaaaaattttcccggcggcgcctatcggcaccgccggacccctgttcccgaaacatttttttgaaaaagagcaccacaaaaaatggtgtaaaaaagtcaatcatatgaaaaggaaaaatgtatggtagcttaaataaggaaaaaaacaaaaatttttgagaaaactcaaaagattgatttttttcgatttttaagtgtgtaagaaaaaatttttgaaaaaagtctcgggtctcgggtttttttggtctcggtctcggggttttgggtctcggtctcgagtctcggggtcgagtctcggtctcggtctcgagtctcgggaaatttttggtctcgagcatcactactaggtacacctctttgttaaggttgttttcgactttttacattctatattatacgttttcatttatgtttccgaaaaatccaaattttgccaaggtactgatcagaaaagcacaaaaaccccccaattcgaatgtgaagactgatcaaaagtgccgaaattttggtcattatttaataaccagccccgagaattggcaaaaaatgtcaatttaaccgcctgttaaatgcatctttgatcatttgtcctaataaaaccccaagtaaaccaaataccgcttggctgactgatcagaatgccggttccaagccttatttccattagcggcttctgatcaaaaaggaacaaaaatgatgtcatccttttaagcacatgttcatccccagcaacactcacgagctgttcatggccaatgcttggccttcaattccaaccacctctgcttctgctgctggttgtggaccaacagcagctgaacaatcagtcgctgctgatcctacagtagttgatccgcaatttcacatcgcaattttgtacggtaggataataatagtaagttttgaatggaaaaaaatttgccaaaaaacaaaaaaaaaaattagtttttttttgaattaaaaatttcctgaaaattttcccagatggacggcaaatcggtcctggttgtctacaaaatgttgccatgcacagcagatgccttccagaaaaacccgaattaccatcgttatgttgaaccaagcacaggcgaagtaagagcaatgaatgtgtccggccgaccctacaatttggcgttggccatttttggggtgccaacctaagccttggcattcttgaattttggccaagatcttgggtcggcggctcagggcgtggttccttttttggcgccaaagcccaagtttttggactttgacttttttctttgccaaataaatccaacaaatttagttttgcatctttgaaaaactctattagaaactcacaaaaatgcaaaaggttgccgggtcattcattcattactcaaaaagccatcaaaataaaaaaaatttgacagaaaattattcttaacttcgccgcccaaaatgaatcaaattttataatcttgatatcattcggtagccctaacaaaggagaggtacccaagtgacggttggacttccgaatgaaacttacagtgtaggtagattatccccccccccccccctttgtattataaaatttttttaatttttgttaagccttattaatgtcattcacaaaacaatgaaaagccatgtaagcgtctctggtcgattggttataccttccattccttttttcttcttctaaagttcaatttccccaccctgcaaataattattttttgttttttacatgtccagatagtttttaagccttttaacattaataattttgatcataatataatattttttaaatttttattctacattaatttttggca

SEQ ID NO: 1661 - DNA, 9687 bp, Heterodera glycines
caagtgacggttggacttccgaattaaacttacagtgtaggtagattatccccccctttgtattataaaatttttttttatttttgttaagccttattaatgtcattcacaaaaaaatgaaaagccatgtgagcgtctctggtccattgattataccttccattccttttttcttcttctaaagttcaatttccccaccctgcaaataattattttttgttttttacatgtccagatagtttttaagccttttaacattaataattttgatcataatattttttaaatttttattctacattaatttttggcacatgtgatagtttttattgaaatgaatgaagcaaagaatttgtttcatcatgcaaatctgatcattattagagaggggatttagatgtgctaaaaatcttttggtggtttttaagctaaaaaatttttttttgtttcaaaaaagttatggactgagaaactcaaaaaagcaagttttcttggacatttttggtcataaactttcattaaacttaacgaaattttttgaaattttgcaggataatagaaaacagttttttttagtaacttcatagcaccagtaaaagtgctaataaaaaaagttacagtccaagaactcgggctgtcgtgccgaaatgacccacacgactttggccaggcccgtacccaggggggctgagtggaagcacttatttccttccctttaattgaaaaatttatgaggaaaaattggtacgcctattttgaaaccaaatcttgcagatttcattaaactttccaaaaaattaatgtgctaactgaataattttttggtcgaaaaatctgttaaaaacagttaggtcttcgttccccaaaaaggggttgctgggttgttactcaaaaagccatcaaatccggttcattatccagaaaaaactggggatccggtttagtcccctaatcctgatccaaaaatttaacaaagtctctgacttactaattatcccattttaattacctctccaaattaatcataattaattaaattaagtttttatatatttttcattttaatccaaaaaaggaagtgtcaatggttggtttcatttgctcctccttggaaatggccagcgaattggagctgttccagaagtgccaaatccaggagatggtgtgcattgtctgttcatcgaggcttataaagtatttaaaaatgcatatttttttccaaaatttttaaaaaattctcgtccatctgagtcccaagatactgcatctggtcaaaatggtgaatggaagctcagctttttttaaaatgaactccgacaaaaatacaactgtgtcttcctgtgaacatttgatgatcactacagcgagtgagtatatggattatatatgtaaagcaatatctaaaattggatgtgatataaaaatttaaaaaaaaagaatcgaaaatgggaattatcccttccattttaaatatttttctcttcctctaaaaaagacttcattcctaaatctgcaaattagctcattaattaattttgtcaatgaatttttgtaaagaaaacgaaaacccattcgaatttttccaaaaaaaaaatttttttttcctttaaaaaatctccattgaagctggctagattccccccacccgaaatttttttattgaaaaatttctaattgaaaattaaaaaattaaaaaaaaaaattcgggggagcgagaggggcaacgattcgtaggggtggggactactgacacatgaggagcagggttgttccgggacgagaaaaatatcgggccgtgattcgggtcgggtctgccgaaaaatcatcgggtcgggttttggaacgagaaatatgtcgggtttcgggtgacccgggacaaccctgaagggaaggagggaacggggagggggcgacagggaggtgggaaacgaactgctcccggagcgctagctagagctgcccacccacggggttgcgtggaggcgcgggttcgattcccacccggtgccgaacattttgccaatttgttattattataaaaaacattttaaattcaatcagtaaacactacattgatcgatgagcaacaacataggcggtatcttcagcagctgaacggagaaaaaaaaagaaaaagatgcgcacaatcggcacaaatgccgtcgtcaatgatgcaaaacaatggaatggagccaacagcaaaaatgccgaaacttcatgcaatggcggcacgaacgccagcagtagatgcacacgaagagagttaacagcgatttaaattgaagcgctggtgtggcatagtgcccaatttttgtgacaattggcaacggataactcatatgaacaaaaataatttttgaattaaattgattttcatgggcagtccttgagggattttgtactggattttgcatcacccggatttcggattttcacaagaaaattctcacccttgagcaaacattttcaagatatacactcataaagactgaaaaaactttggaaaaaatagaaaattgtcaaatttttcgcttttcgtctcaaaaatctaattcgtattcaatttttggtaaaatttgtttccatatttaggaatattttgtccatataaatcctggtcttcgttataactaaattttcgattcaaatttctcaaaaatttcaattaaaattttttcgaccacccctttgccaattgtcacaatggcacacataaatggcgcaaaattttttttttaactaatttgtataattcatttaccataatcatgaagcgttttttgattctcaattacggtaatcactactataattttcatacctatctctttctgtttaccaagtgatattgttttaacttttttttcttgttttcctgatttaggtatatatacattaattttttcaattatttaaataattcactgtgtaaaattactaatttttcaatttaatttaattttgtttaatttacatattaatagaactcagaagaattgtataaatgatattttttaatgaaacccaaattaaaaaaagaaataaagcgacttaaagttcaaaaaaatttattcattaactttcaaatttaaacctgactgggccagggccccgccgggaatttgccgttactcctctcggtcccgggttttttcgggaggtgggacggggggggggggggggggaaacgaccggggggaaaacgacctggtcccgaccgcgggacctaaagtctggtctttgtcctggaaatcccatccccattcattgaaaaatgccgttctctgatttcaactataatggcatattgttttaattctcaaaatatcgatggaattttcacccaggccccgcgcgacattttcgaaatggaaaactcaatttatgtatttgtcgaatttattattttaattatttccttggcagatggaccacccaaatcgttcatttttgtaaaacaaaatgacagccagcatataaggtacatacatctgtcacaacattaaagcatatgtaaacaaattatttttttttgaacgaacatacgaataaaaatgtttgagcaaatgaatgatgggataaattaaagaaaaaatccaataaaattatggccattaaaatttgaaaacataggcatccatggccatttttaattaaaaaagtgtaaaaataaatcgactcttaaagctccaatgaaagtagaattaaaatttttaagaattataaaactaatttggatgattaaccattttaaataaaagtttttaattagggttattaatatttataaaaaaagaaattgaggaattatttctaaatatttaaggtgaatttttttaaatgtctcatataagcaaattgatcaattttttggcaatttggtcaattattattgaagaaattaactgtgaacaaattaatgaggtaaaaattaataaaaaaaataatatttttaatttagtgtataattatttttattaatttgcagaatctttctgttgaaaatcaaaaagatgttgaaaaaatgaatcaagctgaaaggttccttccatataatacttaattaaattaaatgaattatttttatttttaaaataaataaaaaatttttcatttttcggatagatataattttcatattaagtttatgccgtggaaaattcacgatttctcctgaagcacaagcaaaattgcattgctatttaaagagggataaggtaactataaaaataaaaaataaaaaaaattatattatctaaacatatttaaataaattatcgattatttttttattaagccatttctgttgttggcaccgcataaagttgaagttgttcatttggaccctcttgtgctcatttttcgcgctgtgatttcggacacagaaatttttagcatcaaaactttggcctcgaaaaaggtaaattccggaaatgttttgggaaatttcagaaaaatttttcagctttgtcgtgccaaagtggttgatccaaactcgggcaaaactgcgcttgccaattacagagtcagcaaatcggcatggcttaaagatggagttcaccaagtggttgaacggatcacaaaacgagttcatgtgaggcattcagaaaaacaaacaaaatttttatgaattttccacgcaccaactaaattttagtcagtctgtattaccatatatattttcataaatgttactgtaataggcattggttgacctttacagtatacttctattacggtttcgaatgcataaaacaataaaattattcattttttgccaagattcgcgcgattatttctcattccccattacagtatcaataccttaaaatacagtaccgaaaaattctctacaggagcattttccacgcataagtttaggacatgactaacttggacacggaatctgctgaggacctgcaggtggccagctacggtattggaggtcattatgcaccacattttgactttttcagggtaaggggacaaaaaattcaaattgtttttcaaattttatttcgaattatgagtgaatgggtaacaattttttcattttcaaaagcatttttcgatttttcaaaattattttaatatataaataaccatacaatttatttataaatacttttttcagtaactttatttagtctaatgaagtggacaaacgaacttttgagctctatggcaaccgtatagccaccgttttgttttatgtgggtgaaggctaaaaatttttcaaaaatttcaaaaaaaatttcacagttaacccaaccccacgatggtggttttaccatttttacggacctaaacattggcattgaaccaactgaacatgacgcgttgttttggtacaatttgcgcagtgatggaagtgttgacccacgcacgagacatgttttgcaattttaaattaaatataatataatttatttaatagttttaaattatataatatttaggccgcttgtccagtgctcagcggcaacaaatgggtggccaacaaatggcttcatgaacgtggccaagaattcattaggccatgcccgctcaagatggcacaacaaattgatgaaaattgacatttatgaagcgagggacaacgggcagaaaaaaaacaaacaattttgcgtttaaatttgttttttttgaccaaacacaggttttcctcttctttttgtcgcgttagttaaaaaaccttttgtatcatgatacagaccaatttggtagctttttattcccctgaaatccgggaaaagcactttctttaccacagcagcgacactttgggaatggttggccagaaaaaggaagcagcaaaccgcgacagaaaagtgatcgtatgcatctctgaaaaaaaaaaatttaaccttgctggggtgctaggtcgttgtgtaaaatccaccattttagcgatttttcgacaaaacatatggtataacttttcttaaaagcaatcaaattttatattcttggacccctaaatcatgcaaatttaaattttcggaaaaaagatgaaagaaattctgaaaacactactttttcaaaatcccttcggagattaagtcaaaaaacattgaaaaattaaaacaaatttatttatttatgaaattcattttcatgctaaattattcatcaaactttctttttcagaaaaaattggttataatctaataaacaattagggttttaattattttttgctttcctaaatctggatccaggggtccaggtcgagctcaactaatcttacaataagacaaaaataaatttatttcttaatatttgaaaaaaatgaggttggaaaatgatgagattgcagggaaagaatgaccagcagctatttattagaacaatttgtaatttattttacattatttattacagttaaacgtgattaatgacatcatgacaaaattgggaaagcaaattccactcctaaaattggataatcaaataaatggctctcccctgttgaagcatttcatgccaattttggcaagcaattgccatcagggaattatgccgaaattgggcaagcaaacgttcccactatatcctcactttttcgttaaacaaagaaattccattacatgacataaatcaaaattggtaattcctgcaaagaaaagaaaatacaggacgaattttaaggacatatgatcatttccaataagaggtcgaatgtccacggttttggaagacaatgatgatatcggtattcggcttgatcgtcttgaaaagcttgtttcctccctcaacccgtcgatcaacgccacaattgttgagcggctggatcgcctagagctacttgtgcagaaattggttaatgacaacacaaaggagcgatccgccggggactcaatgtccttctccaactcctcacccagtgttctttagggtcaaccgccgcctcacatcggaatggtcacccaactggtcaacaatgccgtgttggactcggaggagattatcgcaaaatcgaagagagcagtgttggagaaagtaccagaacaaatcgatgccgttgaacttgtgcgtaaggtcgctaccgaatgtggactgatggacgaggtgatttttgaagagatccaccgacatccaaaattacaattgccttcgggcaaaaaccgaattgtcaaggtcccatttgtggacaaaaaaaaccgagacattttccttaaaaattttcgcaaaaccctcataaaattcattcaatttccaaaaaatgtctcggtcaggcgggatctcacccggcctgaactcaatttgctttatgagcttcgccgtaaggcctatgccatgaaccaaagtgaaaatatgtttaaatatgtcgtcgttgacctctccattattactttgaaaactccgcaccctcttcgcccactcagaactcaataatgttacacgagcaaaccaaaccataaaaatggaaaatacttagataaaaatccctgggtttcctgcctattaataaatgcccgatcaatttcaaataaaatatctgatttagacatatagcacataagtatgatccatcaatgttcatcatcaatgagacctggttaaaccccagaaatacaatagaaaatgaactgtctataaatggtagatatcgagtaatgcttgcgaaccgaaatgataaaaagggcggaggatcagcaattctattaaaatcaataatcccttatcagacactattctctgggacaaaattccaaaccgaaattttacacattaaactactttttaaaaaaccaatccaaatcataaatatatatcgtccaccgaattgtacagttcagaatactaaaaagctactcaaatttatttcggaccaaagcgattctgaaaatatcatatattgtggggattttaacatcccaaatattttatgggatgaaaataaggtaattcaaagaaatgattcagtgtcaaatatgctgattgagtttatagaccaaaaacaattgaaacagcatgtcaaggaaccaaccagggaaaaagcaattttagatttagtaattaccagtaaatcagaattaattcatgatttaacagtacttgaaaacttttcaacatccgatcacaaaatggtcggatttaaaataaaagaaaaattcagtaataaaaatcccagagtttatcgaagagattttaaaaatattaattttgcaaaattaagtcgagcgatacttgaaaatagatttgatgtttctataaattcgatgtataccgttgaacaaaaacataacgaattcttaaataaagtactgaaattatatgatacttttatacccaacagacctctaaaatcgataataaaacaatcgtaccctcaaaaaataagagacttattttcagagaaattacggttacataagcttgtaaaaaaattcccggaaaaaagtgatctcatcttaaattacaaaattatttcaagggaaatgaagaaacaattaaaacaattcagaaatgaaaaagagtcaaaaattatttcccgggggcaaaattcagttaacaaatttatccgaaataagttatcaaaattttttgagattcctactctaattgataatgctggaaatatgttttccagcaatgtacaaaaatgtaaaatattagcagaaatatttcaaaagtcttttttaagaaaatcaattgttaatggtccacaaactcagtcaacacagaataagaccaagctttttgacattgaattgaacgctggcataatttggaacatattaagaagacttccccggcgtaattccacttcacctgataatatcccttatattttattaaaaaattgcgcagatccaatcacaaaaatattagcagatatatttaggctaattttggattccggtcaaattccggaaatatggcgaacatctttggtagtaccaattttcaaaagaggcgaaaaaacggatccattaaattacaggccggtgtcattaaccagcactgtctgtagagtttttgaacgaattttgagtagtaaaattttagaatttctgaaaagtacaagattctttgataaagaacaatttgggtttttaaaaaatagatcgactacaacccaaatattaaaaacgatggacgatatatataattctatacaaaagaatcaacaaattgacataatctatattgattttgtcaaggcgtttgattctgttccaattgatttattacttctaaaaatcaaaaagattggaattgaaggaaaaatttataattttttaactaactttttaaaaaatcggagttttaaggttaaaatcggcgatgaattgtcagaaagtttcaaaatattttcgggagtgccccagggaagtgttttagggccattactctttttgatttttataaatgatctgccgtcctttatttcaaataaagcatcaccagttggcataaaaatgtatgctgacgatgttaaattatattatgcccacgaaaatgatgaccattcgaatcagttggataaagcgattgaggctttggaaaaatggtcaaaaataaatgggttagaaatttcaactgaaaaatgttttgttctttatttagggaaaaataatatgaaaaaagaatattttattaactcaaaaaagatttcagaatcggataatgttcgtgactagggaattataattgactcgaaacttaattttcaaaaca

SEQ ID NO: 1662 - DNA, 3489 bp, Heterodera glycines
cgcgaggcgcgggtcaccgaaaagaagcaacaaaagcacgtttcaggcgtcggcaaaagcaccaggaactgttgcaggtctgttttgatgacgaacatttacgaacaatttttttttgaaattcgaggcagattgatgcacctctcctcgaaaatttgaaaaaaaatttttcgttttttactttcttaaaattagaggtttttctataaaaaaaagaaagaaacttactcaattttcaaaagtctatgttttgcaacaaaaaaaacgctctaacaatacgaaagttggaaccaaaatttcaaaaaaaacatttttttttttgggggggggggggttggacatacataaaatgaaaagttaaacttttttatcctcgcgacggtcccagaattttgggtttttgaactaacctaactaaattaggtttgttgaaattttgccattgtgcaggccagcaaagagttcaaggagttccaccgcagtgcacaggcgcgggtgcaaaagttgcgcaacgagaaaattcgcatgatgaaactgatggaggaggacgacgtcggctaccgacagctgctggacgagaagaaggacaagcggctggtccacctgctcaagcaggtggaggaccaatttttaaaaaaaaaattttttacaaaaaatggaagaatgagttgtggagagtttgaccggcctggtgcgccagcatcagcagacggagaagaagcggaagcaggacgagcgcaaggaggccaagctggcggcgctcaggcagcaaatgcaccaaacagcacaatgccggcggcgatggtggcgccaacggaggcggcgatgactcattgcacatcattgttcggaacagtgccaccggcgaaacgctcaaaggcatgtgccggggggaccgggcggggaaggccagggacaaatgattgtacatgcgccaggagtggcttagggcaagggccatacaacggacgactgaacggtggggggggggtgtatctcgggaccaaaattttgaatgaaactccaaaaaaaataatttttttttttgcggcctgaggtactgatagccgtccccagataaaatttttttgaaaccaacgaggctcgtccgtatctgcaaaaaaccccgccggggaaaatttaaaaattttgattaattttgttaagaaaattgagaaaatttaggggaaaaagttgcccatttttatacatcccagcaaataaatgcctttaaaaaatttggacgaaaaaataaatttggttttttgccctttcacagatttggacgaggagcaacggaatcggcgcatcattgagaaggcgcgcaatgatgaggacgaatacgacaacaaaaatgcactggcccaaatggagtcgtattacgcgacggcacacagagtcaaagaaaaggtaggggaaacattgaggggttgcacttcaatttttcaatattttttttgaaatgggactggcttcgtcagttttgggcactttattttatgggttttggtcattcattcagccaaggacggcacgaaatattttcttttttggcattttcatttttccaatgactcttgggctaatatttttgcaatcattttatgcaaatttcatttaaatttgcaagcgttggctttaatttttgtttttttcatttcttttttacatttttccaattcctcccaatgtttttttgcgattaatttgtacaaaatactatttaaatttgtaaataatgtttgccatatttaatccttccctttggtgttcaggtggagtcccagttgccggagaagacggagtacgtgatcaaatgtgacatgagtgcgctgcaacgcctcctctacaaacacttgcagaagggacgactgcccattgacagcaaacatgagggagcacacagacgtcgatatctgatccggttttagcactcttatttctaggactttcctgctatcccccccccccccccccccccccattcaaaaactttctttttgttttgacatcgggttggtaattggtcgcaaaaaatggaatcaaaagatgtacattggtaacactttagatggtggaccttcttttggaaaaaatttcttttttatagatacgaacataaaatgtattttgaaagtttcaaatttttgttcgaattcgggtcagtgattcgaaacatttactaaattttaaattggttcgcttaagcacacccactaattccaagttagtgcgtcgtattttttattggtcatatttatgtagacggactaaacattcctgggtggtgtgtttgtggccatgttactgtagatagactcaacgtttcttagttggggtgtcaattacataagtaaccgttaccgaatgatgggaacatttgaaaatttctttcgaaaattttcccgatttcaagccatttttggcttttcaaattatcatgaaagagtgatctgaccaatttggtgtaaaggactttttgaccaggacaaaaagttatcgtagcagaaacttccagaattttttctcagcataaagcggggtctctttgtttacgcacccgtaattttttgatggattagataatcggaggtgtcttttaccgttttagtagggtaatattaggggtttgttttatatagaaaataaatattttaatctaatcacacgtcgcttgaaaaacagtttttcaaaatttttcctcttgcttccatactttttaccgtgactgtagttgaaaaataacattcatccaattggctggccacactcacaatacacttttaaattgctttttcaaccaagcgccatggccaactaaatgattactgccattattaaacaagccttttttaaatgtttattaccatttcggtaaaagtggattgaccacagttcatagttccaagtgctgtggtcgtatcctttcgtgggcatgttattgtggacagattcaacgtttcttagtggggtgtcgattacatcttcacggattacagtgcttctttgaaaatatccgttactgaataatggaccatttgaaaattaaaaaagaatatatgctaaaatgcctggcaatgtatgaacgttgtgagaaccggtacgtgcgatagagcccctccgcaagtacatctgctgacaacgacggtcactgcaaatgtttggtcgagtagcaggtgacgttgaatccgcgttgcggtttgcttgatgttcggaagcgaagcattgcatgggcaccaacgcatgtttaccatgttcgtttccaaaactgaacaaagcatgcatattccttcaaaacatcaattaattcacaaaccagctgttggtattattattatacagggagctcacgtcggtgaacactccgcaaggggggcggctgctgctgctaaaacgccactgcgtccgcccgtgcgcggggctacgcctgcactcatccctatgaacatcaagtgcggtgccaagctgtgcacgcggggcttcatgatt

SEQ ID NO: 1663 - DNA, 1826 bp, Heterodera glycines
tttatgcagagaaaaaattctggaatttctgctacgataacttattgtcctggtcaaaaaagtcctttacaccaaattggtcagatcactctttcatgataatttgaaaagccaaaaatggcttgaatttggtgaaattttcgaaagaaaattattagggggttaggaaaattcttgtatgagtaggcttatcagaaagagcacaaaattctctaccgaattgccttttgggatgatgggtctacgaatacctgcagagaaagagagggtaggtacaaaaattaattaccataaaaatgactactttctactgtatttcaaggaaaaatggcgcacccctaactttttgattgattagataatcggaggtatcttttgccgatttagtagggtaaaattaggggtttgttttaaatagaaaatattttaatccaatcactcatctattgaaaaaccgttttaaatttttcctttttcttgcatacttttaccttgactgtatttatttttgtcgcaaaatttcaaagttgtattgtttttctctattgtattttgttggataataaacaattctaacagcaattttttcccaagaattttttgaataatttttaagtttgaaaaattttaagaaaattttcgggaggaaacaatggagggaggaaatgaagtgcgccctagatttactacaagtacagaacagagagacagataatagtcgttaatatgtgacgggtggaaagagcccaaaattaaggcgggaaaaattggttgaaaataatatataatttttctataggatcagtgaaagtgatcaatcaatcaaatggtccggtccgatcagattgatcaatcagtcgtcctcaaagtcgtgtttgccacccattttcttgttgcggcccttgcatcggctgatgttccgttgcttttgctgctttgggttcgctaaaaacaaatgtttcactttttcgattccatccggtttttaaaaagtcggtcgacaaaaatgaaattgtgtgattagaatcccattgcttaaatcctcccgatccgcgagtgagtgttagctgttcaattaatgctacgcaataagctgataacagcgggtgtaattagtggcacaattagatacattttttggcaaataataattttatttatctccgactggtacggaaaccaaaaatggtcctgtttttggcccaaaacggtggcatttgccaactcgcccaaaatgcccgtgtacatcacatcctccagaaaaagcacattgattttgtgagtttgggctaagatagccttgacagtttctggggttgccatataaccgccaccgatcacaaatggcgggaacattttcggcgcgtacatttcacgggagacgtacctgtggcaaagtgccaaaccaaatttttttttacaagattttcaaaaaatattgccaacgaataatttcaattaaatttcgaaaaactggaatgataagttacggattttttttaaagcccattaggactgaaaaattatgggttcttctttgacctatcataattacggatgaacaggatttccgtaatcccaaatccagtaatatataaccctgctgacggtaaggcactccgttcactgaccatttcttgtaagggccatttgggtcccgtacaggattacgaaatccaccaatgccaacaaatagaagcggttttttggtggcaatgtgacggaatttatgttcaatccaatggtccatccggcgcagatggaccaccgtgtcgtcgtccaccttaaacagccattcggcaccggcacaggtgccgttgttgcca

SEQ ID NO: 1664 - DNA, 2299 bp, Heterodera glycines
  unsure (1)..(2299): unsure at all n locations
atctccgactggtacggaaaccaaaaatggtcctgtttttggcccaaaacggtggcatttgccaactcgcccaaaatgcccgtgtacatcacatcctccagaaaaagcacattgattttgtgagtttgggctaagatagccttgacagtttctggggttgccatataaccgccaccgatcacaaatggcgggaacattttcggcgcgtacatttcacgggagacgtacctgtggcaaagtgccagattttaattcaatgaaatttcaaaaattcttttgggatttatccgctaggaccgtataaagagctaaacaaatagtttttgaccgttatgatggattacgcggattaaagatttttaaaagaatccttcctaattacagattacgcagttaggtcccggccccagccgggtgaagtaattgaaaatctccgtaattacggggttttcgtaattcaaaacccagtaaggcacagctctaacattaaggcctccattaactgaccatttcttgtaagggccatttgggtctcgtacaggatcacgacgtcctccaacgccgacaaatagaagcggatgttttgtggcaatttgccgaaatttgttttcaatccaatgggccatccgggatagatggaccaccgtgtcgtcgtccatcttcagcatccacttggcattggcacagtgccgttttgtaataggattatccttatgaacaattaattaattaggaacatatttatataattaaggcggtcatttatttacctgttcaataccaattgtgaatgctcttttcactttaaaattgacgaaagtgtccaaatgagtgccacgttgaagcaatgccgggtaacagatcagcagtttaaaatggcaattaaagtatttattttgccagaaattataattggtaccggtaattgattgaaccgacactgatttaaaaagcattcatacaattggtttaatttttttacggaaactgaattaaacgccggtggtttaattctttaacagtattggtttaaatacattttccggaaaaggattcaactactactggtttaaaatatttacgtttaccggaaaaaattgaaccactctactggtttcaatattttacttttacaccattactagttttatatttacctttgccaggaataattaaaacattactagtttaaatattaacttttaccggaaaagagggaaccactactggttacttctgaaggtaaacacacaactggtttaaacttactttggtccgtcgctatttcaaattttctaatagaattggtttaatttatttacttttatacaagccgaattaaaccctttgtggtttaatttgtttacgttactggtttaaatgtattacttttgccggaaaaggattgaccgctttaagtgtatttacttttcccagaaaagtttgaaccataactggtttaaaaatatttacttttgccggaaaagtttggaaaacaactggttattacttttgccggaaaaggttgaagcattactggtttaaatatatttactcttcccggaaaagtttgaatcacaactggctactacttatgccggaaaaggttgaagcattactggtttaaatatatttactcttcccggaaaagtttgaatcacaactggttactacttatgccggaaaaggttgaagcattactggtttaaatatatttacttttgccggaaaaattttaaccacaactggtttaaatatatttacctttgccggaaaagttttaccaggtttaaatatatttacttttgccggaaaagtttgaaccacaactggtttaaaaatatttacttttgccggaaaagtttggaaaacaactggttattacttttgcctggaaaaggttgaagcattactggtttaaatatatttactcttcccggaaaagtttggaaaacaactggttattacttttgccggaaaaggttgaagcattactggtttaaatatatttactcttcccggaaaagtttgaatcacaactggttactacttatgccggaaaaggttgaagcattactggtttaaatatttacttttgccggaaaaattttaaccacaactggtttaaatatatttacctttgccggaaaagttttaccaggtttaaatatatttacttttgccggaaaagtttgaaccacaactggtttaaatatatttacttttacccgaaaaagttgaaccacactggtttaaatatatttacctttgccggnannaagttaccacatctggttta

SEQ ID NO: 1665 - DNA, 3174 bp, Heterodera glycines
tgcaggtctttactctattggttcaaatatattaacccccactgttttttaatgtacgtattgtattaggtttaaatgtattccggaaacggattgaaccgctattcgtttaaataaatttacattggagtcgtaatgtatgaaccgccgccactggtttcaaggtactaacattaacgctttaaatgtattaaccgctacttgtttgatgatatatacaatacttttcaaatgtgtgtacttttacgggaaaagagttgaaccactactggtttaaactggtttaaatgtgtttacgtttactctacttctttaaatgtacttactttgcctgatggtttaatttaatttactttttgtaagaaaggggattaaataaatatttatttaataatttaattatattttactttttaattattttatttccaacccttcgtcgcaatttccgccatcttttggaagtcgaaattcaattccatatgggttttccgtcccattttcgggcttacattaagacggtgcttcaactttgatgcgtttcactccgtcggtgccatttgtcaaataaaaacttgaaattacggtaattaacaaataaaaatccaaatttattttttacggtttgatgggtgacaattggccataggacaacaaatgaaaaagcacaatgaaaaatgagataaaattgctaaggatgaaaagatgcattttgttcactcttctaaaaacatggaaaaattatttaaatttaaatataaattattttattttaattttattttatttacaatagaataattaattcaattaattgtttttttactaattttgtcatattattgaaatgatttaacatttttaaaattcgttttctgtcgatcactatgtgaaaaaaatgaaatggatagatagaagatgattcagcagaatttgatgaataatcaccgcaaaaatgcaatgaattaaaaattgaaaattaattaaatttaaaaaataaaaaaaagtaaaattttttactttttccatcaattttactattgcttcttcataattttccaatataattttaaatctttgccttgcaaattttaaattttgaagatgtataacagtgcggcatattgacaaaatttgggcgggggcggagatttgacggattaatttggcggttttttgaatttattagggtcattaattcataatatagtaaattgctgcaagaattatttacacattttcattaattattccttaaatttattggtcatgtgagttcattaatttttcaaacttatggaatataaatttaccatttctttaaaaatttaaataattatttataagattttaaaacaatatttggctttagttttgagaaataacagataaatcacgaaactggctcagaactatagacaatattatagttctttaattatgccttcccccccccccccaaaaaaaaagacccaaatttcccactcgagactctcgaccagtcattactagtaattatagcaaatatgaaagtgaataacaacaaacaacgaaaagcactccctcaggagcttgtctacgaattggtcaatgctctgccgttttgtgtccggtgggcggcggttcgggtggcatcaaattttgaccaatttgtcatggaacggcaacttgactggatcaagacagtcaatgttcgtggtagtggtggtggttgtggtgtgccactcatttgtcagggatgtcggcgattccgaatgcaaatttctcaaaatttagggccccacaaccccgatttatgaattttggcttaagaaattccgatttacagttttttttgcatcggttgacatttccgattgcttttaaaatttaatttaaaatgaattttttaaggcttgttacgctacttatctgacattcaaggaatcattggtaggtgtgttactatttagagctgtctggtagactctgggatttattttctttgaaaaatcgtgacaaaaattaccaaggattccgtaaatatcgggcttttttgggctgggggtagtctcgaaggtgggaatttcggccttttaacatcactataatctccatgccaatcattttactcacatattggaacagaatgcctacaaaaaatcaatatctgttcattacgacgagtggaccgcgtaccaagaaaagtggacaatttatcagcaaaaatggacaatatatcaacaccaccagcagcagcagcaggatggaagccaaggagaagaagtggatgaacaaaaaatggacgaatttatccaagaaatgaaaggcgtttttgaaaaaatcaaaaaaacatcgcaacaaatgaaagttgtgtttggcttaggatggaaagtttttcagaaaaacaaggaaatttttggtctcttattgaaggcctacccaaaaataaacaccgaattttggagtggaggagaaaatgatgacgaagatgaagatgttgaagaagaagaagagcattgaaaatgcattttatgattttttgtaataaaaaaattaaaaataaataataaaaaatgatttaaaaatatgaattgagaaataaacgttttttcattagaattaacatgaattattaccaaaatacaggtcacaatattactcccattcaacagaaaccttaaaaattagcacaaaaataaatgtataacattctttagcatatttttgctaatatttcttgaacttttttggaaaaataccttgatttgggcactcatttatattttgctgtttgtaggtcataattagagaacggaaaaaaaggcagcaaaaatcggaaaaaaaaatgcattccaagcttataaaggcatgcatgatctggtcagtcccaaaaatatttggcatttctttatttgcagctcataaattctgcattttgcggatcatcgcgatatgttttaaagaatttaatttgtggaatcaattccatggaaaatgacacaacttattttatttgaaaaagttgggcctaagaatttatcaaatgcaaaagaaacccggcaccaagcccattttcgggaaaaccgaatgaatgcgaccaattccatcagcaattaatggggcaattttttgggttgtgaactcatttttagaacaaaatgaatgtgaaggggtcgcgtctttgccttatat

SEQ ID NO: 1666 - DNA, 2613 bp, Heterodera glycines
ttgttatcgacgggttatgtcgcgtcaaatcgccagtctgtttttttcggtgacgcgatttttttgatgagagaaggattaaattaaaagaaaatgaaaaattcagagataagagagagagagagagagaaatagagagcgctgtaaccttgagataaattgtacttttagctagggtagagggtcccggacccctgcccctgtaccatatggaggaaggcgtttaagctttcacagtttagcccagacattaccccttacgaatggtcgtttcaccatgccctgaataaacagccaataacaaatttctcagcaatttttgaattaacacttttaggaatgcgttaactgcaaatgatgaacattccccacgtgggaaaattatccaacaactcgcttccctcaaaaagcaattggaagagtgctaattatagcagcagaaagggaatttggaggggaaaagaaaaacgaaatttattaaatataaaaaatggattcctaaatttataagtcctttaaattcgaaataaaccaattcaaaaaaaaaaaaaactaaattgaccttaaattgcgaaaatgtgaatttaagaaaaaaagttcaaccaaattaaaaaaaaaataattatgtacatttgtagaactgaactagtatttatatgacaagcaattttacaatacaatacagggactagcaatagcaaaatgaaagactatgtattaaaatgaaagattatcacaattaactgatcaaaagctatgacattagaagggggcatgtaaaatttaaaaaaaatgatttggcgagatatgattgatcatccttcccctctaatgtcataacaatttattacaaatcacaaacttttcccgcccaataaggctcttatttaagcactttaattacttgaaaaattcagcggctacggacctcccaacactagggcctggatttttaggattttttatgagcttccgctgggtttttgctcccattatattaagatactttataattaaagtaaaaaattttcaataaaatttatgaaaaaaataatttttagtcaatcattttcatgctccaaaaatttaaattttctgtattttttctgttttactttttttttagaatcataaaccctatcatttgcaactttttgggtcctaaaaatccaggccttaaccatcacccgttgctgatcagcactaaatattattcttcctccatctgttcctccttcaccggtgcagcagatgggccaaatgaagagccacgcgtccgtttacagatgatttgtttgcgccatcgccgaccacattcgttgcacttgctgctgttcgctggcttagccggcgctgtcggcattggacgaacaattgaggcggttggcacccgcggcaatggagtgggaacaaccggaccaccatttacagttgcaagcggtgcaatatgtacaaaacgagatggtgcgggaggtggcggttgacgaggcgcatatatttggggcgaaaggattgggggaggttgtgaaattgttgccggatgtgaagccggcaacaatggtgcgtaaggcaatcgaaaaggaggtggtgatagttgaagctgaggctcgcaggggggtagaagactcataccgataggaggcgttgttattgcctgtaaaaaggataaagcttaggggaagaagatatggtaagctttcccagaggctgctaactggaatttttcaaaatcaatattttagcaataaaattttttgaaaattgttaataaatcttcacaaaaaaaactttttgagattttgggccaatttttaaacgaaaaaaagtactttttttttgggctcaacggtgctttgggtaaaaatagaaatttaattattttttaaacatattttcaatgaaaattggcaaatatttggtcaatataatatcttggaaagcataatttcagaaagaaaaatctaattaaacccttgaatcatcaaataatgggataaatctgcatttttttggttattccttacgtttgctggtacggtccaaacagtgacgccggttgcccctgttgtgagttgatagcgccctttcgcaattgctatgcttacggcattaaaattgtcttgcaatttttttaaagcccatttttttgtgtcttcctcccccgttgtatttggtgccatattttgatgtagctgttgctgtcgaaggtttggcaagaaactcatgttgttgttgttattattgttgttgttgttgttgttcatatttatttcgcttatctcggctacaaataattatattatcgatgaataaaacggcacacggacttgaacatggatcacactgtgatgaacctaaccattcttggaattcgtttggatgcggggtggaacatatacgtttcccaccccgcacatcatgtaaacgagcaaagaagcggaaagtggcatcccgccacatttccgaatttgatgagggttgggactcaatctgcaggatctcaagtgatttgcttcgtttgaagcgaatattttttcgctgtagaggaggggaaagtgatcggcttctcattttgccgacgcttgcggataaagcgcttataaagcccatctc

SEQ ID NO: 1667 - DNA, 5471 bp, Heterodera glycines
  unsure (1)..(5471): unsure at all n locations
tcactttattttatctgcgcgattgtcaggtaatttttttcagagaataactcacaaatcagagattttcaagatttatttttgtattttatcctcatttgtcattcaactttcaaataaaattctttgttttagccaatcggtgtaaatccgaatgtgaatgaagtcaccaaggtactactctttcttgttccaacttttcctttccttggactctcttttcagctttggtgtcccaaaggcacttacagtgccgttgccaatttgttcttccaaaacccggaagagagtgtgaagagtctgttccattctccgtcctcctctttccgtccttttactcttttcgttttcgctgtcgaatatttcgtccttactttgtggacctacggactttcagttcccagtggagtgcgtttttgccgtcctttccatgccaattgttgttcattgtcccttaggtgttcattccgtcattgctcaccggcgccgcttggggtcgtctgtttggcatttgtgttcaaagtctttttccacaattggtttgtgcttttttgtgattgttttacgaaaataatttattttaattagggtcaaattgaccccgggaagtacgctttggttggtgcggctgcgcaactcggcggaattgttcggtaatttattcacgaccgactagtacatttgattcgaccttttattccgtcgttccctctttttacaggatgaccatttctttaaccgccatcattgtcgaagcgactaaaaacataaccttcggtcttccgattatgctcgttctgatgatcgccaaatgggtcggcgattggttcaccggagtcagtgtttctgttttccaatttggttggtttgtcaggtttttgctttaggggttgtatgacgaacacatcgatttggccgaagtgccccttctcggatgggaccctccaaaactttctcggaacattttggccaagaaagtgatgcgacgggatgtcgttgcactggagagagtggaaaatgttggccgaattgtggaaattctgcgctcgacgcgtcaccatgggtttccggtcgtaaatcgaatcgacgcgagcattggcgactcccaattccccaactacggaaatctgttgggcattgtgttcaggtcgcaactcattgtcatactgcagaaaaaggttagacggatgcattgagagataaacgtcaaagactaatcatcatttagcattttacgttggattacgagggaaagtatcccgcaaatggacatactccgataagtctcgaggatttcagtgagttctatccaaggtgggtgtgtttttctttttggcatttgagtaaacaactcccacactttgtttagggttgagtccaaaatatcccaactcggactgactgtggccgatgaacgctcttgggttgatcttaagccgtttatgcatccttcgccctatcgtgtgcccctcgactcttcccttgactccatccatcgtgtttttcggggacttggacttcgctttttgctcgtcgttgatcgggaaaatcgggtttttccttctttttatttactctaattctaagtgaattggattttgttttcagctgagagggatcataacgcgaaaagacattgcgcgcttcaaagaacggcgggtgaaaggtgcttatcttgtgcatgagattcacatctccccttacaacaattgattcttttttctcgttttgccttttccggttttcttttgtatttttatccttttttattattgactggtaaatcaacattaaattacatgttaataattttctttttttgcttgtatatttgcatttattttttattttaattgactgtttttatttaaaggcctttttgtcatttcacaagtttttttgcgcacatataacattggtagctaacactattaacaacggacaatgtctctgctgaatggaaagaatgccactggccattgtcaatctgacggcggtaattttggtgtttacaacacattttggaatcgttttcagattcatcgatcgctgtgaagcggggcgccgaagaattcgacttcggtgggagcgaagccgacggggcaattggccaagggtggtcaattgaattgagcatattaaattatttatgcaattttccagtggaaacgcaccgccggcagccaaatttcaaagggttcagcagttctcgtgctatgccgtttatagcagatcggcccagcccaaatcgaacgccattcgagggcaaattcagggtcagaaattataactacaatttattatacgtatttttctcaattcagattttaaacatgaattgcattacgttttgacgaccattttcgatgaaaaggctgctgaaaacttgaaaagtctcaggtaaaagggtcttttgttcctggtatgtaatgcctttttccagcttggtccaactcatcaaaaaggctattattccccaattccgcaactttttacgcacaaaaagtgtccaacttgaaaaactctttggcgtcttaaacgaactgtcctcgaactcgtcggtactcttttttcgataatgttccctttttattgcatttgattgttaggtcttttctctgtcctcctcctgccttttgtatttgttggctcgcgaccaaaagagtattccgccctctgaagtaacttcggcttctacttttgccctcttggtgcttttccctgctgttctctctctttcagaattgttttcgactcatttctgaacttctccggcaagactctcagcgtgccaaaatggacgaggaacacaaaaagcacacggaaacggtgccataatcattagggggaaaatgtgtacggggaaggaaatggaaaacatttttttgtgccgtcatttcagtgttttttcactaaattggcatttgtttttgtgttaagatttggctcataatgaaggattggcacgtcaattgccaaacactctcctctaagcaaataaaattcgacatggcactcgacaacatcgccagtccctacttggcactcgaagcacttgcttacatggcaacgcgagaacatggctcctttttcaagtcgaaccttctcaattccggctgtctgacgagcatagtcgcaaaatgtagcaaatattttcgaattaattgaattaattaatttcagttgacaaagtcatcctcgagttggtccattcaaccgccgatgtcttttcccgacttaacattgtcgagcggtgttttcgaattctggaaaatgttacggtatttgtcgaaatgcgtaatttcttttctatttgaggcggcagtttttgacaagaagaaccaaatgtttttaatccaacatcgcaacagtttgcttatattttcaaccgccaagtattattttttattggaatatttttcaatataatgaattctttttggtcaggtttttgaatttcgctgccaaatttctcgaggcctgccaaccctcgtcgtctgaatacggcacctcccaaagtgaaagtgataaactgttcgaatgcatttgtttgtcctgccgagttctgatgaacatcagtcacgagaatggtacttaaatttttggcatttatttattcatttgttgtcaaattttattcagaaaacgcctctctaaaaattggccaagtcgccggttttctcgccaattgtctctctctgttggcctcccattttcaaaatgcgcctaaagacaaattcttcgacgtttgttgcatggtctcaacatcatttgcttaattaattggcttaattgccttcttacaatttcatttgttcagatgttcggccttttggtcaatttactggagcgatgttctgcgaatcgccgaagatttgttgctttanagtcgaattttgtcgattctaacggcgaaacgctcaacgaattgtcgtctgtcgaaattctaacaaaagtgcaaaatttggcatcactttttccctgtttcttatgccttttccattaagcttttcatccgccatgactcagctgccaaaaccatcgacgaggaattggacaacgaattggtggcggaagagcaatttgtggaggaggaagaagccgaaggaggcgtggccacggagttgggggacgacgaggggagcaacggaacgacgaatggggggagaacagcgggggggcacggcaccgggggcacagagcactgacgaggacgaaatcatcgcggcaattcaatcggcgatgaacaaagcatcggcacacatggaagacagtgcgttggcgagagagagagggagagggaaaagaaagagagaaggagggcaaaagggaaaaagaagagacagtgaaaaagagaaagcaaaagaccgaaaataccaaaagtatcggtattctggatattttaaggtatgatcgcctcctattgctctttggtggtggccattttggtggattctgatgaggtggcacttcatttttctttgtttaaaacagtaaatggtaaatttgaccatagaaactggcaaatcaagtgaaggaattggtgccgaatggcgacgtgaggccaatgtctgagcaactgaaacgatttctcgaatttatgcaaattacgaaggtgtgtactacaagagcaatgccaaacaatgttccaatgttttaaaatggcatttcattcagagattgaaagagggaacggtcaaaaacatcgaacggctcataacttcgttcgaattggccacaaattcgcccgactgattcgatggcacgggacaatggccgttggttttgcccacatccatttccacttctcttctgctgttgctttgtgtctaactgactctttcctaacctttactcacttttcttttccttcagtttgtcgttcttatttctttttgatttgtatttcaatatttattttggcaaaaattgatttgcaattattgtttaagcgtatgattctgcttattttgtttaaaactgatattatatccctctttcctctcattatcaatcaacattaaatgccgggttactgaatatcgatgccgaatagcgttgttcggcgggtcgacggtgttgaacattgtccgtctccaattcccttttccccatctttctgatgactcccaaatcacttccattttgttgtccgttttcgtcactcaactttttgcccttttcattctcttctgctgttgctgatgctttaaatttcctcgagtagtaaatgtactcgatgagaagcatcgtcatggaaatgccaatgcccgccaaaattacctaagacaatataaaatgagttgttttttcgttgcgtttttgcccacgataaacactccgccgatgttccgaatggatattccgctgctgtcgtcctccaaattcgggcagtctttccgccgttcgttttgatgccaccaccgctctttacatgtttccaatttgcgctcattttgcagcctcaaaat

SEQ ID NO: 1668 - DNA, 1235 bp, Heterodera glycines
ggccgccaaacaacccgcaacattttttggcgcttcgccgcccccctggggggtcagcgaagtcatacaaaaccaaaggcattcctaaaggggggagggagtggacagattcgaatggcaaatgcgcactttaaatgtgaagttgcgcttctcctcgtcctcggcgtacctttcgctgttgtttctgtacgagtagggactgaaccggtcgaacacccaaagcaaagtgctggtgaacagataagcccctgggggacaaacagttggaaaatgccaaaaaacgaacccaaaatgcacatccaaacgggccattcgagcaccttttggtgggaattaaacataaaaaaggaaagagagaatcaacaaatcactttgaggaatttgaacattgaatattcaacgtccgatcgcttcatcaaaatgccaaggccgaccaaatcgtaaaagggcaccgtaaagtcaatgtcattttcacgctcggccaacactgaaagttggcaaaaagaaagggcaaaagtaaagaaaggcaggcgaatgtttggccgtaaatccccacccgaaattgggccaagtgccaactccgctttgcccaacaccaaatcgccaatcattccatcccaattgccattttcgtcaaaagagccgaataagccatcttcgaccaaatacagttcaaatgtgaaattcagagactaaaaaagacaattgaaaaagggggtaaaacgttttaatcagtcaattagtgggcaattatcgttgttaattggtcagcccacttctgttagcatcgttagcaaatcgatgcaatagccctccacgcgttggcccgtgttcagaaagacgggtttcgtgctggcacagggcctgggcttctcaatggccgaagattgagttgcgttttctgacaccaattggatgtacggttcatgctgaacaaaacgaacaacagaaaatgaatgacacaatttgcatttgattgactcaacgattattgtaacgatacggtagtgattcaaatgttgcacgtccacgttcaaatggccatacaatggccaaattcctttctccagcgtccaatttgcgacctgccaattggactatcaatcataagaaaggtccaattggccgagaatctcgacccacactaattaattgtcatttgaacttaaaattggcttagttccccgccccatccgattgtacatcgcctttgccatgccccccctctcacatct

SEQ ID NO: 1669 - DNA, 5316 bp, Heterodera glycines
ccccccccccccccccccccttttttttttttttttcccccccccccccccccccccccccccccatttttgatgtccgtcgggtttttcattgttttccctttaaaaatcattcgattctcccctgaacatttttttcttctcgttatcattgcctctccatcagtgcctttttcttcttaaattctcccacctgataaaactccttcccgtgattgtgtttatatcttccgaattcgaattcctcccgcggattcgatatcattttggtcagcgttttctcttttgtcgaatttcgctcattccaaaaatttttcggcaatttttttgcctttttgactagcaaatcgttggtcataagcaaatagcgagtggtaatgtttatgatgtccagacagaaggacacttgagtctcggaaaaggtcggcaccggcactttgtagtccatttccatctcctcctgggcatttggccaaggccaagaattaattggcatggcattgccaatgcaaattttttggtcgatggcattgccaattgttgccaatatgaattatcatttaatggctcacctgtctcaaaaattcgttgaagtttcttagcgtggccacccgaccattgggcataattcggaccctttaaaattttgtccaatttcaattggcaattttcgttccttcttcgctggtccgtcacccaccaaaataagctggcactcacacagtcctcacatttcagtgccaatgtgtcctttgtgaacacaatgaaattggggaagtgtcgcgcttcgaactgaagaatggccgcttgcatatatctgaaggcatacggtagccaacaagggcggtactgtacttcagcaaaagtgaataattctcacagttctgcatttttggtggaagcgacaatgaaaatgtttttcacactttttgagcccacgtccaactgtttgacgtgttcggtggcgtcctatgcaaaaagtggaaaaagtgatggatggatcggtactttccattgcttctgatcagtgggtgatcactgatcggtagaggatcaatccctttcttctgctaatccaacaaattaaagtttggatggaacattggccttttaaaaatgagtccgtctgaatttacgctcattttggtgaacatcggctcaaaaaggacggctttcttcgaagctgcgctgaacaattttctccagtcgtattcgactttctcgtcaaaatgtttgtcgtagaggacaatgaattcggagatgttcaaatggcggatgagttggtacaaaatgttgtcgaaaacgacgaaggcgggcaccaaatggaggaaattgtcaacagaatgatcaaaaggcatcgggagatgacctaaagcagaattaatcaatgaggattaacgggctaattgccctccttcagtttggcaattgactcgtcatgtgccgagtcgggactgactctcagctcaggaagggtctcgggattcgatttcaccttttggcggcactccgttccacgaactcagttccgcttgaatggccgcaactgatgaattggcagcgaaccatcggacgaactctttggcttctgcggactgagccaaactgatcagaaaggcactgttctcccgtagcgaattcatttctcaatgagaaaatgccaataattaaccaattaattaatgaaagcatttgactgaattaattggccaacttttcgaataaattgcgcttttgccaaagtccaaagtgccgttggcgtgtaaagtcagacttttcctgtcgacgtgaaaagtgtccaaacggagcatttcatcgtcaattttgtagtggtcccggaaaaagagcagagagacgttcaaatgttggacgaaaacggaagcgatcggatcaaagcgatcgatgagaatggctgaaaagtgacgaaatcggcggaaagtgacggaggaaacgcactgatagacaacggagacggaggaggggcaacgacggacagaacggagtcaccaaggggaaaaagcaatgccaagacgaaaaaggagacaaaaagcatcgcgaaataaggcgaatgttgccaaggcaaaagggaacggacattcctcccccccccccccgaggtgagctcgaattacaaacgcaaggccaagccaaacaaaaagcagggcacttgtgggtcagattaattaaagggactgcccgtatcaattacagaattggattggcggagacatttgcccgccaacggattgatggaaaaggttttcgaaaagcaaaagcagtttttggttctcagcgttacacctttttattattcacatccaaaggccaaataataaaaaagaaatcggcacgcgcacttcacagaatgtgtaataataaaataataagtgatcatttgggatggaaaaggaatgcatttggaagaataagtcaaagccattctcagcacttttcgtttggcaacacaaaagtcgtttaggaaaccgagcaacggctcagtaaccggcgtcctcaaggtatttggccattttctccaccgcccctcgcacgtcggcgccgacgacactttcctcgtccttgtaaatggcgatcagaatggcggacttggtcttcacagcgaaaaagctgaatgaaagtgaggaaaagcataaaaacatggccaaaatgggggaaaaataaaatttgggcggaaaagtaataaatttttgtgggttgagaatggtaaaaaaaattatttttagaaatgcacaaaccccgttttgtccctcttcccaaagataagattttcatccgttcgcggcacaatgtaatgaattcctgaaagtacaaaatagagaaccgaagtttcacatgggcaaaccctcgaggtcggcaccgacggacggaacttgcgaaagatcatcgaattggccgacaagtttcttgagctcaggctcactcgcctgaatgaataattgttgatttatttgcaaaaattaatctatccctttatatatttcgagttttatttccgaacaaagtcggtaactaaaacaaacacaaccagagattagagagaaccataatagaacaggcattcttactaattgtaagcccaaaccttgaattcgttctccccttcagtcctggcccaaacactcgcgtccgaattgccaattatggccacgcgagtaatctccgcacaactggaagtcaatgactgaatgtacgcatcccaaccactcattgctgcttctgtttgtcgtcaaagggtgaaaaaaaagaaaatagaaaaatgtctgtttttaaagaaataaaataaaaaagagaaaaaattaaataaaaaaaagtatttcacaaaaacggttgaaatgcgaatgagaataaaaaggcgaaggttcatttcttagatagtcaatattttctttaaaaaaattacctaattgcgagaaaagccaaagaatgaaataaaataacaaatttttattcattcaaagaaatatcaccacattattctactgattaaaggggtgacaattaaaacattagagagaaataaaataaattttttttataattaattatggcataacgccaaattaaaaatattaaaaatttaatttattaccgttattttacacacactaatttatgtatatcgactaaataaaaaaaaataaaaggcttgtattctacatattagcatgtcattgtcattgtgaataagggggggggggggggggaatttcctgtcaaaatcgaccatttttgtgaaatatgacgaaattggaaggaattggaaaaatttgcgggacggacggatgactcatttattctttgtcaatggtttaaaacaaatgaaaaaacgcaaagacaaataggagaagggaatgaaaagacgggagggaataagcaaatgaataaatgaaattaattgtaaaaaaaattataaattaactctttttaagagaaaagcaaaacattttcaattttagattggaaaatgaattaattgaagaaaagacaattaatgaattcaaaaaatataatgagtgaatatttatttaatcattttcctttatttaatgaatgattgaaaatggaaattgttcatttccggaaaatccttctgaacaatttgtgcagtgtcccctccaaaatgccttcgcctctttgtccgcccgtcctcagctgatgcagaattttctgcagtttcttcgtctgccatccgaactctctgcgcgaatgggcctccgtgttgcgcaacttttgggccaattgcgagcctaagggaggcaaaacaattaattagaaaggggcgaaacattgatcagtttgatagcccaaataaaaaggaagggttcctttctttctctgtgttttccctattattttaccttctcaaaattcgccaattcaaatttgccctttcattttgtcggttttccacactttgacctcaaaatggtcactcaaagaggtgttttagtgctttttagtgccaatgtcggccaccaatccgactaattacagggctcggatcccttccctttcctcacatatttttttctctccgctggttcttgtcactttccatatataaacatcacacaatttctgtccgcatcggtgtgccaatttactgacctcggagatttgccccccccccttctctttttctgtgtaatcatcgccgatgttttcattggaaggtgggaatgaatgaatgatatgacggatttgtgaattagtagccaagaaaaacagcggaaagcaatcaaaaatgaccccaaaagaaagaagacgatgagagaacgatggcatcaatttgtgacgaattgcgcaatttgagggcaaagagtggggaaaaggccggtgatttcatgggaaaggaatggaaaagagattgccaatttaaaggtactttaatcaaaattattggattaacatacaaaatggtgaatgaggaggaggagggcaaaaaagggagtataaaaggcacggatgcaaaacaaaacttacgcgcccaataaccacgcccccagttaaaatattcttggtattgtacgagagctctttttgttttctaaaaaaatctatggccaaaatggccagaaaaaaatcatttttttgagtgttttgaccttgactttttttacagtgccccaaaaaagtcttggcccaagctgatcaaattttcaaaaattaaaatttcgacttattttgattcattcattcattctcagggatgagtcgcttgatcacactttacccagaaaggaggcaaaaaaaagtcttggcccaaacatgaaaacccatcttgtagttcatctaaaa

SEQ ID NO: 1670 - DNA, 845 bp, Heterodera glycines
atttttcccaatttcaagccatttttgactttcctaatcaccatgaaggagtgatctgatcaagttggtgtaaaaggcctttttgatcagcatcaaaagttaagcaaacgcctgaattatttcagatttttagatgaaatacaagatgggttttcatgtttgggccaagactttttttttgcactgtatttctgggtaaagtgtgatcaagcgactcatccctgagaatgaatgaatgaatcaaaataattttgtggtgcatgaaaagcacatatattggagtaaataaaaacacacaaacaaaaaataataaattaaaattttcagtcgaaattttaatttttgaaaatttgatcagcttgggccaagacttttttggggcactgtaaaaaaagtcaagatcaaaacactcaaaaaaatgatttttttctggccattttggccatagatttttttagaaaacaaaaagagctctcgtacaataccaagaatattttaactgggggcgtggttattgggcgcgtaagttttgttttgcatccgtgccttttatactcccttttttgccctcctcctcctcattcaccattttgtatgttaatccaataattttgattaaaatacctttaaattggcaatctcttttccattcctttcccatgaaatcaccggccttttccccactctttcccctcaaattgcgcaattcgtcacaaattgatgccatcgttctctcatcgtcttctttcttttggggtcatttttgattgctttccgctgtttttcttggctactaattcacaaatacgtcatatcattcattcattcccaccttccaatgaaaa

SEQ ID NO: 1671 - DNA, 2527 bp, Heterodera glycines
taaaagtttatttccatattatttaattttattgtttttaatttaaataataaaagataaaatatgaataaaagaattttattaaataacagttttcccagttgatttttcaaaaatttgctaatttttcaacttatagattttgaccaataaattaggttttatcataaattttgttcaatgagttattttttaggaaaattgtaatgttgttaacaatatttatggtgaaattcagtagtttttttttgcaaatcagtgcatgtaaagttctaagactgtaatcaatctagcacagtaccaagttaaaaaagaattaagccacctactgctgggaatacagttcaatgggattaaaatgtataattgtttttacggtgatgctcattgaccggctccatagcatgatggtcttggcgcataagtgtacaaattgtccgtgtacgcattgcttagaccatctaaaatgaaaattactttttttcatttaaatttgataaattaatttctaattttaatttacctcggtttaaaacatccgggtcaaggaagggtcgcgatataaatcctagaagatatgttatccgagggttttagaggtcgctgatcatcgaatctgacatgtaattctaggtcttggacccaaagaaccccagggaataatttttcatgactaaatattaaaaaattttgcaaacaaaagggtccccccttttgtttttgctttttgataatttcaaaaggttactctttgcaaatagcgcccaaaacactattaattaatttaggtaattggcaaaagtcatattaaagaatgggcaaaaataaaaaatgtacaagtatgagtcgcacgcactcccaagctcccaacaaatgcttaatgctatcgatcacttatcaaagaaattaattattttacaagcggaaataaaaatttcaaaattgtattattcaaaaacattatgccaaattatgattattactagagcccggaaatttcaaatttgcggatcccgctgcgggactggaactcaaaactttttgcgggacgggatcccgcgggattaatcccgcaaattccgcaatcccgcatttaaaatttgcgggatcccgtgcgggattgcgggattttggaaaattcgaaaaaatttcaattaaattcaaaaaatttccaaaaatcaaaaaatgctgaaaaataaatttttaagggctggcgggatgcattaaaaggggctgatgggtcgactaagatttttcgattggatccgacggtaaaaagttgatcggaaatcaaattattaacggttcataaattgactatttttttcttttcaaacccactttttttgcggtgcaatttttcaaaaaactaggaacagagggtccggcggtccctatcagggatggcattccgaggccccaaaaattttcggaagtcggaaatcggaattccgaccccaaaaacgtcggaaatcggaaatttttcaaaaaatatacaatataataaaaaatttctaaatattttaataggctaaattttttaattcttaaccaagtaaaaggtatttcacaaatgtttttagtatacgcttgaaaaaattattcaatattttatcaaattttttttttgtcatttttcattattttagaacatttttgggaaaaggagtgactatttttacacgttttatacagcgcgattttttcaaaaactttttgggaacttggaggagggtacggcggtgccgataggcgccgccgggaaaattttgttaacagattttgtccaaaaaattacaaaattttgcgattttgagcaaattttgcaagaaaaatagggatttttagggtccggcggtgccgataggcgccgccgggaaatttttaaaaatttcagttcaatttattaacagaaattgtacaaaacttgctagttttttgaaaagaaaaattaaaaaaatttccgacttttcatcaaaaatttcggaagtcggaattcctaccccaaaaatgtcggaaatcggaagtctttccgtgccatacctggtgcctatcgacatctgcgagaaattttatgaaatttaaagcgatttggtaacagattttgtctaaaattgaccaaatgacgcagtttttgactcaatttctacaggattattaagaaaagcctatccggcggtgccgataggcgccgccggggaaatttcacaaattttgaatgaaatttgcgatgaaaaatgagttaactttaattaaatttattatttaatttatttaaaaatatttggcattctgtcttagaaaaattttcaaaaaaatcaataaaatcccgcataatcccgcacaaaaaatcaaatttgcggatcccgctgcgggattggaactcaaaattctttgcgggacgggatcccgcgggattaatcccgcaaatcctacaatcccgcaaatcccgcattttccaaaaaatgcgggattgcggactgggatcccgcaaaatcccgcgccgggctctaattcccgcgccggg

SEQ ID NO: 1672 - DNA, 7351 bp, Heterodera glycines
aaaaaaattcgaaaatgttcgaatcggggttaggggttcgaaattttattgatatgagttcagattcgtgcttagcgaccccgaaaacctctggaggcatctttatgcctcaaaaaaaaatttttcttaatttttttcttatggggtctaaccagggatggagttccgaggcactaaaaattttcggaaatcggaattctgtgccatccctggtataaaccacatagtaccaaaaaatttttttgtcccacataaaattcaaatttatccaaattgtttatgtcattcgcccaccttaagctgttgtttgtcagcaatcaattcattgtttccatcaaattgtccatcattttccaaattaattgcagcgccattcacttctaaaaataccataatttaatcttttggttgaaatattcatttaatttcagttttcaaactcaatttttctcccatttcatttacatacctccattttctgttgctgtgaaatcatctccacaatttattgaattggtcgaaattgaaatttttgagtttgataccgataaaacaagcttggattttaaatttcctcaaaagaattttgttgttgttgaataaatgacagggaataaaaagacaaataaaataaattagagttgagcgggaccgggaattttgggcaaacccgggaccgggaccttttcgggttgaaaacccaggaatttttggctgggaaaaccgggactagtcccggtcaaaaccgggaccttggtactcagttgtccgtgttcaggtcccggtcccgctcaactctaaaataaatgactattcattcatttcattttgtttaggtgtcagtccctttcttttcaaaatttaggtcggtttgatttctcatcaatgttgaaaattaggcatgtgaaggaatagaagaacaaaatcaaaattgagaatttggttagacatttttttggcgagtaagagaaaaaggaaatacaagaggaaaaagagagaaagagagagaaagagaaggaggacagaaaaaaaaactatataatgctttttggcgtaaattttttctaattttcggaattttcttcgctaaaaatcaaattttaccttaaagtaaaaaaagtcatgaaaagcgtcaaaaaattgaaaaaattctgaaaattttttgggcatttggccaagaattttggtgccaaaaaagacattttttcgaaaaatcgctaaaatttatgacaaaaactgccgaaaccccaaaatatgtttttattcccaaaaagtccaaaatatgttatttttgagcttttcatgcgatagcatatgcgcaaaaaaaacatgtaaaaacatataaatccgttccctgcttataattttatttagagagataacgaaaaaatgagttctgttatctctttccccattttatttttccgccaaaagtcatttgaaaaaaattgctttaaaatttcaaaaattatcgaaattttaaaaatgatgttgattttgcctttctctcccctcgagcccattggcaacaatttaaggcgaataaattacgggaggggtcggtttagtctggccgttttagtctggccggtttagtctgaggggtcgttttagtctggcaagctgattttgtgccatatggattctaatcagattttttttcgaaaaatgtttaatttaatactaaaacatacattgaaaaatcattacgggcacatttcataaatttgagataatgtaccaacgagataatcgctgatgatatcgggattaacattgacattgacatgcccgtaagagtcgaagaattctcgcatcggcgacatcaccacctctaaggccaacgaaaagttgcaggcgaaaaattcgcccatctttgacaatcgcttgaggcatacgtgttcaacgcttcacacttgaagtgagaaggcagtacgtaatcaaaatccaaatgaacaaatcaaattttggcataaaaattaggaaaagttgacctttttgtcgcagctttattcggaaaagcagctaacattggtgttgttgtgttctgcaagacttgtacacgaattgtagccggcgctttccacgtctcaactgcacgccgttttagctgggtcacacgtcgctgacactccactgctcggcgctcatgtcgcatgtgtggcttccaataattatgaggagattagcattaatgtcaatgtgtaggctgaatttaaaaaaatattctttgttttatttttgcatacacctttgcatttgttattaggtccgaaaaattcgcaacgcaaacacttctttgtaggtgaacagaaattttaaaaaattatatgccgtcaattttttcaaaaaaacaaacaaaatcgacattgaaagtgctaacaaatgaaaaattcatcgtcatctccgactccatccagctctacatcaccatcatcatcagataagccggcttcttcgtgatcgtttcgtccatctttcaccgtttcattttctctaaactcgcgcaaaaattttgtccctatcggtccaattgctccttccggcttgaagcaagcaattttttcgtctcctgttccgtcgaatggcgtagtcaacccacagacttaaaagtttcggcgtctttcgtaggcatttttattttttaaactgaccctcgaatgatttgatgatcacggctttggaaatttcctgccacgatctgtggatccagtcaagtaccatgtgaagcgctggtgccttcgggttgcctgccggtgtgaactctttttctgcatcattggacatccaagtgttgtagaaatgccgaattcgctccttgaacggcttgttccacgagacatcgggagcctagagaaggaattaactttactgagaaagatgacactccacctgaatgaatttggtgcaaccgccagggacaaaaaccgtttccactcccaatcctttcaccaccttcgtcgttctctcgctcttgtggctgccaaacgcatcccaaaccaagaggcgttcgccaacgaacagctttgccccgattattttgtgcaggtagtcctccgttgtgtcatcgttcatccatatcggcccagcgaaattgataaccaattttccagcaaattgtttgacaatttgcggcaccggtcgctttctgttgaccaacacgtacggcttgagtttttgtccgttattccgtgctgtaagacacaccgtcacccgcattttgtcatgtcctgtggtcacaactgtcacctaatttgttagaataggttcattttatctaaaaaaaacttacatcctttgcgcctttattgtccacacatcggttgtccgggcaatcgaaccaaacggccgtctcgtccattgcaaagatgccgccgggaaaattgttcttcgcctttcgcctttgttcaacaaaattgatgaattttgccaccgcttctgcatagttggacggcggtttctgacaaactgatgtcttcttgcgcagcacgaaattatgccgttaaaagaagaaattgaaattaacacacaacatagggaggacttgaacctgggaccccccttttggtgactaactcacagaccactaagacgaaaaaaccaacttaccgtatttgctctttttatataccatggtatattatttttcaaccttctcagaagggggtatataattggagactggcagactaatggagactggcatataaaaagagcaaatacggcaattgtacttggagcccaaaattgaatcgccgtgtggaacaaagtcaccaatttacgcttgactgttccgtttgcaacagccgatgagcagccagtttggggtgttattatgcgtaaaatttggccaattttttcggcaaacattcgccacttgggcgtttgcaatggcatcctttttgacaaattgcgtcgtctcacttcgccttcaattctcaccgatctcgaccaattgaattcaatctattccggtgatttgttgcccgaggcgattggtgatgatgattttgatgggccaaatgccacaatttctgctggccaaatgttgtcaaaatggttgcacagtccgagaaaagatggcatgccgaagcaattgcatttctttttgaaggagccaccaaatatggaatgggccaacactctcaaaaaggtgtggccatattttcgttagccaactgattttgattgcatttaattaatgtccgtccgttttcccattgtttagcattttctccgtgccaatgccatttcttcggtcagctaccaaattcaatttactgttcagcaaccgtcaacgcaaattgtgccatttgaattagcgaacgaacagaccaaggaaaagctgacactgatcaaagcaagcgcaaatgtttgggaggatcgctgggtaatgaaacggtgccaatattgggagacggcggcggttcaatgggcagcccaaaatttggacggatttagcactgtcgagtttcattattacgtcgaagctggcattgggtgagcaacaaaaaagcatttgattttgtttaaaaattgtgccgaatttttaggcctttgtcgccacgtcgcaaatggtgtccaattatttgaaagtgatttaatgcatttgggaaatggtcgatcattttgaattatggcgatgaataagaggtgatctgaccattttttatgctcgtttttactctctgatttgttgttgttttccgttaaaatataaattttctctctcgtctcgatgcatcccatgggtatgtaccagggatggcatggaattccgacatttttggggtcggaattccgatttttgaaaatttttagggcctcggaatgccatccctggtatgtatcaattaacacgaaaaattcagggtgtgaagtttttcatacgcaatttatagttccaataacagtacagtgcttgtcattaaaatcaggacaccccccattttcagaatttaaccgcttcccgtgaactggtcgaattgattattaattcaataagttatttgtagacacgactaaaaaggcaccaaaaaatcgcgaaaaaaggactatttacatataataggcatcaaaaattgaaaaaaggcacgaaaatggaccgatgggttagacaatgtgccaatgggagacgaaaaattattgccaaaaatggaagggatggaaacatttcgacacaactttgtttttaaaataagaaaattttaaataaaaatctgaaaatgaatcatgatattactagggctggtaattaaatgcacataaaatcttaaactatgcgcataaaagtgaaaaatatgcacataaatttttccaaattgggggcaaaattttcacaaattcttcaaatttgttaaattgaagcataaaaatctcgaaaataactaaatgtagtatgaataatctacaccactaaagatctatgttttggaaataaaaaatacacccctaaaaagagaattttttcgaaattttgaaatttttttagctattttgtccacacttccgaaaattttcgctgcaaacagaatgagattattacaaaaattttgaaagtatttgacttgcaattgtgaagctagaatttaataaaattggaattttttaaatgttaaatccatttttgtgcagtttttcgcttatttttgagtctgttttagcaaatattgaatataaatacattttactgaattttttaggctttaaaagatatattttggcagtttataatccatattttggtccatatatggccatttttgagctttttagtccatatttcgggctttttagtccatattttatgtccatattttgcgttttttagtccatataatttataaccctactgataaattatgatcggccgttcattctcaattaattcatttcgtctgctgctgaatcattgtttttgttcgtttgtccgtcactcatttgtcagaacatccttttgtgatgctttgtcccgtttcttcttccggtggcggagacaatgaccttaattaagcgcaaaattcaaatttgtatatgtacaaaatcaaatgccggtaatagtagggctagtgccacctttttgaagatttttggttttcgaaagtcatgaaaaatttgttaggggcttttcggtgtcgctgatcatgaatctggcatccattttgaccaactccaaacaccggacctgaacaaaaagtcgaaaattatgggaccaatgatgtgaactagggttgcgaccccgaccgtcggggttggaaaagtcggggttcggggttgaccaaatcgttcggggtttttcaatttttttccttatgccatatagtcaaaaaaaattatattattttagcttaaaattttttaataatcataataataattttatgtacttttttatttctttttattataactatttttgtatagaattaattaaaacgataaggcatttttaaaatgaacaattttcagtgaaaatctgtaaaaatagacaaaatttcaaatttttcctccggcgccgggcccccaaaacttatttttttcttaaaaaaatttgactcaaagtggcattgctttcgccacgtttccatcatcacacaccacggatggccatccgattcgggacatttttgttcatgaaatttggccaattttttcggcaaatattcaccatttggacttttcccgtcgtgatcatttggacaatttgcgtcttcgcacttcgccgacaattctcactgatctgaatcagttgaattcaatcaatttatatggtcggttgcccgctgcgattggtgatggttttgatgggccaaattcaacaatttctgctggccaagcattgtccaaatggttgcacattccgagaaaagctggccaacccaagcgattgcgttgttggcaagggaactttgaatggatcaacaatttcaaggaggtgtggccataatctcgaaaaacactgatttttgtttccaaattgtttagcatttgatatttgttcctatcgaattgtttagcattttcgccgtgccaatgccattggataatgaaacgatgcaaaattattggggagaccgcgacggtttattggaaagacggaaattgggacaacaattgcaacaatgtgttcttttggctttttagtggcactaattgcatcgggtgagcaattatttctcccctccttcttgcttcgaatttttcctttttctctctctctctctttctcctcccttccccatgctattttcatccttttcctcctctttctcccctcctctttgctcgaatttttcctttttctctctctttctctttctcctccttccccaatgctattttcatccttttc

SEQ ID NO: 1673 - DNA, 2606 bp, Heterodera glycines
  unsure (1)..(2606): unsure at all n locations
tttgattttttcaaaaggggaggggatccaaaaaatcataatgttttttagcttcatcattgagaacaattgaaagggctctgatcagacgaaacatttctgcactttatgccaaactaaagaatgagaaaaggacgggtaaactttcttctttttaaaatttattgcgtaaatgtattttattattttcaaccagctgagagacggaccatccaaaaagccatccgttccgtcactgggcctcgagttgcacacattcgtatgtgattagaatgcgattatacacatttatcacaaaataaaatgtaatttaattaagttggattattataaattgtttttccccaatgcttttcgtcgttcgttttgcgttttcattccattgttttcgaatggccaattcccatcagtgccatttgtgctgcaaaatcggcaccgtcgattagcaatttcgctgtacatgtcggaatcttccctccctccgcgtattgccaacttccacccttttgcagcagcaactccacccggcaatcacttcgcatggccaccttccgcaatgactcgctgataaagtgctgcacctccgcactccaaccacggccttggccatccgtgccgatttcaagctaaatgttcacaatctgcaggtccataaaaattaacacgctttaccttacattttgccagaaaaattttgttgaaagcggtcactgtctaaaatgattttgtttgaatttgctgtgaaggctttaactgacttcagtgagcggcctcagctggttgtgatgtacggcgtggaaatacccttcgtcgacaaccagcacaaccttcagcattttttactctttttaaatttcaatctaatacccaaaaattggggtcggctaacgatggtctgatcatttcaactctttcccatctcccattgacttccgcggccaaaatttcgcctatttttggctctaaattattaattgacggcaaacgcgaaagtgcagcatataaatattcacaatatggaacctaaaaaggaattttattctcaactcgtccttgaaatcccacccaaacagtcaatcgaaaatagatggcgtcagggtcgatggcggaaatcagtctgatcggcactgggtcaccgtttgcctgtggtaaaccgttcaaagggatcgggtcgaattcgtcggaattgaatcggacgacgactgaagaaacggctgattttgaggctttttcctcggcactctccattctgcagagaatggcgtcgtcgtccacggcgtttccattcgaatgttcagtcaccgtgagcctcggttgaagagaaacggacaaaaccgacttaggttttgtcgtttgtacaaggtactggcaaaatcgacgttttaagtgtctcatcctcaatgctcgagaattgatttggatggaaaacggcccgaaggatcgaaagtgccgcgaaaatcctcttcaacggatgacatttgatttgtctgacccaccagcatggtgaaagtggacacgtccttcagctcgaattcttcagttgaccgcattaacgaaagccaatttcttggtaatggtttggccagcctttttgtcacgtatctgaacaataaactcgcttcaattctgagcatctcaaatgcaattattaacctttccatgtacttttgctcaagaaaagtggaagttattcctgtcggaaactccttcagaatctcgtaaatctgtaaattcaatgaattttaagcaatatttttccattttatctaaccagttctctaatctcctcaacctcatcatccaatggctcttattcaaatggcatccactcaaatataaatgacaataatacggggagaatcataaaaacaatccaaatgcgtttattatagagcatataatgaacaatttaatgacaataaggaaatcattttttatttaattatttttaaaaagagtgatggacaaataaattgcaaagtcaaagtgtattaattttcatgtgaataaaattgaaaagaaaatgatttctcgtcgttattcaattatttatccgtcatcattttccgtttccttaatttttcgttatatttatttctaatgcaaatgcttttcttacttctcttgccgtgatcgtttcttatgctctttctccaaatccgccaattttcctttgtatttgtgaaaaatttcactcagttcgcgcattcgactctcgataagacgcacttgctcatccgggtcatccgcacatttctccaattcgtcgtctgaaacagagacatttatttaccaccacacgttttgttttacctaattctgacaatccgacaaatgaatagctgtcgaataaatgctcatcttccattcttaacttcaaaatttgtagttaatgtattttgattaatggatgcttttcaatcgtcacgctttaggaacccacctttgcaggacgcgttgcctcattgaatgcatactgacgctatgcgtaccttaaggttatgagaatcagactcaagtcacagagaaaaacaaaaaagtattaaaatttttgagaatatacttgaacgtaatctcagttatctcttttaccttcanaagcattc

SEQ ID NO: 1674 - DNA, 3261 bp, Heterodera glycines
aaatgttgtgtgtcttttttgcatattcggtagatctttaggttttgacaacaattgaacatggtcccattgtcataagcgaattgcaatcagtcgaatctaattatgctttattttaaaaatagcttaagcaaagtgtcaccgtttttaatggccatcgatgccacgtttaaagaagaagtctgatggtcaattatgacacgttccgagtggaccgaaataaaagtgtgtggcggcgaagaggaagaggatgacgaagggattccgagttcagatgatgaagaagcctacagaaaacaaatcttttaaaaaaataaaaacagtaccaatactttcgttaattgctgtgaaattgtttttggaggcaattgatgagccgaataaacacaacttgggactggagaacgaaaaccgatttccaatggtgcaacatttgtgctcaaaatttggctggagtattgctgttgtgtgggctgtttgtcgggctcacaatcagccaatggtgtcatttcgttatttttgcgtgagttgccatttgtcttggatagtgtggccgaggaaagccggcgagggcgctgttcggacgattgggcgcttaattatttttgtaaaaaaaaataaaacgtatcgaaatgaaaacaaacggtacccgggaagagcggcaagcgaagcgattcctccggcactacgacaccaatccatggcgacagagaacaattccgaaggaaattggtcgggcatcagctgtccaagcgcttttgaacttgacttttcgtccttctcgtccacccgaattttgtgaagcattagccattcctatggaaaaatatttgatcaagttttttttaaagtgaaaatatttcatacgtcatatcgcgaattccagccaaggtaatggacaaatattttggtagacatcataattgaatggagagccctctttaactcagcacccatgttctaaaataaacatatgaaccttaaaataggaaattccaaatacctcatatgacaaatcagttaaattttgcgaaatttgcctcgaaataattgaaagatcgaacgcatcacacaaggatgttgcaatttcttgcagagtcggctgttttaccactaaaaatattgttttcataacacaaacacttttattcaattaaaatgagccggatacttatcacgcgtgcgtcgtaaaagcgaagatggtgccgagctaacaaataagggagaaatgcaatcaaatgaaaggaatctgttgaatttctaaccatgaacattttgtccttgatagaaacgcgtaaatctaaaaaaagtagcatttatcgcatgtaattttctgcacccattgacttttttaagttcactgacatgtgagcgtttgtgaatccaatgtcttcaagaacggcttggtgaccggacggggatttcgttcgttggtcccgtggaattttgggtcttcttccgcgaataccttgcggcttttttaggagggacgaatttttgtctgcttaaaatcagtgagatagcaaataaataataatttattaataataaagcgttgttacgttcgtttaattcctttttgtttgttattggcgactcttccgctgaagttgaccgactttccaattcgtggctgtctgttcgcttcttttccaatttttcgaataaatattgcgaacttccagaaatgtcttcttttacatttaattctgtactaaaaaacagcgaattaaggttgacaataaagcgaaagattatcaaaatacctttctgtattataatcagtttccccaacctctaaataattgatatataaatgaaagttaaaacgtgaaaataatttaccaccattcattgcgttcacactaagtgaagcggcttcaggcaattgctttcccaaattgtgttgtgattcattcgctttggtcgctgtagccaccgcgggggacaagacaatggacgacgaaaaggagcccgaacgagatttgatggcaatgtcggattccttggaaatgcttagacctctatccaaagatcgtcgttccttttgcttttttttcttctgctcgggtgctggctttggcttaaataaataacagatattttaaaaatataattaataataaatacatcaatttgattatatcctctgatcatccgtgtcgtgcgcgaatttgtggacagatttgacgaagagatagtcaaactcgaatacccaagattcttcataaatgcttcgaacttctcaaaataactaaacattttttaaaatgttgttcgttcagggtttatgttaacaaattttcaaaaaaacctcccggcgccggatttccctcctgttcctcaaaatatttttaaaaaatgcgccccaaaaaagcggtgtgaggaaacaaaaatcattgttaatgattgactgcttgttaaccgccttcgttattttttggcattgtcggtttccatagttaaacacgggtttggcccctttataattttaaacacaattcgtagttgatagtgagttaagccctttctaatggaaaaactaaataatattcaagcgaaaatggtattcttaatagaaagtaaaggctttttaattttaaacaattaatacaattgattttttccattcccgtttttactttcccaccgaatatatgtatttttgacgattgttggagagacgcccgtgtcctcaaggtgtaactttcgcaatactttcctccatctcgcctcttgagtaactctcttgtgaccgcccatacgactaacgacgtcgtaaaatcggtaaatgtcaatttcctttcctaaatttttcaaaattcactgaaaattctaaagttatttgaaaatgttgacctcccaacaacggcactttgttcagctggttgcctgattcgtcttggaatttataaaaatgagcaacacaaaggtcccttctctcgttgtatttagaatcgtcgtcctcggaactcgacgacgaatcgctaaaaaaattttgttataattgttttagaaaattgattaaccgatataaaatacattctcggttttctgacctcactttctcagcctttttcttctttttctttaccaaatcgacagaatcatctttcctggtccaactttgtggtaattctccttaattttaaagtaacgaaaagacaaagatacaaaccaaacctcgtgagaggtaattatttgcacggtcgatgccactttcagtccattgagccaaatcagtgagttttgagcatctac

SEQ ID NO: 1675 - DNA, 9813 bp, Heterodera glycines
  unsure (1)..(9813): unsure at all n locations
gcatattttttaaattttaaggtgtataacaaaacgggaaaattancgagaaattgaaagggggttgataaaaaaataacgcttaaaaattttttttcttagaattttgttataaaaaactttgtagctttccctgtgtaaagcaaaagaaaaaaaacgctggagaaatggaccgccataagtaaaattggtcccgagacacctcctgtctcaatcatccgccttgacctgagacacctcttgtattttgatttaaaatattggaagataatatgttttggattagtgattgcctcgataatttttattttacctgaaattgcaccccgaggagggctcaatgaatttgattttgttggtaaatttaacataattccactagaagaacaatctgcagctgctgatgcactacgttcacaatcaaattcctaaaaatttacagaaaaacaaaggttatgcaattgataggttgaattttagtttacggtgtaaaatttttagtaagcttttggctccaactctttaattttttaattcttcacttcaaattgaagatgtgcaattgctctggtggccgaacgcgtagaagcaattcctttcagcggcgtaacagaagagctgcggaaatagcgaggcgaacgttgagagcttggactattaaacgttgaggaattcttttcagcttcttccttcttctttttcgaccttttgtccgggtgatacagctaaaagctgtcgtcacacacaaattattttaatagtcataccggcaatttgtcaagtgtttctgcatccttaaaatgctttgcgcctttttgacaaagttgagtccgctttaaaatacgttcatcgccatcattgaagataacggtgtaagaagaacagtcctaattttaattcaattcattgttatgattagtagaggttttatgtgaaagagtcacctttatacagattatttgccctttatgtatttgtttcatgtaaatgacttcgacattttggttaatctccattcgcccattttggattgcggactcgtcaactgcaataatattagagttcttgagctgaacctaaaaataaataaataagagttaatggataaaaaagagactaaccttgattttcactgattttacgagtttagtgattcgcgcctcacaaaaagcgcctttgaatttggcgctaacctcagtaccaacaggtaaatatataggcggcaattcgttcgattcatactccataaaagtttctaaaaattaaaatttgttttaatgaggggtaagggtttgatgttagacgttcgaccttcgattcagttttgttgctagtaaatatttaaaattaataaattggcgttttgcaatctttttttattagaagtaaattgaaaattttgaaaaatataaaattttttgaaaactttctattgtataggttgtggagtaaaattgaaaattttgaaaaatataaaaaaaaatttttgaaatagttgtcttgtacatttcgggtcataaaaaaaccccgagttcttttaaaacaggaatttgtccgggaacctgtcgggttcaactcggaattctgattctgctacagaccttggggttttttttcttcaagattacgtcctcatctatgtaaatgacaagggtttaattaataaatattctataacaaaaatatctgtttttaataaaaaggatttgtcttgatagagaatatggacttgttttcaaacaacaacaataatagtgccaaaaaagctatttccattttccccgaagaaaatgtcaatgaggatgttattaacaaaagttctggcagttcaagcaactcttccgatggtgtgcctaccgaagaagatgtctttgaggttttataagattttattacattaagcagtacttaatgctaacacatcttaaggtggagaaaattattgcgcataaagtatgcgaagggaaagattattggaaagtgcgctgggttggttatggaccaagtgatgacacgtgggagccgcgggagaattttttggacaaaaaagtgttgaaaatgttgaaggactttgagactgaacagcatgccaaaaaggaaaagcgtaaagaaatcagccgtaaagtaatctttactagtctttcatttgttttaataaacttttagagcattgaatatactcgaagcaaacaggaagaagacgatcaggaggatgcaacagacgaaaagaacgaaagttggtttggcattaagccggatgaaggcacgctcgaacagaggcgactttttgtacctgaccgacgtctctccaagacagaaaaggtcgaatcattatatttttgacaattctgaagaaatgggtttctattttttggttaaaatttgcatatgatagttttccgggatgcttaactaaaaaatgaattcagatttgtgttcgatactccggaaaaagttgtatgccaatctttaacccaaaataaaattttaaattagaaactcatattctttggcgtattttattataattttccttttattatacagttattgaccgaaattggttcatcaccaggagtgcgaatattgcgaagacatttgaaagaacattctgttgaacgtttaatttcacctaaaattgaggaatcgtctccgcaaaaatgggaaattcataaaccaagaaagagtaaaaaattgaattattttatgaaacaatattatatcatttaggaagacgtaacgatgagatttttacatctgagtcgtcagcacaagaagtcttcgaaacaaatgaaaagggtgcagttgctatcccggaaaagcccaaaggaatatcccaaaaaatgccaaatgacaagcggattaaagaagaagtgggaactcatgagatgaaaatggtatttcacaaaaggccaaggcttggcgaggaggaaactcacaattccgaattgggcatcagtaaaagtctgaagccgaagaaattagccaaactcggtcaaaaattgaagttaaaagccgcttcaaaaagagaagacattattcacatgaagaagaccaaagaagagaaaaatgcatcaaaaaaacacgaattgtcgaaggaatcagtgccacacaaaaccaaggacaaacaattgagtaaattagccgtggtgagacttgaagagacagggctggtggttccgtttgcttccgagggagtaaatattgccgcggcattcgaacgtttggcagtggaaagacagacctctctttccctcattgataatccgtttttgatttctcaagaggtacaatgtctgtttatcatcaaaaaacaaagccgattttaggagtttgaggaaatggtaatggatggaaaggtcgagaaagtgcaacaattgctttatggccaagcagcgaacaacttcagcctgaaccgtgtagacgaatttggaaaaactttacttcacaaagttggtctatgtttactcttactgatttcggcttatttctttcagctttgcgagattaaatgtggcgtttctcacacgcaatgtgaattgattcatttgttggtcgcatgcggcggtcgtttaaacattatcgaaggtggaaacagtcaaattcctctccacgtaatatatttctgcaataaatattccttatatttaggcgaaaaattgaaggtaataattagggactggatttgtatggatttccatatttttttttgcacacttatttcggcctaaaaaaccacgtaaatagtatttttagcttggtttaatgcttctaggacacatttttatttccatatttcagatttttgtccatatttgacatccatatttcggcattttcacaaaaaatacacccctaaagatggacaatttttggaaatacaccctaaaatcgaaaaattttgggaaaatttacaaaattttgcttttttgttctaagaaaattcaattttttagtaaagaataaataggaggtcacaattatcaaaatctatacttcatgtattaaatgactttttgctttcttgaccgaaaaaattatggatttatgaatttttcagaaattttttgtccatattttcgttgtttttttttgtccatataaatccggtccctagtaataatttcatattaaacaattgtagtgaattcaatcagctttttgcgtatcacttattgtgtttcactcaccgttccctttagattgcaatcgctaatcgacgtctttgtcatgttcgtcagctgctcaatttgcattcgcccgtaaatttatttgatagaagcggcaaatcgccactgattctggcgttggattgcagtgattccgaatttacgaaatgtcttttgagggccggtgcttcgttccagtcgggtttgtggctctattgcaataggcgttcgatcaaatgaccatctacttgctttggccataatttttaaaaagactaaaattacgatctaatttttaaaaattaaagatgatcattgagtcaatgcttttttctgtgtaggaatattatactcaatcgttttttcctttaagcactcgaaaaactgtacgatgacaaagacagaaataaacgacagtttcgcattattactgaccatgaagctcaattgcgaaaggcgctgaacgctgctcgtgatgccgtatcaatgttcacccgatgggaaaaggcaattaaatcgcaattttttttagggatttaagtatcaaatgcatttcgccaatttttgtaaatccggtccacgagagtgagtcggtgcactgctttcacttgaagagtcaacctcagcttcccatcggagactttgcctatctgttgttgtcgtgtgttgctgaattcactcgggatgaccacgaagtcgaagtttttttaaataattttaaagttgtttttagaaagattttgaacattctgttgaggctcgtatgtggggccntaaatcccaatccnaaagncgtgatgatgaatggtttttgtgagatttaatttgaattataatctattattaaggaaaagtttgtcagcagctgaagcagggaaacaaatttgcctttctctgttctccatgtcaaggagaaaatcaaatcaanattgaatcttgatgttgtcgtgcgcaaatcaagaaatcttttgctcactcaggtattaattaattttttgacttttagtgcattttcaataagggtccatcttttcaggttgtgttggctcagtttttccgtcaaactcgtcctgctgctggtcattcggctgtgtcttctttcaattgcagatgacttttttctaaatctatagttttgctgcaccgactttaattattttctgttttttgaatactttttattttgtaaatctgctaagataaatacttttattcttcctttttaataataatttacttatattttgaattaaaaatatattttccccaacatttacgaagttacaatattttataagaataaggaaatggcgatagataaaaagggccacgtgactgttagttgtgcccgtgtgaaaatacaggtagaataacatgttcaatttgttgggtgaccttttttaaacaaaattgcagtttcccagttacgcttttttcggccgaagggtgagagaagttaacgctaaaatcaagagtttgcagaacgaatgtgacatgattgaggggaatgtccaaaagctgcgaagtaactttcgaccgaattccgcgaattgacacaaacgctgtactctgatgctgcttatttatatttattatgcataaactttaagcatctttagtcgcattttgaaatggttttgtcggccatcttttcctttgattttgtgaagctgtttaatattaaaatttccactgatttgcctttgctatgggtcgaatgccttcgctttacccttcttggttacttaattatttgcctgacactgtatgtacattaaaaaacgcacatttttttgcataattcgttagattttacatcgaatccgacgcgaagagaatgtccaacggacggaattggcgctcccaacggaggagacgacgcttcccgaagatgccgacggtccgatgcgctctcaacttttggctctccttcacggcgcttcgcttcccctgaacacagtttcccacgcgttcgcttacggttcgggtgcaatccctcaacgagaagaggacccaaatacgaaaatggtaacaaaatgcacatttaaaatgatgccattttcgattggtacaggtggattttctcattgtgtgcaacgattcattgctttttcaccagcaaaatttgcttcagtatgtgagcattgcgttgttgggattgtcctcacttcacccaattcaatttgcaaagaaacccaagccattactctcttcccttccgatggttcgatgcgaattgggtaaaccaaatgcagcgactctccggtgcacggctttactacaacacacgaatatctacccaaggtgaagtttattcgtatccatttccaaatctaagtacctttattacgaccttttaattcaaattgtttcaggacgtttaatcaaatatggtattatccaagaggacgacttggagacggacttgctcgactggacatggctgtacgcggccggtcgactgcaaaaacccgtgttggaggtgtacaatgggaggggtgaaacttccgatgttcaaagaacgggacgaaacattggtagggcgctctttgacaattaccgagcggctgctcacgccgcactgctccaactcgacgggtggtttacgatggatgtgagttagttgcatttctctcccaatttattgtctttacttttgtccctatttcagcaatttctcaacaaagttgtgtcaatttcatatggtggagacgtgagacggtatttcggagcggaagacccgcagaaggaggaaaaattggtggccggcgcgagcagacaattgagggcgttgtacaaaccaatcctcgaggcgttcgtattcccgtgattttggataagaaaatgttttattatttttatagtgatcgcgaagtgcacctacacgcggatgacaaaattgaacaggactggtaaataataatggggacaattgggcgattaattaggggacacactgagaagggttgacctaattaaggggggtgcaccccaaattttggcgcgccgaaatttcgccggacggaatttcgccggccgaaatttcgccgggacataatttcgccaaaatttttttttaaaaaatttggaaattttcaagaaaaaattcttagaatttttttatatggaaattccaatgaaaaatttttgaaaaaattttttagtgattttttggaaaatttttcgaaaaaacttattaatttatcataaatttcaaaaaaaatcccgaaaattttttctaatttttttttgaaattttcttataagaaattctatgattttttcttaaaaaatttcaaagtctaattttttgattttatttttttgcggcgaaattttgtcccggcgaaatttcggccggcgaaattacggcggcgaaattccgtccggcgaaatttcggcggcgtaatttcggcggcgaaattttgtcccgtccccattaagggaggataagaatggagggaattgggcagtcattggcatttttcatcaaccaaaatgttttttgaagctcaactccaattgtgttcttccgactgacacaaatgccacgggcggtcctcgaaagaataagcaaaacttactaccctcagaggaaagcggccgacacggaggttcggtgcaccccaaaacgtcgtcggccgaaacgtcgtcggaagactttttgaaccataactttgttcactgtcaatcaaattaagaattgttggtgttgttcgatagctctatgtgtttattattaatttgcaaaatctcaaaaattttcgttaagtttcaaaaaagttatgaccagaaggaactcaaaaacccagtaattcgaactttttttgctctgatttttttgtgcataaataaaaatttttgaaaatttgcaggctaatagcattttttgaatgctttcgaataataccaagaatggttaatttggttgagaaagaaaaaagttatggtcgaaaaattcgttcgacgacgtttcggctgacgacgttttgtcctactccgacggaggttattgcgtaatctgacgtacaatatttttctcctccagggacgggcctaggattcggcttggggtccccccccgggcgacgatctttaaatgacaaattttgcatatttttagcagactttcatcaaaattaataatgtttacggaaaaaagcgaatgacgaggtaggtcttggagatgtaacaacaaatcggtgtcgaattgaaataatattttgattttttggttataaactttttctggttatgggctaggtaccaagaagcactaccaaatagtaactttcatccatctgagttatcgaaattaacttgctaaaattttttgtacacaacagatagttttgttcctgtagtgtcccagttttccggaagtctcgaatttcctaccccctccacaaaaagactggtcctgctaattaaccccgtcctcccaacttaaggaattgctctaccccatcgcacatcgtcatgatctcaaccagcgtttctcgggtgttcttcaaagcatcgtttacgaagccagtttgcgccaaagtgccaaaaattttttgaccgcggggataacaaagtcgctacaatacgttgggcctaaactcaggaaaggattattgagaagattctgaacagccatttgcagatttgttttttgtttgtttttgcaaaaattatgccgcaaaataaaaaattatccgtgtctttcatttgcgattcccttttttaagttccgattcggttgtgattgaacgcctgggaaaagtgtcttccgcttggccatttactttttctgttggtgaatttgccaatttacttttggttcgctgtgatcaaatgcgaaattgtttcaccctttctgtccgaatcgaacggcgacgacagcagcagcaacggatggtcagccaaacattcggcgactgtcgtcggtcgctttcgttggcattttcgcagcatcggccctcagcaacagaacaattgctgcatgggcattcattctgctgatcagcgccgcagcagcaacattttttaggggaaggacaattaaagccggcggaacttttgtcgcagtcgcaacgactggcggcggtgctttgtgatttttgtgggcattgcccgcagggcattgggccgactgtcgctgttttcgttctcgtgccaatttcaaaagagtcgatcactgctaattttggaactgtcgtcgagaagacattgtccgttttcaatacctacgcaataaacaaaaacatttttggcgttttctcaatgccaaccaatttttgctgttgggggcctttttcggcactttcactgattgtgagacggtcatcggcatttgcttgtcccctcccctttttcttctcagtttctatcggttgcgcgtctctcaaatccgtcggttcgatcaaaggaatgtccgcgtcgattacggtgccgtgccgtgtaatttgccgttgttttattccacttgggccattagtagcagaaaaagaagacgaagcgggcacaattagtgccagcggggacaaatttgattttgaatcctttgaactggtttttggacggtggtaaaagcggaggaattgcttcattgtttgacggaaaatgggaggaattggccatgacgacgtggccaaaggga

SEQ ID NO: 1676 - DNA, 3496 bp, Heterodera glycines
gcattatttaattcatttttttcctttcattcatcaaagtcaacagagtgtcatgaacctttccagtggccaagtccgatatgattaagtaaattttttattttaaattaaaatttttatatttgatatatattttttaatttgagaaaaagagctggacaattttttgcgatttaatccatattgaaaaatgcaagcagaaaatagaaattagaataatatttatatctttttttcaataggaaacgaaaattcaaaaaatttatggaaatttcagtttttgtagaattggatatatcatttattttggttttttaaagcatacattttgtgtggcgccataaaaattcgtacaattggcaaacgaatatttttttaaacaatttttaaataattttttagaataaaataaattttcaaataatttttttctaatttttagtttttcttttttaaaaaattttttttcaaaatttcaaatgtaaattttcaacattttttatatttttaaattttcttataaaaatatttttataaatttaaaaataactaatggtcattcacctttttttaatttgaaaaatgctcaaaaattgaaaaaatccttttttcaacttccaattctacaaaatgcacacaaacaataccgtattttgtattattatgatgtaccgtaatagcattaaatgaataaacaacatgtcttatcaattaaaatattcgaattaaaaataaactaatttataataatttaatgaaaattgaaaaataatatttatttttaaagaaatgcattaaaatgattaattatcccataaaaatttttcttctccttaattattttcaaattttaatcaaaaaattttaaccaaattttttataaaaaattgcaaaaaattcgcatgatcacttccgtccgtcgtctctccgttctcggacaaaatttccgccgattttcattgctctccgatcgatctgagaagaatttaatttaaaaaaagtgatcggacggccgttgttctgtgcagtcaaattgcgataattaccattttaattgattgtcgggacttgcgatttgatggtgaaaaataatttaatttaggaaaaaaaataatttgtttcaaaaaatgtgatgacgaaacaaataatttattatttttggaaaattgaccacaaaattgcaaaaaaattgtcattttttgacgtaaaactgctacaaatgcctgcttttctccctccgatgctgaaaattttgaaaaataacaatcagaaaaaaattttgggcctaagagcaaaaaaaaaaaatttctcaccgaaaattttttctacggcctgaattctggataaaagaaaatcaaaaaaaaaattttcaaattaataagttaagcaaacaatatattaatttattttctaatttacataccaattgatacattcattatgcatgagaaattgaataaaattattgggaaaaaaattctgactgaaaaatttcctatcagtgatcacttttgatcagtttaaatcattcaattaattaagctaaaattattgcaactttttttgcgataaaatataatcgaataacaaatttttgaccaattgtcggaaagtttaaatttttattgcatttgataaagattttattctttgattgaatagcgtccttgaaaaatggcctccaaaatcaacgaacatcataaattattcccttagaaaagtgtcaaagattgaaaaaaggaaaatgaaaagcaaaatttaaaaacaattaaaattttattaatttaaaatcttttatttttttcggtaataattaaaattattatttaattttgacaaattatatgattaaaaaaaattaaaataagaaaaaatattaatttaattagataaggatggaagatggaaaaaaaagaaaatgaatgcaaaattaaaatacatataataaaataattaaaattcttttgttttcaataatttttaattaaaaaataattttcatttagacaaaattatatttgagaaaaaatatatatatgaaaagtaaatttcaaatattgtaaattcttttttttttcttttttaatttaagctacttaaaaatttcttttttaaaaaatttttctttttttttaatttgaagcatagactttacacaagaaattcttgaaattttttaaatttctgcgcgcaagtttgcattttaaatacctttaaataatcttaagtacctaaattgaaaaatgaaattccaatttgtttaattgcattttgaagcataaaaattttgctttcatgttaaatagatggggataattagcatcaaattgtattttatataaataattaacataaaattatatatcatatgaattattattataaaattgtatattatatgaatattaaaataaaaccatattttatatcaatgatttcgctatttttcactttcaaaactaaaaattatcaacttttttcgcaactttgaacacataaaattcaaattagctaatttccccccaccttaaaaaaaaattgaatttcgcaacttttaattggaattcagtgtttgctttttttaaaaattgaatttcgcaacttttaattggaattcagtgtttgctttttttaaaaattgaatttcgcaacttttaattggaattcagtgtttgctttttttaaaaattgaatttcgcaacttttaattggaattcagtgtttgctttttttaaaaattgaatttcgcaacttttaaaatttaaatttgcttttttcccatttttttcgtttaattgtgtaactttcacattccgtcctccaaccaattcattcattctgctgaaccgctgattctactaaccacattaacacatcaacattatcagtgattggttggaattgtgcaaataaatggctgatttttgctctttcaacgaaacgaaatgcccaaattagggaaaaagtaatggaattttaactgccatcaatttaaaatgttgcgaatttcgaaatttaaaataattctaccaaattcgaagtttgaaatgcgtaatgaagtagtctttttaaatgttttgttggaatttgaaaaaatgttctaaaattttcaagtttcgtcaatgcccaattgatttgtgaaaaatttaaaggaaacaaaaaatatatttaatatatttttgtataaaattattaattaatataaattgtattattacattaaaaatttatcgaatataatttcggagtctaaacatttttttaaaaatagttattaattaataaactatttttaaattaataaaaaaaatattaaataaaattgtcggacataatcctcatcatctccaattgtagaagctttatatgatgctacgcataatgcaaaaccaacagattgataaatgacgcaataaaaaattcttatacaaaaaatgaaaatttttaatgtaaaaataaaaataaataaataaataaatccgcaaaaaatcaaaaa

SEQ ID NO: 1677 - DNA, 1401 bp, Heterodera glycines
tttcaggccacgggaagctcaggaaaaaataggcttttgcctaaaaatattagccctaattattagcatagttggaaattatcaattttttggacaaaaattcttagaaaagtgtgaataagcaaaaaatgccataaaatcacctaattaggcttaggataacatcctacatttaaaataaaatttgattttaatatttctgattgttgtggtaagctaagaggtccacgattattatctaaatttaaatttttggatttggaattttcaatattcaataaaaaattctgtcattagttaagcctgtggctgggactcaaacctgcccggggactcagttgaccgagctcaattggtgggttcgtgaaatttgcaaaaaaatcggtgtggcggtagaggcacagattaatttactgccaattctgtgctgcccccccccccctccctcccccctgctggtgttgggaggtgcgcaactcattcaagcggcggaacattgggttttgttggacacgcccccaatttgtccggtgatcggtcggggagtgaaaagtgtccccaccatccatccaccatccccccgggggacgtacgggacgaccttgacgagacgcggccggcgatataagacgctgttcctgcgcaccccggggggtcattattcatcattcagcagcagtttgtgggaacagctaattgactgacttcacgcaactctcattcatttgggcaccaaaaaaatttttttggtaatttttctttggaaagtttcattttgaacaagcccatttttttgtaaaaaaaaaaaattggtttgtgaacaggtagtaagttggtttaagcctcattttttttgggggaggggggtcaaatttaaatctgtctgatcactgttcaaagcgaccaaaacgaagcattttttgtagcctaaatttgatgaaaaagtgttgatcagtgatgtttaagcctaatttcttgggacaaaatttatggctgatcagtgagtgatcagagcgattaaaagaagaatttttttagaacgatggagcgattagtagccctttcttagtcaaaaaagtgtgtgttttcactgatcagaatgcagaattaaatcatctgatcaaattacgcttgatcagtgatcagaccgtttatggcatctttttttaaataaatctcaaataaataaaatttatacaaattaatcaggcaaaacgatttgccatgcattttgtataattttttcaaaatttaacagagtcaaatttcaattttctaaaatttcagccaaattccattgaatttcattcaaagcgaatctctctctctctgttttgttcaacaatgtcttcttcacaagttttacaattcgcagcagcacagcacaggttgctgtccaca

SEQ ID NO: 1678 - DNA, 9531 bp, Heterodera glycines
  unsure (1)..(9531): unsure at all n locations
ttcatatatatatatatatatatatcttttcatatatatctatagatatatatgtatatatagatatagaatttattaagattagagtagagtggatcgttgatgatacattttatgtcttaaaatttttcacaaaaaattataatataatttaataaagatatattggtgggaaatctttatgcatgcgatttgactaggcacccatctatggacggatccgggtattggattttcaaataatattccccgggctcttgaacataataaaacgggtatctcgctctgtgtgcgaggcgcgcacctgccttacattggagatcattttatatgggacacaacttacatatgttcttgtcattttatttcatgaagacattgtaattgctaatcttgatgatcgacacatgttgtgtgctcaccgtaaatggcaagccaaccccattgggcacaaatgatggtggtaaggaagaaatgggataattaatgaaattataaaataatattggcaaatatcgctcaatttaataatttcaaaacaaattttcaattttttgtatatattaattaatcaaataattaggcaatttggagcattaaaacacaatgattcatcagagtttctgtttcctaaggagataatgggtaatttatattgtacaaggacataacggaaaaatttaagaaattcaaggaaaatctaataactttttttcaatatttccataaacaaattcatttttttacatcagtttttcgattttcaaggacgtccttaatccaaggacagcgggagaaagccctggacacaaaacttaaaaaaaaaataaattcattttagttaaaatttcattttttttagtatgggtatcgcacagtgggccaaccaacgcattgtggggccatgaaaaattggtgcccgaggaggaagtgtggcacgagaaaaacgacgagtaaaaaaaagatccaaattttacaaaattttaaaatattttatatgttttacagtcttcttactatccgtcatcataccgttatggttatgggtacggctacaacaactacggtagcagttacagtggctacagtggcggatatgcgccggatgtgtaccagcaaaactggatcaccagtgagcacaatcgctacagacgaatggtgggttcgatgtgataatttatttaaatgtttttaaattaatataaaaaaggtactaaaaaattttcaatttaaataattaaattttttttttaattttaataaaataaatttttttcactttaattataaaacgaaaaagttgaaagcatttttaaatcaattaattgattgtcttaatattttgggaaaaagcattattattttaaatttattttaattaattctagaaaaaaattttaattttaattaaaattttaatttttttttaaatttatttcttatattaattgaaactaatttagcctttgatcttttcttgggtttctataaatttagaacttttaaaacccaaaaaagttttttctccccaaattttacgcctttttctttgtcactccgcgcaattttcgcgcccaattagtgttcccaatttgtgcaattcatcaaataaatcaccgccccgctgtgacgtgaacacaatttcacgcattttgtgctctgatctttcccctcagtgttaatacaaatttatatttttcacgtgtcaaatttttgcaaaatttgtcacaaaataacaaaaaaaaagaaagaaagaaaaccagggaatttaaaattgaaatttagaaaataaatataactttttttttgtttaataaatacaataatttaaaaaattcaattaaaaaaaaaccaaaatatgttttattaatattaaaaaaaattaaattaatttaacagtgccattttcacaattttcattaattctttttttttaaattaataaaattaattaattgttagcaaaactttaaaatttaaaattttttattataaattatgaaataaaatttaataaatcaaacatatttatattaatttaaaattgatgttttcactgcttacaataagttttttcttggaaaacaaaataaaataaattatttgaataataattatgagcaaaattttatgacaaaaaaaattattaaataaaaaatttaaatgaaaataaattttaatcaggttccagcaacggacatgagaatggtgtattggaatcagcagttggccgcaagtgcgcaagcacatgccaacacctgcgattttcggtgactaattaaaagcaattaaaaagaaattaaaatttggtaaattattatttttagacactctcgaaaccgggcaaacatggcgaaaatatttggtgagtgaaacagaaagactaatttttgcggaaacttttaattaaaattttccatttttatagggccgctccctactacaattacacggacgcaattggacgatggtataatgaggtaaaaaccaaagcatattaattatgctaattaattaatttataaaatttggaaaaataaaaaatttattccaacggaaaatgttgttttatatttttacgaaatgccaaaacaggactaaaattggtaaggaagttcgaacctggcaaaaaggaagtctttttctaaacaaaatcattacaagaaataaaaataaaaacatcaaaaaatttatttttattttaataaattaaaaataaaaatgcatctagaatttcgtaggtgaaaatttatttttaatatttacgacatgccaaaatagacaaaaaaagggtataaaagttcgaacaaaaaatgaaaaaataaaaatcccaaaatgaaaaacaaatgcctgcctatttttcaggtgaacgacccgtggtgtggttgtggcaccgggtacaagcactgctgtggacattacactcaggtcaataaaattaaaatttaaaatgccataattaaatggaattaaataattaattggattcggaattatgtggaaatccaactattcttaaactgaggcctgaaaaccacgaatgatttcttcaaaaaataactgcattcctcgattaaagcggcccttttgagctctaaggatcggaataaatttaaaaaaaaaactttttttggggggattttatcttaaatattataagaaatataactttctaaaaaatttgaaatatatgccaaaaataatcaaaaaatgaaaattttcgaattttaactcaatattcatgaaaattaataaattttagctttattttgtattaatagatggtatgggccgagacaaatctgatcggctgtggatatgcgcaatgtaacggtgtgacgggcgtcggcggttatgcgaaagctgtgtaatgatggattttgaatttttattattttaaatatattttaattaaatagtatggtaaaaataatattgggcaaataattaattataaaaattgaaaaaaatgattatacaagaattaatagataaatgaattggctaggcaaaaataaatgaatatntaattgaaaacaaaattaaatttcattagaaagttatataattaatcgaattttaattagttttatgaaaaacattattttttaaagagatgaattaataaaatattttaaataaaatttactaaaaataatttaattactatgaataatttaaataagaaagtttcaaaaatttaataaaaatgtattaattgcttaaatgaatgtcttaaaatcaaattataaaattctaatttttatcttttcagatttgtctgccattacaacccccaaggcaacaaagtaatgtattacttcaatggaggggattatgcggtcagtagctatgctttttttgcaatttttaaaattttttttgaattttttgtaacccaattttttcaataggaattttttttttgctttattaattcgcatgagttgcttacaacacaatagtgtgaaatgaagtgcgcttttatactaataaataattttaaaaatattattaattattattaaatttaattggcacaaaaagtttaaatcttaattggcttccttttttaaaaagccattgaattgaaataattattaaaaattaaacaaaaagaccatttatttgatttaaatttattattgctgactgtttggcttttccttgctttttctttcgcttttatgtgtcataatttttctccctttattttgtaatttttaacaattaactaatgaggggcttaggtttttcagttcagtctggacctggctccaggccttgatattcctggacctggattttcctagttttttgtccggaaatccaggccgggtaaatatgaaataaaatccatatcccccaagcctgtatttggaacgaaaaacctggacttcctggacatcattttagatttgttgatacaatagtctatgaatagttgtcaattcatcaaaaaagattattacattaaaatatattttaattatattctattcgataattttaaattttccgagcaattaaatgattttttggaatttttggttgctttttaaaacacattccaaaaaaatgcgcttgacagcctgggtttttccaggatttggattttccagatttttgtccacaaaattcaggtccaaccaagtccaacagggaatccaggtccacgtccagacttttttttaaatacccagctctaattaacataattaattaactaattaattacccccccccccccccaccggtccatccctcgggtgattgtgtcgtgatgtgaaatgccaatgtttcattgttgtatcttccagttacagatgcccgccttcacctgggcacgctctgagtccgaccgatgctcccaatgtccgtccgatcagccaagctggtaccaaggcctatgctacatgccattgaactacaggtgggactttttcgaaaaaataattttctaaatttattaaaataattttttatgataactcgttaaaaaaaatgctggaaaaccttgtcgacatttttgcactttttacgaccatttgtccaatattttttttttaatgagaccatttgtcacacaacatatagtagttatattatcgacattttgtcgctttttcggcccttgcttttttttaaatgagacaattcgtaaacagcaatttgtgatttagtgtcgacattttgtcatttttcgagcatttaatatatttttacagacattttgtcactatttaggcgatttgtccaaataaatatattaatttttcccccattttcagaggataaagaaagggttgttatgctgtttgatgtgtgttgagctgcagcatgttcagtcaactgaatgcgtttatggttgacgaaactttgaccctctcaggacccaactctttatcaacacgacaataaaaacacgatcttgcgccaatttaaatcattttttttaatgcaatggattttttaatttaaaatgaaattttaaagatttaaaaaaacgaaaaaaaattcattgcatttctttggcacatttattagacatggacaaaaagcatagatttttaattgaaaaatttaaaaatttgaatgaattttaaccaaaacccatagctttttggcacatttattagccatggacaaaaatgtgccgtgccgtttattatccgtcaattaaaaatccaattaattaattaataatttaattttttatttctctaaattattttggacgacaaaaacaaacaaataataatatttcaccaattttctcttttctcatttgtgcccagagaaatattttgttgttttgtttattttcctgctcatgccatcaaattcctcaatgttgtttgtgcttaatttaaattcaaatattgacaaaaagtggcattttaatttaatttgattttttttttaatttaaaaattgttcctcataaattgtgtttggggaaatggccaaatttaatttcatttaaaatttcaagtaaaaccaaaatatctgaaagatatgtagtttttaggaccctaaaaatccaaattataaaatctaaaattgaaaaaaatggttatgggccaaactccgtctgagagaacaactcttcgtcaatttaacttttgaaatttctgacaaaacccatcaaacattgggatataaaattcgaagctctttacaggtactaataatgtaaaattttaataaagcctgtcaaactttaaataaaaaaattgcaatttttatttctgttttttttagtgttttcaggcaataatttctttgtgagagttgcttaattgacttacaaattagcactagatgttagaaatagaaaatttgatcaactaaggaaaaatttatgaattttttaacttggatgagacggagttagttgccaacatcagcagggatgagccaaagatcccgtgggattttctcagagtcgcgcgagattaaatctgagactctaccttaaaatccgtttagatcggtttttcaaaattttcgggattgatcgtgatccctccgacacattatgccaatgttttatctgttttgaaaaattctttcacatttgtgattattttttttttaccaaaaaacacatccaaattcattcaaccgagaaaatttcagattaaataaaaaacaatttatggtaaacactatgcccaatattctaggtatttaaaaactttgtcactttttaatcaaaaactcaaaaaaatccttcaaatttattccaacggagaaaattttcaatttttacaaaaaaaaacagccataatttatccccctcataaataaaatataaacataacacatgactaaacaccatctctatcgttttctttctactatatctcaacgacatgcaaataaattctcaatgctcctccgccatttgacgactaatttcggcacgcttaaaaaaggcaccaattaattaatttttaatggcataatttataaataaataaattcataacttttaatgtcataattaattaattaatttttaatggtataattaataaattaaatggcattcttttaattacataacgttcctgggtctgtagcgtttgtggaaggtgcggcttattttcatcgctgagatttttctgaaaaaaataaaataaaaaatttcccataaaaaaacagcagacctccgtaattttaagtgctggaagattttcttggatgtaatggaggtcttgaatggcttcgaattctttactgcttaactgatgcactaactaaatacacaaaatagaaattttggaactctattacaacttaatgagtgcaattaacttaatgagtccaatcaaaaattcgaagagtccgaccaaaattttaagggtccaaatcaaattttaagagtccgtaaaattttaagggtccaaatcaaattttaagagtccgtaaaattttaagggtccaaatcaaattttaagagtccgtaaaattttaagggtccaaatcaaattttaagagtccgtaaaattttaagggtccaaatcaaaattttaataattcggcctaaaaatttaagagtccgatcaaattttattttttagtgcatttttttcaaaattttcataaaaagggctggaagagaagatattctgacatacagtgctaatagagtactgtgattacagtaatacttggcacaattattattattatttttttaaaatcttatttacaatgcttttgcttcgtctgtgcaaagtccgtttccttttttcaacagaatcagatcccacccattttacgtcagcagctttttcaccggtgcccattagatcagcactttttggggatgagcactgttggtttttgtcgaaaatctttaaataaaataaaaatatttttaaaaattacatatttaaactggtaattagggctggtaataaatattagatgtgatgccagaaggaacggagtgtgggagaaagtgggataaaggacctgagagaacctctaaaagaggcgcccgtagctcagttggttagagcacggcacggattgctggggtcgtgggttcgagtcccaccgggcgagttaccttttatgttctacatagatgcacataaaaatcaagctttttgaaaaattttcggtctttagagttgccgctttaatagaggattttttgaaaaaatgccaaaaaattcactaaaatatgcatttaaaacgcgaaatttacgatttacctaagttaggcgctcacggtttggctccagcatgtttttttcgctataactttctataacttttttcattgtcatccaaatccaacatagttggtatcatttgaaagcttatcatgtttaaaaatttttctaaaatattgcttcgtgatttgacaattaccaaaaaagttatattcgaaaattacaaaaaaaaatcaaaaattttgaaattttttcttaaaaactttttatatgcaaggaattttttgttttgtttttttgtaagccctgatagagcatatgaagagctttcgaatgataccaagattgttggatttggttgacaaataaaaaagttatagtggaaaagcatggtggcgccgcccaaccgtgcgcgcccaactgcgcgatttcggaaatttatgcataatgaatgaatttaataattaaaaaatcatttagggccctgattcatatttcttaaaactttttttttttgcaaatattttatcacatgaaaagctcaaaaatagcttctttttttaccaatttcttttcaatcagaacgagtttttgcataaaaaacatttcggaatttggctgataaatttttttttttgcgatttttagtaaatatttttggtgttttttttgcaaaaataaatgttttgaaaattcaataaccatagcttgaataaatcttataaaatttaaaaataaattcaaataaatttttaatacttcttttccagacggttgacggattattatcggcgggagctttctttccttaattatatttaattgaaatgaattaaaaaagttttaaattaaattatttacttcttcaatttttgtcccattttccatcgcgttaatggctgtgaacattaaaaaagctgacaacacaataataattttgttcattttttaagaatcaagcaattaattaatctaaattttttaaatgcgttttaatttaaataacaatttttaaattaaataaataaattttactataaaatctttacatataagattataaaataaacatttggattgtctaatctaaaaaaataaagcaattaattaattatcgaagtattttaaaaattttcattanaaaaaattttacaatttanatataaataaattttttatcaaaattgtataaaattataaaaaatgaagcanatttttgcgtttgatatgtttaagtaagataaaaaaattaataaattgatttcctatacaattcatatgcatttcattcataatatgtatgcataaaatatatttttttataaatcggaatttaaaa

SEQ ID NO: 1679 - DNA, 2006 bp, Heterodera glycines
  unsure (1)..(2006): unsure at all n locations
ggatggggtggggtggaaganttgancaatggaggggccggaaaggaaaattcagggatgntgggaagggattttgcgtgccagggagtgccatttgtgtaaattgtcaattctcgactgcgggatggggtggggtggaagatttgaacaaaatttgtgggcatgctgtaataaccaattacagacggcaccaatattgccgtatataaagcgccaccaaatcattcaccatatcactccatccagccaatctctccaacaaatcttccactccgcccaccatgaacatttacatagtctcttccatttcgtaggcctaatcaaatttattttttaaatttattaaattatttcaaattttattcccccaattaaaaatatttcatgttttaattctcaaattaattagttatttcaaattttatttcccaaatcagtagtaatatgtatgtagtatatggacaaaaattatttttaaattttatttcccaatttaaattcctttttaaattaatttaaataatttcaaatttattttcaaaaattaattaattatattgttttaaacttatttattaaattattttcagatttttttcaaaatacttttgtcaaatatattttttcagaaatcaaaaatttattatccataattttttcaaaaattttctttcagattttcataaactataattttccaaaataattttgcaaattaatttaaataatttttcaaatttattttcaaaaattaattaattatattgttttaacttatttattaaaatattttcagaattatttcaaaatactttttcaaaatttttattctaaatttgtcaaatatatttttccgaaatccttgcagtaattttctttcagaaaattttttcagagattttcaaaaaatataatttttcaaaataatttttcaaaaagtattatttcataaaaaattttcaaaaatttttttcagaaatcttcagaaatttagtttatccataattttttcaaaattttttcagaacttttgcagaattttatttcatattttttcagaaatcttcagaaactatttcataaattttttgaaatttttttcagaaatcttcagaaatttagtttatccataattttttcaaaaaaattttttcagaacttttgcagaattttatttcatattttttcagaaatcttcagatactatttcataaattttttgaaattttttcagaaaatttatccataattttttcaaaaaaatttttcagaacttttgcagaattttatttcataatttttcagaaatcttcagaaactttatttcataaattttttgaaattttttcagaaaatttatccgtaatttttctaaaaatttttttcagatttttttttgcagaaattttatttcataaaatttttcagaaatccagaaattttatttcctaaattttttcgaacttttttcagaaattataatttttccaaaattaaaaaaatgtcttcaactagtcccaagcgtccaaacttccttaatgagaagtgtcgtcaccccagatgcatttcctccaatgaacgggaagggcgcggcaatgagctgactccgcgcgcatttttcggctgcgtttggttttcctcctaaaaattgggcaaaaattacaaatgaatcagaaaaactcaaaacattaattgaaactgctaatgactgactgtttgttgcacttcgaatcggcgacggaggcgccgattttctcgtcgcaatttgccaatttcgccgattaatgtgcacagagtgtctaacaaattgcatgacgtgttattgtactaattaattagtgccaatggtccagtcaatcagtttcctcccctaattaccgagcattgtcggggcttcgctcgtcgcttcgccgccgtcgcgcgacttttgcccttcggcgtatgaactcgtcggcgtccctggggagtaataaagtgccttcccctttccctctcttcccatttcc

SEQ ID NO: 1680 - DNA, 2909 bp, Heterodera glycines
tcgcgtggcgacatttctcattcagaaagcgtggacgtgttggttcatcatcggttgcctttcgcttcatcccaaaatattggcgcgccgcttcccgttcattggaggaaatgcagctggggtgacgacacttctcattaaggatcgcttgaaggcattttttcagttagatttttggaaaatgtgccttataaaataaaaggaaaaacgaaatgcggcgcgaggtttgcattgtgaaaataaaattgacgacttaaatttttaaaactaaaagattgtacaaattttttaccagtttttctttagctacgaatcgaagcaaattgaacggatcgaaatgctaccacagtctattaccgaaatgatttttgataaagttggcaaagatggatcatcaaaaatagacaaagatggattgcaaactattctttcaaacggcacaggccgtgcttttaatccggacacgtgtaggcttctcattgccctgtttgacttcaaccgcaacggcgtgattgatcggaatgaatttggtccgctttggaaggtaggttattcttatagtttttacctttggcttatcgtgtagcttactgctaacacatttctttatctgttcattttagtacgttgaggaatggaaggcctcttttaaaaaaatagcaggcgataatgagctgtcaattggcgttgaacgacttgaaattgctctaagggaatacggtaggtatttgtcaccgatattattatttcagatgttagtttataggctaccgattttctgccgacgtttattgtgaattgttgcgcaagtatgatcgcacaatttcaggtaaaagaccagagctgctgtttttaaaataatcttgtatttaaattaagctcggttgcactttgacgattttatacatctttgtattgtactgcagcaattgactacaccctttcgtgatcgggactttggccaaaaaggacggattagtgttggtaagtattattcatcaaaaaataatttttctaattttttctttaaggttttggagactacatcgctatgtttttatccacaatattataagatttttgcatttgatattaaaatttgctcccatctgtatttttattgttcattggcgtgacattacgcatcattctttactctcggttcagctgtcgctataatcgactttgagctcattttcagcatcccagtccgcttttccctgtcgctattctttccactcagtgtacgaagatgaacagaaacaacctgaaacgattccaaatcaagcctctttcggcagagtccaaaggctccgaggagcagccaacttcacgcacgaaaacgcttagcgaagtcaaggagttcgactcggctggcactttttttctgcgtgcaaagcttgtaagcgtgttgttttgcatttacaaggtgagatggacaataaatccctgcgaatatactcttacatcattatgcttcgaatttagtcctgcccaatgagaagtaagggtattccatgtcgtaagaaactcgacagtgaagacttttgtgtttcgtgcgtccaccgtgcgaaaaagcccagccgcaatttgtacctccgtgttgtactccaagattgtgatgacgaggaatgcgagcaggaaacaacagcattttcctatgcagccatcaactttttgagcattgccagcgtggaagctttttacaacctgtcagagaacgcacctaataagttggaatcgattttgcagtcaaaaatagatcaacccgtgctcgtcaaagtcaacatcaaggtgggttcattttttttttgctatgtgtttatcccaccttagctagtccattgtgttccatgcaaaaattatgtcagctaaaagaggcatattttaaggaaaataatgatacggcgaagcttgactggattatttcctccatatctgtggaaaaaccggtgtcggtgaagcttttggatgacaaaaacaacgatgatggagttgaggaagaggcatcttcaagcgagccgcctaagaagcgaaccaaaaacaatcaagtcgagcgtgctattgatgaagatgctgacgacatccatacgattgaatgacgagtgcttgcagatgtcaccaaagtggccagagaaaaaactgaatggattgctgagctcagcaataattgattggaaacataataaaaaaatttttaaacagaaaacgtccaatttatacgttaatgtagattttttaaatactggttaatatgtagagaatcttaaaaatttttgagggaaatcacgttaaggaaatcttgttttccgcccatatacatatatgtatccccgttcaatcggtgtacctatggatggttatacattatttatacataaatataggtcccatacagacacaaaaaattatcagactgttggagtgctaaacaattgttgcatcaatgaagaggactgcatctgttactgcatcaaaggagatggaaagttgtaaaaaggaagagtcgattgggactggatgccgcaaaggggtgaaacgacgatacccttatccgttgctgtcagctcgatctcaggatgcctggtaagtttgcagacccaaaaaaaaaatcacgtgacaataactcaggtctgcaaaacttgatcagttggaggagaaatattcaaaaatgcaagaagaactttcggaagacagcgatgatgcaattaatttcttcgaagatagcattgaggatattgtggaaaagtgagtaaacctttcaacactttaaatactgcttttattttaaggataaattgttctgaagctaaaataaaaaagtgggcagcacagcgagtcaatgtggcagacgccaaaacacggttggttgcgtagaatcagaaagcaccacatattattcagctgaa

SEQ ID NO: 1681 - DNA, 5149 bp, Heterodera glycines
cgctggcgaaaattgcgatgatgccaatgatggtgctccaacatcgactacttatctgaatttgcgcagtggcgagcagaccaaaaaaaagtttaaaaatgttcaccactgatatagtttatactacactatgataatcattatcttgttaataaaaaaataaaaaacttcgatatatatatataaaccggttgttttccgagtattattactctaatcatattatcaaaaaacatttccgatatcttgtaattgatattcagtgacatgtcatccaatagaaaaagaacagcagcggaaaacaattgcaagcaaagcaagcctaaacagccaaaatgggatttccgctcaatggtgtacttcgaacagtacccaactgaaccacaattggaagaggagactacccagcaacaacaatcatcatcagaagcgacaaatcaaactggaatgggcgatcgatcatcggattccgatggtggacagcaacagctaccgttgtacaaagaaatcaccaatcattcacataccatcgagcggttctctgtgcagcgccatgtcacggaatttgtgctcaacgcccagcatgagcaacctgatgaagcactacgtcaagccttcgatgaactcatcgccagagctatacaaaatgcggaaaaaggaagtgggcgcactgtttcaaaattgggcataatggtaaccggaaaaggcttaaacgatccggtagttcttcctatacggtctcctctgcaaaacaatgtcgacgttgtgatggccgagcttgacaagctgggtcagagcgagggcgacgaaggaggggctaacaaaaaaacgttactactaagcgagccagtggagatcgtcgtcacatgcttgactcctccggcagggtccgccccacgcttgcacaaataccaaaattggggatacgacgaagcgcaaagaatacgtatacacaacgtggacaactactgcttatttcatgcacttgctgcaggccgggcatatcacgaccacgatattttttgttccaatcccaattcgacaaattctccatttttttcaaacataaagaaaagaagggatttttgcaaaaactacgaagcgttcaatcgcctggtatcaaacaatgaacgaatgcgaactgtagctgaagagttgatgaatgcatctggcatccagattggtcaaacttcttatggaattgaacatctacagcatgttcaacaatactgggtaagtgttatacgattttagtcataaattgctgaaaatatgtttcaggataatgtttttcctgggacgtatcgcattgtgttgtttgaagaccggccagaagagctacctcggcctatatggaaaggagcgggaggacatcgttttaacgtcacgctttttctgtccgacaatcattatgatgcgatcaaaaaaattcattgcttcttcaaacttggtcggaaatattgcgtagactgcgagtgtacgtacactcttgacgctaaacatacatttcattgtaagagcagatgtccgcaatgtgctaaaggttttaaaatttgttaaaattttgctatactgaaatttttcagttgggccagaacaaccatgctcaaaacagcaaggcatccaaattttgtgcccggaatgtaaccgatactttttttcacaaacgtgttatgaaaaccaccgtgggtcaacatgcagagtgattaaacgttgttctctctgtaatcgtactcattggtcagataccggcgagatacacaaatgctatacaagctattgcaaacgatgcaaggtagaatattctatttgaaaaatagaaacacgcgcatcatttcaggtttatcacgcggaaaagacgagttgtttcatcaaaaggatccagataccaaaagaaaaacagcgctatcgtatcatcgtctgggatactgaaacacgacttgaacaacttgaggacgaatgccagcgtatacatcgggtcaattttctttcggcacgtattacgtgcaccgattgctgtgaatcgtcagagtcaaacaatgactgtgaaatttgctgtcaaaacaatagagtgctggagcgagaaaaagaatggtgggatgtgattgagaaaataaacttaaattcagataataggagtgaagcctatggcaatgagcagcctgttgcagcgtttgttgagtggattctgagagcgtggaacaaaaaattcaaaacatacatatgggtaagcgattcatgaacaaatttgtcttacaataaaatttataggctcacaacgcatcgagatttgacgggcattttgctctcaaccatctttgcaaaaccgcaagacgccctgatgtcgtgatgaacggactaaaaattttcgaatttcgcgtccaatatagccgaaagcattcaatgctcatatggcgtgactcctgtctgattatgccgattgcgctcgctgaattaaagaagactttcaatcttgactgcgaggacaagccgttcttcccttatgcatttaacagaagggagaactacaccataagactggaaaatcttccggacgaaagcgagtatgagcccggcacgatgaaggctgacaagtacgaaaagtttaaaaaatggtacaacgacaacaaagagacgccattcttcttgcccgatgagctaagggcatactgtctgaatgacaccgaaattctgctcaaagctttggttaaattccgccagattttgatgaatgaaattacggacggatttgacgtgctgccaattagctgtaccatagcgaggtttaaaacataaattgctcttttatcattttcattttacagcgcttgcatgaacatcttcaaggttcaattcatgcaagaggatcaaattgcaatggtccccgagctgggctatgaacgaaacgacagagccagcgtcatcgcaatcaaatatttagactggcgggcaaaaagtgaaggcattgaaatccagcatgcgggcaatggacgcgaaaaacgatggaaacaattcaaacttgatggatggattgagagacaacaacggtgcatcgaagtgttaggatgttattggcatggatgtgagaaatgtttcaaacctaatgaggagctcgtcgatggaaaaacgtgtcgtgagctgaatgaaacaacacatgaccgtcttcgccaacttcgcgagcctgacgataatgggatctgtttacaagttgaagaagtctgggaatgtgaaataaatgaccagctaaagaaaaacgacgagatgaaagagttttttgatgacttggggaatgaacgtggacctcttgaccctcgacttgcatattgcggcggacgaactggcccattgcgactatttgctgaaccagcagaggatgagaagatatccgtcttcgacattgtctcactatatccatgggtcaactatgacaccgattatcccgttggcgttcctaccgttgttcatcctagcgcagaggagatgattgtcaattggacaaaacctgagcatttaagctaccgaggtctttaccgtgttcgcgtcatccctcctcgtggactacaaataccagtacttccgatgaagattgacgaaagattgctattcagctgctgtcatcgatgtgcagctttgttccgtaaaagtttgacacggtgttcacacaagtgcaaccacacagatcagcagagggccttcactggcaacttcactcacattgaactcgaaaaagcgttagagatgggttatattgtcgaccgattttggagggcctggcattacacagaatggagtgatcagattttcaaaggatatgtgcggcaatttatcaggctcaaggtagtataattaaaaaaaatttgtatccaacttttttttcataggtggaatcaagcggctttccggaggggatcgaaacattggaacaaaaacaggagtacattgatgaatatcgacgaatttatggagttgacttggattttgggcatatcaaaaaaaatccaggactccgattcatcgccaaattgatgctcaacagcctatggtttgttcaattaagcgctcttgttagtctgtatgattcttttttcaggggaaaattcagcatgaggaatcagtttgggtcgaataaagtgatgacgagaccacaggagttttacgatctcgttttcgaccacaaaacggtattgagttttgggtatgagaataattttttcttttaaggaaatctcttcaataataccaatctctgacgcagctattcgtgtgatgtataagccaaagaaaaacttcataaccgagcatacatccagcaacattgtgctcagcttgtggacgaccagtcgagctagactgaaattgtttgactacatgcaacaatgctacaacacacctggcgccgagttgctgtacactgacacagacagtgtaattgtgcggcacaagcgcgaccttgttccggtacagacgggcgaatttttgggccagatgagcgaggaatacgcggattacgacatcttgacttttgcatgtggtggagcaaagcagtatgcgctgaagatggtccataaacaaacgaaggagataacatatgtgcagaagattcgaggcatcaccttcgacgtcaacaactctcaagcgctacagtttgaacgatttgtgcacaaagtgctcaactatggaaaagaggatgaacagaatgatgccgcagtgttcaactacaaaaaaatccagcctacaaaggacagtcggataattacaaggaagcaaaataaaagatatttgcctgtttgccaaaaaggaattatcactgaaaatctcgatgttttaccttttggatatgaatgaaattttgttgctgcataattttacttgaaaaaaaaacattacattacattgatgatattttcaaaagttcaattgggaaataactttgatgaccgttgccaccaatgtttacaatacatggaaggttaggaaactttaggcgagcacgatgtcttgcgtataaatgctgctctaccgtgattcctagaagaccacgataggcgtacattcgatttgcaccaaacatggtaaatgattcggggtaaacttgtaaattctttcttaggtgtacagtttcaattttttgatcgcatgagaaatttga

SEQ ID NO: 1682 - DNA, 1862 bp, Heterodera glycines
tagatcaatttcactgatctgactctcatgtctatcagaaatgtacaaacgttctgtcatataatcaaatattggtctgttggcgttcgcaaaaaaacccctgacaattttttgctgatgaccacaataaatgtgcatctcgtccgcctcacggtcctcaaagaacacatagctctttccgttatactcaaaacacgccgtcggtttaattggtcgaatactttgaatagttacaggagaagagagaatcagtttattatagctttgcaaactgattgtccattggctattgttattttttcttaccaaacatgcattatttttgtcatatccaaaaaacagctgatcaccacctgtatctttagaaaaagtccggtaattgttgtcaaaataattaggatgatcaaccgccacttcaagtgtaagcaattcgccttctgcgctggagttaaaacagaaaacggcaaaaaataggagaaaaaatgtactcatggccggtaacaatgaaggcgatttttatgccttttatactcgtaaaagtgtacgaacaaacccctttacaagcaaatctgctatagtacgtgtacgatggagagtgccaatcacctcacaatatgggacgccagagcaacgcgcgactagaaaataaatgcaaaaatgcccacaagtgtctgctgttgacgattgaatttgatgtttattgatttttatgtcactaaaagtgtttaaatacgcgcctaagtctttgttgggcgctttgcctaaactgtcaaaatattcaacccttgatgcattaggaacgaaacaggcaacccaatgctcgccccgtgttcctgacttgtctgtatttatgatcatacaataagggtattttcttctccactttggttgtggaattttatccgatgggaagacgccaataaacttagttctggtagcctgcacgcccttcagaattgttttcagctgaaccgaattcattattatttttctttcatacacttccgtcagtgctcaacacacgatcagcgttaatggaaaggactgaatcgaattcacctaatataagcatttcataaccgtccgcttttataggctgctcaaattggactttgacggtgcaagtgccttgccggatcagctcgaagccaggtgtgtcatccagtgtggatgtcattgggattacaaaaaaggcccatccgctgagaaatcgtgccatcgaaatggacaccgttttgttgtccgaatcgtcaaggccaagccctgcatacatgtccacaaatgcgcgcacaaattttttctgattgccaaacgataacagatagggtgtgcttgggaatgtcaaaccatttgcttcggcactgattgaccgtacgttcgcgtgctcaaaattgaagggtgacagatgccgggcgcccgagtatgcatccgttgacacaaacgcacaaatcagacgacgcggaagggttgaggtgaacacgttgtgtgacagctcagtacgacccatgcctaagaagatggaacgcatctctaccttacgaagcgcatatttggccggcgtgctttccaactgtttactaatcgcaatattaaggcttgaagttacgtctacagtgcgtacgtaaagtcttatatcatgtagacggatacggtattcggctgtgttatcatgccatgtcacacgcgctgctgtaattatattaccttgtgcatctttgaccgcatctgtaacggttttccattttggtgtaagcagaaggaaaggatcgctgttccgatggattgtgaacacaacatcctgattgttcagcaaaagtgatgttttgacgagccaaatcaaagttgagttttacccattgttt

SEQ ID NO: 1683 - DNA, 863 bp, Heterodera glycines
tttatgaccgactatttttatgaggtacaaagagaaccctagcaatcaaaggcagaaggactccgcgtttgacaatgtgtggaatccattgaagagcatggcatagcgtgtgggggttttggagcttcaaatttatgaccgactatttttatgaggtacaaagagaaccctagcaatcaaaggcagaaggactccgcgtttgacaatgtgtggaatccattgaagagcatggcatagcgtgtggggggtttggagcttcaaatttatgaccgactatttttatgaggtacaaagagaaccctatcaatcataggcagaaggactccgcgtttgacaatgtgtggaatccattgaagagcatggcatagcgtgtggggggtttggagcttcaaatttatgaccgactatttttatgaggtacaaagagaaccctagcaatcaaaggcagaaggactccgcgtttgacaatgtgtggaatccattgaagagcatggcatagcgtgtgggggatttggagcttcaaattgatgaccgactatttttatgaggtacaaagagaaccctatcaatcataggcagaaggactccgcgtttgacaatgtgtggaatccattgaagagcatggcatagcgtgtggggggtttggagcttcaaatttatgaccgactatttttatgaggtacaaagagaaccctagcaatcataggcagaaggactccgcgtttgacaatgtgtggaatccattgaagagcatggcatagcgtgtgggggatttggagcttcaaatttatgaccgactatttttatgaggtacaaagagaaccctagcaatcaaaggcagaaggactccgcgtttgacaatg

SEQ ID NO: 1684 - DNA, 1260 bp, Heterodera glycines
tttggagcttcaatttgatgaccgactattttatgaggtacaaagagaaccctagcaatcaagggcagaaggactccgcgtttgacaatgtgtggaatccattgaagagcatggcatagcgtgtgggggatttggagcttcaaatttatgaccgactatttttatgaggtacaaagagaaccctagcaatcaaaggcagaaggactccgcgtttgacaatgtgtggaatccattgaagagcatggcatagcgtgtgggggatttggagcttcaaattgatgaccgactatttttatgaggtacaaagagaaccctagcaatcaaaggcagaaggactccgcgtttgacaatgtgtggaatccattgaagagcatggcatagcgtgtggggggtttggagcttcaaatttatgaccgactatttttatgaggtacaaagagaaccctagcaatcaaaggcagaaggactccgcgtttgacaatgtgtggaatccattgaagagcatggcatagcgtgtggggggtttggagcttcaaatttatgaccgactatttttatgaggtacaaagagaaccctagcaatcaaaggcagaaggactccgcgtttgacaatgtgtggaatccattgaagagcatggcatagcgtgtgggggatttggagcttcaaatttatgaccgactatttttatgaggtacaaagagaaccctagcaatcaaaggcagaaggactccgcgtttgacaatgtgtggaatccattgaagagcatggcatagcgtgtggggggtttggagcttcaaatttatgaccgactatttttatgaggtacaaagagaaccctagcaatcaaaggcagaaggactccgcgtttgacaatgtgtggaatccattgaagagcatggcatagcgtgtgggggatttggagcttcaaattgatgaccgactatttttatgaggtacaaagagaaccctagcaatcaaaggcagaaggactccgcgtttgacaatgtgtggaatccattgaagagcatggcatagcgtgtgggggatttggagcttcaaatttatgaccgactatttttatgaggtacaaagagaaccctagcaatcaaaggcagaaggactccgcgtttgacaatgtgtggaatccattgaagagcatggcatagcgtgtggggggatttggagcttcaaattgatgaccgactattttttatgaggtacaaaggagaaacctatcaatccaagggaagaaggactcc

SEQ ID NO: 1685 - DNA, 1119 bp, Heterodera glycines
aaatttatgaccgactattttttatgaggtacaaagagacccctatcaatcataggcagaaggactccgcgtttgacaatgtgtggaatccattgaagagcatggcatagcgtgtgggggatttggagcttcaaatttatgaccgactatttttatcaggtacaaagagaaccctatcaatcacaggcagaaggactccgcttttgacaatgtgtggaatccattgaagagcatggcatagcgtgtgggggatttggagcttcaaatttatgaccgactatttttatgaggtacaaagagaaccctagcaatcaaaggcagaaggactccgcttttgacaatgtgtggaatccattgaagagcatggcatagcgtgtgggggatttggagtttcaaatttatgaccgactatttttatgaggtacaaagagaaccctagcaatcaaaggcagaaggactccgcttttgacaatgtgtggaatccattgaagagcatggcatagcgtgtgggggatttggagcttcaaatttatgaccgactatttttatgaggtacaaagagaaccctagcaatcaaaggcagaaggactccgcgtttgacaatgtgtggaatccattgaagagcatggcatagcgtgtgggggatttggagcttcaaatttatgaccgactatttttatgaggtacaaagagaaccctagcaatcaaaggcagaaggactccgcgtttgacaatgtgtggaatccattgaagagcatggcatagcgtgtgggggatttggagcttcaaatttatgaccgactatttttatgaggtacaaagagaaccctatcaatcaaaggcagaaggactccgcttttgacaatgtgtggaatccattgaagagcatggcatagcgtgtgggggatttggagtttcaaatttatgaccgactatttttatgaggtacaaagagaaccctagcaatcaaaggcagaaggactccgcttttgacaatgtgtggaatccattgaagagcatggcatagcgtgtgggggatttggagcttcaatttatgaccgactattttatgaggtacaaagagaaccctatcaatcaaaggcagaaggactccgcgtt

SEQ ID NO: 1686 - DNA, 1227 bp, Heterodera glycines
ttttatgaggtcaaaagagacccttagcaatcagagcagaaaggactccgcgtttgacaatgtgtggaatccattgaagagcatggcatagcgtgtgggggatttggagcttcaaatttatgaccgactatttttatgaggtacaaagagaaccctagcaatcaaaggcagaaggactccgcgtttgacaatgtgtggaatccattgaagagcatggcatagcgtgtgggggatttggagcttcaaatttatgaccgactatttttatgaggtacaaagagaaccctagcaatcaaaggcagaaggactccgcgtttgacaatgtgtggaatccattgaagagcatggcatagcgtgtgggggatttggagcttcaaatttatgaccgactatttttatgaggtacaaagagaaccctatcaatcaaaggcagaaggactccgcgtttgacaatgtgtggaatccattgaagagcatggcatagcgtgtgggggatttggagcttcaaatttatgaccgactatttttatgaggtacaaagagaaccctagcaatcaaaggcagaaggactccgcgtttgacaatgtgtggaatccattgaagagcatggcatagcgtgtgggggatttggagcttcaaatttatgaccgactatttttatgaggtacaaagagaaccctagcaatcaaaggcagaaggactccgcgtttgacaatgtgtggaatccattgaagagcatggcatagcgtgtgggggatttggagcttcaaatttatgaccgactatttttatgaggtacaaagagaaccctagcaatcaaaggcagaaggactccgcgtttgacaatgtgtggaatccattgaagagcatggcatagcgtgtgggggatttggagcttcaaatttatgaccgactatttttatgaggtacaaagagaaccctacaatcaaagaaccctatcaatcaaaggcagaaggactccgcgtttgacaatgtgtggaatccattgaagagcatggcatagcgtgtgggggatttggagcttcaaatttatgaacgactatttttatgaggtacaaagagaaccctagcaatcaaaggcagaaggactccgcgtttgacatgtgtggaatccattgaagagcatggcatagcgtgtggggggatttggagcttcaaaattatgaacgactatttttatgaggtacaaagagaaccctatcaatc

SEQ ID NO: 1687 - DNA, 1398 bp, Heterodera glycines
caatcaaaggcagaaggactccgcgtttgacaatgtgtggaatccattgaagagcatggcatagcgtgtgggtgattggagcttcaaatttatgcccgactatttttatgaggtacaaagagaaccctatcaatcataggcagaaggactccgcgtttgacaatgtgtggaatccattgaagagcatggcatagcgtgtgggggatttggagcttcaaatttatgaccgactatttttatgaggtacaaagagaaccctagcaatcaaaggcagaaggactccgcgtttgacaatgtgtggaatccattgaagagcatggcatagcgtgtgggggatttggagcttcaaatttatgaccgactatttttatgaggtacaaagagaaccctatcaatcataggcagaaggactccgcgtttgacaatgtgtggaatccattgaagagcatggcatagcgtgtgggggatttggagcttcaaatttatgaccgactatttttatgaggtacaaagagaaccctatcaatcaaaggcagaaggactccgcgtttgacaatgtgtggaatccattgaagagcatggcatagcgtgtgggggatttggagcttcaaatttatgaccgactatttttatgaggtacaaagagaaccctagcaatcaaaggcagaaggactccgcgtttgacaatgtgtggaatccattgaagagcatggcatagcgtgtgggggatttggagcttcaaatttatgaccgactatttttatgaggtacaaagagaaccctatcaatcataggcagaaggactccgcgtttgacaatgtgtggaatccattgaagagcatggcatagcgtgtgggggatttggagcttcaaatttatgaccgactatttttatgaggtacaaagagaaccctagcaatcaaaggcagaaggactccgcgtttgacaatgtgtggaatccattgaagagcatggcatagcgtgtgggggatttggagcttcaaatttatgaccgactatttttatgaggtacaaagagaaccctatcaatcaaaggcagaaggactccgcgtttgacaatgtgtggaatccattgaagagcatggcatagcgtgtgggggatttggagcttcaaatttatgaccgactatttttatgaggtacaaagagaaccctatcaatcataggcagaaggactccgcgtttgacaatgtgtggaatccattgaagagcaaggcatagcgtgtgggggatttggagcttcaaatttatgaccgactatttttatgaggtacaaagagaaccctatcaatcataggcagaaggactccgcgtttgacaatgtgtggaatccattgaagagcatggcatagcgtgtgggggatttggagcttcaaa

SEQ ID NO: 1688 - DNA, 1444 bp, Heterodera glycines
atcaaaggcagaaggactccgcttttgacaatgtgtgctttcattgaagagcatggcatagcgtggaaataactgtaaaaaaaatttggggcgatttgaatgagaatagaaagagccaggttcgatgaagttttggtaagcctaaaaaaaatccaaacatttaaaaatctataaaaaatttaaaaatgagaattcatgcgagattttctggaaataagcttaatagggcctagttaagctgtaaaaaaaaatttggggcgatttgaaagagaatagaaagaaccaggttcgatgaagttttggtaagactaaaaaaaatccaaacatttaaaaatctataaaaaatttaaaaatgagaattcatgcgagattttctggaaataagcttaattgggcctagttaagctgtaaaaaaaatttggggcgatttgaatgagaatagaaagagccaggttcgatgaagttttggtaagcctaaaaaaaatccaaacatttaaaaatctataaaaaatttaaaaatgagaattcattcgagattttttgcgaatgctatctaattaaaggtagcgattagcagcagaaaaggttcgtaaatactgataggctaattttgccaaggattatcgtcctattttggccattggacttaaaagggttacggtgtacaatcaaaaaatttcggtctcccacatgaaaattatttattgaactttatgcacaattttaatcataaattaggatttaattgtacctcattactcggacgctaaggttctaaaaccaacaaaatcacttttctagtgtcgaattgccacaaatgccggcgaaatatttcgaaatgtttgcgtaaggctagaaaaacaaatctatttgattctttagtggttaaaatattgcgagtttttactccaagacgttagagggcaatttgaataacgaactcataatctaattgcgaatgctatctaattaaaggtagcgattagcagcagaaaaggttcgtaaatactgataggctaattttgccaaggattatcgtcctattttggacattggacttaaaagggttacggtgtacaatcaaaaaatttcggtctcccagaggaaaattatttattgacctttatgcacaattttaatcataaattaggatttaattgtacctcattactcggacgctaaggttctaaaaccaacaaaatcacttttctagtgtcgaattgccacaaatgccggcgaaatatttcgaaatgtttgcgtaaggctagaaaaacaaatctatttgattctttagtggttaaaatattgcgagtttttactccaagacgttagagggcaatttgaataacgaactcataatctaattgcgaatgctatctaattaaaggtagcgattagcagcagaaaaggttcgtaaatactgataggctaatttgccaaggat

SEQ ID NO: 1689 - DNA, 3537 bp, Heterodera glycines
ccgagaaaaagaaacttttttcagcatcaaggctggtgaaccctttaattattttaaaagctgttgttaaatcattgatttttcttctttcttctaatttgtgtaaatcagtgatttttagtctttccccataatttttgtacacaaagccacattttctaaatgcttttctcgtgaaaaacttttgaacgcgttcaattttatctatatctttttttaagttatggttccaaacttctgtcgcatattctaattgaggtcgtacacatgttttataggctgctgttagagtctttatttccctgctttttaacactctcaaaatttggaaattctaagatatgcatttcgtacaattttgctaatatgttctgaaaaattaagttttgagtcaattataattcccaagtcacgtacattatcagattctgaaaatcatttttgagttaataaaatattctgttttatcatcattttcatgggcataatataatttaacatcatcggcatacatttttatgccaactgatgatgcttcatttgcaataaaggacggcagatcatttataaaaattaaaaagagtaatggccctaagacacttccctggggcactcccgaaaatatgctgaaactttctgacaatacttcgccaattttaactttaaaactccgattttttaaaaagttagttaaaaaattttgaatttttccttcaattccaatctttttgattttttgaagtaataaatcaattggaacagaatcaaacgccttgacaaaatcaatatagataatgtcaatttgttgatccttttgtagagaattatatatatcgtccattgtttttaatatttgggttgtagtcgacctattttttaaaaacccaaattgttctttatcaaaaaatcttataccgttcagaaattctaaaattttgctacttaaaattcgttcaaaaattctatagacagtgctggttaatgacaccggcctgtaatttaatggatcagttttttcgccttttttgaaaattggtaccactaatgatgttcgccatatttccggaatttgaccggaatccaaagcaagtcgaaatatgtcagctaatatttttgtaattggctctgcacaattttttaataaaatgtaaggaatgttatccggtgaagtggaatttcgcctgggaagctttcttaatatattccaaattatgccagcatttaattcaatatccgaaagtttagtcttattctgtgctgattgagtcagtgaaccattgacaactgaattttctaaaaaagatttttggaatatttctgctaatatttcgcatttttgctcattactggaaaacatatttccagcactatcaattaacgtaggaatttcattaacttttgatatacagacaatttattgtaagttccgcttctaccgtatttctggagtttaaccaggtctcactgattaggagtatagacggattgtattttttagctaaatgttctaaatcagctattttatttgatattgatcgggcatttattaaaaggcaagaaatccagggattgaccgtttttctatttttttcggttggtttgttcgcgtgtccctagcgagttctgagcgggtgggggtttttcagggacctgatttccaaatcaaccacaaaatatttatattcaccagcagcaatattggcctgataggcttgttgccgaaaggaatataaaattttgagttcgttttgggtcatgtctgcatttttcgagacacatggcatcttgaggatcattgaatatttagctgttcttaaattagatcattggagctttggaattactgtctttttgttgttctaaatataatttaaaaattttgaattttctcaattttcagccatttcctgcgctatttctcatgttctggacactcaacctttccatgggattaaattataattattggttcatttcattttttttaatagttcatatatttaatttataatatatttgtttttataatattgaaataagcaattgatttttttactacatatatcaacaaataagctagttttttgtaaatgtaaaagatttttttaatttcaagtaattatttttctttaatgtacagaaattttcttttatgggaaaattgggttgcttccgtaattttaacggaatattttttattttatttttaaattttcataagaatatatatgaaatgaaaattgttttatcatattaattatataatatctcatgagctatattgcacttacggagcaaaaaagttgatgattatttttgtataaatattatgaaaatcaatatgtataagtttcatagttaaagatctaagtttcattttttcggcatctcaagttttcactagcaataaagattttctcttaacatcttgtcgtctacattcatttatttcacatcctcagggttttttaatcacctgttgtcatacagtgatttatttattatataaatgggactattttatcgtttcaatgaaattttaaatgaatgtgaaaggtaattcatatgtttttcaaataaatttttagtcgcacttttcttaataaccttcactttttttaacaaacaggttctcttgtcatgatttttaaatttgaaattataatatcatattatttttgatatacttcaaagaaaacagaatattttttagtttttatctgctgatcactttatttttcaaattttatattgaaaaaatatgtagttgaccactttttttcatttcgctgaaatggaggtcaatatattttaattgtatatgcaaaaaattattataataaaaattaaaattcatccatgattcaaaaacattgaaaaaacgaattttaaaacctttagttaagctttttgaaattttataggctaatataaaaatataattattccatgataaaaagatgaatattttttaatgatttcatatgatttcttacattagacaaatttagcatttcgctaaatatttgcacttttttgttgtttaatatataaaattattctcttttgttaattaataagaaaaatgattgtttttggaaatttgatcgaaggtcttcttgaatgcctcatgcttattgaagttgttcttaaaattttacaaatctttttcataagcttttctaagtagtttattttcggtttaacaatagatattgtttaaattacatatatttttaatattacaaatttataatcatttcggttataacttggcaaattttcttttgtcaatttatgtgttattttctaattcatttaattttgtgttttcttgccatttgtttttacaatagaaagttttccaattgccttaatttatttacactttttcaaatttgtaaaatatacatcttttatatattggtattcttttttttataatttttcattgcatgcatccggatgatgctttcttacaggttcagcagccgttccttaattgttaattatttgcctttttatttaattaataat

SEQ ID NO: 1690 - DNA, 1559 bp, Heterodera glycines
  unsure (1)..(1559): unsure at all n locations
attaaatatattttaatttccatctgccaacgtcaagtctgcatgtatttttngatgaatggtattatagacaaatgttataatttaatttgtntagttaatgaatgtataaaaggatattatattaaaattctgtttgtattttacttgctgtgaagaacgaatccattcatgactaaataaaaaaaattaaaaattatatttactttctattttttcattattttctaattaaattattttgtcctccttgcataaattttgggcttaagtaaattaatgtttttcattttttaaatttcaatatttgttagaatgtattaaaatntaatgataaattccttttgatcaattgcatttaaattgaagattattctctaatattcatttttgaaaataaaaatattcttgatcgactattccaattatgtataacaacaaatttatcaattttttttctcctcagtacttcaatttctttgttctcttcctcatcttgttctaatccagcggacagtcaggtcgtgatttgactaaaaaagaattaaatataataaatttccatttttttctatttatcgatattataatgagattatcaaaaataaaactaaattagttattttttcaattcagacaaaaaattattgtattgtaggcgacacgtacggagatatgggacagtttggtgaaatcgggctgccagcatcttaatttaacttactgttgagaaaattttccgaaatttaattcattttatttttaatttacaaagatcagttatttttcaattaatttgcatttatctacccccccccccctccttttttccctaccggaaatcgtttccaaattttcaccagtaaatagtgaaaatgggtgtggtgtaggacatctcttcttacaactacgtaatggtgcacaatgatctgaatgaaaacatgaaaattaccagcgacaatttttgatcggatcggtgagatagcacactgacgattcaatgccgagtgatctagaaatttaagaccatttgttaaaaacattgaaaaaacagtattaattaaaacatgaaaattaccagcgatgatcggatcggtgagatagcacgctgacgattcggtgccgactgatctagaaaatttataattaacaataaactcaaatatgaataaagcacaatcgaatataccattcaatttcataccgtagtatgatttaaaaattttcatttattttttctgaagctgcatttttatgaattatgcaaaatttcgtcaaaaaatgggggtttggtcttttaattattggctaataattacccaaaatttgatttgaaatccaaaagtggtaacttttcatatgaaatttattttttagttttaaatttacctaccagaaaatgttcggtctttgtccgaccgctcatctttcgagttgtcggttctgcgtttgcttttgacatcctcgtgccgaaaagagcgccgatcacgattattgttgtttcagaaactgttgtcatggacaatcnggcgttggtcgcggtagatagtttgtttgtc

SEQ ID NO: 1691 - DNA, 1637 bp, Heterodera glycines
gaatttttttgcaatatttcagctcaaatattttttcactcaaattaccatataaatgccatcaatttcgttaattcatggaaaaatcctatggagaaatgaaagagttacaactcaaaaaatttttggatttattttcattattaccacaataaatctgcaattatccattttgatatttattagcaataggaatattatcacttgaatgaaaaaagtgtgattataattgttaacaatgatgttaagaatgttgtccttacactacttgaatgttctaattgaggaaaatttttaaaaaataataattcaatattgaattttttcagtgttgccataaacataacgaccaaacgcacgaaaacaagttgaaagaatactctaattgaaacaaggataccaaaattaacattttacaataaaaaataaaaaattataaatcttaaataaaataaagctgtaataaatgtatgaaaaatgaaaaactaaaaaaaatcattttaaaattaattataacagctctaataaaattagcaatacaaaaaaagaaaatacaataaacttgaaaaataaaatgacatgaaaattactgtggtccaaattgtgcaggagcacaagataaattttcaagagaatctacaacataaaaccgaaaaaacaatattgttcatagagagcatagagagtccatggataagaagaaaaaccactgctgttatatttgtattaaaaataaaattaaaaatattgtgaataaaagtaaaaactctgagttttagaagaagaacaacgttgttgtcctcagaaataatacaaaagtaatctaaaaatcatgattttaaattcatatcagataaatgagataaaaagatttgaataaatattctaatattctaattaaaaaataataattagatcaaatttataaaaaagtaaaataatttttaatcaaaaataaagaatttaccgtatttcctcgattataagccccggggcttctattgttcaacccccctccaaagggggcttatattcgagggggggcttccaatcgagggggggcttttattgttcaacccctttccctatataaattcttaaaattttttgctttctgcataatggtacaatttaaatcttaatctgaaatttttgaattgaaaagatttttcattttttggcccttggaaatttaggcgaatgtttgaaaattcataattcacttctaaatgaatcaattaaagtgcaaaaaagcattaaaaatagagaaaaatctggagcattttatacttttttagaattttctatcttcaaaatgaagaagttattacataaattttggaaaaattcgttttttttagaaaaaaaaattaatagcactgttctgaaaaggttttttgaaaaacacgaaattcttcctctataagcttctgtttattctatatttttataagacttttaaaaaaaagtacaaaaataaactgattttggaattcgggatcatagatggaagcaaggggtttttttggggccttgggttcagaatccacttgcctgaaaaaatgtttttttaagggttttttggaccactaatccaaaaacttggcatccatttttgcccaaattccaaagccttg

SEQ ID NO: 1692 - DNA, 3428 bp, Heterodera glycines
  unsure (1)..(3428): unsure at all n locations
aaatttaaataaacaaaatttcattcatttacttactcaatttagtaacttttaaacaggaccaggcaacggggaaaatattcaatgccggaaaaaggaacgatgtctgaagttatttacatgtaaaaatatttttattgaattaataaaataaaaattaaaaaggatgctattcgagatttactttgtctaaaaaataaatttcatgtctaaagggagagtaaaagaaaagaataattaaataaccaaaataaagtaaattttataaatttttaattggtaataatatgacttaattatattttttatttactaaaaatgaaattaacattctaaattttaaggaaatccgtttaaccttatctctgctagaataaatcgcaagtttttatttattttgtgaatatacctattatttatatatatttcatagataatgttactaagaaaaataaaggaaaaaaattgaatctttcagttatccagaaaagaatgaaaaacaaaattattcataatttataataaaaaagaaaatttaaataatattaacaaatttcttactaagctccagtaaaaagtaataaaatgcataaaggaataaaaagttttgaaaagtgaccttgaaaattgtaaccttgacgattccgctataacttaaattaattctaaataataaaaatcaataaatgtgaaatagtaagcttaaaaacatattaattgtattttctcgttaaaaatgaaaaaaagaaagccttaatctaatactaatttggtgctagagaaaacaaaatcaaaccaatggttagccgacttttgcgccgcggacatttgcgccgcgccatttgcgccgcgacatttgcgccgctcagcaataaagactcttgcgccgcggacatttgcgccgtgccatttgcgccgcgacacttgcgccgcttaataaaaacgacatttgcgccgcaaaagcgaaaaatgtaaattacgccgcttatttaaaaaatttatgtgattgatccatcaatttctaatttaacatactttgacaagcattactaattccattcttcgaagcctttcatgccaagacggtactggagtgcatgtatgtgacttatcaaatcttcgtcatttttgttttctttggcatcatatgcgacaacaagtctccttattgcctgatcgttttccaggtattttttgagccgtggacggtcagaaaatccgcgagtgtgatcaatttcatacggtctcagtctgttgacttggtattcttcttcatttttcatctctttgatgaacctatttatgtcaaaatttttaataaattgagccccaactaggcgtgtgcgaaaaccaaaaaataataattttagaaaatgaaacgaaaattaaaattttaaaactcgaaaatgaaaacgaagcgaaaattttttgacagacgaaaacgaaactcataaagtgacgaagaaaggggacgacacgaaaatgacatgaaatttcgcacacccctgacaatagaattttttaagaatggaaactttttcgaaaatgtcgattactttgaaaaagctgggtgaggggcgtaaatctttttcggaaactgctgtgccacctgagattttttacattaaatcattaaatttattttaaattaatatttttatttgccactcgatgccattatttgtgcgttgttcttcaagcaacacagaattatgttggttccaccgatctggacgaaacaatggaaatcgctgttcaccattcacgatccgaaataaataagtgcttaaaattattgattttaaaattaatattaattaatatactttttaaaataattgtaaatcggttccgcttccggtggggcaatctcattaaaaacattaaagccggtatcattcttcttcgagtaaaaaagcaagactcggtaaagctcggattgcttttctaaagacttcattttgtccgtaaatgtttgccaagccatctttttgaattttacggtgcaccgcttgacaaagatggaataagcaatgttttataggcatttcttgaccaaatgctgtttggaacccattttttgcacctttcataaaaattattttaaatttactaaattatttttataactttcttcaaaatccattaaaaaggataacggtattgaattgtccaaatggttgcgtaaaacagtgaaagcccgtccatacgtgttggaattacgattttccattaaaatatatgctgacggtacagaaacatgcccaatcagcacatttacagtatacaacagtaagaaattagccggacaaacttaaatattttaatagataaaaatttaagatcatttaaacctttaaatgtcccatcaccagaccaatttttgtattttttcaaccttgataatccattttctgtagaaaaaataaaaaatttagctaattccggttcagtaatgcgcgaatcaaatagtaaaaatctgttgccatttttgtccaacgtaaattccccctttaaaaaaaattaattttaaatcttaatgaatactcagagggctggcagtttcggcaaaaaatttttcgaaataggctaccaaaaggctaaaaattccataaaaatacaagaaaaatgaaccagaatggcaataactaaaaaacggaacggaaaggcatcaaatttcctgtcgctctaaaatgtcagccccctactctcgaatgtacttcaaggattatattttctattccacttcgatcaacccctgcagcgcccgggattactctttggcgctgaattgttttttgaatcgaactgtacgtcggcatccttaaaagagctgattcgtccaaattttcccgcgtttctccgattatttcgcgaggagcaaaatttgtgtttttggcagtctcctttgcctgctcaattcgctgtcgaacctttttttaatttctattactttttttttataactttttatacaattgctgaatccgcatttggaagatgattgtgttggatcttctcaacaagctcagtggatcccaaagcagaatgtgcgcgaccaggacaactttttttaacacagccccataccttttaattagcaaaaaatgcaaaattacagtatataataacataaaaacaatattttttacttgtattaaaccatttgcgattagctcctttttcctcatctcaaatccattaaaaacaattaaatctcggcccttggttgtccgttcattcggagcaggcgaatgagcaaaggcaaacaatgaaattaggagcaacaaacggttcatgtttgaagaatcaaaatgaatgcatttctccataatttgttatctatttgaaagagcacctcattccttagaatttaatttgtggggcgcatttttttgcaggantttgtgcaaatcgacaattaaata

SEQ ID NO: 1693 - DNA, 3153 bp, Heterodera glycines
  unsure (1)..(3153): unsure at all n locations
caggatttgtgcaaatcgacaattaaataanaattaacggtaattttgataaaataaaaattaacgagaatttttgatcagaccataaaattctttgataattctttatttttccatgtataaaagatgcagaacattgaagtcgagatcacaacaaaaaaaaatcaaaaatgaaaatttatctgttttatttcctgctactctctacggtgaacgccggacccgtagcaattctcgggggaactgcgcgactaataaattcgctaaaaagtttaaaaacagcacaagcagttgtgtcggggcgatcggaacagcaggcggcgcttcaatggctgtgattatcgaccagataattgacagtcttacaaataaaggttccgtaaaatggaataaattattttaataaactattataatattttgaattaattaaggcgaatttatcaatcaatcagttaaattaaataaattaaagtaacaataaaataatttttagtgaaataattaaattaattatatctaaatgaattgaaatgaatcccaaaaattgaattaagataaggttgatttgttggctccattttttccaatcaatttcgtcgtcgcaggcggcgaaatcttggtcgaaagagaaaatttttctctcgagtatatcttcgatttgttcgaacatctaactgaccgacgatcattgaacgaaatctgtttctacaacaatgacggagagatgataaccgtgcacaaagaaaagaatctttctttgttgttgatgtacgcattgacaaaaacaaaaaattagaagtctatctttgtgattagtaatttttcatattttccacttagttatttttttatcgttgactcatagttttaataaaatatgttgataatattgagtaattttgactgcgcggcgcaaatgtccatttttgctgtgcggcgcaaatgtcgcggcgcaaatggcgcggcgcaaatatctgcggcgcaagtgtctgcggcgcaaatggcacggcgcaaatgtcgattctgctgagcggcgcaaatgtcgcggcgcaaatggcgcggcgcaaatatctgcggcgcaagtgtctgcggcgcaaatggcacggcgcaaatgtcgattctgctgagcggcgcaaatgtccatttttgctgtgcggcacaaatggcgcggcgcaaatgtcgcatcacccaaaccaattagaaaaaaacgaaataataaattgcaaaaaaatatattaaaaatgctacatcgcaagaaaataaaacaaattgaaaattaaaatttctaaattactcctaaatgagcccgaaattgagtgtatgtaaagcctacatagactggaagaataactataatatcaatttttaattgagtaaatttatagttataaactctcgagttgcgaccaatgaatggttaaaatttagcatgaaggttattgaacattgatgacaataaacatttttgggtatttattatgctttatggtggcactatgggagtaccataaataattataattaagttatcgtgtacaataaaaaatattctgcttttggaccaattgcgagtgttttctttatatagttataaaatattaaaaattgttaattttttatacttaaatttccatagttaacaaaatttgggaatatattttcttttaaaatttattaataaatttcatacataatataattaatttttaggttaaatattcaaataatttatttcagtctatataaaatcattttttattattttattattagaataataaaaaatgaacttttattgaaaattttaatttatcaaaatgatgactacacaaataattgatttttgttattttccaataaatagtctttatttttctttgatagcgtttatttatttatttttgcctttacttttatactatttattttatatagaagttttccttggttgtattttttaattttgtgtcaacagaaaaaaaatttattaaaaattttacttttttcttatttatttatttaactttttaattccatttattgtgctcctctcaagactcctaatacttgattggttccaaccattttgtttaaatttcttgtacagcagtcgcaccagtaacaataataacagtaacaccttttttggcgttccgatcgtgtataaatatttattatgtcatttacttgtataattaattatggataaaaatctcagacattcatcagtttatttcttgttaaactattatttacataaatttagcgaaagtgaaaatttttctttaagtaaaatttatgttttttcatcttactatttcttttattcaacaatttttagatttttattattttattaattaaaagttttatctaatttcatttagcaatcaaaatgcttcaaattttaagtttattttgttatgcatttaagaacaacaggtatttatagcattagagatcatttatgccgttttttggtacttatatgttatctgtgtaccagggatgggccaaattgaaaaataaaaagcgaaatgcgaaaagctaaaatatgcgaaatgcgaaagcgaaattttttctacaactttttaatagttaaaatcataaagcaaaaatcattttttaaaattttattccaaatttaaaaatcaataaaacgcttttttgaggtgcgctttttccaaaaaaactttttgggaagagggggcaggcgccgcctggaaaatttgattaaaatttgttgacagattttcactaaaaaatgatcaaattttgtgatttttatcatttttctaatgaaataagagttttagggcgccgctgataaatataaacaggttttcactgaaaattagccaatttataggtaaaattttgaaaaattttatgggaatttaatccaattcttaggggtgtaaaagtcgcgtttcgcgccaaaaagcgaaatgcgaaacgccaaaaaatgcgaataatgcgaaaggcgaaatgcgaaaagcgaaacctaggcacatccctggagtggggggcggaagtttgggcaccgggaagtttgggcaccaggaagtttgggcaccagaaatttgggcaccgggaagtttgggcactaaatttaggatttaaaaaataaaattatttttaattgtctat

SEQ ID NO: 1694 - DNA, 1304 bp, Heterodera glycines
tccaccattttctattcattctcaaaggtcaatataaacagggccggcggcgagtagaagcacgaatatgggtgggacggcgggtaataatttgccagatcgcatgactcatttggggtatggtgatgagaatatcgttgggcatagtgaatgttcaacccatatctagatatgaaatgtcatctgctatcgacgtccaataccatttccaactcccacggcattccgcctctttaggcgatgttccgtcctcatagaaattcaagatctcctctcttgcgatacttcctcgtccctcatgagtcacattacccgctatatatttatctccatctccagttccgcaatccccccgtgtggatctcaagcttaaccggcgcccaaatctctggtgcggcgaacttcctgctcccaagcttcccggtgcccaaacttcatgtcgcccctggagtggatcctcgtggtattttgccccgttcattgcaacggctcaaccatggacttccgatttggcggttcaattctgtaaagatataagtattatgaaatcaaagcttctacaaataagaaaataataattaaatagaagcaatgcgagaagaaaaaattattataaattaaatagttttttaatgaataaatacatgacaaaatgacaaaaaaccaaaagattatataattgaaataaaaaatgatcaaattatgtaagaaatgaatggatcaacagctagaaaaaatttgacttgaactgacaaaataaagcaaaaatattttactttttgaacgcgtgataactaaatcaaataattactgagaaaataaaaaaattttcatagataaataaaaatacggctatcaataattaatattaataactgaacagaagaaaattgttgaaatatctgataataacgaacaagatgttatctaactttaatttattatcgacaaagtcattaaaatggacaaaaaagtagagaaaaagtaagaaaaaatgaatctgataaatttgggcgatttcttttttctcaacttatttaatttatgtaattaaaagcttaaattttgattcttttgacatcagcattttgtgacaactgattaaaatgtaaataattaatattttaattttcttttttagaatttatgtccccaaatgatataagttggaaaaattttattatttaaaatatttattttttttattttaattaacacaattattttcttttagtttttgatttaaatagtattcattgatttaaagattatctgtaaactctaatcgtattgtgaatgtatct

SEQ ID NO: 1695 - DNA, 2613 bp, Heterodera glycines
aagcgagaaaactactgcataaaaatttaagaacgaaaatttttgactagaaaatttcaaacattttcctccaccttcttttaagtcccacccgagggcgagacagttccaaaatttgggtgccacataaatgtggatgtaatagtaccttaattggactatcactagctcaatttaggtggaggattttgggctcatttcttacaaatttcaggggattttaatggaactgaaaattgcaaaaattagatggggtggtccctttgtaaggaattccctcgtcgtctaacccgccccttttcatgcactatttcagggtctaaaaaatgaaaaaaaacaaatgattttttttgttaaaaatcatagaaacttttcggcttttaaattttaaacccgcacgattccgcgattcgaaaaccgtgaaaaaaagcgagaaaactattgcattaaatttaagaacgaaaattttgacttgaaaatttcaaacattttcctccaccttcttttaagtcccacccgagggcgagacagttccaaaatttgggtgccacataaatgtggatgtaatagtaccttaattggactatcactagtcaatttaggtgggggattttgggctctaatggaactgaaaattgcaaaaattagatggggtgcgtccctttgtaaggaattccctcggcgtctaacccgccccttttcatgcactatttcagggtctaaaaaatgaaaaaaaacaaatgattttttttgttaaaaatcatagaaacttttcggcttttaaattttaaacccgcacgattccgcgattcgaaaaccgtgaaaaaaagcgagaaaactattgcataaaaatttaagaacgaaaattttgacttgaaaatttcaaacattttcctccaccttcttttaagtcccacccgagggcgagacagttccaaaatttgggtgccacataaatgtggatgtaatagtaccttaattggactatcactagtcaatttaggtgggggattttgggctctaatggaactgaaaattgcaaaaattagatggggtgcgtccctttgtaaggaattccctcggcgtctaacccgccccttttcatgcactatttcagggtctaaaaaatgaaaaaaaacaaatgattttttttgttaaaaatcatagaaacttttcggcttttaaattttaaacccgcacgattccgcgattcgaaaaccgtgaaaaaaagcgagaaaactattgcattaaatttaagaacgaaaattttgacttgaaaatttcaaacattttcctccaccttcttttaagtcccacccgagggcgagacagttccaaaatttgggtgccacataaatgtggatgtaatagtaccttaattggactatcactagtcaatttaggtgggggattttgggctctaatggaactgaaaattgcaaaaattagatggggtgcgtccctttgtaaggaattccctcgtcgtctaacccgccccttttcatgcactatttcagggtctaaaaaatgaaaaaaaacaaatgattttttttgttaaaaatcatagaaacttttcggcttttaaattttaaacccgcacgattccgcgattcgaaaaccgtgaaaaaaagcgagaaaactattgcataaaaatttaagaacgaaaattttgacttgaaaatttcaaacattttcctccaccttcttttaagtcccacccgagggcgagacagttccaaaatttgggtgccacataaatgtggatgtaatagtaccttaattggactatcactagtcaatttaggtggaggattttgggctctaatggaactgaaaattgcaaaaattagatggggtggtccctttgtaaggaattccctcgtcgtctaacccgccccttttcatgcactatttcagggtctaaaaaatgaaaaaaaacaaatgatttttttgttaaaaatcatagaaacttttcggcttttaaattttaaactcgcacgattccgcgattcgaaaaccgtgaaaaaaagcgagaaaactattgcattaaatttaagaacgaaaattttgacttgaaaatttcaaacattttcctccaccttcttttaagtcccacccgagggcgagacagttccaaaatttgggtgccacataaacgtggatgtaatagtaccttaattggactatcactagtcaatttaggtgggggattttgggctctaatggaactgaaaattgcaaaaattagatggggtgcgtccctttgtaaggaattccctcggcgtctaacccgccccttttcatgcactatttcagggtctaaaaaatgaaaaaaaacaaatgattttttttgttaaaaatcatagaaacttttcggcttttaaattttaaacccgcacgattccgcgattcgaaaaccgtgaaaaaaagcgagaaaactattgcattaaatttaagaacgaaaattttgacttgaaaatttcaaacattttcctccaccttcttttaagtcccacccgagggcgagacagttccaaaatttgggtgccacataaatgtggatgtaataggaaccttaattggactatcactagtcaatttaggtggaggatt

SEQ ID NO: 1696 - DNA, 1860 bp, Heterodera glycines
  unsure (1)..(1860): unsure at all n locations
ttgaaaatttcaacattttactccaccttcttttaagtcccacccgagggcgagacagttccaaaatttgggtgccacataaacgtggatgtaatagtaccttaattggactatcactagtcaatttaggtgggggattttgggctctaatggaactgaaaattgcaaaaattagatggggtgcgtccctttgtaaggaattccctcgtcgtctaacccgccccttttcatgcactatttcagggtctaaaaaatgaaaaaaaacaaatgattttttttgttaaaaatcatagaaacttttcggcttttaaattttaaacccgcacgattccgcgattcgaaaaccgtgaaaaaaagcgagaaaactattgcattaaatttaagaacgaaaattttgacttgaaaatttcaaacattttactccaccttcttttaagtcccacccgagggcgagacagttccaaaatttgggtgccacataaatgtggatgtaatagtaccttaattggactatcactagtcaatttaggtgggggattttgggctctaatggaactgaaaattgcaaaaattagatggggtgcgtccctttgtaaggaattccctcgtcgtctaacccgccccttttcatgcactatttcagggtctaaaaaatgaaaaaaaacaaatgattttttttgttaaaaatcatagaaacttttcggcttttaaattttaaacccgcacgattccgcgattcgaaaaccgtgaaaaaaagcgagaaaactattgcattaaatttaagaacgaaaattttgacttgaaaatttcaaacattttcctccaccttcttttaagtcccacccgagggcgagacagttccaaaatttgggtgccacataaatgtggatgtaatagtaccttaattggactatcactagtcaatttaggtggaggattttgggctctaatggaactgaaaattgcaaaaattagatggggtggtccctttgtaaggaattccctcgtcgtctaacccgccccttttcatgcactatttcagggtctaaaaaatgaaaaaaacaaatgatttttttgttaaaaatcatagaaacttttcggcttttaaattttaaacccgcacgattccgcgattcgaaaaccgtgaaaaaaagcgagaaaactattgcattaaatttaagaacgaaaattttgacttgaaaatttcaaacattttcctccaccttcttttaagtcccacccgagggcgagacagttccaaaatttgggtgccacataaacgtggatgtaatagtaccttaattggactatcactagtcaatttaggtgggggattttgggctctaatggaactgaaaattgcaaaaattagatggggtggtccctttgtaaggaattccctcgtcgtctaacccgccccttttcatgcactatttcagggtctaaaaaatgaaaaaaaacaaatgattttttttgttaaaaatcatagaaacttttcggcttttaaattttaaacccgcacgattccgcgattcgaaaaccgtgaaaaaaagcgagaaaactattgcattaaatttaagaacgaaaattttgacttgaaaatttcaaacattttcctccaccttcttttaagtcccacccgagggcgagacagttccaaaatttgggtgccacataaatgtggatgtaatagtaccttaattggactatcactagtcaatttaggtggaggattttgggctctaatggaactgaaaattgcaaaaattagatggggtggaccctttgtaaggaattccctcgtcgtctaacccgccccttatcggcactatttcagggtnaaaaaagaaaaaaacaaat

SEQ ID NO: 1697 - DNA, 1470 bp, Heterodera glycines
aaaattggcgggggggcgtccctttgtaaaggaatcccctcgttcttctaccccccccctttttcatccattatttcagggtataaaaaaagaaaaaaaaacaaatgattttttttgtaaaaaatcatagaaacttttcggcttttaaattttaaactcgcacgatttcgcgattcgaaaaccgtgaaaaaaagcgagaaaactattgcattaaatttaagaacgaaaattttgacttgaaaatttcaaacatttttctccaccttcttttaagtcccccccgagggcgagacagttccaaaatttgggtgccacataaatgtggatgtaatagtaccttaattggactatcactagtcaatttaggtgggggattttgggctctaatggaactgaaaattgcaaaaattagatggggtgcgtccctttgtaaggaattccctcgtcgtctaacccgccccttttcatgcactatttcagggtctaaaaaatgaaaaaaaacaaatgattttttttgttaaaaatcatagaaacttttcggcttttaaattttaaactcgcacgattccgcgattcgaaaaccgtgaaaaaaagcgagaaaactattgcattaaatttaagaacgaaaattttgacttgaaaatttcaaacattttcctccaccttcttttaagtcccacccgagggcgagacagttccaaaatttgggtgccacataaatgtggatgtaatagtaccttaattggactatcactagtcaatttaggtgggggattttgggctctaatggaactgaaaattgcaaaaattagatggggtgcgtccctttgtaaggaattccctcgtcgtctaacccgccccttttcatgcactatttcagggtctaaaaaatgaaaaaaaacaaatgattttttttgttaaaaatcatagaaacttttcggcttttaaattttaaacccgcacgattccgcgattcgaaaaccgtgaaaaaaagcgagaaaactattgcattaaatttaagaacgaaaattttgacttgaaaatttcaaacattttcctccaccttcttttaagtcccacccgagggcgagacagttccaaaatttgggtgccacataaatgtgtattaatagtaccttaattggactatcactagtcaatttaggtgggggattttgggctctaatggaactgaaaattgcaaaaattagatggggtgcgtccctttgtaaggaattccctcgtcgtctaacccgccccttttcatgcactatttcagggtctaaaaaatgaaaaaaaacaaatgatttttttgttaaaaatcatagaaacttttcggcttttaaattttaaactcgcacgattccgcgattcgaaaaccgtgaaaaaaagcgagaaaactattgcaaaaaatttaagaacgaaaattttgactgaaaattcaaacattttttccccccccttttttta

SEQ ID NO: 1698 - DNA, 1256 bp, Heterodera glycines
  unsure (1)..(1256): unsure at all n locations
attctttatttccagaggagaacgatttgtcttctttcaattcaattgaacagcactaaatggtgccagaactgtactcgataatgtagagtgccacgggaccgggacctggaagcggacaactgagtaccccaaagtcccgggttttgaccgttttgaccgggaatttacacccctcagtttcatgttttttatgcatatttggtgcatattttgtgattttgtgcatatttggtgcatatttcacgagtttatttgcatattttgaccacttttcgtgcatattttttgcagccctgtttattatattgtaaaattttaaaaagttttgttaaatttaaaaaaaaaattagtttttgatctgagaaattcaaaaaccaacccttttttgaacatttttcgtcataactttctttaaacttaatgaattttttgagtaacaacccggcaccaaatgaagaagctgggctggctggttaaaatgcagaaagcggggattaataaaattcataaaagggttttaggacattcgacggttcaggcaaaaaatccgtgctttttaacacaaaaattttcatccctaatccatatttaaaatcactagggcgtagaattatatggatataaaatcccaaaatctggccataaaaaattgacaataaaccacgaaaatatggacataaaattgcgaaaatctctaaatatggacataaaatggcaaaaatatggatataaatttttccaaattgaggatgtaatttaatttaatttaatttaattcgcttaatgtaaagtaaaactttcaaaaatggctgaatatataatattaaaaatcaaatttaagaaaaaaacaacaactataaaactcaaatttattcattgctagcgaaaaatcaatctgaaaagtaaaattttcgctaaatttatcaaattttaagaaaatttaaattcattcaatattttcgagaaaattttgctaattatgatctttttgaaaatttttcggtctttggagtcaaaagggccaaattagctgatgagggccgttcaaatagaaatttttggaaaatgccaaaatatggacataaaatatggacttaaatttgccaaaaatagacaaatatggatattgaaaacccatcctagaatcttcaaaccaggttaaaaccatgtttttcgtgcgtttcaggctttcaacagtccaggaaaaaaaatatggaaatttcatataattcaatgccctanagatcacgata

SEQ ID NO: 1699 - DNA, 2324 bp, Heterodera glycines
ccccccccccccccctaaagggagcttaatttcagggggaattctaatctaagaggagggtgtttaattcaaaaaatatttatatatgtgtggtttttctgagttaaacatttaagacgaattaaaaatgaaaaatttatataaatttccaaaaattcagtttttataagtccacttgggttgcaaaaatttttggctatttcataacatccttaattagtgaactgatcatattatgcaaccaacatctgaagttttaaatcctgaatttttttcagaattatctttattatattgattaatatgtatttattcattaaaatcaaattttgtatagtttttatgagtatgaatgataaaaatttaagcttggttagcctgctgaggggataggtaaaatacgtaaaaaaaaaattctggatattaattggaaagatatttacagtatttcacaaacaaaattctatggtatttacactataattacagaatttcttaaacaaattctgtagcatttagtattgttgacaaaaggttaaaaatgtaaattattttgaatgtatacaaaaataattgaactcgcaaaaaagaaaatatactgtaattggatattgtaagtttattcccatatactaaattcacgcttaaaatttcaaaaatcattcatacaatttattatgatcatttttcatgtcaaaaaaaaagatcaaaacttcaaatattctcaaaattaaatttaaacattggtccaaaattggcctcaattttttcaccaacggcaaacaaagtgacgaaaggaaacaataggccgacagaagatggcacgcggtaatcatcatcatcatctaattgaataaaatattttatttttttattaaaaaaaaaataattagggaagcggttcttaggtgctaatgactgccaaaatagtttgatttttctaaaaaaacccactgaaaattggtgttaaaaatgggaaaatttcaaaatttactggatgtaaaagcgtaaaattttatctaaaaagcaaaaaaattaagccaaatcagtattgctgagacaaataatttttaaaggcaaaaattcttgccaagaaaataaataaataaattttgcgacgatttttgagaaaattttcatttctgaggggcatatttttaaaaaaaaattttgtattttaaattttattgcatttttttttgtttataaatttttggcatagcgtcaaaatagagtttttcagcaatttttaggtgtttagttctaaaaataaaaacctagaaaagaggtaggtgctagcttaacaaccactaccaaaaaataaggatgtttttcatgcatttcagcccatagggagctcacgaaaaaatagacaaaaactctaaaaatcgtatcccaaataataatataataattaaattaattaattatccaacccaatatgtgtccatttcttgtgaaaatcatctgccgattgttcagattaatgccgcatccctccacagaaccagcaacaaatttagtgcatggtacaccagagccacttgtccaaagtacgccatcactttggtatccaaaaatgccataggcgtgccgaacatgtccatccaattcgccatgcttctgtttggtggtgaatccgaagaaaacacctcttgaatatttttttaattaattactggaagattattatttgggctgctaattttatgtaacaaaatttgggaattatgtaaataaaatatgtataaaaaatgctaaaatatgtatgaaatatgtacaaaaagccccaaatatgtactaaaatatgtaaataaaattatttaaatggtaattttttgggtaaaaattcttcgtaaaaagtgcaacaggcacaaaatgccataaaaatgaccaaaataggcttaaatcacattttagtacattaaataataatttttgctatctcattaaaaaaaatcgttttttagagatacattttcaaattttattttttatttttcacaaaaaatttctataaattctcaaaatatgaaaaaaatgaaaatgtgtacgaaaaaattgcaattttttttgggacatctaaaaattttccttaaaaaatcctcaaaaattgcaaaatatgtacaaaaaatgcgaaaaagtccaaaatatgtacatatgtaatatgtagaaaaactccgaaatatgcaaaaatatgtaaataaaagtcccaactttttgttcgcaaacacaaaaaagaaagtgtttttcccactaattaggctatggagaagccaggaaaaaaatatgtatttacataaaattagcagccctaattatta

SEQ ID NO: 1700 - DNA, 2867 bp, Heterodera glycines
  unsure (1)..(2867): unsure at all n locations
gatataattaaaatactaaaacagttaattaaaattactttgcttaaaaacttaaaaaatgataaaaaacagaaatattagcatatttgaaacaaaatgaaatgtttagactaataatatagaaaatgaagctgacttcatacaaggacgaaactcctacggatgagcacatgaaaagaataataaaattattcgaaaaaaagatcattaaattaaatagtccaaactgctacttttaaaaaaggagatccgacttcgagtttatatttgaaaaatcgtaatttatcattaaaatttgataaaataaaataacttataaaataatataagaagtgtcccattattatgtaccaaatttcggcacatttaatcaaatatttttcagcaatctttttatcaaaaacgaaaaaattagccaaatttccaaaattgctaataattattcaatttcacaaagaaattgaaataatatacataagaattaacaccacaagaaaataaaatattgataaaatttttgaacaataaaaaagacaaaaatataagtaacacgcaacgagaccaggggtgcgcgaaacttcgacttcgaaaacttcgaaaacttcgggtttttgagcttcgaattttcgtgcttcggcttcgggtaatttacccgaagtttcgggaacacccctaaagatcgagttttcagtgtgaaaaatgcacccctaattgagtcaaaaaccgtcaatgctttactaatttataaaacttccaaatttctaaatacattttcatcaaaaaaatcatatatttattttattaaaagggttagttgttctctaggtgttctgtcaattggttgaatttgatatttaaccgaaattttgtgatgaaaaaatttttggaattaaaaaaattttttgaaaaacttcggcttcgaaaacttcggggttatttgggcttcgagcttcggacttcgccttcgaataaaaattgggcttcgccttcggcttttgcttcgagtgctaagccgtcttttntacgaaacgcgtcagcacgaatttatttaatataattataaatttttttctgtttttttgtaatctaattgtatattaaaaaaaacgaatcacgaaaataaaacatttgcaaatagctcaaagttttaattttcataaattatgatttctatttaaacgaatatatggtcatattaatttgtcaattttttgtcttctttatcttagttgcttaatttttggaattttaaatttatttaaataatattttaaagtaataaacctttaaaactgtaattatttttacattttaaatgattttttttactggatgtaaaaagttaatatttgtttatatttccatttaaaaaatttgatataattattttttgtattctatcgttttattaattcatacaaaaatattcaacaagtacgctggtgctacatggcaaattgttcatcaatttcgactttggccctgattatttatcttttcctttattgctcttttttcaatagcaattaattttgtgatataatttcaatttttccaaacacactaaatttctttaattctttgatttatataaaaatgattatcttgtagcttttttattttaatatttttcatatttaattgtaaattgttatttgaacttttttaatattcaaaaatattttttgtatctgctcaatgttataaaaaggggtcagaaatacgcctttcaaatccaagtaaattgtgctaggacgactattataattttttttaaatttcacaaaattcacaaaagttgtaagcaaaaagctcgaaaaattttagacttaacaattttgaccctaacttttttgatttaatatttttcaaaatttattttttaaatgaataaaaagtgtgctcagatcaatttgatgtaatgtacattttattcagtacagaaattataattcaaataaacacatttcgaggccggcaatttcactcctttcagtttgataaattgtatanaaatatattagcaattcaatcaataatttgtaattaaaatacaattttaaaaaattaattgaaaaaattataaaaatagcctaatataaataatttttatgattgttgaccaacaattattaattaatacattcatggtcatatgtttatgatcactctttatttgggtaaaagatttatctgatcagtataaaaagtttgattagcatgaattttttcagaatttttggcccacaaataaagtgatcatacacatatgaaatgactatatataattaaaaaatttcttttttttcattctaaataaattaaattaaaaacaaaacaaaaaacaacttaaaaatttatattaaaaaattaaaacattcccgcaccttacttaaaatagcgaaaaaaaatttatttaattgtatttcaaaaatttatgattttaaaaatttgggaaattattataacggaattatttatttatttaaatatatcacagttaattaaaagcatattttttaattacgaatttaaattattctgacatgataaatattacacctctttaaattatttttctattatttatgaaatttcaaatattttatcatttccattctaaaatattttctataagtaaattaaactgataaataacgaaatggcgcggcggcacaggtaacttgttaaacaaataattaatacaagttacactataaaatgtggaaagtaattaaaatgattttgttaaacatttattcattcatcccaattgttcgtttaaaatagtaattatcatttattgcctattttattcattttcattttaattcgtgcattatataaataataataataaatacatt

SEQ ID NO: 1701 - DNA, 6061 bp, Heterodera glycines
  unsure (1)..(6061): unsure at all n locations
gcacggcggccattatttcttttgctgtctgtctaacttgaaataagtactatttcttcagttctgaaatttctttggctaatttctagaatgttcaagtgtgttttaaaacagttctggtaatttctgcaataattctggtattttattgattttttataacagttctgaaattattctggttaattctgcgaattctggtttttcatgttctgatttgttataattacacggcggccattatttctttgctgtctgtctaacttgaaataagtactatttcttcagttctgaaattttttggattaatttcagaatgtctagtgtgctttaaaacagttctggtattattggttatttctgcaataattctgatattttattgatttttttaacagttctgaaattaatctggtttattctgcgaattctggtttttcatgttctgatttgttataattacacggcggccattatttcttttgctgtctgtctaacttgaaataaatactatttcttcagttccgaaattttttggattaatttcagaatgttgtagtgtgctttaaaacagttctggtatttttctggtaatttctacaataattctggtattttattgattttttataacagttctgaacccctgcccctgtaccgcaggaggggacacttccccttcatgacatatacttggacaggggcaggggtcctggacccctgaccctgaactaaatggaggaaggccttgcgaaatttatataaatagagcaaaaaaattaaaggataaaaaaaaaagatgtttaacgctccatttactctaattctttctggggccacaggcagtggcaaaacacaatggcttatgaggttgttgagacactatccggaaatgatcgaaccgcctcctaaaaaaatactctattgctattccgaaatgaatcagtcggttgttgatctgatgaaaatgggaatagaaacacataatggggtacctgatcagacactcattcaacatcaaccaaaaccacttttgctcatcctggacgatctaatgttgaacatgaagaacgattttcttgatttactattcacccgagtgtcccataattggaatgtaagtgttattttcgtcacccaaagtctgtacggaagggacattcgaaccgctagggcaaacagccattatatggtgctgacccggaacccttcaggacagctgcaggtaagaactgttggttcacaactttttcctaaacgggtaaattatttcatggaggcttataatgatgcaacaagtcagccattcagttatttggtgataaacatgcaccctaatgcgcaggaaacggaccgtttgacttcaaaaattttccctgacgagcaacgccaaatctacctccccattgattaattttcatgagtagtgtctctatataaaggtgtaattcgcacaaatttggcaaaatgtgttaccaattcaccccatacataagtgaaaattccgagttttttaaacgtttggcctccacaaagtcagatcagcgtaagaacaagctgctcagagaggcgagtgcagaacagatactcggattagtagaaatttgcgcgaacattttgaaatttaattttcgcctaaatacgcgtcaacggcgacgcttaattcaatacgcggactactacagggcaattgctcgttcacgaagtgagagcacggcaagaaagagacttcaagagggaaccggtgttgctctaggcgcaattattgcaccaataatcagtgtgcttgctcaacatttgctggagaaggcagcaacaacaacaactgctgtagcgtcatgaagtacacaaaaaagatgataatggttcccgagagtgaatatctcactttgataaatctgctgaagaggggaacaacaacttctggcccctatgaaagtgagagagctgaactggacacagacatccaaaaaaatttggccgatcataaacgcggagcagatgtgcaaatgaagcgccattcctggctgtataagcaaagacggcagctaaaagatttagcagaaaatagaccccaaaaggtggtcattgaaaacctggcagccataccgcccaatattgctccttatatgggaattcaggctccttccgccaaagctaagttagagacaaaagttaaaaaagcatcggataatgagcagcagaaaacgaattctttttataataggcttactgcagcaggtgatgaacggaaaagaaggagtcgtaaaaggaagttaggcaaaaaaatggtaatgaacactggcgatgagtctgatgccgacaacaatagtggagataatgccgatggctccttttattcttcagcgaaggatgatgagctcgagcagacatcttatcataaaagaaaacgagcaccttctttgttgacacaaatagaccaaacagaccctgaacactatgaagaattgaagaagattgtggaagcaaggctcataaaatatggaattgatgccaaaacgggcgcaattttgaccaatttcaataaaccggtcgccggatcacattacctgaacgcaattaagtacatgacaggccagctgaacaacaagccgaaaggacatagatttttaatccaacgcttgaacagggaaaaagaaattttaaaattcttcccacatctaaaccaatcgcagcagtccggagagggaatcaagagatttagagccaagaagaaaaaattcttagcccttgttcgcatgcaaccccctataaaaacaccgggactacaccgaactgcctatgccgaaaaactacatgcaaaatttcctccaaaacatcaacaacaaaaatttacgtttaagccagcaatatgggcaaaactgtagagaagctactagagcaaatctattatgaccttcgctccccggcaagctacgcaggggttcttaaggtctggcaagaagcaaaaaaacataacaaatcaattggtattagcgatgttcaaaaatttttgcatgatcagcgaacctacactctgtttaaaccgcgtcggaataaatttccgcgcctaaagactattccaagcggtcttcacactgactggcaatgcgatttgtgcataatggatacactgaaagatgaaaacgatgggtatcgttacttattggtttgtattgatgtgcttagtcgacgcatttttaccgccgaatctgagtctaaaaagagtgaacatatgatagaagcgtttgaaaaggtgtttaaaaaggcaaatgttctgcccaataaactgtatagtgatgctgggctagaatttcaagcaaagcgtatgttagactattggaaaaagaaggacattataaagcatgtgatgtattccccacatctgcatgccggtgtggttgaaagggctaaccgtacaatcaaggagcgtctttatcgctactttagtgaaaataatacaactaggtgggtggatgtgattgataaaattgtggaaaatttgaataattctgtaaatcggaccacgggggtgaaaccaagtgcagtgacattcaaaaatgcaccaccactatggcacaggttatataaggaagcggatatgccaattcatcaactacctcttcaattaaacgagcaaaaaataataacacaaaaaatataaactgggcgacactgtgcgcataagcaaggagaaaggagagtttacaaaaggctattatccaaactttactgacgagctattcaaaattgcncaggttaaaccaatcaatcctccctcatatagaattcgcgatttacaagatgaagagattaagggtgtcttttacgaacaggagttggtaaaaaccagtgcgaaggacacaacccaccgggttgaagtgttaaaatcgcggacccgaaaaggagttaaagaacaccttgtccgctggataggcattccgatcagcataacaagtggattcgggacgctgatcatgtaaaagagcgcgaagctaaataaaaaaaatggatgaattttatgtggtactaccatccaattcacctggaccagggaacacgacctcaaaattcactgtcaggcttccacacacgcttgagctggacgcgaactggatggtggcactttcatcaattatctacccctattcattcccatcagtcggaattgacgatgacgacttcatcagcattaaacttgtaaatccaaattttacattcgcggatgacaaacgttttgtggatattgagctaaaaataccgagcatgcaattctctagtgttggccatttaaggaaaacattaaatgacataatcaatgatgcgtataaacaacggtttgggctctcgtcacagagggccaccaaagcgaaacgccaaattgacgttacggagcttttttttcacgatcaccctgttgattattgggaaaaaattgaagagttggaaaaaaggttggttgaattgagagaggagattgcgacgaatgagagggaacatggtgccgaggtacagagcagaaaagaaaaaaggaacttgaaggtgcgttgacaattttaaggcttcgcctcaagagaaaagatgatgagctggaggagcttaagcgggcagcgaagcgtcgcgatgacgacacccctgagaatcagcagaaaaaaatacgggaattcttccatcaccatccggatgatcatgaaaaaaagttgaacgagtctcgactgatcttcacaaaatatttgtccggtttgcaagaaaaaatgagtgaatatatcggtgaaagggatgcagcaaaaattgctaaacttaatgaacagacaggaaagctgagagaaaaaatcaaatacttgctgcgcaatcttaatttgtttgagagcgccgtgctacagcgcggcgacgccaacggtgatgacacttcccgaaaaacaagagaggaatatgaaaaaagcagtcatgaacagaatagcgcatatgttcaagatttttttcaaagacacccgaccaattatttgcaaataattcataacaactatgacggtatccgggaacagttcgacaagatagaagaactccaacaaaaaaggacacagaagcagctaaaggacgacgagcactcatcgttccagcagcaaatcgaccgagcaaaataactgctggaatacagacgtaagagatttgccgcaatggaatttgaggcaaagaaacgtgatgaacagcaacaacagtcctccccgttctcttcaccaatctcagctgcattgaacgccggagaggcgttaaaggagcgattaggtgccgatcaagtgaaggagacagaaaagtcgaatcaggataataataattcgatggacaaaccaaaaacccacgctgaggttctcaaagaaaaaatacagcaacaacaagacataaccacggcgactccaacagaattgcaaaatgacggtgacaaagcggcaacagactcaaaaacccatgctgaggttctaaaggagaagatagagcaaaagaaaggcagcaccagcgcatcggttgaaagggatgatgatcgcagcgatacagtagctttactatcgcgaggtcataaattggtgagtatgatagaaaagagaagggatggtggtgctgaaagtctcgctggctcaacaattacagttgagctgacacatggagaacagttaaagaaaatgttatcgatagcagataaagagcctgttcatgatgtgacgccgaacagtggagaaggtcacacaagaggccagattctcaaagaactgatcgaaaatattgtaaaggaggacaagctgaggccgcctcctcatggttcatccgactcggatcggcaacttacaagaggtgaagctctgaaggagatgattgaaaagaaaaaggatgagcaacagcatcaatattattctgcagccaaaacgagaggagaaatttttaagctgatcttagagcatcataaatataccggagaagctgatgcgagcttcaaaggctttgttgagagcagagtaagggaaactgccgccgaactagatttcatgcgcttgctcacgatttgtgt

SEQ ID NO: 1702 - DNA, 1050 bp, Heterodera glycines
  unsure (1)..(1050): unsure at all n locations
tatgagaaaaaaatgctgcagaaaaataacnctgaaaacttttagagaacattattaaatatgtaaaatcaaaaaatgataggttttgaagacatatttacaattttcatattggcttttttgtagacctttttaggtcatttctagagatttatagttccttttacgtctgattccacgaaaaggtcagcttagtttcgttgtcttcattggtggagtttcttcaggatctgctcagtccccaccacaccaattatcgggttagaaataattcttcatagctaatcattctgttgcattggctttgtttgtcacaaaaaggcctttcaatgtttagattggcccttacatggactccctataagattatggaacttggtaatatgagaaaaaaatgctgcagaaaaataacctgaaaatttaggagaacattattaaatatgtaaaatcaaaaaatgataggttttgaagacatatttacaattttcatattggcttttttgtagaccattttaggtcatttctagagatttatagttccttttacgcctgattccatgaaaaggtcagcttcatttcgttgtcttcattggtggagtttcttcaggatctgctcagtccccaccacaccaattatcgggttagaaataattcttcatagctaatcattggctctgttgcattggctttgtttgtcacaaaaaggcctttcaatgtttagattggcccttacatggactccctataagattatggaacttggtaatatgagaaaaaaatgctgcagaaaaataacctgaaaatttaggagaacattattaaatatgtaaaaaaaaatgataggttttgaagacatatttacaattttcatattggcttttttgtagaccattttaggtcatttctagagatttatagttccttttacgtctgtttccacgaaaaggtcagcttcatttcgttgtcttcattggtggagtttcttcaggatctgctcagtccccacgacaccaagtatcgggttagaaataattcttcatagctaatcat

SEQ ID NO: 1703 - DNA, 1845 bp, Heterodera glycines
  unsure (1)..(1845): unsure at all n locations
aaatcaaaaaatgataggttttgaggacatattacnaattttcattattggcttttttgtagaccattttaggtcatttctagagatttatagttctttcacgtctgattccacgaaaaggtcagcttagtttcgttgtcttcattggtggagtttcttcaggatctgctcagtccccaccacaccaattatcgggttagaaataattcttcatagctaatcattggctctgttgcattggctttgtttgtcacaaaaaggcctttcaatgtttagattggcccttacatggactccctataagattatggaacttggtaatatgagaaaaaaatgctgcagaaaaataacctgaaaatttaggagaacattattaaatatgtaaaaaaaaatgataggttttgaagacatatttacaattttcatattggcttttttgtagaccattttaggtcatttctagagatttatagttccttttacgtctgattccacgaaaaggtcagcttcatttcgttgtcttcattggtggagtttcttcaggatctgctcagtccccaccacaccaattatcgggttagaaataattcttcatagctaatcattggctctgttgcattggctttgtttgtcacaaaaaggcctttcaatgtttagattggcccttacatggactccctataagattatggaacttggtaatatgagaaaaaaatgctgcagaaaaataacctgaaaatttaggagaacattattaaatatgtaaaatcaaaaaatgataggttttgaagacatatttacaattttcatattggcttttttgtagaccattttaggtcatttctagagatttatagttccttttacgtctgattccacgaaaaggtcagcttagtttcgttgtcttcattggtggagtttcttcaggatctgctcagtccccaccacaccaattatcgggttagaaataattcttcatagctaatcattggctctgttgcattggctttgtttgtcacaaaaaggcctttcaatgtttagattggcccttacatggactccctataagattatggaacttggtaatatgagaaaaaaatgctgcagaaaaataacctgaaaatttaggagaacattattaaatatgtaaaatcaaaaaatgataggttttgaagacatatttacaattttcatattggcttttttgtagaccattttaggtcatttctagagatttatagttccttttacgtctgattccacgaaaaggtcagcttagtttcgttgtcttcattggtggagtttcttcaggatctgctcagtccccaccacaccaattatcgggttagaaataattcttcatagctaatcattggctctgttgcattggctttgtttgtcacaaaaaggcctttcaatgtttagattggcccttacatggactccctataagattatggaacttggtaatatgagaaaaaaatgctgcagaaaaataacctgaaaatttaggagaacattattaaatatgtaaaatcaaaaaatgataggttttgaagacatatttacaattttcatattggcttttttgtagaccattttaggtcatttctagagatttatagttccttttacgtctgattccacgaaaaggtcagcttagtttcgttgtcttcattggtggagtttcttcaggatctgctcagtccccaccacaccaattatcgggttagaaataattcttcatagctaatcattggctctgttgcattggctttgtttgtcacaaaaaggcctttcaatgtttagattggcccttacatggactccctataagannttatg

SEQ ID NO: 1704 - DNA, 1332 bp, Heterodera glycines
gttagaaataatctttcatagctaatcattggctcggtttcatttggtttgtttgtcacaaaaaggccctttcaatgtttagatggcccttacatggactccctataagattatggacttgggtaatatgagaaaaaaatgctgcagaaaaataacctgaaaatttaggagaacattattaaatatgtaaaatcaaaaaatgataggttttgaagacatatttacaattttcatattggcttttttgtagaccattttaggtaatttctagagatttatagttccttttacgtctgattccacgaaaaggtcagctttatttcgttgttttcattggtggagtttcttcaggatctgcttagtccccaccacaccaattatcgtgttagaaataattcttcatagctaatcattggctctgttgcattggctttgtttgtcacaaaaaggcctttcaatgtttagattggcccttacatggactccctataagattatggaacttggtaatatgagaaaaaaatgctgcagaaaaataacctgaaaatttaggagaacattattaaatatgtaaaatcaaaaaatgataggttttgaagacatatttacaattttgatattggcttttttgtagaccattttaggtaatttctagagatttatagttccttttacgtctgattccacgaaaaggtcagcttcatttcgttgttttcattggtggagcttcttcaggatctgcttagtccccaccacaccaattatcgggttagaaataattcttcatagctaatcattggctcggtttcattggtttgtttgtcacaaaaaggcctttcaatgtttagattggcccttacatggactccctataagattatggaacttggtaatatgagaaaaaaatgctgcagaaaaataacctgaaaatttaggagaacattattaaatatgtaaaatcaaaaaatgataggttttgaagacatatttacaattttgatattggcttttttgtagaccattttaggtcatttctagagatttatagttccttttacgtctgattccacgaaaaggtcagctttatttcgttgttttcattggtggagcttcttcaggatctgcttagtccccaccacaccaattatcgtgttagaaataattcttcatagctaatcattggctctgttgcattggctttgtttgtcacaaaaaggcctttcaatgtttagattggcccttacatggactccctataagattatggaacttggtaatatgagaaaaaaatgctgcagaaaaataacctgaaaatttaggagaacattatta

SEQ ID NO: 1705 - DNA, 5429 bp, Heterodera glycines
  unsure (1)..(5429): unsure at all n locations
ataaagaggtaccgaagttggaattaacaaatgctttttaaaatggcaaacccccaaaatatgttgatgatttttgcttaattcaaaattaggcggagaaattaaaaacttaataaactggccctaattaaataatctctatttttggatcagctttagtgaactcctcgcttagaaaagagttaaattcttataaatcaatcgattcgtctcgaggggttaagcaacgccatctgatgacagacaaggagaggttcttgtaccggttcaaaaccaaagaaaatttggtgcaactaatgttaaatttgaaaaaacaattattttgcttattgcgctaaaaaccagcgcactctcgactacggcggccaataggtggggcgagactacgggctccggaagaaatccgcgcgtgatccgcagcaggttcgacttcatccccaattattagacttaacttgtcaagagctttcgaatcatgccaaaattgctgaaaatttttatttaaaatgtttttatggttgattttggttcaatttttcgtgatttaaaccggttaaaaaaccgtttttttattttccgcgcctagggactattattataatgcttagaggtcattagagattgattgcaactagttttaggcggtttttagcggaccaattctatttgtttagaaattatttgcggcaaaaagaagtgtaaataaaaaagtgaagaatttattacattaaaaaaataacagaaaaaaggattcacaaaatatgaattacaaacagtataaaacaaaaaaaggcaggtactgtaattgtgctactatcgactgtattcccaaagtcaaagggcattatttgaacgcgtttgctgccgttctgctgatctattctacggtgtctcagtgctttacgttagtgtatacggtaataaatggtcgtttggcatactgtaactctctctctctctctctcattctctttctctctctctcatttggcgtttcgtcctccccacatttcttcactatgcttcgactttgcttttggaaatggacttcttgtcctcctcctcgtccttcaccagcggaatgccatatcgaatcaattcgcagcccaactcaaacaaatattcgtaacactccaacctgtgcagaatgccaatgtttccaaatttaaataaaaatccaattttaaaaaggcattcccacatcattttggtgcgttgccaagtgttgctgccgaacgcaaaaaagccatggccgcggacaagaacaccactcgcctcggggaacttttgcagaactttcatcagctgaggctgaaaaagcttaatcaacggctaattaagctaacattaaaaaacaatgaaataatgctaacaataaaattaaatttgaatttccaattgaattgaaattggcacggcttacacaaagaacgaattcgctgatttcagtctcgatgatcggcaccacaacagtgtcaatgttttccattctgcgctttgtctgacgattctcaatgccctgaaacctttcaattatgctaatttgactcccttttcatcacttggatcatttcttggcccgaaatcataaacacgtcgccggtgatcagttgcgtgatcaaattggcccattttgtgtgcgtgtgaatgatgcagaccaaatctgaatgaaaagtacgaatttacttttggataggtggacggtgaacttaaacgttggcattttgaatgagaatttgtgccgttctgtttccaacccaccggggttatcgcgcagcaaataaaacggtgccgtcggcgttctgtccgggtctgacgggcgctttacaactgtgccgctggccttcatcacaaaatgctcatttcttgaggagggtttaattaggattaaagcctaagcatttgagatactcggcgaatatctccttggccaacgagttggacgtgttcaaaatcagactttcgcccgtcttccgacagcgaaagcgcgcggccatgccggcgccgttgtcgcgcatccatcccaaggcgtagaagtggcggatcagctgtgccattcgtgccacatttatcggcacattgtcctgaattttaatttgctttcatttctcattttaatcgctttacttaccgaccacccctcgccatcgttgtcctttgccacctttttcgcttcctcttcctcctccttcttctgctgccttcgcacttcgtccttcagtttttcgttggagcacggcgaaatgccacgcaaagctttgaaagtcatttcaattttaattctcttaaataaaaatgaaaaataaaatactaattctctgtttggccttctctttccctctttcttcgtcttaaatacgcctctttcggtgcccttttcttcatttaattaaatttcacaatgtcctctcattttgcactttcttttgcgcttttttagtcctgaaaatgagttcgctttttgctcaagtgcaattttcatgctgcgattggtgcgccgccaccgccaaaaaccaattaggcaaataatttcataaatggtccgttcatttcttcctaatttctgaaggagcaaaagggaatgcggcaaagcaataaatacattggttaattagttaatgaattggtcggttcggagagtgccgagatggactgggccaagaatggctgttgatgatcagtcgcggcgaacaaccaaaaacattggcaacaaaaccattggaggagataaagggacggacggacagacgaagccaaaagcgaaacacgcaaaaaatggggtggccataaatggtaccattttcttggctatttgatttaaactatttattttcatttcaacataaatttaaaaattaattttaactattgaacaacttcggattttcgggctcggccctcggtctgaaatatgcaaaaagggcatctttttatagggcgataaaatggtatcaaaaagttttcgttcattatgattttgatacaatgtttgcatttcttttcttttttaaatttatattctttatttacccagaaaaaatattaaatatcgcaaaaaataaataaatgattgaaaacaaattcgaattttggtcacaaaaaaaagatgaaaagtccaaacgaaaagcataacattttggactaaacttattagtaaattcaacatattttaaattaaattaatcatttttaatgatttcaactcaaattcgagtgtcccgtcccttcccccccattcattggccattcattcctttcccttttcagaaaatcgttcgaaatcccatcgagtaaatttcgaattcgatttgttcttcaatctcttcggtttttaaacagttcgtaatttcatcgtgctcttcatagtcctcgctggtgattgtgttgttcgccacaattccctgctgcattatccgtcccaattgttccaattttttctttaccatttcctttgggtactgtaagtctaccatatccaacgcgttgtgtacaatcataaacacattttgcgtttccttcaacaattcgaacgtatttcgcagttttggcttgccattgaagagtttgtgccgtttcgatatgtgtctctcgaggcccttgtccaattctaaatttgtaatttaatattcaatctcattcgaatttttctaccaattctaaattgtgccatttccgttttcaacatttttccaatgcttttgaattgtgcgcaaatgtccgtttttcgtctttcaaacatttcgttcgcttcctttcgcacgccatcaaacaagcggaccatcagctgcccatttggcacttctgaagtgccaattaatccttggcattgtctttccgtttcattggtagtattcgaaaacacaattaaaaaattagtgccgtaaaatgtggcgccgttcgcttccaaagtgtccgttgctatgtttcgtagcatttcctgcgtggctcccactatcaattcgagcacaattttgaagagtatgaccaattttgccgcttcgtcttcgcttctgtccctttccacttcggccaattggctaattgccttcgtaaatggcattttcccataataactcccgttgctttggcgaatcattgtgccaattctctgttccaaactctttgccaattggtccacccctcccattgggccttcggttgggctgaaattgcgcagcaattgccaaatgtcgttccattcgaccaaattggcgtccatcagtcgctgcacttggcaaacccgcgcctttacgaggccaattccgtgccgtagccttttcccgactctttctccgctctcgctttctccgccgattagaaaattgtcgcagaaatggcaaattttgagcgcgtgttcaagaagcagtgggtctatcagtttggcctctccccgcgcgaactttgcttgtgtgaatttggccaattgctgcgcgatggctttcaaatgtaaaattttattggccatcgcttgcgccgtggcattttccgggaaacgctccaactcaagaatttgatcgcgcataattttcccaaaagtctcaggagggatttcgcgttgcttatctaattaaacggaattaaaaatgttaaccattttttgaaagcttttattgcacttactgttgttggaccgacataatcggccgtaaatgaaggaaaaaattattagaaaattaaaaaagaaattaaaatatttcattttttcaaaaacccttatgagtgaagaatggacggaagtaaagtcactaataaattgctttctttaagaaatggccaaatttgttgaaattttttataaaattggccacgtttccaagcgaaaatttgccaattggaaaaaagcattgattttaatttgttgacaattcaaattatttttagatgaaaatgtataaattatacaaaatatccgttaataaattgcagcaacgcccacacaatgccaatgcttaaaaattccatttcattttgcagttttcctgcgaccccagcagttcaggcgccgcatgtggagaaattttgagaaaatttcgttttttgacatcattaaattaatcgtatagttaaataaattttcttcacaaatgtacatgccaaatgtttgtccccaaaataccgcccgtagtcgcggaacacgcaaagtttgatgcccccccccccctcatttgtatttttaaaaataataataaaaaaaatccctttctaaataaaaaataaataaaaaaaaatttttcaccaaaatttttgtctgctttcgccaaagtcaatttaaaaatataaaagggctatcgttgtccccaaatattttaatgaaaacataatataaaacaatagtttttaatccgtttttatattgtctgtcaatccggaattatttatttgnggtaacacattttaatcctttttttacatttttctcgcgagtcttt

SEQ ID NO: 1706 - DNA, 11202 bp, Heterodera glycines
ttcatttatgaatatctttcggatttcaccccttcggagattccctcccttctccgctgcttctcctccctcattcaattagcctttgcccttaaatgctttgtagagaagtgccgcgccgagtcctgccgcggcaccgcctgccattgccttcagtttggtgccgcgtcgtctccgtctgagcatttttaaaagcatttagcaatttctcatttttaaattcgttttacattttcatgccattcccttcggccggcaccgcacttttgtcgaccaaattcgcctcggggggcccctctctcttttgaattcgtttgactttttcatcggtttggccaacggccaaaagaacaggcgccagcaaaagctgaacaagcagtgccaaatggagaagctgaacgagtcgcatttgagcagagaaaggccaaaaatgaattaacaaatattagcggaattatttaaaacctaaaataataaacatttgaataaaatcaaattaaaaaaacgaaagaaaaattgagataaaacagaagtaaatcaaagtaagtacagtttgtggaaatatttttattacgaattacacatcttcgagaacttaaacgacgaaatcgatggtccttcccttcttcgtcagtctgtgaaatgggccgcgaagttcgttgatcccgtgatcattcattcattcattctccatttatttcattttatttggggttgcgctccaaaatatgatcggacaaacagagcgcatttgataaacaatggacaaaggggagaaaagaaaagggaaaatgggcgggagagaggggcgggtgagtcatcgtcgcccgccgcgacactttcgagactcccgcggagagaaattgggaaatgttttattagtaagaatttggaaataaaaatttacacaacacaaagggaattagatattaataatgaaatgtaaaaatataattattttaaatatttaaaatcaaattatgctttaatttgtgcatttttcgcattttctctccgccgcttccgaatgattaacttcccaaaaacagccacaaaaaaggcaccgatcgcaacaccagcagcaaatgttagcacgtggaaaagtgcgattggcatgggagaaaaaagctaaaaataaaaaacaaatttaaaaaataaaataatttaagaaatataaaaataaaaatgggaagcgatgacagaacgaatgaatgaattctgctgaagcaaaggatgaattcttttgataatgctttctccaaatttgggggatgtattgtcggcactgaaacattttccgattatttggcgaataaacggcgacgaacgaaagaatggataatgaatgagtcattattaatgactcattcattcattgaccaacgaatggacaaatgtgaaaagctaaagaaaaagacaaacgaagtgaaaataattaatttgaaaaagaataaaaattaaaattaaagaatcgctgttggtttgtgtttggtgccgtgccattttattttgcctaaattaacaatttaatttaaaaaaaattattgtttcaaaaattcactccactttttgattatttcttatcagaaaggaatttaattgataaaacgacaatttcttggcctttggcaattgtaaaaaaggcaattaacaaattaacagagtcacttataccatttaattatttaattaatgaacgaagtaaaaacaataaaaaataatttaagaaatgaaattaggctgctatttttcactttacattttaattatttttttttgctgcaatttttgctcaatccgtgccgaagaaataattgtggaaacaatttatggaaaattgaaaggacaaattcacactttggcaaacgaattgggacaaattgacactttctttggcattccttttgcacaagcaaaacgatttgaggttttaagggaaaatgaaaatttcaaaatgaaaaaataaatttaaaaaaaaaagttgatattcattgaaagaagccaatcgcaccaccaaaatgggaaggggtccgatcggcggtcgaccaaccgcccgcctgtgtgccacacgcaaggccaacggaggaaggcatggctgatcagcagccgatcagcgaggactgtctctttttgaatgtcttcgcgccacaccgatcggttatttaattcaaaattaacaataaaaaaaataatttaaattttttgattaaaaaagacgtggcttttgtacttattaagccttctgctgagcagaacaaaacgttccctgtgcttgtggtgatccatggcggtgcttatgaaattggctcttcggcacgttacacaaagtacgaagtgatcggccaacgatttgtgacagacgcaaattcgcggggcattgtttttgtgagcattcagtatcgattgggagtgatgggtcggtagaaaatttaacaattttaaagaaatattttttaaattctgtgtaggatttgccaccaccggagatgaggaacttcccggttgtttgctgaacattttaatcatttttaaattcattttcaaatctgtcatttttaaaggcaatttgggcatttgggaccaaatttcggcacttcaatttgtcaaggacaacatcgcggagtttggcggcgacccgagccgagtcactgtgtttgggtacagtgccggctcgggaagcacggctttgctgagcatttcgccgaaaagccgaggcaaggaaattgaaaagagaaaagcaaaattaaagaagaagggaaagtgccgaatgatttggctaaatgacacccttggcacatttcaaatttaaccatggattggtaaatttcgtccacaggtctcttccagcaagcgattcgcatgagcggcacaccgttttcggtgtccggcagcggcacttttgtggcggaagagaccaaaaagttggccaaagcgatgggatgcgcagcgaatcggacaaagcaatgcctaagcgagaaaagcgtggagcaaattttcgatgggatagacaaaattgtaaaacattccaaacccaccgtattttactctattttattatttttatgggcctgctccgctttcggtttacattgccaagttcagtccacatcgcttggaccgggaactcttcccgcaggattatcccgaaatgatcgccactgcccctcccaagaaaatgattatgggttttgccgaattggactttttgctcttcagtaatcaatcaaaatgcatttaacagcagcagttataaataaattgtttttaggcttaatttcgagcaaaaacaacagcatttccatgttggcacttacggacgaacaaattgccaattacgaccaaaaagcatttgaggcatctgtcagtgaattcgtcgtcaaggaaaaatattttggcaatcagacaaatgaagtcaaagcagaaattgtgcacttttatgtgaacgaatatttgccagcggagacagtcaaagaccaaaaattctttgtgttgctttacacaacggttaattacataattaatcggacggagggaaaatgggggaaatgccaaaaacaaataaaacggaaaaatcaagtgccaactaactgatcagaaaccaacttttttgatcagcatgccgagcaggcattcgaagaatcgagcccaacaaatttgggcatctgatgaaatccaaaagaaagggcgttaaaacattagttttttggggtttcacatggtcgggaaaaaaatcgggtcgtcaaaagccaattattcacggggggagggagcataatgtataatttctttaagttttagttgctttctgatctgatggacgttgtgcctaccttatgggaggcgcaaattcgcctcgcttccaattggccaatttatctgtatgaaaatgtgtactttaacccggcacagttcccaaagcgtgccataatccaaggcaaattaattaaaatttgaaaaaataaaataaatttaaaacatttcagcagcttatcatggctttgatcactctctgattttttatgatgaattcactaaaaagagcgaagaagaccgaaaaatgtccgaatatttggtgacggccatcaaaaactttgtcattaacgggtgggtgttctaatatgataacataaatttaattaagtattttagtgatccgagcaccgaaacaattcgatgggaccaattgacagattttccatctattgaacgcgttgaaaaggttcaacacatgcgaatggaggcaaaaaagacggggatggtggacggaatgaaagccgaactgagaagagcgcgtttctggcgagaattggccaaaaagtacacaaactttgatttagtccgtggcactttcccagaaaaaagtggacagtcggcggcatttgtcccttcggcacaatttgctcaaatattttccattttcgctattgtcgcaatcatttcgctgaacaatggcatttattgataaactaaaatggcgtgcattttgcaaatttaaatcagagagaaaaaatgaaccaattttccaatgggaaagggaagaaataaattaaaaaaccactttttgcctttgcgaggcacttttccaattggtcaaattagagctcgatttttgagaaaaggactaataattgggtagcaaaaatatgtaaatacatattttttcctgtaggttttatacctattgtgcatattaccctttacgaagaattttttccctaaaaaaaccatttaaaaatttatttatatatttggtacataatttacagggctttcaaaaatatgcatgaaaagtggccaattaaaaattttattcctcataatttgatcgattgtttttgcaattgcaaatcaaaatttctcaagattttcgccagcgaagctcatgaagctcactgttgacccactcgcgcatccattcagatttgatttattttttagcataatcaaattttttcctaagggatattcaaatcggaaaatatttgacaaaaatggcaaaataatatgcatttgcatatttttgacagccctgataatttgtttttttttgtgcatattcttacatatttcgggatttttttaaatatttatgtgcgcattttgaccacttattatatatattttttaccagccctaatgactaaaataatcagattaaattacaaaaacagtccagtattttggcaagtttaccaaaaatcgacatttttaattggattataaaaaatgatgcttgaaaacaaatacacccctgacttagaaccccctgaaataaagccaccctttagagtggagttgaaaaatatatacccgggggttctaaattcagtaaatacggtttgattcctttagattggacgcctaaaacgcacttaagcaattctcttttcctctttattttttcttattaagaacagagctcaaaaataaaaattaatttggccagctttcctaatgaggtcttaaatttttaccgaccttttctctttattttgcgctgctaattatcattaaatagttcagtgataatcgtttttcagtcaatgcgccctttggcggatctaaaaataaggaaccaaaagaggcgagtttttgacccccttcgcccgcacaaccgaataaaagttggttttttagggatccgcgcaccaggcggcttgagtggagggtccccccccccccacgggtgagtgattaatttgtagaataaaatttcttttctcattttcagatgattcggaccaggaggagaagcacggacaaaaggaggagaaggccacaaaaagagaggcaaattttcgaaaaaaataagacgactcgatttaaaattttacgcgatgaattttattgaatttttaaaccgcacattcgtcaactttggccgcatatttcactcaccgcaacagactcagcgaaatcaaaggctgcttgctcatgggcgactgagtcgtgatcccagccaaactacgacagcgcatcctcaccacactacatttcacccatcctggaattgtcgaatgaaaaatttggccaaacaatttatgtactggcccaaaattgatctcgacattgataggtgggttagaaattgtgaagagtgtgccttagcagccaaagcgccacccaaagtgccgcttcaaccttggccagcatcaactcaagtctatgaaaggcttcacatggatttcgctggtccatgtgcagatggtaacaaatatctggtagtggtggattcattcagcaaatggccggaaatcattaaaatgaagtcaaccgaacaccttttgatcgaacagtttgtttggttattttcgcggtatggtttcccaaaagaaattgtcacagacaatggccccccattcaaatcgcacgaaattttcacgttttgcagttcgcatggcattcagcaaacattcgcaccaccttttcacccacaaagcaatggccgtgccgaacgattcgtcgacacactgaagaggcaaatgaagaaatgtgcgcgtgacgatccacattgggtacaaaattcactgctcgcgtaccgcaccacgccgaacgcaagtttaaatggtcgtacgcctgccgaattgttcttagggcggcccgttcgaactgttctatcgttaattaaaccaaattcccaaaaacaaaaacagggacccgtgttaaacgagcagaacagcaaaatggcgaaacaattcaacaaacaccatggagcacgaaatcggaacttttccatcggtgacattgtccacttcatcaattatcgcggcccttcaaaaatgtggctgcgagggacaattgtgtcaggaaaaggtgtagtttggcgaattgagtcgccacaattgcatgccgttgtaacccgtcatgcaaaccaaatccagaaattcgatcccattccatacaaggaaaattcggacattgacaatcaggcacaaggcgaacagcaaccggagacaccaaaccgatcacctcgtagagttcggttcgctgacgaacagaacgaaccgctcgaacagatacaaccgattgagccgagacggtccacgcgccaaagaaaagccccacaacagttggacatggacgtgaccaaacccaaatatgattatgtcaaacaggggaagacaaattaaagggggagatgttgggatgttgtcagcaattattattttctctcgctctcttccctttagtcatttctctcttatttttccacactctctctcttgcctgaggcgcataaatagcgaccgttcccttccctttctgtccgtctcccagtattttccaaattcagtccgtttttgccattcagctttctctgtctattttattattatgtttattcgcttctgacttattttattgtgttcaataaatattggtgtttgtgttctcccaaccaaagaacacaacacttgcttatgtgtctagagatagaattcggatcaccggaacaggacgattcattgccgcgtttcattgcccgccgtttctgtataaatgtcatattcgtcgtattcagcgaccccgaaaacactacaatagactcattttcgggcttttatatgcttataaaatttttgacgtttcgtggcttggacactgttgtgatgccactgattgcaattataatacacatcatcccaaaaaacgagattttttgcattttgaggcacttttcccattggtctcaataataaatcactcctccgctgatgagttgggtcggtcattagtcccttcttaattgggctcacatgaccatgagcaaagcatagtgaattacatttcaaatcagcagcaaaaactcattttgtactgctgaacagaggcaaattccattgaaaatggacatggatggcattgattttgttctctcatttttcggcacaacatttttaaaggcggtgaaagaaagtcaaatattttcattacttaattaataatttgtcatttccaattctttttaattatgatttcaatattttttttgttcgtataaattcggtctctaatgaggcccaccattctctgcagattttgcttaattcactcattacatttcacttcaccaaaatgtccgtctcttttcccgaagagattatgccgccatcctcaagtgataacccaaaacaaaatccattcaccggcaacaatttttcgtcaaaatattggcaattgctctctgaacgcaccaaactgccagtttggcgtcacagagacgaattcatttctgcgttggcaacgcaccgatgcattcttttggaggcggagacgggcagtgggaagaccacacaggtggacgacgagagaaaacaaatcccagaaattatttaatgcattttaaaatgtgtgcaatggttcatttaagagtgatgtccaaatccccctcccccacagattccccagtggtgcgtccaatggctccgaacccgcgacccccacaacaaatccatggtctgttgcacccaaccgcggcgattggccaccgtttgcgttgcgcagagagtggcggaagaaatggacgttatggtgaaaaaacacaaaaaatattatataaatattataaatagtataacatttgtaacattttgtttcagttgggcgaggaggtgggctattccattcgttttgaagaggccctggccacagcacacttttgaagtgggtattttcacaaaagtattaatgattgaattataattcaattattagttttattttatttgctaaataatacatcataatttagcttaaacttagtcaaattaattaaatttggtattgaaggaagttcttcgtaccctctactatataataactttttgaaataaaatttacaaaaagttgtttaagctaaattatgttgtattatttttaaacaaaataaaaataattattattttaaatatttctatcagtcacccttctcaggtattgcaccgacggaatgcttttggccgagtcgtcccgtgacgaattgctgaagagttacggcgtcattctgctggacgaagtgcacgaacggacgatgatcaccgacgtggtcatgggactcatcaaagtcagtttgccggatccaataatttgttgtgccaaaattgccagattaatttttgagattcttttccatttcgtttctcccttttctcgaccttttcaccatctccttccgttcgctaattatgccttttttagcgtatttccgaatttcgtcccgaattgcgtgtcgttgtgatgagtgcgacactgaaaaccggcaacttcgagcagtacttttacgggtgccatctcatgaaaatcagaggccggtcttaccccgtcgacataattgtaacaattgctgcgctttcccattttggtccattcattaagtaattgaaatgtccgtttagcattcagaaatcaacgcagtgatcgacggcgacaattacatcacaaaatccgtctccaaagccatcgaaattctccaaaagacggaaaggggcgacatattaatatttctttcgggattagaggtgcaaaaaacaacaaaaaataaacgaaaatggccatttaggacattgaaaaatgctgtgaaatggtggaaaatgaggcagagaaatgcggcggaagtggccgattggtaattcacagggaaattgggcgaaagttcaattagaatatatttatttttgttttcgattgtgattcctctctatggctcaatgcaaaacgaacaacaacaaattctgatggaaacacagcaaaaagacggtgggagagagtgaagatttggagagtgaagggggggggggcgattgaagaggtccgattgccgacagattttacattaatagtaaggctcaattttatgggtttatatgtgactgtaaatgccgacaatccgctgggagaatttcttaaagtattgtgatccaacggaatgaatcagccaatgtctcaatttaaacgacaattttccacatttaaacaaattccaatcgaaaaacaccgtttttcacaaatgtttaaggccctcgtcggtgtattgtggccacaaatgttgccgagacttccatggtaattctctttcgcgggaatgtccgaatttaccgctttcccgcgtcagaccatcgatggcgttgtgttcgtcatcgactcgggcttctgcaagcgcaaaatgtacaatgcgcggtccaagttggagtctctgctcgtccagcgcatttcgcgcgcctccgccacccaaagggcggggagggcgggccgaacgcaacccggcaaatgctttcggctgtacacggagcaatgctttagggaaacgatgaaggaaattgtgccggaggtgaaattgccgtgatttttgggggtttaatttgtgcctttctttgctcagataaaacacaccaatttggacagtgtgattctccgactcaaaaagtgcggcatcgacgacatttaccaattccatctgatcgacgcgccttcgcccgactccattcaccactccatccgacttttgacagacctcggagcattggaccgtaagtttaaggaaatagagaaatatttattgtccccacaaagattacccaaaaacggtgtgaatgaaatttaattaataaaattaagaaacagttataaaaaatgattgttccgcaggaattctacaatcgacagaaaattcgtctttgagccgctcaacccgacgaaattttatattttttgctaagttcacatttgataacgttggacaaagcgttttaatcactttttgaacaaatttaaaatcagaattatataaaatataaaataagcttcgtttaacaaagcagctagtcctatgagaattcttcccctgaacggggttaacacttcctctgaccttttaaaacggtcaaacccgaacatatttggtatcgttcgggtgctcttgatgagctatgtctataaattcgagaataaagtcgaacaacgccgtttgagcaccaattaactcgatgggcttttccaaattaaaaccgtttcaaattatgatgatgttctctaataattacatttgtctctcaatgtgtcagatttgggccgtatcactccgttgggtgaacacattaacattttgccggtcgacccgccgttggcccgaatgatgttggagtcggtcaaattgcgctgtaccaaagaggtgatttgcatttgcgcaatgctttccgcgccgaa

SEQ ID NO: 1707 - DNA, 616 bp, Heterodera glycines
cgcaagtgcggacaaaaccgtgaagatttggagcaccgttgacgggaaattggagaagactatccaaggcatgagtttttgagtttttcttgcattaatgtgatctgttcccataaattttccgggtgatgggggggggaggggggaacgttatgacccggtccatcggtccgataggcgactcctaggaaaatttttggaatttttaatgcattttgttaatttatctttaaggaaaatcactgcttctttttattctacatttgtttaggtcataaattgggaatcagcgacgtttgttggtcgtacgacaaccgaatgattgtcagttgttctgatgacaaaacattgaagttgttcgatgtgcaacaggtcttttggtgtaaatcagagttgccgagttaaatatcgggtttttaatttccggtttcttgtttaacaaagaattcatatgaaaatgggttttggcagctgtgtcagaatttatactactaaaaaattaatccatttttcataagaattacagggaaaaacattgaaaactttccgtggtcatcggaattatgtattctgttgcaatttcaaccctcaatcgactcttttggtctctggctca

SEQ ID NO: 1708 - DNA, 1192 bp, Heterodera glycines
cctggattttcctggacaaaattttagaatttattattccaagtgaccgatgttttttaatttttcaaaaaaagattaaattaatttaaaaatacattattattattatcagatatttttaggtgtttctaagaattaattaattttttcaaacatttttttgatttttaagatgagttccaaaaaatccaggtccaggcctggatccaggtctcgaggagcctggagttttcctggacctggatttttgtccaggaaatcaaggtccaggtccaacatgtagtccaggtccaggcttttttcaaaatatcgagctctattagtaattttagttttgtatgaataactaattgccagtactttattataattgcatgtcgttgttcagctcagacttttttccctttcttttcgcccattgccgctgcaaaggccgcttcgatcgctttttcgtaatttacaccgggcacaaaaaagtcagggaaaagttcagccgctgaattttaacgaatattttcaagactaagttttgttttagaaaactgtaattacccaatggaaattgacttactcggatcgttggcgtattgcgaaaagtctttgactccgacttcctttagcacttcttcgtcaattgcgaaatttcccgtgtaatcgcgcgagtttttggaaagaatcacataagccgcgtcggcaataatttcaggcttaaacaaaagcattttaacaatcctatcaatatatgccattgttttcaaaacgacacttaaaaaccggcttttcggctaacataaaattaaaaacacgaattaattggtatttttatattttaaatttggggggggggggaaccaaagggaggacccttttgaaagggaattatttcttacccaattttcggtttcatcattttttttgtcgcatcagtttgcttccccctcctttcgctcacttttctcgaattgcgctgccctctgcccgaagtgagcatttgtgtggctgccgtccaaatggtcgtccgtggccaaagtgcgttcactgcgatgccatctttgcggaactcttcgtgcattcccaacacacacattgacatgccgtacttggacatggtatacgcttaattggcctttggcgacagaatggcacaacggatgactcaccgacgtgaggagcgaaccattgtttatccatc

SEQ ID NO: 1709 - DNA, 2322 bp, Heterodera glycines
taaataaaatatgtataaaaagccaaaatgtgtatgactcacaaggaaatccagaaatgtgtacgaaaatatttaaatactttttgaaatggttatttttggaaaaaaattcctcgtaaaggtttcagagcatggagaatccaagaagcaaaaaaaacaatccctataattaggacctttttatagcatttttttgcttattcacaactttctaatatttttgattaaaaaaataaacaatttaaaaattttattttcatattttggttttacatttttcttacatgttatttacatattttgtcactttttgtgcatatttttgacattcctaatatgttagttattttttatttaacaaaaaaattttcacatttttatttctatattcaaaagtgattaaaaaaagagaaatcttttaaatttggtcgctattaaattttcagaatggaattttgagtaaaatatttcattagaaagcaatgttgaaaaattgaaggctcgcttcgtagggggtgcatttttaaaagtttttatcgaaatatgcaaaaatgtgtccccaaaccccaaaccaaccgtcataattggccattaacgcgaccactgagtctctgccgctcaaattgcctttttgagatattttttcgacttcaacgaccaaaaagcgtaaataggcgaccaggaaaaaggagctttcggcctcaatggaaagctttgcccactgattgatgaaatcgatgacaattttttggcgtttgtcggccgagtgatagtcaatgccttccccaccgttctgtgccgattgtccctcgtcattattgccatttgcgttgctcaattcttccgctttgtatttgcgcattgtttgcgccgccacaaagttagcattgttatttgtatcagtattattattgttattgttaacggagggaattggtttctaaaaagtgcgcaaataaatatgatgactaaggctgggatttttaagcacaaaaatcgcaaaacaggcactaaagattgccgttaaaaaattgaccaaaattataaactgattttgtgtattggcgcaaatgggactgggtcgttttggcgccgacgttttggcgccagcatcagtttttttattataactttttttcttgttgaccaaatctaacaatcttggtatcattcgaaagcccttcacaagctctattagccttacaaaaaacaaacaaaaattttagcttctaaaaaaagttattaagaaaaaacttgaaaaatttcgacttttttgcaatttcatgatataacttttttggtaattgtctaatcgcgaagcaatagcttagaaatatcttctaaacatgttaagctttcgattgataccaagattgctggatttggttaacaacaaaaaaaagttataccccaaaaacttgggctggcgccaaaaccgtcggggccaaaaaaaaaaaacggggcctttgagtgtcatcccattatacggtttaattactaaacattccgctaatcccccccccaaaaaaaatggcactttttcaatttcctccgctgcactgtaaattgtccctggcaactttgggttgccctgagttgtcttcgcgcaaatgactatattcgcgccgtctttggccaatttaagtgcaatttccttgccaatgccacgcgatgcccccgttatgacaaaagttttgccgagaaattttctaaacatgaaattattttgtttcataacagcaagggaatgaccaaccccgtgttgagcatgactaatgggactcagaaaggtgttgacaaatgaaaaacaagtgcttttaaaagtaaataaatatgtaaaaaacaatttaactgtaaaaaattaatttattagtttattatcactgattaggtacttaacatcatatcattgataagttattcaattgtttacgaatcaaaaaataaataaacaaaaatgtgttacataggatattgattgtttgttttcgtataatttcaatttgtcggttgcatcactttggcaatttcaacctcctcttttgtaatgtccaaaaatgacaaaataaatgcatcaaactttgctaaaaaattcattgtcagatgaattaggtaattaagcaagagcaaataagcgagaatggttaatatgaaacgaatgggttaaggaaattgattgtacagctcgagggataccaacaggagctcaacgacatccgagtcaaggctgacgccgtggtcaaagagaaggaagtgttggagtatcagctgaccggccagaaaaggaggggaagcaaacaacgggtgagtgaatcgcggaaa

SEQ ID NO: 1710 - DNA, 3011 bp, Heterodera glycines
ctgcatttctgttataacttttttggtaattgtctaatctcgaagcaatagcttagaaatatcttctaaacatgttaagctttcgattgataccaagattgctggatttggttagcaacaaaaaaagttatagtccgaaaacgccaaaacgtcggcgccaaaacgataagaacccggcgcaaatgtccgagccgaaaaaggctggacacgaggccaaaataatttttgcaagattgagacacaccaacccctttagaattgagtggaagtatctgaagttgaacaattctgagtggatcgtcatcgtcaattttttgccgtttttctcctcggccaaaccataatttactgagccaatctgccgagctgaaaatgttacaccaaatgccatcattagccgcattttctgtcaataaattgtgccgtaattcaaattggccattcgcatcggagcgggccatgtaaaaatgcttaaaacatttggccaactgatcagtcgcattcaacacattggtgaagaaatgcagcttttccacgcttttggttggcagcacaaatttttgttggcattcattgtcctcttcattcaaaatgccgtcccaggcaatcacggcatatcggccaggcggagaaatctgatttaggcgatgataaaaatatttaatttcaaaaaaaaatttacctgcttctgagagaaattattttaatgtttacaattaaccataaacaatttttatacaatatatttgttcgaataaccctatctttttggtatcattcgaaagcacaaagtctaaagcagctaagctatataaaatctcagcgtttaggcaattgccaaaatattataattaagtaattgttggaaattttcgtttgtaactttctttaagtgttagcattttctcgttttcacaaattattaatttgtactttgtgtttcgaaaaaaccaaaaaatagggtttattcgaacatgaagaaatgttgcgtaaaaaaaccatgaattgttaattgagtggactcataaagaagtgcattagaaccattcctagaataggaacgataccaagaatgttagattgggtttttaagaatgtttaggattttttttaaattttatttccctttgggatttaggaaaagttgcggaattgaagaaacgaccaagcacaacttatccatttttaagaggaatggaacgccaaatttcatcgaattctcgggcgttttcttttaaaattttaagcattttttgtgtcgatattttcgcttttacactgtcaaacaattaggtaattcactctgtgctttacggtaattaccgtcgctcggtatcgtatcttttcgcctccgttttgctggtgttcctcaaaagtagtaccgtttgaatttgggcagttgttgttgctggaagaagctgtcatggggttgttttgtttgtgctgaaattcagcaaacctttcaaaaatggcatcaaaattaaacaaaatattctccggttctttcttggcgaaacagaacgccaaaaacgggagcataaaaaggccaacaaaaaaagggaaacgcatttattttattactgtcgtagaataaaaaggaaaagattattactaattacacctaaaaaacagtgaaaagtaattatggcattttttcaacagtttaattttaatgagaatggacgaaagacaacatttttagccggaaatagattgttttgacgtttttaacgttaatatccataaatgtaaaaaatatttttttaatttcataaataaaatatttacgaatatgtttttttaactatttcaatattttgagaatatttcggcaattttaacaaaaatacaataaaacataaatttaacgaaaaccatttcccaaatcgcacccaattgtccccttttacaaatatggcctttggggttttttcgtaaatatttatttaaatgtttcggaatttttcataaatatttataaatctcagcttcagtgataagcaaataaaaattgccgaataaattaatttaagaataattacaactgaataattcatttttatttttgcgaaaaataatattcattttaatatgccataaaatcaatttttctattgattgcttttttatatatataaaaaaagttatctacgagaatgaagcgtgcaaaccaattacatgttcgctgaaaaataaggctaatatacaaggattcctttttatgtaagaaaaaaagcaaatatgtaaataaaaaatgtaaaaactatgtatgaattatgtacaaaaacccaggaatatgtacgaaacaaaattttaaaatggttattttttggaaaaaaattattcataaagggtgaaacaggcacaaaatgcataaaaatgacctaactaggcctagaacgaattaaagttcaatataaaaaatgaaaatatgtacgaaatattgcgaaagtttggatttttgtcgtgctgctgttgatgttgcggcggccgaactggcgatggcgtaccctccgatggagtgtagatgacaagatgtttacgctgctgttgttttggcgcaggagtacgatgtccttgttgcggtggccccaacgggtgctgatgcaaagttgcgtttggcgatggtggtgcaacaggagtgtctggttgctgacccacaagcggcgactgcaccaacggtctttgctgacgcagtagcggagaaggtgtatcaaagttcagcctgtcgtcacgcctgtggtgttgttgtgccggcggtgactgctgacgcaaaacgatgttcggcgccggaggagcgtcttgttgttccggtggcgctataattgttatgataaaagttctatgtatgacccttggtgtccaaacacaacccaaaaccaggtggggccatttagcacacaaataggcaagtgtacattattgtaacatgtactcgtttctcgtcttataacaatgcttacactaggctatatttctgctaaactgtcttctttctcgcctatgtatct

SEQ ID NO: 1711 - DNA, 3362 bp, Heterodera glycines
gagttctgttctcatttccacttcctcaatccgtctgcgcagttggtccgcaaagtcaccagccttttgcgcaaaagcgtcgaatgctgacgcaatttcatctgtcggctgttggccgatgatggcctcacgatcagcaggtccaaacaaaggctaaatttattagtcaaaactgaagacataaaaaattgctaacatcttgcaatgcctttgcaagagtgacaggttggtcgtccgcgttgagtccaggctgttctggtggcacatacccgtccttgtcggcaggaatgggtgggcagtcctcgattgggtagtaaactccacgggtggcgtaccacgcggctgacgccaaccgtgcggtcgacgatcccaagaagtttgcgcggaagcggccagcgatggttgctgctttttggaattggtgatcggtgcctcggccgtaggctttacatgaaatttattgattagcctgtgtgtacgcatgctcatatgtaaaaattcttccaacttagtaagtttcaagcgtagtgtaactatttgttacacatagggcaaaatcaatcacatgtaaggaatccttacataataggaaaacttgcgacatatcaatagaacactaatttagagcttgtaaagttgcttatataccttgtttgatgtaaggattgtcgaaggcttttgcaggaggccatttcaccatttcaaggcttttcaacttgaacgcgatgtccttcttttgcgcattccttttgaggcgtccacaagcttttaccagtgcagctacttctccttccagctgctgacgcctttgctcaacctcaagacgttgatcttgctttcccttgcaccaaatggccacatgtttgatgattgtgttgcgattttgattagagagctttgtttattggccatgccaattcaattgattttccattgcccgaccgtccgctgcccgacaaaattcgctttcgtctccttcatattttgtaaattcaaatattctatgtacaaaaaaaacaacaatttatttgtcactttcaggtacattgactattttgtgctcgcttttctccgtgccaattagcaaatttttgacaaaattggcaccgaattgtatttgttggtttctctttcacctgacattgttgcccagccgatttgggatgtttttgtccgtgaaatttggcccattttcgtgacaaacgtccgccaattggactttcccgacggggaacatttggacaatttgcgtcgccacacttcgccgacaattctcactgatctcaaccagttgacttcaatacaatctggtgaccccgatgggaatgatgatccaaatgcaattccaactgctggccaagcgctgtccaaatggttgcacactccgacaaaagatggccaacccaagcgattgatatatagaaattacggatcagaaaacatctacgaatggatcgacaatttcaaagcggtcaacgggactaatcatttttatgatttaaattaaaatatttggattaattgtcatttgatttcgattcccaattgtttagccatttctccgtgccaccacttctgcctgctacaaaattcaacttgaactttttgatttaatggaatttgagccatttgaattggtgaacgaacggactaaagaaatgctgatactggagaaagaagccgattatgaacaattcattagtggtgattggctgttgaaacgatgccaaattggggagacggcggcgattcagtgggagtataaaagtcggcacaatttgaactatgtcaacttttggctttttaaggattgcattgggtgagtttgatgggagaaacagtttttgctttgataatcaaatttaaatcacacttcctcaagaccgttatctccaccaaaggcgagtcaactgaatgcaaaaagtgatctgaaaatgattctcgggcccagcgaaagaaaaagtgaatgaattagtgggaaatgacaaatgatcgatcattatgaatggaaagtgatcggataattgctcctcacatttatttgttgcttctttcgttcgaatagagttaatgttcgggtttttttccagcagttgtgggtttaaaagatgattctcaaatgatgggttgccgacttttgagtaggcgcgcatgccggtggggtcgacaggcccaattttaaaaatttagaaaaccctggtattattttcataaaaaaaattaaaaaaacctcaaacaatttccaaaaatttattttaccatttaaatgactacgataaaacacacacactcatgcgctgagataaatacataaaacaacacttatttacagtatgagacaccatgcaaaccgataatacagtacccatacactacagtgtataagaatagggcggaaaaagtttaatatttttgcgaaaaacggctaaaattttgtaaaatacaccctctaattcgggatttcaaaaaacgaaaaatatacccataaaaatcgaatttttcgttaaaattctgaaaaattttcctcggcggcgcttatcggcactgcccgcccccaaaactccaaattatttttaaatattaactccaaatcttagtcatttttagacaaaatcttatagcaaattgcataaaattttcaaaaatttttccggcggcgccgcctgacaacccccttatcttccccagttttttggaaaaagcacaccgcgaaataagctgttttaaaaatcaaaaaaatgatcgtcaattaacatagctgggacgggaccccttcacaaatcattcccaaaatcaatcctcaaaattcaaaaagaatgaatttttacgtcacaaattataatttatttgcctttcggcaccgccaaaccaggacaatctttttaattttgttttaaaatggcttctaaaagggtgagatattgataattaatgcaaaaattttgaaatttgcgaccacagctctgaatctgccatttttacccctatttttcattagccctaattaatttgcaattaattgcccattctaaacggaacatgacaaaagattagtctgtgccccaatgccgattaatccactaggtttttatgatggcattattgacgaaaattcattttcttagttagaggtcattgcaaatggcacagtcacagattatcaaacgaattgtggtccccctgattaacttaagctgaaatagcacctataatttattaaatgagtaaacaaaaaaaacggttgacaaatatctgactttaatttaacgaagaaaagccatgttgttaaagttatgcttaacaaattcttccgttaggctaaattattattttaatgggatcgcccgtcaaaaatttgaaaa

SEQ ID NO: 1712 - DNA, 1705 bp, Heterodera glycines
  unsure (1)..(1705): unsure at all n locations
aaaaagttttctcaacttagcctgtcaacaagtcctaatattaattttttaatttgctgttttattaatttgcaaattgaattagagcttaatttgcaacataaaaatatctctttcagggtttttgtatccttgatcagatcatcactctttcatagtgatctggaatgtcaaaagcgacttgaaaccgggaaaattattgaaaaaaattcatagggggctgcgaaaatttttctggaaattttgtatagggctgccagaaagacgacaaaactctaccgaattgcgttttgagtggtaggggcaacgacttgtaaacaaaaaattatgattggttgaatttgatgattataaaaatcactactttataccgtagtaattcaaatggagaaaacataacaacaaattatcgatattttaagtctgagttgcttccttagaacaaaacattgttcttttcaattttgaagattaaaattttaataaatttccattttacaatgttaaacttcgcattaaattaaatttcaaaatttatttctttgtcattttaatggaattttcagaatttttactttggaccggtttttacaatatatacaaggaataataattatatgaaaatattataattattaattcaaacaattctattaaaaactgaattttactatcaatttaaaaaagaaatataaagtgaaaacataaaacaaataacaaacagtcagtattcgaaaaggttgagtaagtttcgagaaactattaaaaaagcgaatttaattagacgagttggtttcacacaatggtgatacaaattaaataaatttaaaataacaaagtaaatacagttttaaatgcagtatatcaatattacaatattaaatctggtcttatgcttatataatatctatttcaagaacccgagtatactttttcatactatttgctaaagcatggaataataaaaaaaaagttaaaaatttaataaatataaaaaagtaatcattgattaatattttcaattttgttcaatgaggataaaaaaatatagaaagaaaattgaaaaaaacatcccctaatatcaactttcttgttattacaacttattttttcaaattttgtaattgctaatgtattcaacacgcccaacatcagtgatgtcgacgagttaatttagataacaaaaaataattttcataaaaataatgaaaaatactattaagggaatgcaacagcatgacaaacaaattattattaattacttacattaatatatcgaaaatgatgagaatttattttcatcttcacaataatccctaaaagcaaaaatttttggtaaattttaaaataaacaaaaaaaaatttttgtagactgaataaaaagatttcatataatcacaaaacaattctcaaaatgctaacaacaaaagtgttaatttacaaaaaattgacaaaacccccaaaatattaaaaaaaaatttggcaaataagttaaaaattgtgtgctgtcaaactggatagaacctaagacaataaaaaaatgaattttagtgatagtgtaattttaaataaaattaaatggaaaatataaataattaaaatatgaaatataaaaataattaaacaataaagtaatttttacaatgattataaataagtattataattccnaactaaaaattataaaaccaaatatgagaaaatc

SEQ ID NO: 1713 - DNA, 6481 bp, Heterodera glycines
gagtagtattgggacagaaatcttggcccccccctgggcagagagatgcgcattcactataggagagaggagagaaacagagaaaaagagtaatttctaaaagaaggaaaaacgattaaattgtaaagggacagcggcaactctaaagccccagcctaatggtattctcgagtacgcttcgcaccactgcgcgagttccagccgttttttttgtgtccccagttaatagatatcaacggaaattatcgatttgtaaatgcaacaataatcgaaaaaataaaaatttttttcaagaaaaatgatttggaataaaccccctcggttgttttgtccaacataatttttagtgcgggaaataaatgactatgaaaatgcgcgaaataatgattttgtattaataattttttttcgcaaataatttttaaacacgaaatattagaaataattttattgggatattttttttagttctgtaataaaaatttttttctcacatatccgttttttcatgtgatgaataaacaattaaaaggctagtatttttgcctctccctctaaataataaaccatttgggaactgtacagataaaaaaactttattgggaatttaacagaaaaattattatttaaattagaaaagataattcatatattttaaaagtggaacataaaaaaaatcgaagagagtgcgcgaaaaaaatgctaaacaaaatttatatgaaaaatgctcggatttttttagtttttagagcgggaaataaaattatttaatttttaaaaccttgatgactacagataatttttaaaaaaagttgtggggaatggaagatataatatgataaaaaatgtaaaatccgcgcggatagggggaggtggtgcgctgccatcgtctttttggagatggtccctttaatcctccacatggaaattgattggaaatatttaattttaaaaaaattgaaatttaaggacagaatcaaaagtaatgaaaaataattaaaaattaaggaatataataaatataaaaaaattgaatttataaaatcttataagaaaagagaaaataacaataattcgaaataattgtttaaatagtttaattagattgaatatttgaaagattgttgtgttcggaacacattatttttgcagttattattttactttaatttttttaatttgaacgtgaataatgatatatttaaaataataagtattagcacgtaatttacaaccatttgtgctactaaatttcaaatttactttatttagagttttttaaggaattaagattttttttaaattttaatccctcctatatagactataaaatatttcatttaattgcgatgtaaattatagtgtgtataatatatttcataagccttatttattttggactgccccctacggtggggtgtaaagaatatttctcgctgagaaaataacaataattcgaaataaatgtttaaatatttttaatgagaatgtgagaaaaaataaatatttggaaaataggtatgaattttcggaaaactgttttattttcaaccatctgtttcaggattccaaactttgttctcatttcctccaaagatttgtcctcttttcgaggcctaaaaatcaaaaaaaatttttggaaaggaatctcaccaataaaatattgatcacctcaaatgaattagtgaaaaaattgaaaatggaaaaattcgataactaaatgacaaactgacagcgcacaatttttgggcaaaagcaactgaagtgaagagcttttatctccgttttaaatcaggctaagaaaaaaaagttttgcggtaatgaaaataaatgaattacaaaaaaaatgaaaaataatggaaaacagacagggatttttagggggttgagttaactgaaaaaacaatttttttgtattcaaaattcaaatttggcgcgctaaatgacccacttatttccccaaatcctgccagtgctgactcagctgtcatttataaaatgattgatggccaaaaatgctcattttggacctaaaaaatgacacgtgactggtcatgtgaccgaattatttcgtaatgcaatgcaccgcgctgaaaatgagtcagctgtcaaggaaaaatgccccaactgtcaatgaaatatgcggacaacagctggaccccgtccatcccgtgccaggcgttccgcctatcacattagccctccgaggccgctataaaagccacaattgcgcaaaaaaattttcttttttcgagaaaaaatattgctttggaaaatatttcgcaaattgaattttaattcaaatttaccaataaaatatttattttatatacaaaaaaaagtccaataaaaaaaaacaaaaaatgtctcaggcgcaaaaaaaattcctgaccatccccgttgaaaaaagaaaagaaagaaatgtaaaaaattatttcaaaaaaaatattaatgaaataaatttaaatgaaaataattacgttgagatttcgtcaactgaaaaaaacatgcctgactatgggatatatgaaaatacgataagatttatatttaaaaatccaaaaaaagaaaatagaaaagaaacatcggaaaattttaaaaaaataattgaaaatttgattaaaaaagccacattaaaaaagagaaaggggtggaaaattcagagaatctctattgatttatattgtgaactgcttaatgaccctatcatattgccggcccgggaccccaaaatcaacaacgccgacactgtactgcatgaaatatttcgaatcaaccaatcctataatgaatttgacttgttgcacgagcctatttcgtgtattataaccagttatagcaccccgatagggacaggtaaaaatgaataaatttaaaaatttaaaataaatttaggttttaacccgctggatttttgtgaaattaaagaactaggtagaattactgttaaaaattcggattgtttttgtaagtcaaattaaaatattattttttcaatcaaaaatttttaggtttattttactccttaattttgagcaaattttaccagttaatcaacaaagatgatgaggaaagtatctcaatggatcaatttcgaaaaattattaagaatgaaacaaggcaatgggaaacaacaaaacaattaattatggatgctaaaatcaatatgaacggaaatatatatgggcttaagcatttgcaaattattcaggatttttgggtaagtaaaacttaaaattttaaggattaatgagaaattaatttaattaggactctaaatttccgggaaaataccggattgttgctttttcaagggatgttggattgcgtccgatttttaaagggaatggcccacgtaaatataacgtttgcatttttcacgaaaataatcactgggatggttagttttaaaactgtttttttttgtaagaaaaaaaatttattaaggaataaaaagtataggacaattttttcaaattaaaaataaatattgtattagctgtgaaaaaacatatcaaagagaagaaaaacatagcttggaatgcgaggaaaggtgtaaaaaatgttgtagaataggtaatttattagcgtaaattttattataacacttaattaaggatttgggtttccttgtcccccggaacggaggacatttaattgtgataaatgtaatagaaccttttttaatgagaattgttttgagtaccataaaaagaaaatatgcatactgtaccaaaaatgtacaaaatgccaaggagaatttaggacagatacaaaacatatttgcggtaggttttataaacattaaaatgtcttaaataaattttttttagaccaaaaacattgtagaaaatgccgcttgtttcatgaccctaaaaaattatgttttatgcaaaaattgaaaattaaaaaaatgactccttatagaatagtggcatacgacttggaatgcacggtaattaaagattttttttgcaacaaattacggtttcttatttagacgaacactgttttggatgaaaaatcattgaaaaaagagactattcataagcccgattttattagcgcccgatttacttgttcaatatgtttgggagaaattaaaaattgtgaaatttgcggtgatggcccacggcatttaaaagggtgtagtaaggatggagttgacccgttaaactgttttgttaaatggattattagttttgaaaaatatgaaacgtatgcgtatgcacattttagcggtaaggattaacaaataatttaaaaaagctaaaattttatttagggcgttatgattcacattttgttttgagggaacttgctaatttgggatataaacagccggaattaacgatagcggatttaaaaatttacgaattaaaatttaaaagaggggaaaaattcccgaaaattcattttcgggacagttggcttttaatgcagaataaattagctcatttaccaaaaacatttggattggattgtgaatcaaaaatgtactttccccaccaatttaacaaagaagaaaattacggtaaaaaaaatacaaaaataatagaaatataaatttttaggcataattttgagtaccctccctccttttgaggattatttccccgatgaaatgagcgaagaagaatatgagaaatttaaaaaatggtattatgcaaattatcataatgggtttatattaggtaaaaaaactttttgaagaccataaaattggaaaattttttagaagaaaaattggatgaatattgctcaaacgatacggatattttaatgaacgctctattaaaactgagaaaaatatttattgaaataacaaaagatgaggaaacaccaaatgggatagatgtaatgagattatcgacaacgattgcatcttcgtgcatgaagtaagttttaaaaaaatgaaaataaataagtaattttttttagcatttttcgtgccaaatttttaaaaaatagtgagaccttacccatcattcctgagagtggctttgaaccaaaagacagccagagcaatattgcgattaaatattttgaatggattatgcatcgggacggagttaaagggaggcacgccgcaaatgggggagaaatatcgcttttgggcgacaaaaaattaaaaatcgattgcataattggggcgcaaaagagaataattgaatttcaggtaataatggaaatgaaataaatattaaaaaaatttaagggttgcgcttttcatgggtgccaaaattgttataaggggtatatgattcaagcgaatggatttacggcagagcaaaattatgaaagaacacaaaataaaatggagagattaagaagtgtagggaaaaagatggggtatactgtagaagaagtttgggtaagtgttattaaaaatagaaataaaataaccaaatttttaggaatgtgacgttaggaaaatgttaaatagaaagagtgaattttatgatgagcaaatgtcaaaattttttaataatttaccggaaataggaccaattatcccgaggaatggctttgcgggaggccgtacaggtagatttaaacattttttctggtttaatgattaattttaggcccattatgtctttttgctaaggcctctgaaaatattgaaatttcaatttatgatattgttagtctgtacccttgggtgaattattccaccccctatccggttggtatcccaaaaataatcattccgaagcaatatatagtaaaatggtaatttttcggtaaaaaaatacaatttaaatggaattttaggacaacccccgacgatatcccttacgatggacttttaaaagtacgagtcattccccccaaaaatcaattgttgcctgtgttaccgttccatactgtaggttaagaaactttttgattaaatggtgatcttttttaggatgatttattattatttacaaattgtacttcgtgtgccaaaaaatcaaaatgtgattttgtttttgccaaaaattctaaaaaatgtagacatagtgccgaacagcgggcactaaccggggaattttgttctttagaattaagaaaaggtgaaataaataattaaaatgaatcatgctcgttttttgcagcattagaatatggggcagtcatcgatcggttttatcgcggttaccattacgaaaattttgatggaaatttgtttaagaattatgtgagaaaatttttaaaattgaaggttgaggctaccgggtggcctcaggatgttaaaactgaagaagaaaaaatagaatttgtgaaaacatatagagaaacatatgaaattgaattggacccaaaaaaatatgaattttaatcctggattaagacatattgccaaattagcattaaactcattatggtaagaaaaaataaaaataataattaaaaagttattttaaggggaagtttagcatgagaaataaaattgagtttcacaaaaatgataagcaaaccgtcggaacttttt

SEQ ID NO: 1714 - DNA, 961 bp, Heterodera glycines
tcttaatttttttttgcaagaaaaactcaaaataaaataaataacgatttttcatattttctgattttaatttttgtaacttttctcattttctcacgatctttctttctgaattgtaaactacaaaaaattcatcagcaggttttgaaactaatgtttatagatgctttatattgtttgtatacgaaatatttttaaaatattaaatattatatgaaataagtactgaaaacaaagaaattattctttaatttaacaatttcaatgcactcaaaaatctttataaatcatgctatttatgcaacaggagataaattcttattaaattttgttcttataatatataaatgaaaggataaaaaattaaactcatctggcaattaattgtaaaaataattcaactatttcagaaatatcgcttcaaggacgttatgttttggatgaggaggaagcaattggcctgggaaagagaatgagggtaattaaataagaaaataaaaaatcatgagagttaaaataaaaagtaatataacaaattaaataaatctagaaaataaaattcattagaaaacagaataaaatggaccaaaccgaatcaaatacttaaaggtctacaaggtaggaaattattgcaaattgttaattaataaattcattttccaaattaaatacgaagaatagtagaataatgtaaatttacaaattgaaagtatgtaagaaggacaaaataagacaaaatgattgaattataaaaaaaaactaaaataattttagcatttataaaaataaatagatgaaaaagacttataaaataactgtaatattagtaaaaaaaaagtttatatttatttacgaaaaagctaagtgcttgaaagtttacaaataataaattaaaagaacagataaaaatttaatgaatgaaatattatccaaatccactcagtgggaaatacatgcacgt

SEQ ID NO: 1715 - DNA, 2245 bp, Heterodera glycines
ttagtatgcggaataagttatgttcaacaaaaatgattagcaaaccgtcggaattttttgaattaattaatgattatactattgaaatggctaaacctatacgctttaatgacaacactttacgggtgatattttgcaaaaaagacgagtatattaaggagcataaatgctcaaacgttatgatttcgatatggtaggaaaataaatattttttaaaaacaactatttttaggaccaccgcccaggcgcggcttaaactttactcttatatggaaaaaataaataattcagaaaattgcaaattaatttatacggatacaggtggactaaaaaacaataaacttttattttcgatttttagacagtgtattttttatgcatccaaagggaacgtctcctattaaggaagggagttttttagggtatgaaaataaccaagatccttttaatttccaattttagtgaaatgtcaaaagaatatgaggattcagaaatattagaagttgtctgtgcgggtaatgaatgaaaaagagataaaaataaatgagaattttagggcctaaacaatacgctttgaaattacaaaaagaaaatggagaaatttggtacaaaacaaaaattagagggatgacgcaaaataaaaacaacaaaattgattatgaagagtttaaggacatggttttgaattatgaggaggaaaagaaaatacagtttaaacatccaaataaattcgggtatgttttcaaatacttagctaaaattatgaattttatttagacctacgagggaaagttatgtgattagcagaaatattacaaaggattatagaccgattcaaaagaaggggttagtttgacagttttattaacgaaataatatttcaatttaggattattttgaacgatgaaaatttaagtgttttgccttttggttgttggtgattttttttgaataaattttcaaatgttgtctcttttttatttatttctttggttttttgtccttaatattttttaacgtataaaagaaataaaaataattaaaaataaaattaaaaatggataatcaaaataagccaagaggaaggcctccgaaaaaagttgagaaaaaggaaactcctcaaaacctggagaaaaaagaaattcatcaaaaagcaaaaattaaaattctaaggcccaaaatacagcttaaaggaagaaaaatagaattggacacagaaaatggtacaaattccgttccaactaaaataaaacttcctcctatttatgtaagattgtaatttgcttgtttaataattaaaaactttagaaatgatgaaaaatattctgatcagtaaagttttaaaaaatatatttaaaacaaaacttgaaaagtatagtcatattttatcatgctcaaaatacatacagatctttgtagttgtaatagtgagagaccaatagatgactaaaaaatgagagatcgggattaacatatgctcaaacagtgaaaaagttaggtgaaaaatcgttgatctgtgtgtacctatgggggcatgtgatcgagtgactacgaacaagtgcatgatcaaaagtgattagaaatgtaaagagagagagagagagagagattgattagagttcgagggaggatgttcgaaataatgattagagtaagtatgtgagtgttttggtatgacaataaaatgatcatggtgtgtatatgagcgatcaggaagtactcagattgagcatatgagtgatcagagtgaatacgtaagtggattattgatagaaaatgatcagagtgtacatgtttgatgtaaagtgatcagagagagtgatcggagtaactagtcatagagagaagagatagatcggagtgagtatgtgatgaaagagagagagagagtatcagtgatcagagtgagaaaatgtgtgatcaatcagaataagagtaagtgatcacaaggtgatcaaactgggactgagtgatcaaaagtgatcagaatgagaatgagtgatcaaaaaatatcagaatgaaaaaaataagcatgtgaatgcgtgagttaaattagagtgattgagtgaaagaatgataagtgatcagaaagagagagagtaatcggtgcgaatgggtgagcattggtgagtgcgtgcgcatgtggtgtgagtatgtataggtataagtacatgtgtgtgaatattggcatgtgtatgtgtagatagaggtagggtgcaagagcaaaggttttgtgtgtgcattg

SEQ ID NO: 1716 - DNA, 11058 bp, Heterodera glycines
tctgttgaacggtcactgtgaatgtgctcgtcacgaaagccgtcgccacttgtcacgtcacttccatcactaccaccaccaccaccaccagtttgtgcagcggacacgatcatcggaatcgcaaccgaggcggtcaacacgctgcgcattggctccggaattgctgttgccgcagctatttgggacgtcacacggttggcctcccgtatgacggcagcggtatgttgttgctgcagtcgcccgctctccccaccatcactgaacatgctccggattttgttgtgttcgttgttgttgttgttgatctgacgtcgagacgatgttggcgtcgacgagtgtggcgacggcggtggcatgagaccggagtgacgaagccagcgtacaaccgacaaccaacaaatgatgaacaacggcagtatgatggcgtagttggtgaacaggagcagtgcggaccaaatctgcacagacatgactggggctgctgctgctgttgggtccacaccatctgcgctcatcgtaacgttcatctcaacggcagatggcacacttttgctcgtcagtgcaatttcttaaatttacaaatgtctttgctgggggtggcggtagacataatgcttgaaggtaatttcacgctgaccgctgtgcaatggcgaaatgagtggcgcactgtcaatcacccgtgctggcacttcaggtctggcattgaacaggggatgtggcgccaccagtccgtcccctcgtggctcatacaaaatcacccagcttaggtttggcatgtttatcgtgggcagacaatatatgtttatgtttgtgtgagctttatgaataagacactttgttgataggtacaaatttgaagcgttgagcaatgtgttgttaattataatatgggctcctttttatgcaatttttgagtcggatacaatatggcggttgtagtcaatcatgatcaactgatcgaattccccgagcacgaccatctcaacgccgcctgccggtatcgcttcgttgaacgcgagccgaatgctggtggtgccggagcggagcagttcaaagccgcaactgtcgtccagcgtcgatgtcattggcaccacgaagatggtccatccgtcgtggaactgctccagcgtgatgtccatagagcgctccgagttggccatgcccagcgcctcgtacatgtcaacaaatggtcgaatgtaggcacagccggagaagtccatgcggtgtggcactgccggatacacatgaccggcagcgtgcacgctgatctcacggatcgcgtagggcttgaagttgaacggtgacaatgccagctggccgttgaatgctccgttcgccaccaatgcaattgtcagccggcgcgggatggcggcggaaaatatgttgtggtccatctcggtacggccagcggtcagaaacacggacttcacctccgtcttccgtaccgcgtaggtggccggctgcttttccagcgtcttgtagatggacaggttcagcgatggttgcacctcaaccatcttcacgtacagctttatgtcgtgtaggtacagcgcgtaatgttgggctgccgctgctgctgctgccgccgccgctagactttgtaacaggaacgcatcctttgcccgatagatggtgaacaggacgtccatgttgttcaacagatacagctcctggttgcccaggtcgaagtccagccgggaaaggaagcgtgctttacggccgcccgcgaagcgcgcacagcgtgccagaaaaccggcgtccgtcgcgtcgtcgtgctttcttgatgggtggtagcccgcgctggccataaagtgtccctttgcactgttcggaaaggacagttcgttggtcaagtacgccttgtaggggtagagggttccgctgtcgtataactccgtgttttggacctcaacctagtcaaatttggtgattattatagtcaaacggactgtgtgacggacacccaccttgagttgttgtacaaatgtctgtccaacgcactgggcaggcgcgacgagttgatcggcggccactgcagcttcaatgggcacccaacgtccgccgccatcctccttttggatggacagctcgaggaacaggtagacgcgcgacatgtccgcccacaggttgtcattgaacaagcggaacaggtagggcccctcctggctgatagtggacaatggcaacagttctcggaagaaggaacgcgacaccgacacatttgtgggcggaacggtgaacacgttcagcgcactgttgaacgcaagcgcactctgctcgctgatcttttttggacaactcattattggtgttgttgtttgtttttgtttgtttgccacttcgttttgatgtttattgtggctattgtctagtaggtgcccaaggtatcaaaacggagtcgtttgctgctgctgctgttgatattgctgctagcacctggtttgctcactgacagtgggccaactgttgattgcaatggttttcgcttgcgcagatgcctttttatgcttttctcgttgccgcccagtgtgggctgattatgatttctgttgccgcttttttgtcccctttttgtcgctgtagttgttgttgaacagcagctgtcattgttgttcaccatttgctttcgatagcgcttaaaatcaaagttgccaccggcgccgccccgttgtctgctcagattaacggccgccttctcgagcaaattttttagccccgcgcgtccctcgtccaccattgcatctttcacattgcgcccctctaacacttgggagagcatgcgcgagccgctctccaatccttggcgcccgatcgcagcaccggcttgccgaccgattggaaccaagaagcgcaaaaagctgcgaaacatggacccaattccgcccgctccccgttgatagggcagtcctgtaaacactgggtatgacgcacccgctcctccgccaccgccgccacccattgcgctcccgccgccgctcattcctatcgccatcatcgccgagtccaaacgctgggccggccctgtgaagtgggaccagtccaccgacagagggtcaaagtcaacgtgcatttaaaaaacaaaaaagttatgctgctatcttttttttgtttacttatttatgctttttttattctcacatgctcaatttgcttcatccccaaacacatgggcacgtacaaaagcgctgaccaatcggtcgggctccgtcttttgggcatcaatatggtcaacaatttgccgcaggctccagccctggcaacgatggtacaagaagtagaccacgtgctttccacaactgatggaccgttccgattgtaggcagcgacggttgtgctgcacggtgttgaaatggcgctccaaaaaaatgtgaatgggctccgacacgggtggccagtcggcgaacgagtcaaagtagtcggcgctgtgctccgacttaacatagatggccacccagtgtgttccaccgcctgtcgcccggtccgtgttcaccaccatgcagtgcggcatcggcgcggacagagagggaattcggtcggacggaaagcagtcaacgtactgcccgcgcgtcgcatcacaccgtgtcaaaattttgtttatctcgtcactattcatattttattaatacaaaaataggaataaacaacaaaacaacaataacaaatagcaccacaatatatgcactcagaaatagtgtgattttctaaaatgcagtgtgagtgtacaggtgccatactggaagggcataagggcgccggtgggggtccgtatctcgatgaaaatctcggcaatctcttttgtgatcagctgatggtattgtacagtggtgtatgcctcttcgatcatgtcatccggttgggcgccacgaatgcagaccatgcgcagcactggggcgcacacgttgccgatgatcaccggctcaatgagtcccggcgcgtacacgtaaaaggatgagacaccgcctttcatgtccggctggtagcgcgccacgttcagcggtgcagacaggtggcgcttgtggaagccaaggatgtaggcctgttgatccgacagctccacctgtctgatccgtgactggtcaagctccaggcggaagcgctgctgctccacgtcaaagctgaagcggcaagacaggcgtgccttgcggtaggactgaacccacagctccagccccactggcaggtgtcgttgaagctgcacatgctccgcctcactcattcggtccacaaccaatttgtagagcgattgacggtaaagactgttgtacgcggcacgcttccattcctcttcctctttatcatcatcatcatcttttcctttctcgttaggcttgggttttgcactttcacgcttttccaattgcttcttctccgtcgcattctcctgttgttgtttttgttgttgctgttgctgctgttttttacggtcacgtattgccgcttccagttgtgttttggcgcttgactcggcttcgctgatcagctggtggtaggtgagctggatttggcgcagctcagtggccaatttctcactgccttcgcccaatgcgagatgcaaactggtgagcagttcgctggggtttcgcactgtgctggccgggacggggatgcgcacctgttccccggtctgccattcgacccggacaaattgctcctccgtggtgcccagagagggccaagagtgcgggtacagcagcactgccaaccccacgctccactgcgagccgaactgtagcttgcgtggcaaacgtacgcggaaggagttggtccggttgccctcaacctgtgtgtttgacggtaagacaatgtagaaggaggatgatgaggacatttgtgctctccatttctacctttttttttgttgctgtgccctcggtttccctccccctttttatatgattgatgtggcagggatccagctgttgtgcgctgcggagtagcccttccacttgacaagacaatgctcaccaccgtttcgtccttgccgtcgtcttttcagcacccgttcaatgtcataaacgggaccgacgacggcggcggcggcagcagcagcagatgcctctgccccttgttgtgttgggcgctgtggtggggctgggggcgggagcacaaggcacaagtcttgtgcgtagaaccagccggtgagcagctccccggtgtcgtcgcgcaatttatacgtggtaggcgtacgtgagcctcgcacctctgccacagtgaacacctcatcgttgaagcgtggcaagtagccctttttgaacacatgcttgtgcttctcaattcgcacacggtctccagcgtggaagcgaggaggctgcggattcagccgacgcacatgcttgctactctccagttgctggcgtcgaatttgctccgcgttggcaaaattgacgtcccggggccgtagcccagacagggcacgatgcggtgatgcattcagcgccgacaccaactgctgtatcacaccggtccagcactgggtgccacggtgggtgaagtagcgatacagtcgctcctatgaatagtaaaagtaaataacaattctttttttgtctagtctataccaccttgatgctgcggattgcccgttccgcaatcccggcgtgccattggggtgaggtgtgcatgcaatggtgttgaacctcttttttgttgaaaaagcgctgcactggggcggcggtgaactctttgccctggtccgtcatcagcttccatggcacgtagccggcccgtttgaatatgtggtcaaaagcgcggatcatgtccactgactgcttgctcttcaccggctccacaaacagctggcggctcagcgtgtcggcacacaccagcagataggcattgccacggttgttgcgccgaagcgagacgaaatcggccaggtcagcctgccagtctgtgtgaaggccggacgccagcgtgggcaggcgacggaaccgacgaacggcacgccggtgcagcgtgtacactcgctgtcgcgccagatagcgacgcacctccgcccgtcgtatgccccttgttggatgtactcgctgtgcctcacgcagtagcggctccacactggtgaaggcggcggccgaccttgtgtccttgtacagcgggtccagcagttgttcaaccacaatttcgcgcacttcttgggtgttgttgttgttgttgctgtagtcgtcgcatcaccataacatgggtttaaacaaaaaagttttgttgttggtagtgctgttggaccgtttcgcgtaatcagcagcaacagcagcagttggctttccattctttttaaatgcatgcaagagggtagcagcggtggagcagcagccgccaccacccatcttcttctttttcccactttccgcgccgctgttgccgaacaggatccgtaccatgcgcgggtcttgccgagcattgccaataaatgttttgtacccaggcggtgccttctccggtttgggctcagcaaaatgaaaagtgagtaaagcatccaaatcgctgttcttgatcggacggtacgcgccttgcatcagccggtacacctgctgtccatctccgatgcccagcgtgcccgcgttgcgtaacgcatagtcaatggcttgtcgtttcctctgctcagtgtcacgtaagactgctgctgctgctggtgctgtcgatgttgatggatgcagttgcacgtccgcttcttcccgctgtcctttccttgcggggtcaactgccgcaacattttggggtcggtcgtcgttggagctgtcttcacgctcagtcgtctcagctcctccttttcctccattatcagtgcgtgtcaacaatgagacggcagatgacgatgacgggaagcggctagcttcggcgccatccgtagaggctgatgtcgtacggtgtgtccttttggctggtcgttgtctgcgacgtggaggctgcctcattgttgacgaatcagactgcgacgactgctgttgttgttggtgcagcgccggctgttttggttgaggttgttgttgaattgttcgcgccacctcggaaagtgcctcgcgcagcaggcccttagaggcttcgtcggtgggcagttgggtgagacgaactggtgctggacgctcctgctcatcctccagaaattttttgaaccgtttgaactcctgttggtaatggatcaaccgttcgtcatcgttcagaaggtgtttaggttgttgccccgatgacggcgatacgccgtccgtgctccgggtgacgttgctgcgtgcagcacgcgccatgcgctttgccgtgtgctcaattggcgtggtgtgctgcggtaagccgcccctcgcagaggatgcgtcggcaacaggagccgagctcctggccaacaaggagcggtacagttcctccggcactagcagcatgcgggttgtgtgcttcatgtttggatgatgctgtctttgcggctcatgagcttatccgccagcagtggaagcacaacgctggccaccaagccagccaaggccgggacgccgcgcccggtctgctgtctcagcaacagtcgacgtgccccgtggccgcttctcgcacggcccaacgcacgcacgtgttgggcctgagcgcgcaagtgctgaagatgagtgctcctgagcgggacacgtgcacggagaatgttcaacgcactttccaccagacacaacagctgctcactgctcgcccccctcaccagctgacgataggcacgtgcgcgtgccgagcgacagttgctcagctgcttgaaaaagctggtgttttgttgaatgtattgacttggtgttggcccttttttcttcgcttgcttttgttgttgttgttgttgttgtctcttttcttgttgtattgtttctggtctgtcagtgttgctgttaccgttgttgtttccactcttatgcttcttccgcattgaacattgctgcccggtctcgtggtgcgtacacaacggtcagctcgcccggatatatatgagttttgaggcgcatctgtggccgggtggtcgggtgcatgtccaccaacagataaccaaacgggtccgctgtcgcgtcatcgtaagcctcgaggaagtggcggagcgcatccgggaacagctgaacgcccaacgagcgtacctgaagtgcgcccgacggattgcgcagcagcaccagatagtgcgcattgttgtgtgcaatgcgcagctcgcggacgaacaaatgctgcgtgatcaataccacactgacgccccagttgtgtgagccacgtgtgaacaacgtgtccaggaagggagcgcgcatgccaaccatcagatcgtccaacaccagcagcagtcgaccattgcactcgcttgccgcccgcttcactccctcctcgtcaggcagcgcgtggcagacacgaacccatcgattaccaccactgctgctgttgctgctgctgctgctttttttgacaccattagttgaggttgttgttgttgctggagtgctgtcaacgctttccagctgttgcaagcgcagcacgtcctcattcacttccccgaaacagtaaagcactccatcaatgtgggcggggccaaccagtgcgtccaggttggccagcagacggagcacccatttagtcttcccactgcccgtacacccggacacacacattgtgaacggatgtacaaacacgggttttgcgtgcgcaagctgctctgactgtgccatctccaacctccttttcatttagccccgatgacccacttttttatatatgctctcaaatttagtatcacattttaacaatttttgagccacacaaatttaatataaataagtttatgttgaaactgtttattgttcattctctaattattttgtcaatggacacgtcgtcacacgaatctgatcgcaaggccggcgatggtgctgataatgctgatgcacctgcagcatgccaacagcagcagcagccgagtttggccgcggacgaaccgctgttggtccgacagccaaaggaagcacctgcgcaccagctaatgaagaaagaggaggaggagaaaccgcgacaggaaagcgcgccacttcctcagcccacacacaatgatgacgtcagcaaatcggtcagtcagtctgttgccgtccaccacaatgcacagaacaagaaattgtcaaaacaaaacaaaaaatcagtcgctcgtttgttaagatgacgaagctgagcagcgatagtaatgatgaacatggcggtggcggtggtggtgatgatggacacgcgttgccgaccgaggatgacggggtgggcggtgctcatctcccgcccctcttgttcatcgatgaggaggaggaggaggagagcgccgagtcgcgcactggggatgacgtgggccgagacggtgacggtcaaatttacactgaaaaagtgacccaggaaggggaggaggaatcagacgacggcaacgctgacatggattctgtcagcaatgacacgtacagaagcagcagcaacagcagtagcagcaccatgagttcgtcgttgttcttgctgcatgactgtcatatgcgccaccactaccaccacgacaacaacaactgcaacagcccgccacgaaaacaagcggcgacagagctgctcaagcttccgctcatcgactatttgtgtgggcttaacaacgggtgcagtgtgagggagcttcacacgctgctccagaccaagggcccacgtgcacacatgttggcccatctgcaacagcgctgtctgctgcgcaccgtccatttgcggcccgccgagcgcaacattgcgctacatgcgcatgccctaagtgccctaagtacaaacctgacctttgcatgcggtggttatctcaacctcacagtaataattttgtttaaagaagcgccgcccgcattctgtttgttttttttgcctaggtgcgtcagtacttctatgccaaacacggtgtccgtttgcgccacccaaacctgccggcgctggttgagcgcggtggtggtgcacacatgtcctattatccgctagagtgtgtgcaggtgcacgtcatggtggcatcgcccacggaccccaacgagacggaggacaataaagaggagagcgcgggctgcgcagatgatgagtgaaaatagacaagcatccatttttctcattttttattgcgtcaatcacactgagataaaactataattcgtattgattttaagcaagcctgtttcaaaatgacatatttggtgcaaaatagtaccagcacattttctcttttcaaatcatgtggcgctcaagcggcctcatctccacggcagcaacaacaactacgctttacccgcgaccaattcttggcattggcacgcaacggtgcgtgcaccgaatatgcccctcgccgttttcacgccattgtgatgcgtctgcgcaccggttcaaccagcaccatcagcaccggcgccgtcaccatcaccaccacaaccaccgccaccacaactcccactggcaccacaactgcgcttattttccaaagcgggcgtgtggtgctaactggcattggtggtggtggtggtgtagcagtgcagcaaattcacgcactctgtcgacacgaagcgcaccgagtgtgccgccgtgtcgccgatgcactccggcgaggtggctttccgacgctcggccgctcgcttcgcgtcaatggggtgcagttgcgcaacctggtctccacacttcatatgccctaccgcttgaacattgaggtgatggcgcagcatcttttgcggcggatgaccatccatgggaagcagcgacccaatgacaaagacaacaacaacagcaaccacaataacttggccgggcagattgtgcgggtggcacgcgcgtgccttgatctgtgcacattcccaggccttcgctgcgccttgcggattggtggccaacaaaagggcgggacggaggaggggagcatgggggaggcggagtttgtggtgacagcccttttcttcatctccggcaccgtgattgtgacgggagtgcgcgaccctctgctgctgaaacgcgccgttgacactattcaacatttatgtgctcaatacattcgagcctagtccgtccctctcccttccccgcccgttctcg

SEQ ID NO: 1717 - DNA, 2054 bp, Heterodera glycines
aacatggcggtggtggtggtggtgatgatggacaagcgttgccgaccgaggatgagggggtgggcggtgctcatctcccgccccttttgttcatcgatgaggaggaggaggagcagagcaccgagtcgcgcactggggatgacgtgggccgagacggtgacggtcagattttcactgaaaaagtgaagcaggaaggggaggaggaatcaaccgacggtgacgttgacatggattctgtcagccatgacacgtgcagaagcagcagcaacagcagtagccagcaccatgagttcgtcgttgttcttgctgcatgactgtcatatgcgccaccactacaaccgccaccaccaccacgactacaacaactgcaacagcccaccacgaaaacaagcggggacagagctgctcaagcttccgctcatcgactatttgtgtgggctgaacaacgggtgcagtgtgagagagctccacacgctgcttcagaccaagggcccacgtgcacacatgttggcccatctgcaacagcgctgtctgctgcgcaccgtccatttgcggcccgccgagcgcaagatttcgctacacgcgcatgccctaagtgccctaagtacaaacctgacctttgcatgcggcggttacctcaacctcacagtaataattttgtttaaagaagcgccgcccgcattctgtttgtttttttttttgcttaggtgcgtcagtacttctatgccaaacacggtgtccgtttgcgccacccaaacctgccggcgctggttgagcgcggtggtggcgcacatatgtcctattatccgctagagtgtgtgcaggtgcacgtcatggtggcatcgcccacggaccccaacgagacggaggacaataaagaggaaagcgcgggctgcgcagatgatgagtgaaaattgacatgcatacaaatttttttctctcatttttgatgcgtcaatcacattgagataaaattctaatttcttgttgattttaagcaaggttatttcaaaatgaaatattttgtgcaaaatagtaccagcacattttctcttttcaaatcgtgtggcgctcaagcggcctcatctccacgacagcaacaagaacaacaacaacaacagcgctttacccgcgaccaattcttggcattggcacgcaacggtgcgtgcaccgaatatgtccctcgccgttttcacgtcattgtgatgcgtctgcgcaccggttcaaccagcaccacgagcaccgccgccgtcaccaccaccaacaccataaccaacatcatcactggcaccacaactgcgcttattttccaaagcgggcgtgtggtgctaactggcattggtggtggcggtggtggtggtgatggtggtggtggtggtggtgttgcggtgcagaaaattcacgtactctgtcggcacgaagcgcaccgagtgtgccgtcgtgtcgccgatgcactccggcgaggtggctttccgacgctcggccgctcgcttcgcgtcaatggggtgcagttgcgcaacctggtctccacacttcatatgccctaccgcttgaacattgaggggatggcgcagcatcttttgcggtgtatgaccatcagtgggaagcgaccaaatgacaatgacaacaacaacaacaacaacaacaatttggccgggcagattgtgggggtggcacgcgcgtgccttgatctgtgcacattcccaggccttcgctgcgccttgcggattggtggccaacaaaagggcgggacggaggaggggagcatgggtgaggcggagtttgtggtgacagcccttttcttcatctccggcaccgtgattgtgacgggagtgcgcgaccctctgctgctgaaacgcgccgttgacactattcaacatttatgtgctcaatacattcgagcctagtccgtccctctccctcccccgcccgttctcgcccactccccctgcccaccccctgcccaccccatgtccacctaatttgttgcattatttttttatgaataaacaaataaaaatgtgaaatgaaaaacaaaatcaatttcgaaaaat

SEQ ID NO: 1718 - DNA, 2119 bp, Heterodera glycines
  unsure (1)..(2119): unsure at all n locations
ttctttagtgaccaaaaagtctaaaatagtgctttctagtgcgagtagtgacattcaaacgaaggattttagtgctaaaaaggtgtttttgtgcattcctcatcgaaacaaagctgcagaaaaaatagttaaaaaacttaaaaatccgttccccagtcattaatttaataaatgtttatataagcatgaaatttaataatttgccaaaatattaatagccgaaatttttatacaaaacattcgttcgttctttttatggccatggcatgcgcggtaaacaccgcttttttgcgtccaaaaagcatagattgacttcataagaatcgcatttgtcagtcggttgattttcacatatgccactccaatattggtccactgaatttaataaattaattagtgcttataattttagttaataattgtagacaaataataattatgtgttaattgcccaattaattaccgggtggcgcattgaacacgtaaatgggaaggcacgaggttggcgacagctcgctgtcgctgtcatccgtcacatcgctgtcatccaacccacacggtttaattcgcaacgagtcgcaacactttgccattgcattgcaatagtcgtgccaatcttcattcactttaattttgcccaattaaaacaaaacgacaaataattgtgggaatggctaaccaaaataaaaataaatataaatttaataatagtgtaaggaagaagcgggctgggcgattaaaacgcggaaagcttaaaatccataaaagaaagggcggatgtgcctcggtagctcaatggaatagcttcccatggaaagggtgcacgagtgggttcgattcccacccgaggtttaaagcattttgcttatttcttattatatagttatttaaagaaaaaaaaaacatactacgaacacagcttagacatggtccactggtgaccagcagcagccgattgaagccaaacacgaggaaaaggacactcaatgggaatgatttgatcatcttgtgtaaagcgggatcagcagcagaacaccgaccagtactggtccagcaatgctcggttattcagcacctgtccgatcctgatctcagttttaaaagctgaagtcaatggccgcagatttttaagtagtgacgggatcgggccaagaataatcactgcttgaaaatgtatttgaaactatttttttcttccatttttaccataaagaaaagaaatatttaatttaaattattacttttaaaattggctggtaatgagcatttgtataaatttagttatgtgtaatgatagcatttttctttagttattcaaaatcgatgtttattgatgaaaatatattgggcacaaaattaaaagctaaaaaagaaaaggaaaagaaatatccagctttacgttgaaaattttgaaataaggagattttttaaatgttttattttgaaatattttgtcaatgtagtcgagaaaagtcggtttttcaaactctaaggaaatgattgacgaattcagaacgattttcttatgcaattatgagctttttgtattgcttaatgctacaaaatttttatcactgacgcattttgcggcagcactctgacaggttccgagtagcggcttgtcattttgttggtacaaaaccagttaagaaaatttattgaaatttcattcaattaaaaaaagacccaccaaaataaaatttaattttgacgttttttaatttaaattccggtttcagagttctgtagaattaaaataagtcgattcaaaaattcttttctgaatttatagtttgaaatttgttttataagaagagaacaaattgactaatttttcgttaattccgctgaatgaaaagaaaatttttgaattgtagtttgaatatttgtgtgtgtttgatcatgtgtctatttaatcattcactttttcaattactttactatatgtataagaaaataacgaaacagttgtttgattatttttcattaattttcaccgataaaaaattttcagttaaaaaataacaattaatttttaattagatttataattctatttgaagtanatttgcttcaaattctcaagttagtattcttcctctattcataatttattaat

SEQ ID NO: 1719 - DNA, 3074 bp, Heterodera glycines
  unsure (1)..(3074): unsure at all n locations
taagtaaatagaaataatttttttcttaaaatattttgaanttgaatttgcctttttaagtttttggctttaccgtgccacctattggaaacgacgcggcattccatgcccggatgggaagctgttcagtggcaatttggacaaaatgttttgggaggagcttcgcctgtttcagatggccaaatggacggaacagtacggaaaggtgcacaattaaaatataatttttattaaataatataaaagtattttttgatttggtttgttaggtgtacggtttgctcacgggcttccagccgatgttggtgatctccgacccgacaatggtccacgaattgctcacctccaaatttgaatatttccattcaagaatggtgctttctttatcaattcattaattattatcaaaaacgtaactacgaagtgaaaattaataaattgtttttttgtgtctttttgacttttcttttttttctttttttatttcttttaatatttaattattgatttctattacaaattttaatgatcatttaattatgctaatatcaaacttgaaaacatgaaaatctcatcaaattttcttaagccgtgccttctgtttccgtccacactgttcaaaaataagcacatattttccattttttttattaggtttcctccttggaaggcgatgttgacaagaatccccgaatgaatttggtcaatgcgcgcggcgcgcgatggaaacgcctcagagccatcgcaaatccggcattttcaattagcaatttgaaaaaggcaagtttaatcaaaaagaatcatttttatttttaattaaaaagaaataaatcagaacacattttcaagttaatgccaacaattgatgattcgatcaaagtggcaatcgaactgattgagaaagagcgccaagcgcagccaaatgcgccaataaatttacaccggtaaggccttcatttattggcatttcgatgaaatagttttgattaattatatttgagaggaatttttaaataaatttgttatgacaaattacgctttaaaataatatttcatatttaatttttagtttttttgtggagatgacttacgatgtgattgcacgcgtcgccatgggccagcgcgagtcgcgacaattccaatcggaggacgccaaattggccgtgcatgcgtttcaacgactacaaaacaattggtataattgcagagccgggattttattgtaaaaattcgaaggttcacatatccgtcccttaattctgcagcgatcagtttttctgtgggattaatgggaggaaatggggcgggcttgcccagattagagatgtttataaattaatagaaaaaatggcaaaaatgagtgcccttaattaatcgccaaaaattgtgttgctaaatgtttgagtgttgtctaaaaatgtcaaaatttttctcggcggcgcctatcggcactgccgccccccccccctttttccagtttttttagaaaaagcgcgccgaaaaagctcggttgaaaagcaaaaaaaaaaaaaaggtcatcgcgacggccgacgccccttcgcaaaaactttttcctgccctccctctatttaaaatatggtctaatccccacatttaattttaaaaaatatcgaatacatccggattcgagttaaaaagtgaaaaatttgaaccaaggtttgaatatttggccatgttgttcccatggcttggccccactgtgctccggcccatccttttgctgaccgtcaaaatgcgtcgcgatccgttacttctgctgacactcaaaatcagagagcaagtggcggaacgacggcgccaaaaacagcaacaacaacagaatgccaagcatagaaatgctgatcaaaccgaaagtgatcagcagcagcaacagagggtgcccgtcgatttcattgatatgtttttggactctgtgacggatgaggggagcattgagtacagggacgagttgggcgtgttcaacaaagctggcacaaaggtgggccagggagggttggccaaacactcaaaatcattggaaattagctccatttcagttaatgcatccaattatgaccttcctctgttcctaagccatgtttttttttgttaatgcgtacattcttggcatcaccgaaaccttaaagtctttagcttatacaatttaattctgggctaaagttaacaaacaaaaaattattcttgattgaaaaaagcagaattttcttgtttttcaatgtagttttttaggaatatctttatttgctcttttttcttacatttacaaattcatgagactttaagctttcgtttggtaccaagaatgtatggattaacgaagtaataacaaagttatggccaaagaaactgaggatagtcattgttggacgcataaacttaaatagagccgaaaaagttgtattcattattatttaggttttataaattaatgaatttgaaattgttttaagtttaaaaatggaatgccaacattaaggttgatcgaaccaacactgttgacgaaattgaaatgcaattgcaagtgtttcttttggctgggtaataataattaataataataataaaattttctgtttttaatttaattctttttaatttaattttcgcttcgacaccaccgccaattccctgggctttgtcagtttcaatttggcctgtcaccctgaagtacagttgcacctccaagaagagattgctaccgtatgcataagcgaagtgagtgccaaatataattattagctcatgggggattggctcccggtaaattggacaccagtgatcaatcgtcacccatttttggtgcattttgtggcacattgatcatcatttaacccatttattctactcaaatttattttcacctaattcttgattttttttaaaaaggaaatcttagtgtccaattttcctttagtgtccaaaattccggcggtgtccatttttccgcttggtgtccaattttctggtgtccaatttaccggtccccggaggattagaggtcgggaaaaagaatctgaggtcgggcatgcgcccgatttgccatattaaaaaag

SEQ ID NO: 1720 - DNA, 1476 bp, Heterodera glycines
atcaaagagacactccgactgatgccaatcgctgaagcgtgagcacaattaaaatagaaaaataggcacaaaaataggcaaataaaattttttgttaaggattttttgggagcaaaaaacccataaaaacttattcaatattttggttagtattaaatattttaaagttttttttcgaacaaggaccaaaaatttttatgaaaaaaaaaataattttagggaaaatttttcatttataggggagtattttctgaatttttttcggatcatttcataagggtttattttttgttttattgcatttttgtcgaggatttttccgcaatttttaaataggaacaaaaataggcaataaaagtcatcttagacaacacaaactaagctgaaaacgcgtttcgtgcttatctgagcgtattaaatgcgcagaaattttaggcatttgccttaaaatagaagcccaggtaattaattaagacggactgtgacggggctgcaaaccttcgttctgttaaatgatgtggcatttttaatttctgagtatttgtcttgattttgtatattttaaagagtcaaaaagattttttaccaatgaattttgtggtttttgagaattttcatttggtttttttaccaaaatttcaaaatataaatttttggggtaaactctgttgtaaatttccttcttttttgatgattcttataaaaattatatttttagtttacccaatttttaaatttaacttaattttatattgcagtggtgaaacgcgtctttgttcacagacgacgaaattgggcgaatttttggtggaaaaagggaccggagtggccgttgatgtgtacagttttcatcgaaacaaggagttatggggcgaagatgcagacgaattccggccggaaaggtgcaaattttgctattaaaaatataaattaattaattaataattttaattattaaaaaataagagacttaaaagttgaacgggatttaaataaacataaaataataagtcatttatttattctccatatttcttttcttgatattcgcttgtatttaaattatgccaaattaggcataaatacacacgtattagccaaatagggatcagtaacaaatataatatttttattatatagactcagagccaaacttcaaattcatagtctgtaaaatttccatgctaattgtaagaagattcatatactttactacatttatggcataaaaaattgttttaaatttaattatattttaattttttggaagcatactaaaactaacttagcttaaatttaatcaaatcaaaaaaaaccttggcattgagcgatagaacgcctttaaatttttgtatgaccataaaaatatgatacatttttaatttcttcataatatgtttcagaaacagccaacttcaacttttacattatatgattagacagacgaaagatgatttttctattctttaattgaat

SEQ ID NO: 1721 - DNA, 1401 bp, Heterodera glycines
cttgacatgactttcccccggcctcggcccatttttatgcgtttggcggcggccctcgcatttgcattggcatgcgatttgcacttttggaggagaaaatggcacttgtgcgactgttgcggcgttattcgctggtcaaaactgagcagacggaggtggtgaaggggggggggggggggaaattgtcaaatttaataattatggcattttatttttaaaatatttcccattttttagaaattgctcaatttcaattcgcaagtcgtactgaatcatggcgctgttatggtcaaattgagtcaaagagaagagaatttctaggagaaacagaaagaatttgaaaactttttaactgaattttggtttaatttaatacaaaaaaaaaattaattttttaatcaattaattaattaatggtgatgctctgatcatttctttatatgctaatcattacattcagctcaaaaactttaattagtttttggcaattatatagttgaatcaaaattaaggcacacatgatttcaaaaaaacacaacaagaaacattgatttttaaattttaaattttttatctgagttttaagaaatttttgaaagaaggatcggtcccgggttcatttttctcggtctcaaatagcgaaaaaaagtactgaaaagataggcgaaagttaaaaaaatcatattttaaattttttataaaataacattttgatcggatttttaggcacttaatttttttaataggtacctaaaacaggcataaaaaagtgtttcttccaacaattacgaaaaatttcatccaggtttaattgccttttcaccgatcgaaattttaatttcggaatttgctttgtatttttcggcattttctttggtgaatttcaaattttttttttcaaaaatttttaagctttttaggctctaaaaaataaaacctagaaaataggctctaataaggcgaaaaagtagcttaacaacccccctcctcccaaaaaaaaaaacttgtttttcgtttgtttcaggccactaggatattagccctaatcatcaccttccatatttaacttttaattttttctttagaaaatgctaaaaattggtaaatgcttttaataattaacaaaaagagaattttcattgttttcgccggttgcgtatcaatttgggctttattgctgccagtgtttttttttggcaacttacatgaatacgctgaacacaatattgtgatgatgacaacgcatttttctcttccgcccaaaaggggtcaattcgcgtttggatcaatgcttgggaaaaacgcacgtaaacaaaatccaatgcagaaaattttgagttttgatcaaatgatgcaaaaaccgaagagaaacaggtgccaattctagaagtattgtaatta

SEQ ID NO: 1722 - DNA, 5635 bp, Heterodera glycines
  unsure (1)..(5635): unsure at all n locations
tgtccataattgtgatgctactggcgccaaattgctttaccattctactgttcattactagaaaaatttctaacaaattaattaaaaaataaacatttttctggcggcgtcttccgctactaatnggactcttgaaaatattcaaatttattttagaaaaagaaattgctcactcatatttgttataaaatcccagcgaattcaaaaatttcctgccctaaaagccgatttttaggggagaatgttctaattttgaaaattttgagatgctcaagtccagctgtcctgatgcttccaaagacttaacacctgattatataaattcaaaacaattagaaaaactgaaagattcaagcatggtgaacagccgaaggataaaattcattttttattttttgattaaaaataaatgaaaatttaaaaaataaatgaaataaagtaaattgataataggaagctaacattctttttttgttttatttattttgaaaattttgaaaaatgaatttccgatattttaattagttttttgtttttgttcgagatttgattttttgtacaaattttcactttgacgcttgacctaataatttcttccgaagtattcagcattttatattggtcaatttagctaattaatgtcaacaaaaaccatattaatttcagactaattaattgttaggaataaatttcatagttcaagattaattatttactttaagtaatttactttttccgaaaaattttggataatttagaaattattatttaaaagtaaaaataatgaaacagtgagaaaaataatagacaagagcaaatttaatacttgaattattttccaactgattgtgctgaggcgtgggttcgatgtcctaacattttgctcatttttaataaattcaacttttttacattttttaattttaagaaaagtaagcaattgatcaacacattgtaaatttgccgttttatcattgtcatgggttttttaaaaccaatctttttcaccaaattcctccttatcagctcttaattaccatatcattttaatgagtgcatttctctttggacacgcaatttttcgtcttttcgtcgcgtaataatcccgccacacaatcgcatgagcatgtgcagaacattaaagtgcaaatcctcggtctcgggttgtagcaactcggctcacatcggttgcaactcaattggcccggctgctcattttcggggcacttaaaattattggaaaaaaaacattttgaaatagcaaatttagtaaagtaattaaatgaacatttatggctactcactatgcaatttggtgcataagcggcaataaatggggcaataaaaagaagaaagaaggaaagaattttgaacattattaacctaaaaataaaaattaaaaacatttataataaaaattagaaattaaaaaaaaatttataaagaacctttatcaattattctttatttaatgtattaaataaataaattatcattacaaaaaaaattatatttaaatataattgaaaaactcacataaaaatttatgaaaatagaaaagtgttttataataattttctaaataaaaaaattccacgtcttatgagcaaatattttgttagatttaaatgcgctttatgtattggtaattaaaaacggattgtttaatttgtttgtttacacaaaatcctcgagaaattttaaattcggtaaaaattttcggattggaataaaataaaataataaagcatttttatatgtttataaggttttgtataacgattgtttacccaaccgcctcaattttgcacgtttttccattttaaaactaatctacggagcattacaacaagagataaaaatattggtcttgttttggattacattgattcatcgtccatcggtggttattttgttattaaaattatggaattaatattaaactgtcttttaaccttttaatcccattaaacactacccaataattatcttatataatcctttttagtgaaaagtggtctttgttaattctcattaaaatttgtttattttcattaagcttttctccggaaaattgccaaactattgatccgggagttgcagccatctgcaattttttttggcacattttattctttatcctccgactttataaagataggataaatctattaatattcccttatctgttgtgcacattttgaatatatattttgatcatttttggttgcatttgaaaaaagttacgacaaaaaaaaggtgagacacggcttattgcttcacactttatgttattataacatttgttactagaaatgcacactaaaataaaattatcaattcttgacaaatgaaaagaaggaagtcgaccgttttgtgatgcattttttgcgtcatattttttggcccaaaaattaattttactaaaataaattaataattttcaattgaaattatgattattaagcaaatttgccggcaaactaattataactaatggactagtttgaaaatggctgctactgatttcaactactattatttgtattatttgtagggctgcaaaaaatatgtacaaaaagtggtccaaatatgtacataaatattaaaaattactttttttggtattttaggcaacattttcaaacttattttttctttataaattttcaaaatataaaaaaaatgaaaatatgtacaaaaatatttgccgaaattttggattttttttgaggatttccaaaaatttccgtaaaaaatactcaaaccgaaatatgtaaataaaagtcccggtttttgttcgcaaacacaaaaaagaaagtgtttttcctgctatttagagcaaggagaagccaggaaaaaaatatgtatttacataaaattggcagccctaattatttgtatgaattatcaatgcaaacttttttcccataaatgttttaaataaagcgaataaatttgcgagcctaaaaaagtaacaatgatagtaatatttaaatccaattttactaaatcttattaatttattcctgttttttaaatctcataaaactttttgaaaattagaatcataataaaatttaaatttgcttgtttctgaaaaaagttatgaaggaattaaaattaattaatttgactaagttttgtgctaattatgatttattattaatagagctcgcattttgaggcatatgcctttttttctgcgaagtagtttcgatatattaagcataaaaaacgcattttccacttggtttgaggcttctccgttgacttttattatgccttttttttgcctttttcgggattttcgtgccttaaatgcctttttggcattttgccgttttggtgccttttttggcgtttttttccgaaaaattccataaaaatgcaataaaatcggcaaaatacatccctaagaaatgacatgaaaattttttagaaaatacacccctaagattgaaaaaattttcttaaaaattgatcaccaaaatttattttatttttttcttgtaaaaaattttaggcttaaaaattttccttatttgaaaaacactataagtatttaataatcatttaaaagaccaaaattatgttttttggttaatttttacgtgttttgctccctaaaaatcattaataaaaaaattttaaatgccttttttcatgcctttttcgggattttcgtgccttttcatgccttttttttcaattttttggtgcctattttagtgcctttttcgcgatttttggtgcctttttttgcgagctctaattattaagcaaaataagattttaaaaaattaaatttaattcttattatcattgacacttttttttatgggacatagcaccaaaatgcagcaaaagtgttgctactgagatagagaagaagcttccccgagggaagattaatggatcaattgtggcatatatgatcgagcaacgtggagagctggagagtgcagggtaccggaaagccagagacgccggttcaaagcaggcctgccccattccctcaaaagcttccccagctcgttcatatatttcatggcgacccttggcggcttccagttcacccagcagcagcagagaagcgaaaaagatgagagagaataaagctggcactggaagtgatcgaatctgcaaccttcagccgagcagcagctgacgcagagaagaagaagaaaatggacgaggacgtcacataagagaggcccgggatgagaaagagaagaagaagcttccccgagccagagacgccggttcaaaggcggcccgcccaatatttcccttaaaagcttacccagctcgttcatatatttcacttctatcgagaataaataaataataaatttgtggcgattgattacggaaagggaagaaaggaaatgacaaatgatgataatgaaagataaattcagagaataaaaaattgaaaaaaagttaaattatattatattgtttgaattaactatatttaaaaatcattactaaaaattcattaaatttcagataatcaaaaaccagccaatcactgggggtgtaaaaaagtctcggtatagagtctcgaaagcctcgaagaccgagactgaaaacccgagaccgagaccaaaaaaggatgtgaaccaaaattgagcaaaaatctttcctcttggttccacctttgatctcagatcttttctctgcaaattccttcccgagatttcccaggccattatcatttttccattcttttccattcgatcattcacattttcctttcattttcacatttcataagcaaaggtttaattacccaagtttgagatggaacaataaagatattttttggttagtatttggactactacgatcctgggaatggccagcccgtttcatataggaatttcaggacatttcagcttcattaagattctcaatcgtatcacgcttcaactaaattcagtatagccaaaacattgtctctgtatgttttttccgttctcgaattcttgtcccctcaattgggtccaactcatactgccgcagtcgatcgactgcaaacgctcttctttcttcagaacagtgatgagtccgaaaattgaaaagtataacttgattaattcattttctttcgacaataggggttgtaaactgatagaacccttcttaggcgttgtttgtgcgccccaggtcatgaagaacgctttcgttatgatttcatctgttaatcagaaacaaggggacattccagcatttagttggggcttttacaagatattttccctttgaacttcgtgtagacaacgtgttcgacaattacaacaattctaaggcagatctcggcatcctgatcctatactctgtacgtggcgaagaaatatttgaattattcggctgtcgttgaagactttttgccacatttgctccggtgcccctgggaaaggcattttctttttataatgatataaaataaaatttccatttatttgtgtgaaattgtgtatgtcatcaaatgtcgggatcctcaaatgtcgggtcctcagatgtcgggatcctcgaatgtcgggatcctcaaaagtcgtgtcctcaaatgtcgggatcctcaaatgtcgggtcctcaaatgtcaaatcctcaaatgtcgagtagcca

SEQ ID NO: 1723 - DNA, 918 bp, Heterodera glycines
aaagccaaggaaaatttccataaaaggggaatgttctggttaaaaatattttataagtttttaattttgtaaaaattaaggcaaaaatgtttttgctgttccaaatacaagccatattatgaccaaaaatttaatgatcgattgggttcacaatgtgttggtcccagttttacgccctggagaaaaatcattattgttggtggatagttggaatggttggaatgattttcgactctcggataatgttaaattaaaagtaaagcaaatcccaaaacatgcaactggaatatgccaaccattggatgtttacatttttccggtagttttgttgccaaaaataaaataaaaaaaatagttttaatttattgcgataaaaaaagtttggcacgtcatatctcggcactcagactcatttcgcagaaaataaaaacacttttcttaagaacccatgggtgctctatccacccaccaaatttcattcggaaatcccacggacacccggggaccttcctttgttagccaagccgataagggagcccgcacaatccgttaattttgcttgtgatttcattttttgtgattcgcataattttttggctttgattctcaaaattttgagaaaatataattttttgagtgtcttttgtctgtttttgtgcccggaataattatctctctttaatttgtttcttgcgacgagtaaatttttttaggcaatgacttttaataattaaaaaaggggtttccggaatttcacaaaaaaacttaatccggtcctcccccatggcatatttcttgtgctttaataaaatgaaaattttgtgattcttttgcccaactcccacaaattcctgccaatttggcctcacaaattgtaaaggcaactttgacacgttgccattctcatgcggacgtcat

SEQ ID NO: 1724 - DNA, 1828 bp, Heterodera glycines
taatattttattcatattctacaataaaatctcatagaatatatatcttttattaaataaaataaagttttagcaaaaataaattgattaaaaattggtaacaatttttttagataatttacaaaaatggaaatgccaccaattctcacacaattaatgttaattttatttgtttgttcaacgttcattgaaaaaacaaagtgcggcaaaaaagaagctgctgctactccgatggaaaaagttagccaaaaaagcgacgaaacagcaaaagcatcaaaaccggtggaaaacaaaaacgaggagctaaaaaaagaagtgaacttattttcaattgttaaataaaggatctttttgatttaagtgaaggttgtttcgtataaattgccatattaatgtgatcaaaaattcctaattaaagcaacaatttttatttgaaatttgcatactatagagcagggatggcacggaattccgagttccgacatttttggggtcggaattccgacttccgaaatttttgataaaaagtaagttcgaatttttcggaattctttatgagtttttttttaaattagcaatttttgtacaatttctgttaatacattgcactgaaattatcaattttttcccggcggcgcctatcggcaccgccgcaccttaaaatccttaattttcttgaaaaatttgcttaaaatctctaaatttgttttttctacaaaatctgttaacaaatcgcattataaatcactaaaattttaaccgacacctccggacccctccccccagttccccaaattttcttttaattacgcttaatcaccaataatgtaaaaaatgaacaaattttgggtcaaaagtgcaaataaattggcagtttgtaaaaacgagttcgcatgtgcatgaattttaaattaatattaaattttatttaaagattgaaaatatgaaaaagcaaatggaccaaaagttaaagaaaatattgcaagaaaatattcccgcatttgcacttcaattgaatgaaattgcagcacaaattgacaatgaagaaaagcctttggagaaagaatttattcaaaaattgatagacaaagtacgaccattgtacggtaagtgaatataaaataatttaaaatgaatttaaaacataaattatttaaaaaagttgatgcgaagagggctcatctgcatttctggtcgaaagtgcgcattttgaagaatgacaaacatataaaagaagacgtgacgaccgtggaagtgttggtaagcaatcgaaattaatttacataattaaaataaatgaaactgacattaatatgcaaaaataaataattatttactgattttattagtttaaaataaattctggcaaatgagcccttaattatcactttgttttctcaggatgctgttgaggatcaaatttctgccaattataactgtttcaacagagaactcgaggtgttttttgcattattttaattaaatttaaaattaattcagaagatacatacttatcataatgatcgggcggaattggagcgcaatttgcagcggtaacataatatattttgttttaaagtcatgggtatcatttttatttcgtattaatttatgaaatttagtaaaaataaaggttaaatttctgagaaaaattcaattagaacccatagatttggctaccctggtttttgattttataaaaatttgtttcaatttatccacctaaaataggaaatatttcttatgactatcccattaagaaagattgaatgaacacgttgaatttaatttgaattttcgttttttaaagagccccaaggcaacaaag

SEQ ID NO: 1725 - DNA, 3805 bp, Heterodera glycines
  unsure (1)..(3805): unsure at all n locations
taatgttggtagtgatgggtgagtgtgattcactggtgatgctggacaaaaatcgatcgataagcacggacacccactatntaagctcagcacattgtcatttcatcattttgcaattaaaatgttttcaaaaaaattggtcatcattttgttctttctccgagtttcgcttccagttgtttccacttatcgagaccaaccgcaaaagccaccgctagagaacacctattctgcttatataagaaatttgacattgtctcggcaacacaatgagccggcatattcctacagtgaatatttgagaagactgtctttgtctaaaatttatttttcaaccaaaacaataccactaacgaccagagcattaacaacaacaacaacaattaccccgccgcacataagcacccctctgaaaaacgacaagttaatcgatgaacaagtgtccgcgctgctgccaccgttcattcaattgtgcaaagatagaccggaagagagcagcaatctgtcacggcaagcaatttgctgggcactgttcgctctttatttaatgctcatcatcagtcttgtgctacatcaaatttgctcagtttttatgctaaagaatggacagtctccaaatcacaaagatattgagcgaaaatcagcggacagggcgagtgtttcggggctgcttcgccagtgaccagttgccgcccccctccacgatacagtatcccgctgcgctcattgtgaacagggacccccgccacaaggaaggctctcattggtgcgccatttacgcaaagggagtggaagcgccagcgctctactatgacagccttgcccagcccattccgcccaccattacgtcatcatttttacgctatttcccagggggcgtaatgaagaattcgcgtccataccagtccccccttgtctccacttgtgccgcccattgcattgttttcatttaccacttatccttaggcgacacattccatcaatttctcaatcgattttattcaagtgcaaatcccgatttatatgtcacggttgtactacacaaaattttaaattaaatagttgaaaaaaaagaaaaaataaaagcccgatgatcgggcgtaaatgtctaagtaggcaatttcatcgtcaccaaaatgcggattcttcaaaatatatgcttcatcatcatcattagcggacaaaggctccgttgacacaatcccactttcagccattacgctcggcgctgccttcaaaattgccggaaagttgtcgcggtgcaccagatcgacggacgtgcactttttcattgtgaaaggattcgcgctttttgttaagcagtttagcaccacatcacatagtgcaccattttccttaattttttttatcacaaaattgaaaaagaaaaaatagttcaaaaattttacgcgcgaattgggcgagtcgaccaaaatgcgggtgcaacaaatgcgcccagatttgccgaagcaaatatattgagcgaactcattgaaaaaggccggctcacacagctcattgttgttgtaacggaaatgtaggtagagctgtccgtctgacatccacccttttgaactgatcacatcaaattttgaagccaattccttctaaatgtgtaaaatttaaaatgaaaaaacagaaaattgcattacaattattgcaaatttttggtgacgtttggcccgaaaaacctcaacggttgcgttaagcacaccaatgccggagagtggccggcctttaaattgtgaaggaaatgtgaaacaataattttaaaaacacatgtcctacctggtttgggtgttaccccgccaaataaatacataattggcaatgcgtcgataatttgggagagaagctcggcgggtaagcgcttccccatttttaggcacaaatgaacgaatgagtgcatgattttcgccggtcgcgtcgccgcgatgaacacgcattaataattcagcatgttattttggtggtggtcacaatggaaatttgaatttgccggaaatgagccgagaaattaattagtggccgaagacacgaacaaatttttggcactcaataaaagctcatcccattttccattacattcatttccattctcgctcaaattcactttaataaaaaatagtaataattaaaatttttattattatttatttttgttaggctgttaaccagggcggttgctcaaactattgggcaccgtttatcctggcagcattttttgtgtcttttagggcttggggttgttcaaatttctgttctaattgcccgagccgtttaggtgcactgtcgtcttgtgcttcatgggtggcagtgcgcagctcatcaggccaagattggttttaatttgcaaaaatttaatatatgctaatttcaattgccatttccatgcccaaacgcctagtgctgtaaattgccccattttcacgcattatttgtctcctagataaaatgcaaaatcagtctcccaagcatccctctgacttttcaattgcccacattctttctgttccgagcaaaaagccgcggcgcggcggcttcctcattaatcaattattgggagatgttcaagagggtgcaggcaccgcatcctctgcttcttcaaaatcggcaccggactacgtcaaaaagctggccagcagtgttgagcatgtgccccgcttccagtacagcaaagtgaagtcacagttcagcattgtcgatgtgccagcagccaatcccgaggggctccttgctggcatcttccagtactgcattgatgcggctttgggggagagccgggaacgcggcatggagccaactcacctcggctgtctcatcagcagtccgttgctgactggcggggacatccccatccccatacgacagatcaccgataacaccgtagacaccatactgaatcagttcaccaaagtggcgcagagcaaacagcagcaaaacgtcacgctttggggagagcccttcactgttgtagtgacgacagtcgatcgctccaatcttcccgctcggagaaccctgaagggcggtgctcggcgaagcctagcaccagtgcatcaccgagtgacggaaaattgtttgattaaggtcaggtcgcgccatcaaacccaaacaattcgattgacaatttgttttaagatttgcaacccggacgggcattgcctgttctacgcgttgcaggcaacgatggtggccaaaacgcgcggttggcctcgttggaaattctacgattacttgcacagtcggaggggacagcagggatgtctgaggcgggatgctttacaactgatgcagcaaattcgtgtacggatcgggctgaatgcatacgatgccgaaatttgtgtgccgcgtgtgattgaccactggaacaacagtcagcagcagcatcgctttgcggtgttcatcttcggcgcttcgggacagtacaagccactcttcaaatacgtcaacgaccattacgacactcccattgtgctctacttcaacaaccaacactttgatggagtgcaaaagttgcatgggttgtttggtcgtccttattgccttcaatgtgagaagccctaccagcaaccatcaacacatctaaattcctgcaaagcgcgctgtatgctttgcgcacgcgtcgggcccgcattcccctgtgcccccatggatggctttttccatcaatgcgcgggttgcaacaaaaaaatttccgaaccacgaatgccacccacaccatttggcatcccatttttgtggcaaatcgaaacagtgcaaagaatgcggggtaatttggaatgggcgagacaacgatccaaatggg

SEQ ID NO: 1726 - DNA, 3098 bp, Heterodera glycines
catgacccgtaccgcattgttgccttcgatttggagacgacgcagcaccagccggtgagcccgcagcagcccgaaagaagagagcaccagcccaacttcatcgctgcccaagttgcttgccctgagtgcattgagaatggtacctggcgcagcagaacaacagcaggctgtcgaatttgtgggccgcatcggactgttgcgttctgtcaacgccgctttgtggacacgcacgtggaccatcaggtggtggtggccgacgacaatccattggtggcatttgtgcattggctcgtcttcgaactgccgatgagctacgacacatacgcctactcacactttggcggacggttcgacatggtgctcgtctttcgcgagctcttcagaattggctttaaccctgagatgctgagacgagtaaaagcaacatattttttttatggtgataaaatttcaaatctttagggcaacaaaatgtatgagatgaaagtgcgtaagcagaagaagcgcaacccaaacgtcgtcttccgggactccttcaacctaatgccttgctcactggccgcgctcgtcccttcatatgggctggaggttgaggacaagccgttcttcccccacatggccaatcgaccggaaaactacggcagggaaatccatccgacgcccgacgactacctggccagcggtatgatgcccagcaaaaggcggcaattcgatgcgtggtacgccgagaaccgtcatcacccgttcaagctggatgaggcattagcaaggtggtgtttctaaaaatgttgccaaagcccactcattttggctctctcagctattgcaccattgatgtggaaatcttgatggccgctctcgtcgcgtttcgccgtgaattcttcgacatttcccggcggcaagaatacgtggacggaatagacgatcgggagaaccacaacggaatcgacgttctgcgcgaatgcatgaccatcgcgggtgcatgcatgcgtcacttccgcaccaaccacctgcccgctgagcatctggccattgtccctgagcgaggctatgacaacgcgcagaaccagagcctgctcgcgttcaggttcttccactggtacgcggaggagcacggagtggaagtgcaaactgcccactcagccggaggagagaagagaatcggagcgtattcgctggatggatggattgaggcggaggggtgcgccattgaagtcaacggtgcacaaatttattttttatttttatttttatgaatataattttaggctgcacttggcacgggtgcaaaaagtgctatcccaacgacaacatgttgctccccagtggcaagacagcgggggaggtgcgcgagcgcgacgccaaacgcctggacttcctgcggcggcaagtgaaccgagtggacgtctactgggagtgcgaaatccatcggatgctggagcggagcagagaaatgcgcaagtcgtttgctgattatgtggatgatgggccgttggtgatccgggacgcgttcatgggagggcggacgggaccgctgaaactgctgcgcaaagcgggaccaggagagaaaatctcatattatgacttcacgtccttgtacccgtatattaagtatgtgtggtgctcgtcgtttttaaataataaaattttgaactttagtttcgtcactcgctaccccattggtcgtccaaaagtgcatgtgttgaaccggcaagtggagtggcgcagcgcagcggacaacccctacccattggcactgctcaaagtgtgggttgtgccaccccgtcgcgtcgacgtgcccgttctgccggttaaagttggagagcggctttgttttccgctctgcatcacttgtgccaaagagcatccgactggtggtgtgaattccgactaccactgcgcgcacaatgacagacaacgaggttgggtcagcacatgcacttcgattgagctcaacgcggcgctggacgaaggctacaccgtcacgagggtgttccgcgttctggagtacgagcagagcgacgaccaactgttccgcccgtacattgcggaattcatggctcagaagatccaggccagcggcttcgacaacaacatcagagggaacgccgacaaagaggagcagttcgtgcgggagtgcgcagagcagttcggcatcacaatcgacccgacaaaaatggtgctgaacaaagggaagcggtcgctggccaagctttgcttgaacaatttatgtaagtgtcatttttcagaattattttgatccaaaaaaataggggggcgcttttcgcttcgcaacttcggactgtgtcagacactgatcacggatgacccagcgattttggcagaatatttggacaacaaatcaattgaggtgacatcaatcgaccaattggatgaggagcacatactcatcacctatctccacaaaaaggactgggtggatgagcatgcctgctcaaatattggtgaggcacacacacacacaaaattcctactaattttttgtttcagtcatttctctgtggacaacatctgctgcgcgcctcgtgctgctcaaagccatgcagaaggtggtcagatcgccgggatccgagctgttgtacacgggtaaagcaaacagtgcacaaaaaccgaagatgaaatcagattattttagacactgacagcctcattctggtccacccggaggagcagtgcccactgaaaactggcacccacctgggccagttcacggacgagtacccagaccacgacattgtggaattttgcagtggtggggcaaaacaagtaaagttaccatctgtgcaaattgttttttaatttttccgcgctttagtacggcctgtgtctgcgacgcaagggcgcggaggcgggagcccaaatggaccatgtgctcaaagtgcgtgggctaaccctgaactatgagtgctcaacaaccaggggatgcggtatgacacattcaaagaagaagtggtcccttttgcaacgacgggtgactatgaaccaataatagtcacgtacccaaattccttcgcccgaacatcagggagggaggccgagtcgtttccatgcctatgcaaaagtgttatcgtccgttt

SEQ ID NO: 1727 - DNA, 1880 bp, Heterodera glycines
tgacagggcatttgagcagctggccgcaaaatacgcttacgagaaccatgcagggagaaaaatgaaagtcagatgttcatggatttcacttttatatccggaaaagtggtgccacgcctactccaaactttgcccaggaggcacgcccactctcaaccaacatttttcatctggccaaaactcaaattcatttcgccaattttttccaaaatgaagagacgcgctgctactcttactgatgctactgctgagcaacatcccgagcccaaaccacaggaagagaccctcaaaaatgtcgagccgaaggacgagtcggcaaccaagaaacgcaaagtggaggaccgagagttgtggaagttggaaaagggcaaatttttgctgacgacctatttgtgtccgggtaataaacaataaaaaattattacatttttaattaattaattttgagatgattggaatcgactgttcaacaatcagcagaaggtgaaacgtgtggagggcgatcgtgtttgcttcagctttgatctgtgtgaggagtgcgcattggccaattgccgcgcaacggacctgctggctccgatgaaaaaaagacccaaaaatgacttttgaatttccttttgattcgcatttttatccctaattcagttgaattgttccatatttgggattatgcaataataatgaattttttcggcagtggccgcatttgaatctgtcacactgttaattaatggtcaataggcatgcgaaccgagcgcaggggtgggggaggggattgcatttcctttattcattaccaaatccatcgattccattgaatttccaacaaaaatggcaccaacccatcgcaaaggacaaaacccatcactgttcggaaccgcaagtgaccaaataatttaaatcatttgaaaaaatgggttttcaaggatgccatgagtgtcacggggaccggtgcatgccatgtgccaaattgcgagagcggaacagagaaagggcaaggatggggctgtgtcatgggcgcatgactcttgaatttgggccaatgagcagagaacagcagctcaatgcaacggcagcgcgcaacccaatggaagccgcacttcaagctggcagcgaaacgaaggcagtgtttcgttgggggaaccctttggcacctgtccatttccccgacacattgttgtacccgaatataggggggatgtgtttgtgtgttgtaggggtggcacaattctttggggcctgtgggcacgtaggactatgccgacaatgtttgcttattcatttaaaaatttcgcccagccctgataaatgtccctactgtagagtgagcaccacattttacatgcagcactaaagcaattttcattggctgtgtacgtgtggtgctgctcaccctacagtatccccctcacacaaaaaaaatttttcactccattgtactaatatttgcgtgcaatatttgacatttgtttattgatgagataaaaaataagcaaaattaaatttgatcgagtaaatgtgcaacaacaaatgagaatcagttttttggtggtggtggagggtacgggcaaaaaggcatgaaagggaccatcggcatcatcatcatcatacacgggaatggtgtcatttgagggaaattgttgttgttgttgttgttgtagttgaacggcggcgctgtcattggacgcgggaatgcgaatgactgctgctcaccctacagtatcccacacaaaaagtttccattccattgaactaatatttgcgagcaattattgtaatttgtttattgatgagagaaaaaaataagcaaaattaaatttgatcaagtaaatgtgccaaaacaaataaacaaatgagaatcaatttttgggtggtggtgg

SEQ ID NO: 1728 - DNA, 1902 bp, Heterodera glycines
  unsure (1)..(1902): unsure at all n locations
gcccaccctatgggtgagcccctttaaccagggcccaccctatgggtagcccccaaaacctgagcccaccctacgggtgagcccccaaaaccagggcccaccctatgggtgagcccccaaaaccagggcccaccctatgggtgagcccccaaaaccggagccctcccacttggtgagcccctaaatccagggcccaccctatgggtgagcccccaaaaccagagcccacccatagggcgggccccccaaaaccagggctcacccatagggtgagcccccaaaacctgagcccaccctatgggtgagcccccaaaaccagagcccacccatagggcgggccccccaaaaccagagcccacccatagggcgggccccccaaaaccagggctcacccatagggtgagcccccaaaacctgagcccaccctatgggtgagcccccaaaaccagagcccacccaccctacgggtgagccgctaaaccagaacccgcccaaagggtgagcccttaaatccagggcccacagcaaatgcgtgagccctgaaatgcagggcccgcccaaagggtgagccctaaatccagggcccacagcaaatgcgtgagccctgaaatcagggcccacccaatgggtgagcccaaaacaaaaacaaaaaaaaaaataagcgaaacaaacactcacccgctttcgtctcggctctccattttcctcaccgccgtcggacaaatccaccaccacatcagttgtcggtgcttcctgaaacaaaaagaaaaaatgaattttgaaaaaaaaattttaaatattcaacagacctcattacgcctttgttcggcatcgtcgggtgctcgtcgtttgtcaccggtgttcgtcgccgccgccgcctttagggattggggtaaaatttagaaattaattcataaaaatcaaccccccacacatgaaaatagaaaaaagaattattaaatggggaaaaaatttgaaaaaatttttacttgctggccatttgtcgttgtgcccccaatttcattgtcccagcaacgcgcgctcaacacatgaaaatttatttgaatttaattattaaatttaaaaagaaattcataccccccgttcaataccagatggagtaaaatactaaacaaaatttatttttattttattttttggaaaaaaggtaaaaaattttacatttttcataaggtcagtggccacatttgccgctgcccgtctgaggtgggatggcgccccacccgaccttttagcaaattgacgtttcattttttaataaaaaattggaaaacaaatctaaaattacaataaatatttgcttaaattgttttggagagttgggtgtttggcgtcgctaaagtgaatgaatgaatgccattcattcgtcccccccccctgccctcttcggtccaatgacctttcccagttagagagcgtatgggcaaaagaagcagagaaaacgacgccttattggcgtggtcatctccaccgaaaaatgaccccccccattcgcttatccgcaccccaattttctctgtctgtctgccacttcacaatttgctctctctctatccgctcttccccccttgccccacaatctgtctctttctctcttcctcccttgccccgcaatctctctctctctcctctatctctctcttcctcccttgcccccgcaccatccctctcctccatctcctcactcttttcttttctctgccccacagcactgtctgcgccccgcgccgccaccaaatgatcattaatcaccgccatcgctgaccaaaagtttttttgccaaaaagttttacatcactgtncgaaaagtttacccccccccataagcaaaagctttgtcccccattccacaaaagttttttaaaaatttccattggccaa

SEQ ID NO: 1729 - DNA, 2036 bp, Heterodera glycines
  unsure (1)..(2036): unsure at all n locations
gaaaatgatacatattttatctgttgaatatatttttctttatccacatgatcagttccttgttgagatgatggattttcgtcggatcgtctctttatgaaaaatactttttgcacttttattcataaaccagtttatatatctgaaaacaaaaaattactttatttaatctttgggtttgtaattatttaattatttttaaatatacgtaaaatttgcttttttaaaatgttgtccgattaatgactttcaatttattttcatttattcttttgttaaaatatgactttaaaagctttttcatatcctaaagagaattaaaatttaaatttttgcaaatatattttactttataatttatcactttattataaattaatattttttttgattcatttgcagcagatcatgccgattatatgaaaataataattgatctttgcagtaataaattattttttaattctgtttagacaacttcatgtacaataaaaaaataatacttttataatatttaaaaattattagtcataaaaattcctaaaggatgacttttttttgtatatttaaaataaaataaatttaaatacataaaaataaaattgagtaataaatgtttgaattgataaagcacgtaccattcttaaagagtagaagcccatggcctgttgttgatcttaacctttaaaaatatgacaataaaattaattagaaaataatgttaataatacatatgaacaaccatccattttaataaaattatttctttttaaattaattcgaattgaaaaaataatatttatggcacaatcggtcccttttggcgatggcattttattatgtttttgtgtagtttactgaccatgagaataacaattattaaaaaataataaatattaaaattattatagcacttctacataagttattaaaaaaaaaaaaacttaaatttgatttttatatagaactgattaggaaataattataatacaaattaatataattaatattttaaaaatataatattctatgaaaattatattcaaatgttaaacaaagaaataataaattctataaatttatagagagatattatattattatatgatttctagaatgaacatttattaaaattatgagatgttgaaaacactttatatattaataaaaaagatggattatttgcttttatcaggaaaaaaaggaaacttaaataattaattaacaatgttttaatgcactaccaaaaaaagtatcaataaaatgatttttattattttaaaacaataaatctaaattttaaataagccacaagataatagtaaataaatgaaatgaataaaataataaaataattaatttcaattattatttaataaaattaattatttgaaataaaaatctcctccatcaacaaataattcaaantnaatacataaatacaananattatttattattaattcataataaatttttttttctnttttacaaaatnataaaaaatcattttaaaatanatatagtaatatttaaaaacacttttaaataatataagaaaatttataaaaattctctaatttagtaatgattttccaacaaaataaaacttattcatattttacgatgcaaagcgtatccatctaatattgaagtgaaaacactgaacttttacgagccatgagataaaataattaaaccaaaaaactggtaaaaattattgttttcaaatgaaaaatgaaaaaataatttaccaatttaaaaaaataaataaaaaatatattattatcagcataaaaaagcttaattcttcaaatgagctatttattaaatagaaggaaatatttatttatattattaataatttatgcattaaaaaaagaagaccagaaatattctcatttactatttttgaaagaattttttaaatatttcaaattgtttacgctcactagcgatagcataattaaaaaaaaattattttacaatatatatttttggttttctttttatactttcaattttgtattaatatt

SEQ ID NO: 1730 - DNA, 2999 bp, Heterodera glycines
aagttctcagaaaaaatcggtcaagcggaaatgccctttgaaattagttaatttaattaaccgtatttggggcagcttgtgcaccgacaatccgataaaattaaaaaatgcaataaaattgaattaaatacctgccagaaacaagtgtagaacgcggcggtgccgactttatccagcaattggtccaacaattgaaaggcacgaccatagaattcggtgccctcctcaagtgcgagaagaacggcggtgatgaagccggggagggccggccgaaggtgagtgcccagggggaggaggtactgctcgaagatggacaacagctccgacttcactttgatgccacagtggtcgatcaactgaataaaagaattgatggaaactgcaatttagctatggaaataggacttggagatgggagaggggagggactcaattcataaaagaaatacacaaaataaattttaattttaaaaggtttatcagggttttgtgcaaaaaaaaacaacttattttgataccaatttttacaaatatagtagttaaaattgcacccaaaaattggaaacagtgaaaaatggggggtttggagaggttgggggagggactcgattcataaaacagctacacaacgttttaattttaacggtttatcataaggtcttgcttttgaaaaaattcacttttgatacccaattttactgaattgtcgaaatttcatgaaaagtgcttgaaacgctctcgagaaagataaacaattcagatttgtcgaaaaaatttaaattttgtttttaattactgaactacgtacgacttcagaaacagaaactacccaataaaaaaatttacgggaaagaggccaattgcgtagagaaacagtgatctggccaagttctgattgtgtcctgaatgtccgaggatgttgaacacttgtctgtacgtctccaaagcctttagatggacacctgttgacaaaatattaaacacagaaaaattatgacaaatattagtaccggatggaagtgcggggtgaagacattgggagagacgtttggcaacagtcagaggatttggaatatcgttgaacgactttgaattggacgcaaaaacctagaaaatgagattttaacggaagattttataaaattggcccgattttcataaaagttcgttaaatctatcggtacctcatttcacatccgtcgaaaaatttattaatagatctatgagaattgcattttcccggcatttaaaagccaataaatattcagttattttaattagaaaatcggaattctcggcctaaaaagcgctaacaaactttgccgagttttcccaaagctgcgattagatcggcccattcggtggtcgactcaaacgatttgagcgctttgtccacggcggacgcgtaggcgcggtatttgctgctgttttggtgcgacgaaaaagtgccgagcagaaaattggtgctggtcgaagcttcggaattatgtgcttaaatattgaaaataaaaatgggaaattggagaggaaaacttacagccaaatgaggacatagaataatgacggacgaaaggcgactcctcaacaaaataagctcacaagggacgaacacacaatagaataaaatctcaaaaattatagaaatctgtaaattcatttggtaattcgttgcttgacaaaacttcaaagcactttttcattttaatttggagtgaatggaggcataaaaattgaattaaaatatgcaaattttaatttttaaaaaaatggggtcagatgcacccaaacaaacttagccatacagcggaattgagtattatgggaattgggtgtaattcatttgtcagtagaaatcatagtaaaaatgtggtaagaaaaaacacgataaggggaacaacagttcttgtaaatggaagagagggaaaagaatgaaaaatgctttttgttgtctggcggagtttcctggtgggccgtccgccctcctccttttcagtatcgcgattaatatgtactgcttgccgctgctgcttctgctgttggtgcggtgctggaattcgtcacccacccatcatcatcgccacccttccacacacacaacagccaatcccgtgaactgctgacgggggaaggatcaataaataaacagcaccggcgccaatcgttgcagcagcagcaacagcagcagcagcgtcatggacctctcccccaacgccaccccaccaccttcattcattcaccacaaacataaccaagcaagcagcagcagcaggaataatgctctttggctataaaaatgctctgaatttgggcggaaaggagggaggggggaaatgcacacggacggttccccctttttcccatttctttgctcgtccaatccctcccccccccccccacttcactccctccgctgcgaaatgcgatgccattgatacatatttcgttcatgttcatggttgctatacaacacataaataaaaataatgttaatctatgaaatcaaatttggaggtgaacacaacaataacaaaacctgcaaagtacaataaatgcataataaggattagaataatacataaaaagaggggagggggaaaatgggaggataatcgcgtttataccacggaatttcgtagtgcaagtaaaaataaaatttctaaatttaaatttgacaaaaaggtccataaataaataagattctgctggacaacaaattccatttacgggccgatttttaggggtgtatttttcgttttattgcattttcgttaatatttgggcaaaacaccaaaataggttcaaaatagatttttcaaattttaggctttttagtagagatcggaattttgagaaaatacggatcaggatcgggattacggactaggcacacatacggatttacggaccaaaaatccggaaaatccgtactccgtaaaaatccgtatccaggaaaaatacggcggatccgtatacggatacggattttttataaatttttt

SEQ ID NO: 1731 - DNA, 6161 bp, Heterodera glycines
tcgataaaaactgatttaattaatacaaaccttaaatatttaaagctaaaaacattgtaataaatttattataaattctaagcaacaaaaaatgaaaaaaacaactcgcaataaattggcaacaaatggaagtgagggtaaatatttcagtatttgtaattaatttccggaagtgctttgtttaaaaaaattaacatttcggctgtttccggtttcaactaatacactcagcttttccttcagataatttattaaataaacctatttgccaaattagtgaattcacattttaaatttaaatattttgtgcaaaaaatagaaaaaatatcaatgaccattcccttacactttcaattttttaaatataaaaaaaattatttatgttttggcaaaatgactgcaaaaatttaaaaaatttacacatttgtaccttaaaaaatgtcagataaaaaaatccgtaatccgtgtcttaatttatacggatcgggatcaggattacggacttgacatcgatacggattaaaaaatccgtatcggccgaaaaaaatacggattacggactacggatccgtaaaaatccgtatacggatcttgtccgtatccgatctctactttttaggctctaaaaataaaaacctagaaaataggcgctaataactcgaaaagtagcttaacaaccaccaaaaaaaaaaacttgtttttcgagagtttcaggccactggattttaggaaaaaataagctagaacctgaaaattgcatcgctaatgatcacttttgcttacttttttatttttaaaaatataaatgttttttatgctgattttttgtcagccaaatgatgattttgaaaaattgcatctctggcagccctgctagcgctgtcaagacgccgatgcgttgaaatgccgattaagctaacttctcggaataccgaccattttaaaaccgtacattcagtctccgtaaatatcaaaaacagtaatttttgaaacatataaaaaattaaatttatttattttgcatgaaaatgttcgcacaaaaaaattcagaatatggaatttaccacaaataaattcttagaaaattaaaaattattgaaaaagtcagagacttgatgaaaagccatagacaaaatcaattattttacaaatctgagctcagattagcgaccagcgcattttttagcctagaaaatagtaccttaaatttttacatttatttttcgcagaaacaacaaaactttaccattgcccttcatttggacatggccaattaattattaattaattgaacattctcttgttatcttaaactggttaaaccgaattcccttaaccttcaaaaaaaaatattaaaaattgctttggaattaaaaaaagattaattgaggggggcaaaatttgtgcaacaaatctttctcggtaaattggcaccgattcagccaatcacaaaatcaaaatcaaacaccatccatcatataacaaaaatggaaaaaatgataaagaaaaaagcaatacacaaagataaaaaaaattgtacacttaagaaaggaaccaaggtttaatacgatacaaaaatatgtaattaggggactcatttggtcacaatgtttggtattgagaaatgaatggcttggtcgagattatgggggatggtaatggaggcaattagcaaatgaaagttaatgggtttcggcgggttggagcaagtacaaaaaataaaaaataatgagacgattagatttttatcttgtcacgtcctccatacccaacttatccattatccagctgttccataccaaactcatccgcagcatggcatttgtttggccataaaaagaaactcattatttctcttatcaattaaatgattaaaaagaaagaattgacatcattatcattaaatacaattcaaaaaaagaaaaaaatattttattaattaaactaaacccaaaatacaaacaaattaaagacatttaatgaaaatgaaagaaaaataattcgattttgtgtggggggcaaaaactgaacagaacagagtttaatgtatgtaaagaaatcgaacgcgaaatgagaattgaaatgaaatgaaatgaaatgaaatgttcaaattgctttgaaaataaaatacaatagaaaaaattgaagacaaaaaaagggaataagaaaaacgatcggaatgaatggaaagaatgaaaaaatggaattaatatggggggagggcaattcagcggacggattggacaaataatgtaaatgtttgtcgccgacgacagaaaatggaaatttttgttctaagcgatggtagagtggtctgacaaaaaggttctggaatgttccgttcccgacttttagagttccaacattaaatatttgacacgactgagagcggattgggggggagagatattccgggaaatttatgccgaaaattaggcaaaaaaccgaacaccaaccattaaaactttttgccggaatttcggaattattgtgccaatttaaaaaaatctattactattttaacagaaaaaaaaggtttaaatgacaaaaaattaaagctgtttttgtgcaaaaagcaattcaaaaacagttgggatttgaagagcagctagcgctttttgtggcggtcatttcgcggccgacgacgagcggcggaagggacgaagcaaatgggggaagaggaagaagatttagaggaggagatcaactgggaacatttaatgacggaattttgatcgggatgaacccattttttgaggttcggcggaaggatgacgatgacacggagtgggagcagcacaattcgatcggggattttgatcgggcttttttgttggaggcggggcggaataaaatgaaaatccttgggggaggagggcgggtgtaattcgattgacgaggagggatttatttgatcggaagggagggggcgggcataaatcggatcggattgaccaacacaaaacgcgcacacactgtgcagagacggaccgcgaccgatccatacggcgacccttgacgatgagtcgtcgtgaattgttccatcgacaaatatgggcgcgctgaggattgaccgacccaaaaaaagcgccatcaaatttgggataagtgtgggcagacgggcgaccgaccaatcgcgacgaaatgagtggtcatttggagggaggccgagtcagtacccggctgattcattgtggcaattttgtttgggatgccaccatgattgtggtttcatgatgctttgcttgcggtgctctctgatcagaacccaaaggattcaggcaaaatttgtgtataatccctggcactcttttttttggatttccaaaaaccttttccctcccatctcaaaaagggccatttaatgaattgaaataattcattcctcgccggcgggaaggggggggggagagaatgaattctactcctcctccttcggcggttgctgcagatgaatgctttttcttatgcttctccttatgctgcctccccatctgctgttgggggaacggcgacggatcggcggcggacggatcgtccgtcggttggtcgtcccctccggggcactgcttgcgtgcgtgtgcgctgcagttgtatgccccccaaattttgtctctccgccttcccgcactccattgctcccaccgtctctctctctctcactctctcacctctttcctcaaccgcactttcatatttaggaattttctttaaactctctttttatcttaccgccttcccgctctctttacacccaatgtactcttgcaatcgctctcactgtgtcagcatgtcctttgtcctctctctctctcactgtgttcccgtcaactcctcacatcctctctcaatgatctctctcaatacgaggatatcttacaccttcaattacacacagactctctctctctctctcgctcttctctatccctctctcactgtcttccccggatttacactctctccaccacacttcgtggccctcccggctctcctcccataccacactctctcatccgcatgattgtcgatgatccccttgatgctgcaggtggttgcttggttggggtgagacccgcggaatgagagaacgaaatgctggggaggaatggatgaagaagaagaatttggggctctccgttggggtgactgttgtacacatcatcatcatcgtcatcatcagggcggggcgaactccgtggccaatttttgcatttaattggccctaaaattagtttcggaggaaacgcaaattgcgcaacatttttgtactttttaaaatgcgtcgccgcccgtccgtctttttctctgcgcttgcactgctcctctcgctgtctgcccatggcgccggtgctgaacactccgccttctacgacttgctcggcgtgccaacggacgctgacctgcgctccattcgacgcgcgttcaagcgcttggcgctggagaagcatccggacaaaaatcaggtggcaaaaaattaattaattaaatatttttaaaactatttttcatattttcgcccatttttaaaattttgaatttcctttaaaaataccttaactaattcgttaaattcttttttgacccggcgcacctcctaaccaaaatttaatcaacaaattatcaaaaagtttcattttggtgcaaaatttgttagcaaatctcattaaaagtgaggaatgtaacacttaataaatttatgcattttatacaatttcagtcgaaaaaaacattgtcttttgcgaccatttttaagcatggtgtccctattttgaactgtgatcggtgatcgtatctttgacctttttaaaaatatttttttccttaagaaatatgatcaaaaaattctcagggattttgatcaaatctgaatttaaaaattgccatttattcttaactaaaaatagaaacagcgcaataattttgctctgagctgttcttttcggtacagacaaaatttttaccaaattggaattacaaaaataaatgtccctgatttttgttctaaactccgatttatttataatcccgcatttgtctaaaaaatgtattggatttcttcatcattttccacgctttgttcttccaaaatatgaattcaagtgacttttgccgtttgtttttaacctatggcctcaaaattcgttaaattctcccctttcgtatgactcattttttgatttctgcttttttgagtcaaaattttcaacaaatttttctcttgtccaagaatgacccggaggcacatgacaattttgtgcgcataaatcgggcctacgaagtgctgaaggacgaggagttgcggaagagatacgaccaatttggggagaaagggttggaggagggaaacaacgccgcggggggctgggcacaacgccaacgccaacagcagcagtgggagtcgtgggagttttacaatgacaaatttggtgcaaaaaaacataattactataaattaaagttaatttaggcaataattattattcctgtaattagaccacaagaaaaatttgattaactatattacaattagtgaattaaaaagtgttcctttttgaaaattattaatttagtaaatcaattcttattttataaaaacattaacaggaaaataaattaaatttctgaaaagaataacatttatatattttttttaattaaaattcttttaatcaaattaaaatgcttgctttaccgtatacttttttaaaataaatttaagatttgaattaataaatgagtttttttaaaattaattatccaatttttgcaggaatttatgacgatgaccaggaaattgtcaccttgtccaggtaaatatgtgcgaggaacatagctttttatccacggtaatgggatcccgaccggagggattggtcccggccggaacccggaagcccggctgtttagacccccccccccctgattttgggtcccaattattatggcccctgttttttcagagcccgtttttggtcccgacttacccaagattattctgatccccgtttttcagacgcctttttaattcgactttttcaaaaatctttccgttttaattaaattttttaattttaggagtgaattggaggaagaagtgttcgaatcaggcgaagttgactctaataaaaagcattttgcctcgttaccatcactttttt

SEQ ID NO: 1732 - DNA, 5748 bp, Heterodera glycines
  unsure (1)..(5748): unsure at all n locations
cattttcagcaacttttttccacggttcgcgcgacttggctcactttccgcttttttgctctccaatttgctttctcagcctctccgatcgctcgaacaattaccagaaaattggcgcccattgcttgtcgaattgaacgacggcgaaagtgaggggatggaggagcaggaaaggtgggcaaaatgccaaaaaagggcggaaaaatggccaaaaaaattagagaccggaaatttcaaatttgcggatcctgttgcacaggattggaattcaaaattttttacgggacatgcaggatccggcaaaaaaattccaactgattcaaagaaaaaatctatagtatttaaaagaccacttataacgtctatttttaaaaaaaatataggtaaagttcaggaaattgttgtgttttgctaacacacaaacaagataaatttattaaatgaataaacaataaaattagaatcacaaaataataataaaataacgacggagtcaaattagagtgtccgaaaataaacaccgaaatgtaaaataacacaaatgcaaagaatgagtcgatgggagaggacccatcaacaaataactaatcaataaaagtattcgtgtcgaaacttaataatattaaatatcaacacatccaacttctccctcttttggaaagaccgtccgtggcaattagccgggcgaatagcgaattggcttcttgcgctgtcgctgcggacgaggagatttgactggttcgggtgtgcggtcacggacaggagtttgatcacggacaggtgtctgatcaatttgaattggcgccattggaggaattggttgttgcggagcggcttgaatctgatcggacacaatcttacttgaaatgtaaggggaaaatgaacgcatttgattgacgtgacgcgttacggtaattccaaggattggaatttcgattttccaaatcaaaccactaccactcacaattttaccttccaaccatgatggtttaccactcctaccataattcaagactaagactgagtctcctgaattgaatgaacggctttttgtgccatgatgttggttgtactgctgtgacatcctcgattggtactgtccacgttggttgttgttctcgttcggcgtgtgctgtctcggttcaagcattgacaagggcgtgcggagtgttctttccaaaaataattctgcgggggaaaaaccattcaaaattggactcggcgaggaccggtacgcaaacaaaaattccgaaatccattgttgatttttggattttgcgtttttctttgcctgccgtttgaatgtgtccaccatccgctcggcttgatcattacagtgcggctgatacggcggggagaacttgtgcttaatgcctttaagcctgcaaaagtccttaaattcatgggaagtaaatggtggtccgttgtcagacactatttcctttggggcaccataccgatgaaataccaaatttaatgcttcgattgtgcccttggctgttgtcgtgcgcatctgcatcacttcaggccattttgaaagtgcatccacgaggatgaggtaaatgtttccaccggcacatgggcctgcaaaatcaatatggacacgtccaaaaacttcaccaggaattggccatggtcgaagtggcgctttcggcggcattttgacggcgaattgacattccgcacaatgctttaccattgcctcaatgtcactgtcaagaccgggccaaaagacatggttgcgagccagcgccttcattcgcacaatgccaggatgagcaaaatgcaacgtcttgagtacacgttaacgaagcggcgcaggaacaatgactcggtttcctgtcaaaattgaaccgcccacaagggtgagcgtatcacgtctcgaatagaaaggcattaattcattagctgggcatttgtttggccacccggaacgtacgaattatgccacctcctgcaacaaatcgtccgaagtcgtcaattcgctcacttcttttgcatcgactggcagctgctccaagttgacaagaagagcatattcgacttcttcagtgctgtccacgtcgtccgatgtgtgggcgacaatgacttcttcgtctgtccggtgctcagaaatcagtcgagacaaaacgtcggcctgtccaaaatttgcagatttaacatattttattgtaaaatcataattggacaaaattagggcccaacgctgcaatcgggaagccgtgtagatcgggatcccatttttattaccgaatatagccaagagaggcttatgatccgttaatagagtaaaattacgaccgtaaatcatcctgtgaaatttttgcacagcgaagatcaaagacaacgcttctcgttcaatttgggcgtaatttcgttcagcgggagtgagcgttcggctggcgtggtcgatgacgcgctccactccgtttggaaacacatggctgatcgtggctccgattccactttggcttgcgtccgcagcgacaatgatcggcaaactaggatcatactgcgtcagcaacaaatccgattgaagaacctgtttggcctgatcaaaagccttctgctgatcaggaccccaaaaccaaggagtgtccttcttcaagagcagatccaaaggtgcacgcaaatcgcgcatttccttgacaaccgaccgtaatagttgagtgcacccaggaaagagcgcaaagtgccaatgtcatgcggtgacggcatattacggatggcatcggatcgagcgggatcgggcttcagaccatcggacgagacaacatgtccgagaaacttcaattcagccttcaaaaagtggcacttgtccaattgaactcgaaatccatagtcctgaattcgggaaaagagttcaatgagagcagcaacatgctgcgagtgatcggccgaagcaatgatgatgtcgtccaaataggcaaacacgcctggaataccggacgtcaattggtccatcgctttctgaaaaatagacggggccaattttatgccaaaaggaagacgctgatattgaaaaagtccgcggtgcgtgttcatgccgactaactgctttgaactttcgtccagttcgacctgcagataagcatcacgcaaatcaagctgcgaaaacactttggctccacgcagagcatgaaaaatgtcttcggtccgcggaaggggatgcctgttcaactccagcgcatcgtttagtcgcgtagaaaagtcaatgcaaatccgcacattaccacttttcttacgaactgccaaaacgggagctgcccagcgcgaaaaatcaatgggcttcagcactcccgagtccaaaagtcggtccaattcttcgtcgactgctgcttggactccatgcggcacaggtcgcgcacggcagaacactggcttcacattttgcttcaaatgcagcgtggccttcgtcttcacacaatgtccgaggccaggttgaaacaccttcgggaaggaagccttgatttgcccttccaatttgaccggatcatttgttggttgcacactgttgacaatgagcgactgttgctccaaagtcgtggcaattggctgttgggtggcacgctcgaaagggatgatccaatccaatcccataatgatcggcgcttcggtgtctgccactgaaagttcaagccgcattgtgactcctctgaacagaacgtcacacttgaaacttcccaacaacttcaatttgtggcccgaaaaggaacccactaatttaccaactttttccaacctcggttcgcccaaacgctcgaaaaagctgttggctcaacaattttgacgctaacttttttgaaactcattaaaatttttagaattttttgcataataatataaatatccattctttggtcgcaccattgctacactgaaattataagagaaatacatgtgattgaacacgtggatgagctgaattgnggcaatatttctcgtgtgcccttgctttcgacatccaaaacatttgacgtccacaggaataaacagtctcgcaccgcgtgtgcttgaccacaccgcttacacttttgactaactggtgcctgttgatatttgcctgtaaatgttttggtaacatttgaatttcccgaatttggttggctaggacgaaaattgttgggtttggaatgcttttttgaagacccatccccaagtttttgtggtcgggttgaaattgcatggacttggcctggatttgcgagcgcagcggacgagtttttgagcgacaggatggcgcggcactcctcgagaagcttttccagcttaatgtcctgaggcggcattgcggctcttgccttttccaactgccggaggcactcctgccgcaagtccttatgtgcgtctgtcaaacctgaaatgaagatcatgcacttgacttcctctttcgacagcgtcatttcggctcgctcgcaacgggcgttgacaatcgcgccaaagtccagcacgttttgagtcggcgcacatgccagctgaaaacactcaaaacggcgcacaaaaattgattttgtgtctgaaaacagagttttcagtttgccgatgcattcctggaaagtcagatcagacgctttttctggaagaatttgttgttcaaaacgaatgtaatccgggggcgacaactttcccaagaccaaccgcactttcatgtcgtcgtccagcacttgaccgtccttctcaatgaagggaccgaagcgttcgtaccacaaggcaaacgtcgaattggcttcggggtcatattcgaaatcgggaatttgaccgtttattttagaaaacaggtcagaattgttggatggcacatttttagacaatatcgttgataacaaatcggtgaattgtttttgttgtgcgtccaaaatagcttttagctcctcctttgtcgtcattttaccagatcagacagaagatgaatgatagatgagacaaagataaagtttaaaagcttgccactagcaaaatttggcaaaaaccgaatccacacttagctttgctcagtcaaaatactgagaaactcttcgggctacgacagatggggaataacttgtttgttatgggttatgtgagggggccgtcagagtcgctttttggtgaattcacggttaagcgcaaaaatgcacgggcgtcgccagttgttgtgttttgctaacacacaaacaagataaatttattaaatgaataaacaataaaattagaatcacaaaataataataaaataacgacggagtcaaattagagagtccgaaaataaacaccgaaatgtaaaataacacaaatgcaaagaatgagtcgatgggagaggacccatcaacaaataactaatcaataaaagtattcgtgtcgaaacttaataatattaaatatcaacacatccaacaggactttcgcagacgttgataacggacgacccggttgtcttcagagagcacttggacaaccgatcaatcgatgtcactgccattgatgagctcgatgaggagcacatcctccttagctagaaaataagaaagagtgggttgaggagcacgactgctccaacataggtatggatcaataaattagagcaaatatataatataaaattttttcactgatatccctgtggacgacctcggcggcacggctcctgctcctaaaggcaatgcagaaggtggtgcgtacgcctgtaagcggactactatacactggtaaaattattattattattatatggcgaataaaaaantttaacatttttcagacactgattca

SEQ ID NO: 1733 - DNA, 1547 bp, Heterodera glycines
tcattccgccccaatgagtcacagcttaaggtttttgtctcttatttttagaacgttcattacagtgttgtttttgtagaaagaagacatgaaaagtctgatagaactgatcgcccgcagacagccccatttagtggtcatcggaggcgaggacattgacgcgttacgcttaaccaccgatgttcggttgagtataaacgaggctgcccaacagaacttgaaaattcctttgcaactttccgtggaaattgcaaattccgacgccgcgagagtttacatgaacagtcgcatggcaatggtgtcgattagccaattaaaacatttggtctgaaagcaaattattgttttagcaagaatttccgaagtatccgccattgctcctcaaagcaatatcgctggccagatttacgcttgatccgttgatcgaaatttgccatctttgcaacgcggacgacgacattatgtacatgaagttccatccgctgcagaatgaagttccaaagcaagaacttcttttcgcgcttcaagttgagtgcatcaaccgtgttaacgaggttgaaaatatataataaattccattcacaaaatcttgaaattattattattattaggttggtgttgatatcaatcgctgtttggagtttccatacaccgccggcctcttacaattcgtgtgcggtcttggaccccgaaaagcatctcatttgttgaagattctaaaacaaaacgaaaacttattggaaagtcggacaaaattggttacatattgtcggatgggaccaaaggtgttcatgaacgcagcaggatttattaaaattgacacaacgaaagtggctgataggacggactcttatgtcgagtgagtccgtaatttcattattgtttagctttaaaagttttccgttaagaatgcctttgttaaatttagagttctggatggttctcgtgttcaccccgaaacctatgaatgggcaagaaaaatggcagtagacgccctcgaattagacgagccatctgaccaaacaatcgcaatcgaagaaattttgaaggcaccggaaagactcaaagaattggacctggacgcatttgcagaggaattgggcagacaggtctgccgaaccgaattctttgttagttagaagaaataaaaatgtttagggatttggaaacaaaagtatcactttgtacgacattcgggctgaactgaattaccggtacaaagaccttcgaaagcctcatcaggcgccgactggcgaagaattggcacaaatcttgctcaaggaggactgcagcaatttgcaaagtttgttttgacgagaaccaaaaaaacgatatgcaccccatgaaatgatagtcggcttttaatacttaagccggaaaaagtagtcaccacggaaggtttctagccacaattttattgacaaagagaatttatggaattgagccaagtgattttaagataagctcgtccatgggcaatggattaatgttttgtaccgacgattgaatgatcaggatgttgagaactcgcaatcaaaaaataacaa

SEQ ID NO: 1734 - DNA, 7002 bp, Heterodera glycines
  unsure (1)..(7002): unsure at all n locations
aaagttcgacccgtatttgaccacgtgcaaatggatctgttcaaaagcgaagaaatcaaaaaggcncaaaaggacgatgaaaacaanaatcgaagaattttccaatatgaatattttgcaaattatacggatgagaaggcagcggctgcaattcgccggatgaaacaggtgttattttcaaattaaaaataatcctttaaaattttaaagggcggaaaaatcatttggccttcagaaaaatctccgaatattttgatgatcgcctggaaagtcactaatgacattcatcaagtgataaaagttgaggagaaggagaagcgacgtgttttcgaaattggcaaaaaactgttgatgaacggagaggtcggagcagggagagagggggggggggtgacacggggtaaagtcaggcggtgctatgactccggtttggagatgtaacgccaaatacgaccttttttgttcttaggacagccaaaaaaaattccgctttgttttaaaacaaaattccaaagaagagaggcttccgattatgccgggtcacttaaatttatagtcatccctcggggtgtctgaatttctcaaattgatacctgctaattgtaagatgactggattcattatttatttgtgttcaggttttcgaggacgtagatgagattgttacacgatgcattgaaccgatggccaattttgcagtcgatattttgcgctatcgttacttcatggagtcgggttacgcccaggaggtggttgacggttacctgcgagatcaaaagcgcgctgctcctcaacggatcccgtaagtcaatttaaacactatttcttatggttttgcctttgtcagttacgttatcactgccctccgggaaaggcccgggcgttttatgctttcttatttggccggttcaacaccacggaacgaatcaatgagcgtgactccggatgggatcaaattccgtggccatacatttgcttctacggaggactgtgtcaactggtttaaagtgagcaaaatttaacaaatacacaacacattcattcgttcatttttgaatttcagaatgaattcgctcgtcggcagcaagagatactgcaccaacaacgatagttttgcattttatttatttatttattcagaagaaataaaaatatccaacgaaggggtgaccacttacacgttagattttagtaaagtaatatcaagtccaaggagctcttttacagactaaatttttgtttaactcaatccatttatttattcgttttttgaaactgtcaacagatggagcatctgttatatctttgttgagtttagaccatattaaggccgttctgttgataaaagaatttgaagttttactggattgtggttttaacacaactttacgtctaagattgtaagggatgtgaccagaaaattgggggaatatgtcttttttaagatgagtgagaccattgatgattttgaatgcctgaactaaatcaattgtttttctcctttcttctaaagtttgaataaatcaagtctttgttcgtaaggtatatacggaagcctacatttaaataaagcaatttttgtaaaatatttttggcatctttccaatttatttatatcttttttgtatgtcggattccaaatttcgggtgcatattctaaaagaggacgaatgtatgtcttgaatactttggtccaaatacgtatagagcgggtttttaaaattttggcaatattgcgaatccttaaataagcagctttaataattttagtataatgatttgaaaatcttaatttattatcaattaaaatgcctaaatcactaatagattcaacctcattaataatattgttgaaaaatttatattgttgttttgaattatttttgccgagaaataatataaatgttttattttgggagatgtttaaaccaaatgcattagcccattttccaatattgtctaaagcaacatttaatttgcttctttcatcacgagttttgtaagaaacataaattttgacatcatcagcaaaaagcttgatgctaactcccggagggattacctgcgggaggtcattaatgtatattaaaaataacagagggccaagaacagaaccctgtggaacaccagactgaatcggatataaattagaaaatttgttgttaattttaactctgtaaaatctatcctttaaaaattcagataaccaacttagcagttttcccctaatgccaatgttatgaagtttatttattaaaatattaataggaagggaatcaaaagctttccgaaagtccacatagatacagtcaatatttttcttaccgtatatgctgtcgtaccaatcttctaatactgtaattagttgagtattagcagatcggtgtttaacaaaaccgaactgatgttcggatattaaattattcagatgaaggaagttataaatgctttttgcaattattttttccataactctacatagacagcaagtaagagaaatgggtctgtaattatgtggatcatttcggtcaccttttttaaagagaggtataacaatagattttttttcaggaattttgcctgtgtccattgatattctgaaaagttcggaaattacaggagaaagagtaaggtggcaattacgtaagattctaaaggaaatttcatcgggggatgtggattctcgattcgataaattttttaaaattttagaaatttcatcggcattaaattcaacatcagaaatagatggttcattgggattggaaggacaactgctaatttgcggaacatctgaatttgaaaaggattcttggaaaatttttgcaaaagtttctgcttttaaataatcatcaaaaataatttggttctcgtaactaagagagtggatttgttcaaaattttttgtaaatttatttatatatttgtagatagcattttttcctttattcagaaaatttttttcatttttagtaacaaagttatttatttgaatttttatatgtaatgaaatgctatcatacaaatgcatatatttatcacggtttattttttgtagtttataaagtctggctttttccttaattgacagtttaagactcaatgggtaattaggctttctggatttttgaccgacagtgattttaggcaagtataattctacatattctctaaaaagaaggtaaaaatgattaaacttatcttcaatggtaaatttttgtagtaatttgtagggtaaaattgaagataagtttaaatttagtagattaagtttagtagaattataattgcgtactgtaaatgtatttgccttactcttattctgaggaaatgacaatgaaaaattagtggaaagatgatcagaactaaaaatgtcctcaattaaaacattattaacaaaatcaggtttagaagagagaatcagatcaagccaagcactaccacgagtgggtccattagtcataaggaataagccatacttattaaaaaattcacaaaaaatatttcctttttccgacttagcataaggcgttccactggtccaagttatgtcctttgcatttaggttaaagtctcccattaatataaaatcttcttcaaaatagttaccaatgaggttcagaatcttttttgtgaaattagcagaagtgttcggtggtctgtaaaagtaatgctattcttaatttttttgctccatttatctgaataatttggatttcacaattgaatttagagcaggataagacagaaaaagaatttacgctcgtttttgtcaaaatcattactccaccaccattttttccgcttctgctagcttcatatattttgtaattgttagtaataaatggttggaaaggtattttttcttttgcccacgtttcagttacaaaaactaattcaaaatcttttagggctataatcgcagtaaattcgttaagcttattatttagggatcgcatattgataaatgttgagtataaaaaattttgttttttatttagtaaagttttcgaattttctatggggtgttcaattttctatatttagtttgtaaaagagctaaattaaggttattgcctcgtgagtggtcacccaaaacacattaagatttgttatgacaaatacatttaaaattgaggtcagatttaaaggcgggaatgtcgtcgcgggcaagcacatgccccgcatagacaatataatcacaggatgggtcattttcacgttgagatttacacagtgtaatgagtcgggcacggtcaatgagatcacttttagatagggaggggcgcaacaaaactttggaaaatttgttaacatgctaaaaaataatctatttatgctaattaataataaacatattttttaaccggattttgtatataattttcttttttctttattaattattgtgcaaattaatttttaaaaattaaaagtcaacacatgctaaaaaataatctatttatgctaattaataataaacatattttttaaccgattttgtatataattttcttttttctttattaattattgtgcaaattaatttttaaaaattaaaagtcaacatatgctaaaaaataatctatttatgctaattaataataaacatattttttaaccgattttgtatataattttcttttttctttattaattattgtgcaaattaatttttaaaattaaaagtcaacacatgctaaaaaataatctatttatgctaattaataataaacatattttttaaccaattttgtatataattttcttttttctttattaattattgtgctaattaatttttaaaaattaaaagtcaacacagctaaaaaataatctattaatgctaattaataataaacatattttttaaccgattttgtatataattttcttttttctttattaattattgtgcaaattaatttttaaaaattaaaagtcaacacatgctaaaaaataatctatttatgctaattaataataaacatattttttaaccgattttgtatataattttcttttttctttattaattattgtgcaaattaatttttaaaaattaaaagtcaacacatgctaaaaaataatctatttatgctaattaataataaacatattttttaaccgattttctatataattttcttttttctttattaattattgtgcaaattaatttttaaaattaaaagtcaacacatgctaaaaaataatctattaatgctaattatataataaacatattttttaaccgaattttgtatataattttcatgttggaagtactataatattgttctaaatcatttttgtaacttaacaaagtggcacagcggggggcatattgttaccaaaaataagggggggtggggggggggggaaggcgaacacaacaaaataatacaaaggcataatgccaaagatttccccaccttatagttagggctgggatttttatgttttaacatattttttttgcggcttagttatggcgagagaagcccaaaaatagcattttctccgaacaatttttgatttggagcgacttataaaaacataaaaacacatattttggcgttttcgcacataaaaacatatcgcacatatttcggagtttcgcacatattttgcacatattttggcatttttgaaaaaaatatctaagaaaaacacaaaaaattcaaaaatgcacccctaaaaatcaactttcttgccatttttataggctctttcaaaattttctttatttatttcgtgtaccgaaaatcgaattcttcattaattcgttactggatatcgaagtttcttgctggcacttactcaactgatggaaaaaaatctttaaaaacaatttatcaaaaaaggactaattttacccccaaacacctccaaatgttttttatttgcaattgtgcgggcgaaaatgataaagaatgagttttttggaatttttatgcaaaaataccattggtttttccaatttttagcacatattttcgcacatattttggcattttttagcacatattttattacatatttcaggatttttagcacataaaaatcccagccctagtaattacaatatacaatatataacgtatttgaaaatgcgccatcctttttcttaattctttcggatatgtataacaataccatatgtaaattttttcaaacctttcccaatgaaaaatatttttgttatataaattccggactttacatgtacaaatttattgcacacatcctgctgaaactgctcgcaaatgcggcggtggtgtgaaagggtcaaaagcgcatacaaaatttgcacaacccataaaaccgaaatgtgtttgaaatggggctgccgtcgccgccgccgcgacgtccaaatggaaatttaagtgcgttttgtgagtgcgcggcgcatcccccgctacttttggcgctccgccgcggtgtccggacacgcccaaggggcggtggcgggccgaaaaagtgggacgacggacggacgaacggacggaaagcgcagcaaattaggcggcaaagtttatagccgacttgcataaaaagcgacaatccatcaagccgatgaggggtttaattttttatcgaaatgaacaacgataatcacccaataaaagtgggacggatgccgaaaacgaatgggatggaagcgaatttaagggctgtctgatctgagcgcatcagtctatgtgggcactgtcctgtctgtcatcaaaatacaaaattcaaaactgcatcgaatttctaattcaaaaatgccgttaatttcggcatggattttttaccaacaatttatgtacaaattttatttttgaattttgactaaatttcttctttttgttattttcaaataatttgttaatccgatatcccatcattaaaagcacacttttgaaaatgcaccccaaactgttcctcgtcactttcgctgttctgcttgcgcttctgtcactggccaatgccattggcttccctccggaggtggag

SEQ ID NO: 1735 - DNA, 7170 bp, Heterodera glycines
gtgtggtgacagggcggtggcattgagcgcttaaatgccatccagcggggctcagagggacagaaatggaagcaattgcgacgaatgaaaactcaattaacttattaaattaaaaagaaaaatttatacgatattttaattactaaaatggttttaactggataatcaaacttaaaaagcagaaacagaaattaaacacaacttccaaagcttcgttatttgtatttcttgcatattaaatgataaaattaattaattaattttttttttttttggagcgagtattaatgacaaactgacacataaatccggtttgaccaactctcttgtgttcatccgctgctaattgctcatttttttcccgacaatgaagatgcgcaatgggttttttttgcagaatcccacccaaatcttcgcagatttttgctgcaacttttttttggcgaattgccgaaggcaatttgttccgctaattgcttttatccttcggaaatgcgtgcaaaaagcaaattagccaagatgagcagaaagtaaataaaggagatttgcgaattaatcactggatgattcctgcattcgtctcactgcccaattcgatgacagatgcgtcggcacttttgatggatggactggacgacttattcgtcttcgggtaatcgcctttttgcggaacagcgccgcgtcattattttactaatgagcagcgtaattgctattgtcatatcatattgttgggtttttgtctcgtaaaaggagcacgatcagcagaccgaaacaggaaatggtcggagggatctatagctcaaaattcgggggatttgatggatgacgtttgagcggatgaaacatgccttaatgttagtgaaacttcaatttgatgagaatcaattaaaaatgatgaaagtaataaagattggggcgtgaatcgtcggcccctaaaaaatgactgtccattgaatttgattgattatttgggttgaatgagcgctaaaaaacaaaaaattaaaaatgaagaagcaatgctcaacttcaaaactgcttataaagcacggctagagcaagcacaaattatcaaacttcgcttttccatcaaattcaaaagtcgccttcgtttgtccgccatgactcgcttcaccaattgtctgatcactttggcttttctgctgatcacgatcgtttccaccattgatggctttggctttccaagtggtggtagcggctgtgggtgcggctgcagcggtggaggcggcggcggaggagggcacggcggatgctgtggaggaagtggaggcggtggacacggtcgcaggaagcgcgatacggacgcggttcaaccacattacatggcggacgaaacgccatgcccacaggcggcgtggaaagccattcttgaggaggtcatacagtcgtaaatcattcgtagggcaactaatgccgccaatttacagtcgattagcccggaagatgccattgtctctgtgggtgccatccaaactgctttgtaccgccgctataccaacgagcagaagttcctggtcacctgctcggcagccgacgtggccaaaaacggcacagcactggcaaccaataaagtgcacttcagttcatccggcaatggttactgtaacatggtcaaagagcgcatttggtgccaggcggtcgcattgcactcatgaacggattcgttgcgaaagattttcaaaattaataattttaaaatgtgagcaatacgtttttgtctagttagtgatcttctctttgtatgtcgcagtgtattattatattatgtatattattattatgtatttagttaaaattacttttaaaatttgataattaatatacattcccttttgttaccattttgatgctaattaaatctttgaaaaatgcatgtatttattacacgaaagttagagatgcttacaaattgattaattgctttgataatgcgaagattgagcattaataaataattatttggtgttgagcctgatgagaaaaaccagatcaaaaaaagacgattgataggtgcgtcagcgatataaaagcaattatgctatcaattaactgtcactttttcacagagcaattactcaccagtgaatttcagctttatacattcccgcatccaaactaacagcaaatatgtctcaacttttaaactgtttaattgcgctgaccattctgtcagttttggtggccatgacagatgccattggcatgccaatgcaacaatgctgttgtcccatgcagcaacagtcatgctgtgggggtggaggaggcggaggtggcggttgctgtggccggaagaagcgtgaagcgacggcattggaagcagttcagccccacttcaaatcggacgaaacgccgtgcccacagacagagtggagacaagtcattgacgaggttggcaaactgatcacttatccaatcattggcatatccctaattgcttgctaattttgtagagcatccgcaccgacgatgccattggctcggtcagtgccattcaaactgcgctgtttcgtcgctatgccgaccagaagttcctggtcacctgctcggcagctgatgaggccaaaactggcaccaacaaagtgcacttcagctcatccggcgacggttactgtaacttggtcaaagaacgcatttggtgccaggcggtcgcgctgagcgcgtgaaaaggattaatccgatgaattttttcttagtcaaagttcaaaaaaaaatagattccattttgtaactgtgcaataacattttaattttcttatataaatttatttagtgtttaataatttttatttttctattgaactattatttggattcataactttgtgcctcacaaattagaaataggtaaatcatttttcaggcaaaaattgacacactttttttcaagagaaacaattttttggagtgcctaaagttttttatattagcttacaaaacccaaaaaattgatataatgcgttttttctgctataatttctgcctaatagagaaatctcaagctcttttgactagggttcggaccccgcccccgtcacccccgcacccgccgggggcgggacaggttttttggcctcacccccgtccccgcgactctgaccccgcccccgcgaccttcgcccccgcgagggcgaaaatacacccctaagaatggcatattcgtgggataaaatgcaaaaatttatacaattttgaattttttaaccatctttgacaatttttatgaaaataaagaaatttgaatttccaagttattttggtttagtggttagtgcttcacaactaacagtattttttattatgggttcaataccggttgacgttttctttttatctgattaatacatggtttctttatattcttatttttaagatatgttctgatttgggggcgtattttcacccaaaagagggaaatttctgaaaatttggctaatttctaacaaaattcataaaaaaaaattcctccggcggcgcctatcggcaccaccggcccccaaaaacttatttctttcatagaaaattgtctcaaaatctaaaaatttggtcattttttggtgaaatcttccaattttgcttgtgcaaacatgaaaaaaaaaatttaccggaaaaatcttaatttttggtgaatatctgttagaaataaatttaaaattcttttttgtgaaattttttggaattaatttaaatcaaacccccgcccccacccccgcgactctgacccccgccatcccccgcccccgcaaaaagccacccccgcccaagggggtccgaaccctagttgggccgaggtttcgcttttcgcatttcgcctttcgcattattcgcattttttggcgtttcgcatttcgcttttcgcatttcgctttttggcgcgaaaagcgacttttacacccctaagaattggataaaattcccataaaatttttcaaaattttacctataaattggctaattttcagtgaaaaactgtttataaatgatcaaaatttccaatttttttccccggcggcgcctatcggcaccgccgcgcccccaaaactcctattttttcttagaaaatggcccaaaatcgcaaaatttggtaatttgatgaaaaactgttctcaacggcgcgccaaaactcttatttctccttagaaaaattatataaaaatcacaaaatttgatcattttttagtgaaaatctgtcaacaaattttaatcaaattttcaaaaattttcccggcggcgcctgccccctcttaccaaaaagtttttttggaaaaagcgcgcctcaaaaaagcgttttattgatttttaaatttggaataaaattttaaaaaatgatttttgctttatgattttaactattaaaaagttgtagaaaaaatttcgcttttagcatttcgcttttcgcattttcgcatattttggcttttcgcatttcgctttttttttcatttcgcgcttttcgcatttcgctttttatttttcaatttggcccatccctggtccgaaccctagtttaaagatgttaaaatagagctcgcattttgaggcatatgcctttttttctgcgcacctgtttcgatatattaagcataaataacgcattttccacttggtttgaggcttctacgttgacttttattatgccttttttttgcctttttcgggattttcgtgccttaaatgcctttttggcattttgccgttttgatgccttttttggcgtttttcacaaaaattacatcaaaaatgcaataaatcgggaaaatacacccctaagaaaggacttgaaaatttttgagaaaatatacccctgtgaattgaaaaattttctcaaaaattgattgacaaaattttattattttttcttgataaaaaattttaggtctaaaaattttcgttattcgaaaaacattataaaataattaataatcatttaaataaccaaaattaagtcttttatttaagttttacagtgtttttctccctaaaaatccttaatacaaaaaatttaaatgccttttttcatgcctttttcgcaatttttggtgccttttttgcgagctctagttataaatgatcgaattgagaacgaaagaatctttcaaaatcaagtgcatcataaacctttaattacgaaataaataatatcgaaaaaataaattaaataaaataaacaaacaaaaaataaaatatattcaacaggcagataaccaccctttttgttcgacagaaaaaagcaaaaacaataaataagtttataaaaaaaagaaattcaaacgtaatgtaaatatgtattaaattaagaaaaatttcaaagtttttaaaattaaattaaaaaataggatttttagttcatcaatgactaacggtcggttcaacgcaataagaaacaaaatatattaaaaaattgaatcctttaaatttatatttaataaaaacaatttaaattaaaaatcagattaatataaatatttacaatttcaatattataaattgcttctataatatattgagttattaaataaaacgactttaaaataaactaaaccgaaaaaaggttagtatgaagaagttcgaaatctcctaagatgctaagattaaaaggaaaaatagaaaataaattaataaaaggtacagagaaaattacaatattaaaacattatataattttaaaataaaaaatgttaaatagatatattattaatatgaagaataatttaatttaatttaataaacaaaagatgaaaaagaaaaaccaaattcctaaaatattttattaaaaacaatagagtgacaactgaattagatcatcttcataaccctacaaaaatgttaagcaatagcgtaccatccatgtaagttctgcgaatgttactgcaacaagatgaattatccaaatgcaatttagagattaacattaaatttttggaaaattattataaaattcattgtgttttgaaatctaaaagtaaataaatagtaaatcaactaaaacattatttccatacattacaataaaaaattaatgatgtataatataagaataattttcggaactaaaaatatttattaaaattaatgattaaaaaatggtaaaattgcaataaaaatctaatttaaatatactaaagtatcatgccctaccaaaatctcgttttcatcagctgagaaaattagcaagagagagaaataatataaaacaattgataatttttctaaaaattaatgtaatatatgaataaaattaataaataaagaaaataatagaaaatctatgagatttctcgacaaatgcatatatttcaattcaaaaatatttatttttaaatttagatattgataaaaatgatattagaaataatattcttcaattcaaccaaaaataatcattaaataatattacaagcatatattgtaaagcttaattgactacaaagacaagcaatgtgtattacaaaaggaaacatgactgtatcatgttggtacatggcataaatttctttttactcgtcaattatttaaattaactaaaataaataatgatatattaaaatcagaaataattgccatatcaaaatagataaaaatatataaatgaagtttcatcagctatcattaaaagttcagcgaaatgtacatcttatgatgagcccataaaaataaaatcttatttattatgcaacctaatcataggccaataaaaagtttttcgattcaaagcatgaaggagaaaaataaaaaattaacaaaattaaaaaatattaaatcaatttattctgtattttttgaattttgccaccgacatacaaaacaaaaagacgagatttgctttaaattaaatttaattgaaaaaggataaattaagcatatgatatctctataattaattgtacattagatatttcttattttctgactctctgattttgttagtgcctctgatcactctgatcaactttaactccgccccttctcgtaatgtggcctatttcctagcgatcacctcaattcattcttataaccgggatcacatttttacccccgatcccctccccttccgtcctgtacggatcggggtccctttcccctttttctactcatacattagcatattgtatttcttggatccgccttcggaataaaggacattattccatg

SEQ ID NO: 1736 - DNA, 10872 bp, Heterodera glycines
  unsure (1)..(10872): unsure at all n locations
gcgacagaaatgccaattaaaatcacaaaaataagttaataaattgaaaaattgtactaaataatttttaatacctctaaaaattttttatgatgattgaacaaaaatcgaaagttcgaaattttcgacctttcgagttcaggttaggaattggttgaaataaatgacagattcatgatcagcgaccccgaaaacccgccttttatgacaacaaattttgctaaccaaatttgacttggaaaatttctcttgggcgatagaaaagaaaaaaacgtggtgagtcgaagtgacaaaagtgcgaatgagtggtgatcagaagaagcgggtcatttcagtacggaagagttattctaatgattaatatattattttaatctattaattagatttgttcaccatatttataatttcgatttattattttattttcccaaacaaattacatttttatgagaggaatacagtgccccaaaaaagtcttgactcaaacctgaaaaactgtcttatagttcatttaaaattttaaataattcttgcttgcaaaacttttagtgctgatcaaaaaaggctcttacaccaacttgatcagatcactccttcctagtgaccgggacacacccaaaataaactgaaaatcggggaaatttcgaaaaaatccctagggggttggtaaattttttctagagaaaatgggcaagcccactggaaagagcacaaaattctctactgatttgaattttgaataatggggctacgacttttacataaaaagatatacttggttgaataattgatcaccataaaaatgatcaatttttgatcagtgccaaaaccttttgtagaagcatcaaaattaaacaatcttggtatcttttgatagccttaagtgtcctctatttgcctgtaaaatttcaaaaaatttcgttgggttataaaaaagttgtggcttgtaaatttcaaaaattgtttttctaaacatttttggccataacttttttgaaattttacaggaaaataaaggacacttagcgctatctaatgataccaagaacgtaaatttggattcttctagaaaaagttatggcgcattaaatttgtcaaatttttatatggtcgtgttttttttgtggtcgtgtaaactgaaatagaaccaaatatatttattattattagctttttttcaattataaatttaaataattaattaatcattagaataactcttccgtactgaaatgacccgcctcttctgatcactcaatcattcgcacttttgtcacttcgacacagcaccgaaaaaaagatgtgtgacgagagtaactgcggatggcatctgcagataaaaaaatcgtcagctacagatagttagcgctagcattatgaatacggattttatctgcagattattttatctgcagctaccctatccgcaaatccttagctgcagataactaactatccttagcattatgaataccagcaagagagcctttcccatattatttatcccattttctcccacactccgcttccttttgctggcatcacaaaacgacaaagttaaagtggctttttaatgagccttctcattcagagaagcattcattttgtatttattaaagggaaatcgcaaaagtcaaattgaaaaggggggaaagataatatttgttggatggagaaattttttaaaattttctgtaatatttattttcttttttatttcaagcctcgcaatgctttaaattcgaccctggacaacttgaaacggtcccggattctccaatcccgcatggtgtactttttaaatcacaaattcatttttacttcctctcatcgatctctttacgctaattggcaaaaagtgaggcaatttggtcaattttcagtaatctgtgacaaaagtgaattatgggcaggtaatttgttcattttctaacaaagtccttcgtctcgtctttgtgctctcttttttttaaatttcccattaaacacgcaccatttagcatatttcattggagattgatcacttccactaatgtgcaaatttgtgtccagtttctcacaaaacaatttttaatgggcgaatgttacaacgcttttgcaaattaaggggggggaagatttgaatttaaatgaaactaattaaaatcaaaggtcgcataagtttccttttttaaatatgcaatttgatttaactcaattcaattcaattcgacaccaaatgcttcttctctcatcgctctcttcatttgtcacgggtcccttggggcgttccgccgaagtgccggtccccgcnggngccctttctgcccattctccagcaaaagctgtttgccccgtttctgctgttgctgctcccccatcgcttcgtctaatttctcgattcgttttgaaattaattcgattttttttctgcgcaacccttttaaagctttgcaacaaaaggccgtcgtaaatgaaccgagcaaagtgaagctgaaaattgcagggcaaagaaggcagccaaagcctggaaaaatgggacaaattttacgaaattggcaaattaaatttggaatgacaaacaaaaattacaccaataaaataattatattataaaattaaaactcacattggcatgcggttttgacgcaatcgttgttgctacatattcccagttctgtgaatggattttttaattgttaaaagtcaaaaaaataaaaacggtcaactaatttaaataaatgcctttacgccttgattagctacaaaagaaataaataagacatttctgtttgaaagagttgaggaaaagcttttttaaaatgaaaaaattgattttggctttatttttatttatttatatgatatatgtatactattttgttgttacgacaatttcggattatcaattgcagacttggcaattgttaccacaataatatttaaaaaattctaaagtataattattcatacaaaatctattgggaaaatatagcgttaattagggttagaagggatcggtatcccgacggcgtgggtcccggaatcccatcccgcttaaccctggtcttaattatccgctttccatcgtgcccagctgtaaatgtcattcaatcagtcttttgatgtcgtaccgctgaatatttttacaaaaatactgacgaggaattcaacttttgaagagtaatggaaatttccgaaattattgaaactttcaaatgggtttaatttttcaaaagttttttaaaaagaaaaaatgtcattaccatcaacatgactactttcgcagacattgcacaacgaacaagctaacattgaagtggcacaagcgtcgccaaagccaaaggtttccttttcatttgccttttcggcatttgcttttttctttttaaattcttaaaattcatttctcttttatgctttattttcctttttaccttctcttttagaaaaacatttgaaatattctttgtatttcttctgaacaacggcatttgtcaaaaagtgaaacagtgcgatttcttctaattttgttcgaatatttttcaacatttcgtgagaaacaaaatgaataattcttaaagatataaaatttattttttgttttgaaaaatttggtttttcaattttggtctttttgtggtttgtgagaagtatcataaaaaataataaatcatatccgagcgggttcgaacctcagtttacgccaattattgaacaaattaactggttttaaatgcattttaaaaattaaaactattgaatttgagtccgttcggttttaggcaaatctgaggtcagattcgttaccagcccctttttatcccatttgcaaaggaaattctaactttatttttcatcgggacaacaattcttaacaatttcccaaatgcaacagacgctactaggaaaaggaaaatgtcaagcttctgatccgggctttcctaattagtcgcttttggttgtcttttggttccccaaatgattaatagtttgactaattggttacgcttcgttgtccttttgttggtccaacacttcgtttagttctccccattctttgcttttctccctccgcattgcttcgtccagccgtttttcgtctttgtctttgtacgcctccaattcggtgactttctgtcgctgctccgtgtggacagtgaccaaataggcgtcgatttgtgcaaaaattgcctccacttcgctgccctgcacaatctcctcataattcagcttttgggccatcgaattgaatgccgaaattagtctttggaactgttctcgggagggcatttgcgtctgctgttgagattcattctcgagacttagtccggccaaatgcttgtgcaaattctgagcattcccacaaaatgcttcgcgtttctttgtctattggcacatcgttggacaaagccttttgaaaactttgcaaaaaaagaagcaaaaaaagaatatttttataaaagaacatttttattctctgctaaaattaataaaataaaaattttctttaattttgcaaaaatagtaataaatgaatgtgaaataataatatcaaatgaattattcctattcttttatttgggaatttacattgacttcatggatcaataatttaacgtaaaaatagcaaatgcataatgttttagtgttaatagcataattttgccaacatttttattattttcttctattctcaacaaagattattgcattataatgggcccacaaaattttggtcccagccaaaatattataaaactaaaattttgagtaaaatatataaaattggaattttgcgtatgtttattcgtgtaaattcattgagaaataacagactttatttcttctgctcattgtatttatctgctgctgtttgcctttttctttactttttgtactttaatacgctcactgcgcatccgacacgcatttcacgtgccattgcttttgcctttttgcgtgccattggatttgttttcgtctgctttcgttcatctccttcattctcgtcattttgtttttgttcaagataaatgccaaaagaaagcttaaaatcgtaaacaaaatgagacagacaatgtttgatgcttaattgagaagaaaaattcggaaatgtaatttttaaatgaaaactcaaaaatattttgaaaaagggagtgaattgccgaaatagaaaaagaattaagccgactttcccagttcctttctcagtttgcttccgcagttttctgttacctttcccatgccacctgctgctgcttgggagtgcaaatttcttagtgccaccaacacttttgggtccttttcgccgctcttttggtcaatgcaaatcatttggcaacgctggcaaatgccaaccgtctcaagggaaaaatttgcttatttttctttctttttttgcattaactgaaaactccacacttccaattgccaattgctcaatgttttcctcttcaaatggcttcgaatttggtccaaaatcgaccacaaaatttggtcggaatcgcgcgacgacactttcgtaagggagcgaaacgcgggaggcaacgaaaagagccgaagcgcgggaaatcagcagaaaattggccttattggagaaattggaaggagcaactgctgctgaagaggaaaattgccaaaatgaataattaagggcatttgtggcaccttcgtccgtcggacaacacatcaatttgctacccttcagcaaagggtccaattcggagagccaaagggaaaggcattccccgccaaaatccaccaattccatttgccttcgtctaattaaatttaatattttccttttaatgctaattaattttacctgcctatgcattcggcccctttcgacgtgtcattattttttgtcggattggccctttccttccctttttcgcctttttcaatttcaattttgatggccggcagtgcgtcgtgccgttccttcaccaccaattcggttccgttggcatcgatctgagggatggtcatttcgtaaaaatgccaattttgcttcaatcacttccggcacgaccaaacaaagtgccgaacatcgcttttgggtcattggatcaccaccgctggaaacgatcagccaatgcctgtcgaagagaagagtgccgagagagggacaaaggggccagctgaaagtgaagcagtaacagacgatggaaacagcgataatgagcgtaattacatcaagttaattgcaattctaccgtaattagttaccatacgcaaacacagtaacctcttctttgccatggctgcgcacgatttaatgggatagacaaacaaatgagtgagtgtgccaagtccaggtgggaaatggcggttcatttgaccgtcactttcagcgaacattccgttcatttcattaagtatatcagcagaggaggggaaaaagtgtccacaaaaggaacactccaacattcggaggaatgcggccaaatcctatagaaaattcttcaaaatttcttttaattatttttaaattgcattttggcattttacttcctcggaagaagttgggccaaaggaaatccgaaccgagcctaacggtttcccatcgaataaatccacgtcgtccccgcactcttttccactctgaagggaacaattaattactggccatgtttcaattgcttaattagctaattcgtccaacacctgataatgaatggccatcatttgatcttcacttattcccaaatgtaagctgcaggcgcccaaattgcctaaataaacccttaagtcagtcccttttatgtgtcaggaatgttgttttgtttctttgtttcgatgtaattaaatatttttttttgaaaatggtacaatggcatccggtgcgcaactgaatgccaaaaaggtcggccattttatcgacctgaaaacggaaaaaattttagctatagaaagcatgtaagcaatttaaatttgatggacctctacaaaaccaacaaaggaaccgtcgtcacgaagtaaattaaaattgacaattggaccttggacaaattttctagcgaaattatttgagctgtttcttaaagatgattgataatttataaaatacataaatggattaattaatatattttgttaaatggtaacatttttttatgctctgtccaccctttgccgtaagcaatggcaattggcgcgccgttcggatgttttatttggcttaaagcgtcgaaagctctcttagcaaaatgcattgaatgctccaaatcttcaaaatgttattcattaaggaatcaagcagaaagaatgccgaattgaataccaatttgattttgttcactttcctcaaaggcaattaaaagtgccgaaattgcatgaaaattgcaagttccgtcttcaaacctaaacattcatttttgttcaagagttttgggttaatgagtcaaaaagtagcctttcttcgatggtttcgcggaattcgactttggacgaagttggagaaacgaatttgacagttccgccgccaaaataaccgtttttttgaagacaatgggcggaagaacggcggacaatgagagcaccaatgccaaaaatgggaagaaattggcaaaattaacaaaatgccaaaagagcaaataaacaaacaaataaacggaactaccggagggataaccgaacattttgtagaaggaaatgacggcaaagtcgcaaaaggataggccaatgtcggacgaatgcggggccaaagcggcggagtccaaacagacgaaccaatgggagcccaaaactgagcaaaaagcgaattcattttccaacaattcttattttaggaaagttgcataattttgcataatttatttaattttaattatttaattcatttttaattttatattttttgtttaatgatttatttttttatttttgctaattcattagtgagtttttaattaataataatattcccaattattcaaaatgtttattaaacctctctttaatttatgtgccaattccatgtcatagacacgcccacagaaattgctcatcgctgtcattacgaataggcatttcttccgcccaattaactcccctttattgcctccacttattaaatgcttattggcctctgtttcggccaaaaattggcttaactcttcgtaagtgaccacaacaattcgttcgaagctttcagcacttcgcattccgacgacggaagtgtgggaatcgcgcagcatcagaagggtgctcaaaggagcaactgagaaaggggggggggcaatttgagagaaatgggaaaaccagaaaaagaaagtgccaaagcgactgactgaaaagccaattaattaaacggaaagaaataattaccatccgacagacaattcacatcacttgaaaattgtttttttgtcgtgtgacttatgcgagtttcgtctccaaagttttcggcgagcagtttcaatgcgtttgttgcatttgaagtgaaaatcacagcgaattcttccaaattattgccaccaaaatgggcgaggattcttttgtgatatgtacccaattaattaattgaatacttccgttaattgccctccctcactttgcccgtgcgttttgcactttgtcccgcgtcctccgtcccatcatatggccactgtgtgggtttgccaagaggcattcccgcgggtcgtacaacaaattggcgatccgttgtaaaaattgaggcgatgataaagcagctccggcaaagtccaaataatgcaacgaattttgggccaattcttttccactttttaccattgaaataaattggataatttgggaaattgatcggcggtgcgtgaccaattaacacactaattaattacacacaaaacagtcataaaattcccgcaataaacacaaagtgatacgagaaaaggaaccacccacaccagcaggggacgaccagtttttctgctgttcacttataaaaaagataaaataaatgaataaaatattaatttatgagtcaaattttttaatattgagtcaaattttatttattttaaatttaaaaacactaaatatttaatgatcagtagtccttccatatttaaataaatattacttttgctttttgagtaaagaagtgacaaatgccaagagattgaacgtattttgtaaattggttttatttcaaagtgtataaaaaatataattttaaaataaataatatttctttgtcataaaataacaattaatttcgaatgaataaaaatgccctctcatcaccatcctcctcctcccatccctccacccatgcccatgcccattcccattcccatgcccatgcccatgccgccgcccatgcccatgccaccgcccatgcctcctcctccaaatccgccgttgttccaaccgccccatctcgacgactcataaccgccccaacttccgccaccgtaaccgccataaccgtagccataatggcgcttatggcgattactaaagagaaaagtacaagaagtacatttaaattaggaaaaaacgaaaaataatcaaaatttaaagtcgggatttcgagtaatttgggactagccgagaatttccggcttttaaggctttggcccggtcagtttttactccgtctctctgaccttttgctcgcctttccctcaactgctaatggatttggcaaacttttgtctccgtttctgtcgtcagagccatcggcagccgtttttatagccaaaaatgaaatggcgagaagcaaaaaagtaaggaaaaatttcattttggataatcaaataaatcttaattttgttttgcttttttttaattgatttattataaattatataacaaataatattaataataaatgaaaatcaaatgttaaagttttttaattgtaaatttggaaaagggaagagaaattccttcgcctttgaacccatcgccaatttccatttatattcatctctttttttgaccttcgatcattttgcgtcttcgtccaattgttttacactttacctaaattatttgagtgtcttttgcgattgggcggtaatcgccgagaaatcatccaattacttaaaatagttcgccaaattcaaaattggttagggcatggggataaataaatatgcattaaatagagcaattagcgtaattataattgataagtaaaagaagttttgatatatgtaaaagaaaaaaatatataaaacattaatgcaattatttttggaatgttaaaatggaaaatatcaaaaaacaaaggacaaattgtgacatgacaaaagacaactttgcccctcagaatgaacacttcaaaatacaaatgcatcacttttatcaaatgctcaatttggaattaattaataataaaatgcaaattgaaagtgtttctgatttgggtaaagtgacataattttgttatcttttttccacaaactgctaatagaccaatcaatcattcatcattttgtcttttattccgatgtgaccggaaatttcgtcaataaaaaatcaattatgataaagtatctttttaaaacatgatacggtattaagatgttatgaatttaaatgtgagacatatggcagaaatcttttatagttttgactctaggacctatttttaaaaagtttgtgtattttcggtgctaggtcgaaccgaaaatagtctcagtgtgggcgaaccgaaaaatgtatgaaatttatggggaaacgaatgaagaacttaaatttacgaaaatattgagtgaaatttcagtagaaaattagtagatttttttttctaaaaatgaaaaatcctctaataagcttacttgccaatcatttcatggattcaagatttgaaattanaattttcgtttcgatgtaattntttttggtcggagatggaatgctnttatagtattcttttttagtttatttttt

SEQ ID NO: 1737 - DNA, 1864 bp, Heterodera glycines
  unsure (1)..(1864): unsure at all n locations
acgaaattgaaatgtataattaaatttaaataatttttattgacacttagactacctattttcggttcgtttcagcgtggtattttctactgacttattttcggagcactccttccagtcctgaagaaatgaaaaaagaaaaaaatcgggcaaattctttaaatttaataaaccggtacttccaaaattccgattttgtcgtgactcccggccccgttcttaggacaaaacaccgggaccgggattccctaaaaacgggagtggaccccgttccggtccaatttccaagttccggttctggtacttccaaaccaatttgccgtgtctcccggtcccgttttttggccaccgggacctacattttcaatccctgcagtgtttttaacctttttcttcgttttcgcaattcccgttcccagaagtttttttaccgggctccaatttatggcacatcattttatattttgtttttcttaactatagtttattttgctatcaccaccaccttattttcttatctgtggttattttctttttttttcgtgcacacaaaccacacacaaaattgacattttaagtactccaaaagccagaaccattaattgaaaagggaaaatatattgtaattaattaatgggatgggtgtgttgttaattccgttgtcccttttattttcccttaatggatttgcatttataatcaatttttagctttctaatgagctcgaacagcagtgaccaccaaaatgaggaggaggaagcgaaagggacaaagtcgaaaagcggcgactcggtcagtcagaaatcatttgaaaaaagcaaagtgccaaatattggccgtaattctccccatttgtcacagtttccgccgcgccattcccacacttttatcggttcgaccttcgccatttggtcactgattttcctgctgttcgccacttttgcctctctgcagtactatttgcccaaggccgcttcctcttgcctttgcccggccgctgaatttgggcgactgaccgcccaaagagcgtacaacgacagcagttttgggaatcccaaggttagttggatgggggaaagggtctggaagcaggacattcaagcgcagaacccaattttctttttttttttgtcagattttgcccgacggtcgaatcgaatacgaattggcggtggtttccgatttggaccatgacagcaaaatggaggacagaaaggagacgtggcgtagttttttccgcaggggtcgcctcctcttccgccccgacattccttccgtgcaagtccaatgggccaaggacaagcaggacaacacactgtactcgcagctttcgtccggaggacgcgcgatggagtaaaaaaaaaataatggggagaggcaggatttgtatgagttgtgatagggcattaccagaggaaatggtgctggtattcttaatgggaaattggctggtcaaatttttgaatttacactatttgccaaaaattgcaattttccgatggcatttaaaggcatcacagaacaccaccgctatttaagaattttattattatttttaattatttaaacactattttctgacactttaacacaaatgttcttttttaagactgtccgaactctgcgtttacgacggacatttgctcaccgtggacgaccggacgggtattgtgtacaggtttttgatttaatttttaaattgttcattaaatatgtaattttttttcaaagattcatactgctgggtccgttttttgcttaccatttttaatggtcatttgtcagaactccagtttttaaaattttttgcaattttgtccggtccgaaagtttgggttttatttttaaaggngtgttaaagtca

SEQ ID NO: 1738 - DNA, 1279 bp, Heterodera glycines
tgatccacggtcagtcagcctcatctgattctgaataaccaaaaaaaagtgaaaattttagagtccggccaatggtccgacattcacaagaaatggtttttcttgccgaggttttccctccaattcccacaataaatactaaacatttttcagaagagcgtcaaacgacacttattccgaaacggaagatgagcacatgggcaccaatttattgctgatagccgacgaggactttgaacatattcaggtggacaaggaagttataacaaaaaatagagggatttaaaatatgtaaaacgttaatatttgaatcattgaaattggtttctgcaaaggtccgtcacattgggccccccggcgatggcttccgcggtttctccgccttccaatttttgccaaacaccgaagatgacatcatcgtcgcgataaagtcggaagagcgaggcggcaagccaatcgcctcctatttgttcgtcttccgtctcagtgatggccatgtgctgttggacgaccaaaagtttgacgggccctacaaattcgaaggggtcgtcgtgtactgacagagcaaattgggcaatattgttgtggagtcagagtttgttatttgtgtatttaaaaaagagcagacaaaacgccgtcggcggaggagaaaaagctgacaataaatattccatgaaattttttaattaaaggcatttggaaccactcgaaaacgcaactatttttttttgcttttttaattattttgcccacctcatttggccgtgttttgtttgttgtcttttatttcatattgtatttatatttcttctgtttgggttttgttccatttgcttgaaatgccggtccttttttctgtttggtcagacgagaatttcttagagtgaattgaatgttcgttcgttattgttataaatgtgcgatcaattgtttttcgctggttacgggatgccctttctcatcagataattggcacttaatcagattgttttttatgttttattatcattacttatttaaacacgcctctgctaaatgtcgagtttaattattattattattatgatttcctaaattattacctaatacttttattattgtttgtctaaaaatgttctaactatttattcaaaaattgttttgcatttgcacttctgtaattagagacatttaaatttcgaaaccattttgttttgtttttccaaatttcacttctcttactccataaaattcctcattgtgtgtattctgttgcacctgactctgtttctcttcttct

SEQ ID NO: 1739 - DNA, 2797 bp, Heterodera glycines
tcactgactgcgtttgctgaactgaaagtgttgtgctaaaatcgcgctgctgagtgatcgccagtgcaatgcgtaagcatttaatccattaattctaaaaatgcctttcccgtttttatgattcctcccgaactccgtggctccatttacggcacgggcggccgtctcgacactgacgaacgattgcaaatattttgcgcaaaaaatactttgaagagaaattcgaatcagaaaatgggcgcattttgactgggcttgtctccactcacagcattgagctggtcaactcgtaagtattgtcacacaaatggcatttcaagttccttaattagttgttttcgggttacatcgagaattgtctcgggattaagcttttgtcttgcgttatcacacccctgcgatactaatgaaattgaaatttaaggctgatcaacgattttctgaaggatcgaaaggcttttgaggaagatttttacgggtttttgctcaagttggttaagtgagttttaatttctaaaataaatttttcatgcattgttttcttaatttttaagatctccgattctaaaccaaattgttgcgtttatgcgcaacaatttcaaagtgttggcaaaaaggtgctaatattttgaaatttaagcaacttttcctgttcagaattcggcatccctcaattatgaaggtgggacaaaaaaaatatgcttttaatatattaatttgtaaaattattcaatcaaacctggcattattaattaattctttccatcggcaaatattcgaattgtcatattttttttttttttggttgttaaggttgtgctaacctacgtcacaaaatggtaattaattcttttttgagaattgaattggtttttccattcttctcctttttcccgttacaggatgcaaagcgaaaaggaactgcgcgaggtgtaactttaaaattaaatttttgaaattgctggatttaattttcatttgtaatgaaggaaaagggaaaaaagaaaatctaaatatccaaaagccgaagcattttttaatggcttatgctttcaataataaaccaaatattcaaaaaaaaagtaaactttcagttggaaatgttcgagcgagaaaatgcggcggaattgcgagacttgcgactgtcggcctatttgaaagagcttcggatggaaattggggctaacattgactttgtcgggcggggggcagtccaaatttttgactatttggggacgcggcacgaaattaatgggcgaaaagcagcgaacggagcgagcgaaaacgaatgccaacggagggaatagggggaaaagcatcggagaaagggcaattaagcattgaatcgtttgaaagttcaatgcccaaattacatattttgtttgatagacatattcacttgtatgtgtacatataatatactccttcctattcaattatttggcgcaattaatatcaaaaattaaaattagagttttaaatttatttgaaataaaaaaaaataattaccttcaattacattcaaaaggtaaaacttaaaaataccagcaaaatacaaaaaaataataaataaaatcaattaaatggtcattttgatcgggcaattgatttattttgcaggacaaatatcccaaaggagattatgtgcttcttcgactttcgcttcgccgttgactttgcgtgccaccaatgttcatttgaccattcgttcccttctcattaagtcgtcctttctttttatttatttatttgtcacaaagaaaaataatccacgaaagggaaaaatccacttacttcggggacatatgaaaacataaaatagtgcacaagcaaatggataataaaataataaaaaatcatcgtcaaaagaaacaaataaataaagtcaatacaatttgtaaaaacgatcaaatcacaatcataagcattactcaagaatttttaattttatttttgaataagttaaaagagtttgttttaatgagctctttatcgagttgattccacaatttggttgccctcccagcaaagggaatgaattttttgcctaatttatattttgtattaaatcggtagaaaggaatattgaatcgtgttgatggtctaaaaatggagaaaagtttcagatctgttcggccataaacaattttatgtgccatgaacagatcgaataagtttcgcctattctcaagtgttggcagctgaaggtactctaatcgattttggtatggaattggtggaaggttgcatttaaaaaaaactcttttagtgaaatatttttgacacttctcaatttttttaatatttttttgaagagacggattccaaacttccggagcgtattccaataaaggtctaatataagttttatataatgtaatccaaattttagaagatttagatttaattattctaaacaaggaacgcatacgtaaatacgcattccttgttatttggttaatatgatcggaaaattgtaatttgttatcaatgtttactcctaagtccctaattgtatccacagcatttattgtatttccatcaaatttatatgtttcttttgggttttttgaacccaaatataatacaaaagttttttgaattgaaacttttatttgccatttatttgcccattcgaataaattatgcaatgctttatgcataatttctgtatctgctcttgctttatagcatatatacaatttaacatcatcagcatataatttaatattcactcctgatggtataacatcaggaaggtcatttatataaattaagaataaaagagggcctagga

SEQ ID NO: 1740 - DNA, 7663 bp, Heterodera glycines
aaatatcaagattttaaaatttaattcatttgggctttctggtaagaataagtaattctctgtcattgcattattccttggtctgaaaaatttttcggaaataagaattacggccccaaaaaatgtcggaaaaatcggaattcagtactatccctggcgagtaattttaaaatatgataaatcgctggaaaaataaaattgaatttcattcaactaacacccaacaatttttttaggctcactaatggaaaataggaaattttcaaaatattcgaaaaattgaacataaatctaatatttgcacattgaataatctgagtaccggtatatgaaatgattaaatgaacaatttgctggcgatggttcacttttaaatattagtgggagaaggcaaaaaatcacttcggcaaaacaatgacctaaaaaatgaaagaataatttttcataattttatttgtgtgcaaaatctatccgataaggttttctcacagagagagagagagagagaaaatttaaattgattgaatttatgacaaaatttttgaaagtttttatatgaattttttgcctaatttatattttgtgttaaatcggtaaaaggggatgttaaagcgtgttgatgggttaaaaattgaaaatagtttcagatctgttcggccataaacaattttatgcgccatgaacagatcaaatagctttcgcctattctcaagtgttggcagttgcaggtactctaatcgtttttggtatggaattggtggaaggttgcatttaaaaatacccttttggtgaaatatttttgacacttttcaatttttttaatatttttttgaagagacggattccaaacttccggagcgtattccaataaaggtctaatataagttttatataatgtaatccaaattttagaagatttagatttaattattctaaacaaggaacgcatacgtaaatacacattccttgttatttgatttacatgatcggaaaattgtagtttgttatcaatgtttactcctaagtccctaattgtatccacagcatttattgtattcccatcaaatttataagtttcttttgggttttttgaacccaaatataatacaaaagttttttgaattgaaacttttatttgccatttatttgcccattcgaataaattatgcaatgttttatgcataatttctgtatcagctcttgctttatagcatatatatattttaacatcatcagcatataatttaatattcgctcctgatggtataacatcaggaaggtcatttatataaattaagaataaaagagggcctaggacagagccctgggggacgccagagccaacttttttaacagaggatagagtatcccctattttaacacgaaaagttctgttacttaaaaatgattttatccaatttaataatttaccctgtataccaatttttttcaatttatcaaaagcaaattatgaggtaccgaatcaaatgctttttgaaagtcaatatataaatacaatcaacattttttccgttaataattgcttcgtaccaatcttcgacaactgttattaattgatttgtcgttgacctatttcttacaaaaccaaattgggattctgaaattttattgttttttaataaaaaattgtaaatatttttgctgagaattctttccataactctgcacagagagcaggttaaagaaataggcctgtaattttcaggattaaatttatccccctttttaaaaagaggaaagacaattgattctttccagatgtctggaagtgaaccactgtctaaggataatctaaacaagtcagtaataacagttgctaaagaagaatggcaattttttaaaattttataggaaatgttatccggagaagttccgtttttgtttggcaattttcttaatagtgtttgagtctcaatgatgttaaaatcaatatctgatataaagcattgattactaccttgggcattgctcaagtttaggtttgggtcagcccaagaaatactaaatgaatttgcaaataagttggcaaataattcacatttttctgcactatcataatagcatttgttttcgaagactaaattcggtatttcaaagggattatctttgtatttatttaaatatttaaaaatagattgttttccctttgaaatagccgttttttcaatttgtgaatggaatttatttgtttgtatttttatgtgtaaactaatgctatcataaagtgttttttttgttgggtcaattttactttgtttatataattttgctttttctttaatggatgccaataaatgcctaggatatttatggaccaaatcatttttggtcaatcgttttattggaatacactcatctaaagtttctaacaatgcattgttaaaggagacatatttttcatttacgctaaaaagtttaaatgataaagctctaagccttgaggcaataactacattgaaaagtgacacatttgatggagtaaatctcctaatatttatgttttttgatttaggaattaattccggaacagttaatataaaaaattgggctaaatgatctgacgaaaaaatgcctccttcgatagaacattgtgttacaattttatcatttgctggtaaaaccaagtctagccaagaatttccccttgagggtccattagtggcattaacataagaaaacctgttaaagaagtcacaaaatatttcaccaaaattactcaaggaaaatggtttgccttccttccatactaggtcttttttagaaaaatttaagtcgcctaaaattatagaatttacacagaaaaaggtttgtaaaaaattaaaaagattttttgtttgcttaaaagtagtccttggcggacgatatattaatataagcctaattgatttagtattttgtaattgtagaaccaaaatttcactattaaatttagtatcagaaaatttaacaaaaaatttaatttcttttctaagaagaataccacagccaccgccacgtaagagatttttagattttcttgaagcaaagatataattaaaattttctttaatccaaggacaaaaaggtatgtcctggttttccattgtccaagtttcagttaatgttaagatttgtatttttttggcttctaaaattagtgaaatctcttccattttgttcattattgacctaatattaattaagcagcaatttaaattttgaaaattttttgagaaatgcttaggtgatttggtctcgagtcaatttttacgagaatcggtagctatcatttgacgccgaaaaatgtgaatttcctcccgtaagataacgcttcctgcatagacaatccaatcctgaccgtctctctgacgcttttcgacacactgtgcatgaagacgacgccgttcatccagctgtgctttggtcaatgactcgcggacgcgaacgttttgaagcgatgggtctttgccgcgaattgtgttcgatttgttccgccattccacaagagcctgtctttgaaaagcacgggaaggcaagagcactttgagtgggcgggcacttttttgtgctgggttgtaaggacggcccattcggtacgatatggtgccgcattcgatccccagcgaatcgaatagacaattgattttggaccggtccatctccccccgcttagatggtgaaatgtcattatgttcaggcaggcctattatcacgacacttctttgtcgttctaactcctctgctgaaatgggcacgtctttttgagttgggtcagcagagcagagatgaacaatcgatgagttcaaaaggtcaaattgagtcgacaaggtggagattaagtgggagagaattggcttttggtcaagggtgaaggaatcttggagtttgtttagggcatcaatggtgtttttggcaaatttcatttgtgagtcaataagttggtgaatgtcgctttgttttgacattggcgaatattcactttgagagcgaggtcgtttagtcattgaatatttttgggagaatgaatatttttgggagaatgaatatttttgggagaatgaatagcacttaatcaaagtggagcccaacgaaattcaatttatccatggaattcagttcaatttgagggtttctcggtggtgccccttggcagagacaaaatgccaaatttatgtggacaatgccaaagggcggacaattcaaaatggcgaattattggcagggaaacatcaacggacaaacaaatttttgatgagtgtttcgacgttgttttgtgtgcaccggccattattggtgccggcgagtgccggaatttgcccacaaattgactatccgatgggcacattcccacgaattccgaagagcggaatattttgccggcaaacgcgtggccatcgtaggggcgaatctaaccggaattgaaattgcacttcaattagtcgaacgcgctcaagaggtgtccgttttttgaatgaatttaaaataaccgtctgattttaaatttataatcaatgcaagcgacgcgattgagaagagtgcgcttccgaatggcacttccgattcgctgatcccaacatccaactgaacggaagccgcgcggtggacgccctcgggggcttttgcttttgtccgatgggcgtgcggttggcccgctggactttgtgcttttcggcaccggctaccgcttcaacttgccgttctttgctcaactttttgcaccattttcttcaaatttgccgcttggcttgagaataagcccacttttacaaacaaacaaatagatttaaaaatgcttccttccctttcttttccgactcattttgcgctcgctttgctcaccgaccgcgtgccaaaggcaaacgaacgctttcactttggaaatggaaaagagatgggaaacggagcgaattaagtggaaaatggcacacaagtgaatttggtccactgcttcttcagacgaatgaatggccaaaacattgccccaaaatatttccatcgcttcggctccgatctgtgggaatttttcgattggcttgccgatttgagtggcgtcaaacgggtgccgaaagtgatggagaaaatgaacaaattcaacattgaacagagacgcaaaaacccattgacctatcgaaacattcgctacctaattgttgatgaaacatttttaaaattgagtgacaaaattaaataattaatgaaaattctttcaaataattattatgcaaaacgattgtttaattgtctccattatggcacatttgcgactaattaattatgctaattggacatcttcaacatttgctttttcttctccacttcctcctcaaaaattgataaagctttgccataagcagcggcaaattcagtgccaagggacttaaaaacattttcatccttctaaattaaaatataaaatgaattttaattcgcttttgtcccaccttttgctgtgccaaaaaagcgctgcaaaaccgaggaaagtgtcgcgttgagttcagcagttcgccgtactcggccaggtccaactccaagtcgtccgtgtagtagcgactgactgtgccgcgcgtgtcgtccgcctcgagcccagcggcacacttttggtcgatcagttgcatcttcaaatatggaaatgattgagatgacaacatttttatttatttttttatctccgcaaaaaaataaaaatttttttgtttcatctaaatcccatcttggcttgctgatcaatcgggctgggagtttcagttttccaaaaattttctgcagcttttttttgatgagaaacccatggaaaacaattttattttcatctaaagccaaaaaaatcattattttggactttttgccaactaaaagaattacgtcacttttttggacttttgcaaatttttttgtcaattttgctttttgaaaaaattcttcaataaaaaggcaccgcttttttgacgaaaaaataataagaaaagtttgacttttcagtgtaaaataaaagtttattaagtttcattcaaaagattaaacttttttttaaaactcgaatgagtgaaaaatagtttttaccgtttaatttatttcatagaaaattattattttaaattttaattatgtaattagtgatgcccccgttccgcttctcctcgcccttaccctggcatgcaaagtgcacgcttggaagcggcaccgcaagtcctgctggtggtaattggccgcctccgttgcgctgaagccgcgcgtctccgccaactcgcggtcaatgtcaatgcttcgcttggccgcctttgagcaggcggcgtggaaatgaaagtgcgaatttgtggcgctgaagtgaaggaacaaagagaaatttagcaaattatttaattcgattcttttttcattattattttcaaagcgatgcaattcattcataaaaaatattaattgaaagcccaattaatttgatcggtttgtgtcttcgattcaaattatcatttgcttttaggcttttcccgggtatttttgcttctctgtccgatttattccaattaaaaatgccctctttattttatactttaggcaattcattgcgcgctcaaagtcctcgcggtgtttaagacaaatgtgcgattggggcgaatgggccatttgctggacgaaacattcgcgctgaacgcagcagcgacggttgtggacaagacgacagaatcgggacaaggcactcggcgaggaggacagcagcgggtcgatgggaaaatcgaagaattgggtaaggtaggagaggccgaactcctcctgaaagtgggggaacaacaaaatgccatgaagagggacattggcactagccaagcttaaattgcgaaaaaaaatgctaacggaagattattacggccgaaaattaaaattacgaaaagaatgccaatgggaaacgtacggattaaaatgctaaaaaagaatgccaaggggacagcatacggattaaaatgccaaaaagaatgccaagaggacatagtaaaaaataatgccaaggggaaaatgccaaaaaaataagaatatcaaggggacactgtacgtccttcgtttaaaacttcggcatgacatccattcagaatcattggcattattaatgaatgagtcacctcaaaatcgcgcgcgaattgtgcgccacaaagagcctcacaatggtactccacgtcataatacaaataattcggcgaatcattgcgggcaaaatttgtggcggaaaccgtcgaccttcgcctcctcagaacgactttctgctggggacgcgactgagctgaacaatttgttaattgcatgcaattattggacggatggataatatgcatttacttcccgaaataataaaaaaaggcatttcatcaaaacagaaattaatttgaagagatacaaatgtaatggcaaaagatgaaaaagcgattaccaaaaatgcaaaaccaaacgaccgaagcaattaacaccgaagtccatctcattaactgtgaaaacattcaaaatagctaaaagcttaaatggtaattaatgtttttcgccttaagatcagtttttactggcgacataaatttaaaattcgaaaaatgcccgcaagtgaaaagaactttttgcccccccaaggaatcgtcggaattaaaaaaagattttatattttaaaaaatggggggaaaaa

SEQ ID NO: 1741 - DNA, 1853 bp, Heterodera glycines
gtgtgggaaaaattccacacacaaacgcatggagagaagtgttgatacaatctgataattattgagagagaaacggacaaatcccgtggacatttgaagaataaagatcaattaaaataactttaattttaaataatttattttttgtaaatttttcaagatttcaatatcttactctaatcttctccgttttattattttgcttaaaattttatttagttaacagtttgttttttatgcaatgcttaattcatacacacaaatttattttatttgagaaggccaaataaatgtaaatgcaaattaattctttataaaatacacgtatttgtattcatatttttcctgtttaatttaacgtttataaattgatttatatgctataataccaaatgattttcatttttacattttttatgaataaattttagtttcattaatatagttttaaattttttataatataatttttcgaatgattcaacaaataaattatggcaaaggacagcgaattttattaattctttttttatacttttatttaaaaataattttcgctgaatttagaggtataaataaattgttccattcataaattttgtttatttttagagaatggtaatgcttttgcctcaccattaaaaagaatcgccacaccgcgccaattaaacggttctgtgccaagttaaatttagcttctttttttttttactctaaagttcattaattcattttgaagttggcgaattaagccgaaaattgtcatctcaaaaaaatgaattgccaaaaagtggtgaaagattgagcaaaaaatggtgccaatgcggacgatcagaaatagagaaaatgaaaccgatggcactgatcaattttgaagacaaaaagccaattgaacttttatatcaaaaaaagagacttggcaaagggtcgtactcagaagttggtaaaatgttgaaagagaaaagagaaatttaataaatttaatgaaaaattaaagttttagcttttaaatgatggcacttttaaggttttgcatgcgaacataagaaaaattggaaataaaatttacaataaatgcgtggcactgaaaatgacaaaaaaagatttgacagtcagtgactggcaaaagcatgtcaaggagtggaaaattcagagatcattcgacactttcaacgaaacgaaacgggcacacattgtcaaattaattgcatagtaatagggggtatttaagactaaatgagcataattatgagctaactttgttaatatttaccaaagtaaatttgataatgtataatatgtattgctagttaaaagctaaataattatatttgctcctccaaaaatgccgtactgacgttgcattcgtttgaattggtcaattaatattttccagcggatttcacaaaataaacggaagagattatgtgttctcatttctcgagttgggcaatggcgatctgatcaaaaggatgaagcaaaagcgaatcgaatggctgcggaacaaagttcaagcgggtgaccgtcgtttggtgccgaccattcggcaactcgtcgagacggtgcgcgacttgcaccaaagtaagtggacgaaaggccacaattattgaaataaattgaaaatttgcaattaatttaaatttagaagtgatgcacttggacatgaaaccacaaaatctggtatttgtgcacgagcgacaaaaatcggtgatgaaagccatcgattttggctccgcccaattcatcgacgaagacgacgaattgggcaaagggacggaaacggcaaacgcatgcaaatggatggtgatcaacgacccggtgaccacaaaagtgtaccaagcaagtgtccaatc

SEQ ID NO: 1742 - DNA, 2342 bp, Heterodera glycines
gggggtggcaaagtgccaatcgaaagcttattgatagtttagagccccgaacatcacaaccaatgcaattggaagtatgagccggagaaagaacgagcaatgcaattgagtgcaaaatcggacatttggagcattggcatcatcatttatgaaatggccttttttggattggaattcggaaatatgcgacaaaacatccaaaaaaattattcatttttagaggtgggcttagttgaaatgataaaatattctattttaaaaatttaactttagaagaatcgacaaaatttcatccgatggctttggattttttacacacaaaacgatgacaaaatgttgaggaaagaaatggagcattgggacgacttctacacacttttcttcacgattttgtgcattcgactgcaatttccacgcattttccatctgatcactgtcactttgaaaacaaaaattatattttaaattttatttaattattttatttatatatttttaccgattattcaatttaattatccgtttctccacaggcaattttggtctatgagcccgagaagaggccgaccgcgaatggcattttggcctttttggacggaaagtgtcatttcgagttaatgcgcagtaaaacttcgcggcttttcccttggcttggcatggacaaattcaaagcccatcttgaggaaaagcgtaaattgttcagagaagaactcgcaaaagcagaagataaaagcaaagaatcagttgaaagaaaaattgacgagacggagagacttttgtggatggcatcgctaaaggaatggaagccgagcgaaaggctttggaaagtgccgtgtgacacgggaaaagccaaaacgaagccgaacagaatgtggacgacgaggataaaggcggagaagggcgaagccaaaaaagccgagggggagaaaaacggtgggaaaaaaataataaaattgacataatccaattgaaacggataattatctcaatttagccaagtcgaacaaaatgttggccaatcttatgaagagcattggcctgactttgtcgccgagcattcaaaacgcaaatgattcaattgaaatgaaatttgaggggacttttgaaaatttgcaagattcattctataaccggagttcaaaggtatgtacaatacttataagataatacaatccaaattattacaattataagcaaatttcttcaattttattgctttggcacttacgaagggggcggggcgacattttcccaaattgtaagtgccaaattcgatttctaaccatgcccaccgtatgcagccaccgttcgtggaactttaaatccgaaaaagacctaaccatgaaaaagtttcatgaatatctactgacaaataagttataaaattttatattaattaaaataaatatttaatctttgttcattttaaaactttaattgcatttttcgccattttgttcaaaaaagcttaaatttatcatcgtaaaaggtgatgccttatgagatgggcatggcaagggatttatgcgaggcaaagctcgaagaaaccgattaagcagaaaaaaattatttaataaattaatgagaaatccaactttcacaattttgccaaaattttcagcagccctttgatcagagtaaccaaattgttagccttttgttagaaataggctacagaaatttattagaacatttgatttccataattgaacgttacgaaagcgatgccgaaatgctgaaaaaggttgtggtcatagtcagcggaaggttggactcggaatggaagaaaataaatgaattggcagccaaatacgaagaggaggaggcggaggaggaagaggaagaagaagaggaggaagaagaagaggaggagaaagaggaagcggaaagtgagaccgaagaagagaaagaagagagcaaaaatgaatcgaatgaggagatggaagaacaagaagcaaagaaagaaggggaggaagtgaaaaaggagcctgaggaagagaaagaagagggccaatttgtgttcaatgagaaggaggaggaggaggaagaggaagaagagaagaaagtggaaaatgagactgggaaaaaggtgagccaaaaggagggtaaagtggaggaggaagaggaggaagaagaagaagaggatgaggaggaggaagaagaagcagaagaggaggaagaagaggaggaggaggaagaagaagaggaggaggaggaagcggttgagaaatgctgttggtacacgaaaaccatcgaacagataaaagcagtgtatttgtatgagctgatttacaaacattttatcgctgaagtggaaaacaatgctacaaataattcagtaa

SEQ ID NO: 1743 - DNA, 1359 bp, Heterodera glycines
attcccgtccattaatttctggtcgtttctaacacctttctctctctctctctttctctccgttttttcctttcgtccatttttctattatttattttaattttacgcccttttctttgcgctgctgttatctttttttattggctggtaattgtgtgacaatttctttttcaaaaattgtctcggatgatggacgcgcaatttgcgaggattttttaacatgaaatgtttttttattaatttcattttttggtgataaaaatttttctccacccttcccaagagaaaaaaactaatgtttttttggattctggttgaggcctgcctgccttccttggtctattcatactctttctgtcttggtgtagaaaatccctaatttttcagtgcattttgtcataaaaatcctcgttttcttcaattatctttgtctctgttgatatatacataaaacgatgtatgaatgactttctaacagcgttttatacattcatgcaaaaagcgctttgttatttttgagcaattggcataaatttttgttgaaatttcaatttttttcaaatgcatttttacccacacaaaaaaaatgttactaaaaaacgacggcacatttttttaaatgcaattttgaaattcacaatttaaatttggttgtaacgtccccttcatcgggatgcgcattttggtcaccggttatggcccgtttggtgcctttacagtcaacccgagtgccattgttgtggaccaattggcacaactgtgccgtgacggcacattgggcacggatgatgccgacgcaattggcattgagctggtgaccagggtggtcgaggtggactacgccggtgcactgggctgcgccaactgggcccgcgatgagctgaacgtggatgtgagtaattaggaagtggcaaattatgcaaacggtggtcattaaggataattaagggggaagtttccaaattcttgcggtatttttatgcgggatacgccagattttggttgattttttgagcggttaaaaaactttgagcgcgaaccttttaaatcccaaaaaattccgtcccaatccaaatttttcgttgccaagaaatcttttattttgttttgttttttgcagtttgccatccatatcggtgtgtacccaggaagtgggttcgtgtttttggaacggcgcgcatttcgggacggatacgtcagcaaggatgtgaaaggttcgctgtttttttcggtttttcgcattgaaaaattttttttattttctagtcataaacaaacttttgagaatttagtggcctaaaactcgacagtttacctaattaagttctcaaaattgtgacctgccaggccatccaaagc

SEQ ID NO: 1744 - DNA, 5465 bp, Heterodera glycines
atattaataaaaaaaataatcaaaatttatcttctttcaccatgaactaatgcaaatttacattgcttaattaataatttcaaaaatatatttatcatgaattatttaatttttaaattgtttgatttaattgtttttgtttacgttttaatatttttaagtcatttttattaaaatcattctgcaattcttttatatttcaaaaatcacttgttttttcccgaaccgacgatttaagaatttatttttttaaaatatttttttgtttttaaacatttctaacctaaaatattttaaatatattaatcatgaattatttatttttttttaaatttgtttacttcaattgtatttgttaatttcaatcttttaaataaattttttttattaataaaagcacttttaccattcatttatatttctaaagtcacttgtgtttttaatttttacgaatcggaagaaaatttaaaaatttaattttttctaaatactttatttttaaaaatgtaataaccggaaatattttcaaataaatttcattccataaattattttgcctcaggggtttttcaattttcccccataaattcatcattatcatcatcatcagcagtgcggttgggcctcgccatgtgttcagttagtcaatttgtgatgcttttctgatcaatgcctcaaatcgctgatgatttccctcccacccacacaaaatatcggcttgcttaaaatagttgtggtgcttttgcggggagtaaaaaatgatggatgatgagctgagggatgagatattatattgatgacgatgacatcggatatggccaaatgtgacgaaatgcggaatttgaaataaaaaagcactttttactaggccctttgcttcaataaatttattataaacaataacaatttaatttttctttaatttttgaaactttcaggacagggattagggatggttccaggatttcggcttggaggggataccttcccggcgggcacgcgatatttttatttttttgcttttcacgccattaatttttgcattaaaaatttttgagacacaggaggggttcaatggtacctgtctcggcaacgccgggaaaatgtttttaattttactatttttaacagattttcaccaaaaatgccaattttgtgggtttttggaaagatttagcgaaatttttggaaaacttggatgcgggaggacttggaggggatacgaataaggaaaaaacgaaattttcagcttttccaaaaatcctcattctatcaacaaaaaaaaaatttccaggattatttgttttaaaatttgcatattttatttagccttgacacaaggggtgtttctctcaacagttgtgtgctcctttgccgctgatttgtttatccacaattcaaaacgcttattctcatgaccttgtgtccttttaaatgctctctctgtaaattattcaatttaaatttaaatttccaaaaattttatatttatattatcagatttaacatacattcatgccaggcccagggacggtcccaggattttggcttgggggggggcacctccccccgtgcgacgacctttttttttttttttgcttttcacacccgttttttatgtggcgcggtttttccaaaaaaaaattttgggggacagggggtccggcggtgccgataggcgccgccgggaaaatttttgcggttttaaatgcggtttgttaacagattttgtccaaaaaatgaccaaattttgtgattttgagccatttttagcagattttcattaaaaatttgtggattttttgaaaaatttagcgacatttcttggaaaggggggggggggtagccagcccagcaaggaaaacctaaaattttcagccaaaatattatttttccttaaaaatttttggacccgggggggtcttgggggggggtgaatatttttcccccttcaaaaaggtttttgtgcggctacatttactactgttccctgctgaatttgtcgggccgttcgctgttcgttcacatccctccgtttgatgaccaaacgcacacgccccaacgcatcacacggctgctttgccaactcgttgtcgaggtggccaaacaaatcagtaacaacaccaacaacatgaacatcggtgccaaaaccggggccaccgccgtcgatgacgcaccaattggtgctgttgcttatggtgctgatccgtcctcgacaccaccgccgcagccgccgccttcgttgtcctcgttgatgatcaacaacgggctgaccgtttcattcccgctgggcggcggtaccaacacttcattattatagggaggctgctactactgttttctgggactgctcgaatatagcgaaaaacttactttttcgctttttggttgtcctggtcggtctcaactctacggactgctcgagattttagatgaaattttcccggttttaagtggaaattttgacttccaccaatttgagttcaattctggttctcgatgtgaaaattgtcggttttttgcgagtcgaaaattttcccgaaatatttttgggttcagtttttttattgactttatcagcagagtcaattctcgggactcttgagcagtccctgagcttcttgtggcttttgcagcgaaattgcggataacggaaattgcacgaggctcggttgacttttgtttttgagatgatacatggattacggatttaatttgtttttctttttttttgtgatttttcattcggcactttttgttcgcttaactctctcatccccaacagaagagatattattcactgttatcgacccaaaatgctcaatatttagacgaattttttgaaaaaaaaacttacaaattgaaaatttcctattatttaattgttccattcatttaatttcaatatgtgtgccgtgctgatgatgtcctcctagcatcaaaccatcattcatattcattaacatttttctttaactgtgattgatttgcctaccaaaaattgatattttttaaccaaaatacataggtatgttatttaattacaataaagcatggatttctaaatatgtacaataattctgattaatgcgtttttatcatttaattgttgcaattaaattatatttttacattttaattaccctcattactgtttttctccttactgttttggattttcctctcaattagcagtgcatatattggatgggcaaacgcaagctcaaggaggagccggtggaagaagccgaccagggcgacgacgaccaattgacggcatcggcacaagcggagacgacgacggcacaacaacaaaatcagtttagggagccgcggttgaagcgcatcaagcgggacgagtaccagcaacaccatcaccacaattcgcggcaacaatttaatgtggacgacgtttccgctgcagcagccgcttcatcttcggcgctttcgttgcccaatgggcatggccatgcgtcctcctccgccaacaatcatcgtctgttgatgaacggcacaacagccgtgccgacgacggatggtggggacaatggtggtggtgaacaacaacactcggtgtggctgatccggaaaccgatcaatgtgaggaggaggaaaagcaacccccggaggggggaatttacatgaaataaatttgattgaaaaatgcgttaatttcatgccattgtaaaacatggcactttctgatgaagttcatggttgctaaatggggtcgacgaaacattttttactgcacttaaaagcgaatttttgcatttttttccgtctttttatttaaccatttttggggggaacagttctcatcgccacctcgccgttccctcaccgcccgaaaaaaaaaagattttctttcaaaaaaaatttcgaaaataaaaggggctaggctaatcgatacggtgggtgtggcttttttggaaaaacggatcggtgcaaaaaatttagatattctgaaaaatgccaataaaaaacaagatggcattcatttttttttgcgccgcacagatgcccatggaagcgctgcacaacatccatttcacacgcaaacaaagtgcacaatgccaaacaatttcgtccacgtcgggtgccaaagttgagtgccatttgaagaagccgatcaggccgttgctgcacgtgatcagcgatcggaagcgcacttttgacgagaaagtgccgatgacgcagggtcagtgagttgtgacgggcggcggaatgaattggtgttggcattttgggtcgatttctttttgagtaaatttgtgccaatgccaaaaacaatgggggaaatagtgaaatttgatgggccgttgaatcaagccccccccccaccccctcaacatttgacactttttcgatgccatttggggaaattgggtcatttttctaaatttattttatttttttctcacgatggtaagcatttttggggaaaattcagtggaaaatccaagaaaaatttattttcacgacggtttcttttttttgaaaattttaattggaattgttaaaccaatttttttttaatttttagaaattcttgaaaaccgaagcatatgcctagcctagaccaatattttcaaaaaaatataatttttgtcattacatcgcttttcatcgtcaggctcaagtctgcgtggcgttgtgtgggtcaacaacattgagccggttcagctgcagcagccgcaacgatcgcggacgacaacaacaacgggtgatgatgacgtggaggaggatgagtccggggccggcaccgaactgctccaacttgacgacgacgacaacgacggaattgacgatgggatttgtgccaccagctcagcagtgccttcttctcgcatccaaattgggtccattcggcgaacaccggtggttgacgaacgcatgctcaaggaacggttgaaagcgttcggcacggcacaaaaaaagggcacgacgacagaagcgcaacggcggcggcgaaaatgaacaaaaatagagaaaaaaaacggatgatcaatgagcaaggccgtaaccaaaaaaatcttataggataaggagtgccgaatttcgtctaaatttttcggcattaatttccgaaatttttcccgtagaaacaaaaaaaattttaccccattgttcgctgactttggttcaaagtgtcaacgcttgaacaaatttaaaaaaaaacaaactaaaatgagtgccaagcagacgcgcgcccccgggaatgccaatcaccggatcaaaatcaccgaaaatttgaaaaaatccgtgacccgtgatccgagatcacggcaccccaaaaaccccgtgatttccgtgatccgtgagccgtgatccgtgatcagggccagccctgatacaaacactaccaaaaaggtactgatctatatttttgaattagcgcgcaaagtgacttttttgaagttttaaccatttttgccaaacactggggttgaccccttatttgt

SEQ ID NO: 1745 - DNA, 3999 bp, Heterodera glycines
ccccccccaaggtatttgaaaaaacgcgctttaaaaaatggtgaaaagaaaaaattagagtagagcgggaccgggaattttgggcttaaccgggaccgggacctattcgggttgaaaaaccgggaatttttggctgggaaaaccgggaaaaaacccgggactggtcccggtcaaaaccgggacctcggtactcagttgtccgtgttttggtcccggtcccgctctactctagaaaaaatcgtcgtaaaaaaggctctgtcaaaaagctgataaatttcatcaaatggatcagcttcttgatgtgaaatggatgtacgtttcggccgacctctttcttatacaccaaagtttaagtttgaaaatttaaggaattaattttgtcaaatttgggttttctcacacccagcatgcttcatttttatacacagcaaaaaaaaaaagtcaggacacataaatatggttctacaatcacgatacaaaataggtaataaagtcagacattatataattccagccatgacggccaattaatcttccgtttcggcctttttcttcgtctccaattgcttcaaatcctccttgttcttcgtgagcatttcattggccaattctgcgaagcgtttcttctggtcctgaattaaacaattaataaatgtgaagacggtacttttcaatgagaaacccaaaaaataccaactgttctgcccttttcacctcgatctgctgaaagtggtcgcaaagtttcgtgactttctccagcaccgccgtcaacaattcgttgtattgtgcgtccaaacgatttttgtagtccaaatactaaacaaattcgaaattgtaatggtctgtaactgcgattattatacatttttgtgcttctcggccaattcgtcatggagtttgcccaatctcaggtcaattttgcccagttcgtcgacggtggcctggtgtttctgcctgatcacatccaaactgtgcttcgcgtcgaccaatgaacgctgattgtccccaaacttgcgcttggcccgttccagttcaagcttgtgctttgacagaagctaaatccgttcaaactggatttaaatattttcggtttcattttaactggcctgctctttgctgaactccaactcgttgatttcgtccaccaatttgctgttggtcactcgcattgattcctctgcttgttgcacagcacggatttggcattccatcatccctttgagctggttgagcaaacgtgtcaatttgttgtcgttacggcatcgctgaaactcgacaattgcctgatcgacgctgcactgttccaattcggccaggtgctgctgcagttggtcctcactgaataacggctcacagatgacgcgaagacggctcatgaacgcgttgtagtcggaacgaatctgaatgatgtgtggttcacaaatttttattgaattttttcataaagaaatttcaagggaaaaatttttcagcgattgctaattgtaattttttcaaaaaaaatttcttatgaaaaaacttcctaaacgttttataatttttttttaatttttcggcgaaggagaaacgacgcgggggaaataagtgcatccaccaaaagtaccttggcggactgcttgaaaatgatgggctgacgttcgtaaatgcgtgcctctgttttgttgaggttttcgcgcagcaacaccaactcttcgcgaacctaaaactcgaaaactgaattttatatacatttaaaaaaaatttgaccgatttacgcttcgcgaccaatgcacgcgcttgttctccggctaattcgctgcgtgctgatcagacgctccctctcccggttttcgttggccaaattctcccgtgccatcaccagttccttgttcgccaatgtgatttcattctgtaattagagggatttggtcaaattttatcaagtattcccctcgaaactgaccaatgtgcgttccttggccgacgcaaccatttggatctcctcaatgtatcggtccatgctggcaatgtcattctcgcagtccacggcttccttttcaagctgttcagaaacgcactgcgcctgtaaaaggggtctcaatggacagcgtcaaaattactggtcattcgcctacctcagcaatggcggcctcgagtttgtgaattttctgctcctgggccacacgccgtgccaccaattcgtcatacgcgttgcagtcgatgcccttctccgccattttctgggctcgatactcctcgaatgcctctttgaatgtttcttcccggtcgtaaggttggccatggcctttggacatgaacttcttaaagcacgagatcagcaggttccattgaggatcatcacgaattttgtccaagttttggtacatttcgttttcaatctaaaaaataaatatttatattattggcatttcttcgaaacctcaatgatatcgataaaccaatccaatgagccgagcaacagaccccacgaagttggcaaagtaatcgtttgcattgtgctctgcttcagcacataaggatagcccaattggttgagaaaattaagggcctaaacagtttcaaatgtgaagatgaaccgaaaagaaaacaaacgtccgtctcgagttttcgcacttggtacgttggctcaatgcattgaaacaaatattggaacacatcctggaaggcgattttgctgggaaagcgcagaaagtcgggctttccgaaggagaacggcggtgccggattcactcggtcttccaaaaagtgtacgatttttctgataatggctgcctgaacttcctaaaaactaaagtatcaaaaatccgtgaatgattttaaaaaacttacacggtcacgaaggttgcgctggtccgggattgtctgcattttcggcaccgaaactaagcgacggcctttgcagcccggaatccactctgacgattggccaacgaaagacgggagggcaaactcgcgcgtgcttcgtctgcccatcttaaagcatttttacaatataagccctgatttgccattaaaggaacatttggaaacaaacgaagtttaccgaatggaacgagggttgggagtcgggtggaaaggctggcggtttgtgagcggagtacgactcggaggaggcatcatactcttccgctcaagaatgctcttccgttcagaattcattgaggaaaacattaacttttaagatttattatatccttaaacttaaacaattaaaaaaaggaaagtgtatttatgaaagttgtgacagtgcacctaggtatttgccgattgccgagtcggcagcaaaccaagccaactctgattcatttaaatcaaaatattcgcaatttgtcatttaaattggcattatgtatagatttcaaataatggtaaaaaaaatgcattttcgcttttcagatttgcctgaattttgaggaattgaaaatcctcgatatgtaaatataaaaaaattatattggaaaaaactgaaaatggctgaaacgctgccagatttattagggatgtcctgcttcttgcattagcattcatatcaaaatactttgttagaaaattcattcatttttatctcgttaatatttcaataatcgcgtaaatttcatccaaattttctttttagcttcattcattctcgaattatgtctatgctcgatttttgcatcaacaaccccttgattcgcatcggcacctatgcgttggccattttcatgttttctcgaacggcgtggagagagttgagcggaaatgaaaaatttgtcaaacacttggaaaatgaggtgactggggtgcgcaagatggacaagaaaaacattgtgacatttgattagcattttgtcgaaatttataaattattttaattatttgttttgaataaattatgtaattaaataattgtgattttgtttctagagtggttgactaatccgcgttttcaaattgaagttgagaaacttattgtcgaacaatcgttataattttttgattcaatgttggtcttacgcc

SEQ ID NO: 1746 - DNA, 1147 bp, Heterodera glycines
acgatgactgtgaacataaccaacagagcattggtacgaataattaagcggaggatgattaattagggctgggcatttagtcaattaccttttttttggtttttatacataccgtaaatccgctatttgaaggctcgtggccttctattgttcaaccgctccaaaaagtggcctttaattggagaggggtcttcaaatagtggatttacggtagtaccttttgggatttttatgactttttagcatttttttttggcaatttttttttatgacttttatgagattttttgtgacttaaactcccggccctaatgattataatataatttttgaaatccaacagaaatttgaacggctgtacagcagtgaggcgtcgctgtgggtcaattggggcggctttcggccaatgaccacgccgttgtgcggctacaacggcacaatgtgcggccaaaatgtgacggtgtacattctggtcggcgcaacgcttatgctgctgatgctggttgccgctttgcttggcatcggatatgcaattaggtaaacaaacagacgacggatagaaaaagcatcggacggtgccgatcagaaattggaaaaagcatcggacggtgccgatcagaaattggaaaaagcatcggacggtgccgatcagaaattggaaaaagcatcggtcggtgccgatcagaaattgaaaaaagcatcggacggtgccgattagaaattggaaaaagcatcggtcggtgccgatcagaaattggaaaaagcatcggacggtgccgattagaaattggaaaaagcatcggtcggtgccgattagaaattggaaaaagcatcggacggtgccgattagaaattggaaaaagcatcggacagtgtcaatccgaaattaaaagcaagtcgataattggaccaatgggaaaggtagtgccaaaatcaatcataattttatgccgcatttctccgaattcggcacaatttgggcgccctttactccgccccgattttaccatttgcagggagaaaatgcgcgagaagcagcgcctgacgcgcgagtgtttgatcccattcgcggagctgcgcaaccccaaagagctgcgcagttcggaggaactgaaggcggacacggagaagagcatgcggagcatgc

SEQ ID NO: 1747 - DNA, 969 bp, Heterodera glycines
atcatcagcagaaacaaatgcgagtgccgcaacgggaaaatgacgaaaaacatcacacggggcattccatctgatcagtgatctcactccaatcattgaccgatttaatgaccattttaaatctctttattaattattactttttaaatccctttttcttaattattaaaatcattattcagtatggctagagactagaagtatcagataaaaattcaaatgcaatgatcgatcaatttattttataatttagtcaaataaaaattcattagaagatttcggatcacaatttttatttgttcaaacggttagacagcgccgaaacatccgtaggacactcactcattttctgtcgtaaaatctgaaatttttgcaaattttaatttaatttcaatttttttttggcttattacccttcaattgatcaatttttccaactcgcgaaaatcgaactgttcattggacatgttggcacccttatgaccaatatgagcaaggcacgtgttattgttgaatgatgatgctctgttgacgagcacttgagtgtcattttgttcttcacaagcccaaaaaacggtgatctgttcagtgcctaagacggaaattaaattcatcaaattgtcttaattaggtaattagtgagtggcccaccgattgcgcaaccaatcgcagaacagaattgttgatcagcagcacattctgatgccacaatagcagcattgcccgacgtgtcgtacattccgactttgcaatggatccctgtgaaatgtaatttaaaaattaattattttttgaattttgaaattttaaaattaccgtagcaaatgcatggaaaggcgaggcagcagaagaaagtaaatgggagaacaaatttcattttccgcttaatgttttgatagacgaaaaacaatcattaagaaattggtgacagatattaaaaatattgatttaaataaaaataatttaaaa

SEQ ID NO: 1748 - DNA, 4465 bp, Heterodera glycines
  unsure (1)..(4465): unsure at all n locations
aaattggtgacagatattaaaaatanttgatttaaatttccttaatttaaaagaaaattaaaagaaaataatttaaatatatattaaaattaaatttggtccaaaattttcattaaattcttctccactttgccttttcttcttcttcttatgcttctaccgttcattgaatacgaaccatcatcattgcccggagaaggaatttggtcaaaaaacctttaaataaaaatataaaaattaattaataatttaacacaaaatttgtcgattaattattattgagcaataaataacaatttggcaaaattcaatgttatttttccataattaattaatcattctcattatcattatgtaccaaatgcaattgttgagcaggtaatgaaaatgttggcattttcacggatggttcggccggtcggaattggaagttcattgaattcaatttgaactgttttataaaaaaaggaaaatataaatttaattttttaataattttcatccatttaataatatattattgttgccaccaaaagacagaaacgcaaaaaaaaaaatttgaaatttatgaaatttttgaggaattttaccaaaacggcacattttttagtcaaaaagcaggcttaacataattaaacaattaagtatcttttctaatattattattattatttaatttttttgcgctcactttttcccttcatcggcaaataattcgggttgtcaaaattaaaattggccatattctctcccttggcaccaaattggcaatggcacttttggccaaatgccaggaatttgctcatctcctcacaatcgttgtccaaggaacaaccccaaaaggtaaaaatttcagagagtgtaaaaaagggtgattgacaatcaattaaacaatcaatcagatcgccgcattgatttatcgatcggtctaactaatcgaacaattgatataaaatcgattattgatcgattgattgatcgagattgatcaaaattatcaaaggctaaaaataaaatcatacataaattggacctatttcgcagctgaccgtgtaacagtactctccgcctcggcattctctggccgctgtagtaccgtatccgtttccacgaaaatagcccgccttgcactggatgccttataatttaaatgtttatttttttaattttcgacgatctatttaaaattcaattctccttttctaacaatttcgatctaatcggggatataaattaattttcatgcaattccaattatggcataatattcgtggcatttttgcaatcttggcgctatttccctcatttttatggcacaattctcgactcattaccatccatttttccctttggcattgttttccctcataatttttgtgccacagttcgctgtcattttttatgcaaaactattttttggcattttgccctcacttttctcaagtgcctccggcgaaatggtcggaatcgggccgggcttctccttttcgggcagtttaacttgctcattggccatgtctttgccctcgtcaccaaattggcactcgcaccactgcttcgtcgagtgcagcgcggagttggccgcgttcacaaagaattgttcgcagcctttttagtccgcgtccccgctgcacccccaagtgatcagtgccgtggaggtgtagttttctgaatttttgaaatacaaaaaatttgctatttcggccggcgcctaagtaggcgctaaaaatggcaagcctgatcaaaacaaaccagcaaacgccagaggatgctttttggaaaaattttaattttcactttgaaaaacaggattttcggcgccggacttgcgcctgtctgatacaaaccctaaaaaccaatgggacaatggcaactcgtataaaaggcaactcatattttatgaaataaagcagatgcctaaggctaggcccaagccaggcacccaagcaggcctaagcctagatttaatccttggcctaacctagcaattgtacgatttgccttttgtacaagttgtcatgacaccaaaccaataggtcaaagaaagataagagatactgtactacttaaaaaaagtgtaaattttacggaaaccggatcggctaaaatagataaaatttcacttttgcgggtcagaaaactggaccaataaataaattgcggtgattttgatgatttaattttattaataattttttttgcacttacgctccatgcacatcacggaaaagcagtgatgggctttgctctcgcatatttcagttgtggcatttcaccagataaatggttggcatagcccgccttgcacgtcaatgctaaattaattaattcattgactaattaacaaactcattaattttaaattgttactcgagcatggattgaacatggcgatcatcagcagcaaggcaattagcggcaaacgaacaaaggaagagatcattttcattatgttcttaaaattttattggaatttaattgaatgatttttatttttgttttggctaataaattgtaaaagaatgcttttcctttttccgtttgccttttttatgagtcattcattcactttccatccaaacaaatgcttctttctgctgcctctattctgatgattaatctgattaatcaaaaattgtcttcatcgtcaataacattttatataattattcactgagaaaatgaaaaatgatttatgttaattaaagcgaaaaattatttgaaaaatagatagtaatattcaaaatagtagaaaatatttaaaatttcgtagttaaaattaaatttccctaattaggtaattagtagagaccggacaagagggtcggtcggtcggtttcggcataaaaaccgaaaaaaaccgaaactgaaaaaaaccgaaaaactcaaaaatttgtcggtcggtcggtttcggttaaaaacccgaaaaaaaccgaagaaaaattttcggtataccgtttcggtttcggtttttttgaattttttatcttttcccaaaaaaactcgggggcgacatgtcgggagtcgggggcaggggggggggagcgcaaatgtctggggttggggaccccgattgagtagtgatcaacaaacttttttaacaaaaaaaagaccaaattttctctttaaatgctcgaaatcttccttttttcactttaatcaaaatggaaatttttgaaaaaccaaaaatgtagtcaagtaaataaataaataaattttgaatatgaatttttgataaaattttccatttctcaggggtgtatttttcgtttttattgcatttttgttaataatttttttcaaaatagcagaaaatattttacaaaaaattcttcaaaatgaaaaagagcacaaaaaagcaataaatttattattattaacaggttatatcgctccaatttgattcggtttttttttcggtttttgaaaaaagtcggtcggttttttcggttttttgattatttcggtcggtcggtttcggtataaaaccgaaaaaaaaccgaaaccgaaaaaaaaatcagcaaaataattttaaaaaagcgtatgcaaaagtcatgaaatgcttctcgttctgctgactaattgaaaatgatcatcatcaaacaaaattaagaatacctttaaattgtgcttcattatggatacatatgtttaatataagttctgattcaaatttatatatttttatttattttttttatgaatttgttttatttggcaatttctgttttccaatttttcactattttcaatatcaattacaaactgttatcaaataaaaaattattcgaatttagatcattttgcaccttcaaaactaaataaaaattcataaataaaaaataataatatcgtgagaaaaaaaatccaattgatcctggtcaaaattaccagatcgggatcaggatagttttgtcatataaaaataacatgaaatttataaaaattattccatcgtgtttttaattgaagacccaattgattaataataaaattaattagctaattaagttttttctcgcgctaatatgatttggcaagggcgatcattgaacactcgatttggtgttttacataatatttttgtttatttattcatctttggatgtttacaatatcctcctcctcatcgcagtgggacatttgcggacggcattttgcgggaccggacatttgcggacggacatttgcggacggacatttgcggacggacatttgcggacggacatttgcggacggacatttgcggacaattcctgagaaaaaattaaatgaaaaaaattttttttgttataaaaatttctaatggaagagtgggcctcgtcagtgcggtgctcttccaaaagaaaacaaaaaaataagaaaaaaagtgtgtttcggccctaccgcagacacacaaaactaaagaagcacacttcaacaaatataaaatacaagccaaaatattttttttaaaagccaaaac

SEQ ID NO: 1749 - DNA, 5744 bp, Heterodera glycines
  unsure (1)..(5744): unsure at all n locations
aaaaataggctgttgttggggccttcagcaagcctaataaaaaatttaaataattacgaattaatttgttttggcttttaaaaaaatattttggcttgtattttttaatttgttgaagtgtgcttctttagttttgtgtgtctgcggtagggccgaaacacactttttttcttattttttgttttcttttggaagagcaccgcactgacgaggcccactcttccattagaaatttttataacaaaaaaaatttttttcatttaattttttctcaggaattgtccgcaaatgtccgtccgcaaatgtccgtccgcaaatgtccgtccgcaaatgtccgtccgcaaatgtccgtccgcaaatgtccgtaaggcctcctcatcctttgactaccataaaaaaaaagttttctttcatcattctttacaaacatttattttccccgatgatcacattcaaaacattcctttgttatgctgcatatttttgccacagaaaattagagttcgtcatttttgaaattttattgctaggattcgataattaaatcctggattggattcaaaagaaaaaattatattttcgcggcctcctgtgattttgatgcatttttcgaaaaattgcctgatcagggtcgaaaaatcatttgaaaaattctggcagggtccggcccacaaatccggtctctctaccggaaaaccctaaatcctgaaaagatttgaggcacccatcctaagagaaggggagcgcgatgaatttaagtgtcttgatgaattctttcctcattgtaccgcatgccattttcaaaaggacactgtatcactagcacattttccggttacgatacctacacacaaattttttttaattaaatttctctaattgccactatgtgcattaacaaattttttgatttttaataataattaaaatccatttttccggcatttattttttcctgctaatgccgaagaaaccgacaccgcgtccacttacgaagcctccgccccaaccgccgccaacgccgcgtccgcaaccggcatcgccggctcaacggccggcgccgcgtccgccgccgccgcccaatcttccgtcggcgcgtcccactcacccgccaatgcagctgcccacggcacatccatctcacccgccgatgcagctagccggtgccagaagcagattctgagccattttcaaagataaccgcattttagcgatcacacatattttgaccgatcggttcttttggcacattgccaaaatatggaaattcaatttggtattttgttgccattttaaaattgttcgaattttgccgaataaataaatgcatttttacagactaaaaacatgcgtgtgttcaattcaaaagcattgttttatggatttgttccaacaatttcagtttacaatgacaattcttgcttaaagctcaaactcattgtgtggcaattttgtcgaaataataaacaaatattacccagttacaaataaataataatttaattatttattttttaattattatgcatcactatcaattaaaaaatttattgtcagctgaagagccaattctgttgtgaataatatgcataaatcaccgatgctgagaaccactaattttttgctttcattttcaaccaaacaaattacttaaatttttgaataaaaatcaattttttttttggattcctgagagggttttttagaacctaaagcctacctattttggcagtttaagcacctaaaaatcgcatccctagtaataatactatcgatggtgccccacctttttggaagaaaatttttttgttctaaaaagtcgaaatcatgtttatggggagtttacagggtcgctgatcatgaatctgacattaatttaaccaatttcgaatcccggacccgaattcgaacaaaaagtcgaaattttcaaaaattcactttatcttcgtttctgtacagaaagatcattttttgatgttgcaatgatttttgactaaattcaacttgttttgttaatttatgaacaaaagtgagaattttgaaaatttcgaattttcgacttttgtgttctaattcgtgcccgggattcgaaataggtaggtcgaaatggatgtcagattcgttgtcagcgatcctgaaaaccccccgtattccccgactttttagaaaaggggggggggtaccatcggtagtattaccggggttcgaaatgtgtcgagatggatgtcagaatcggactcttatatcccagaaaacccccaaaaagcattgaattagaaaaaataaaaaatttttttttatttttttcaaaaaatgggacctaccatctgggtcaatacaaagtcaactcgtacaaaaaaaattctaagaattttcaactaaaacttagaatttttagataaaaaaactctaaatgtattttctagctagaaaaactttaaaacacttaaattttcaaaaaatttaagaaattaaaaaatcagctgaaaaatttgtaaaaaaaaactttaatgaattttttatgtttttcttggctagaaatccatttagagttttttttatctaaaaattctaagttttagttgaaaattcttagaatttttttttgtacgagttgccttttgtacgagttgccatgtctagggatacgatttttaggtttttacctatttttttcctgaactccccgtgacctgaaacgcacgaaaaacatatttttgggctgttgttaagctacttttcgagttattagcacctattttctaggtttttatttttagcacctaaaaacctaaaattggcgttttgtcgaaaatttgttaacaaaaatgcaataaaaataaaaatgtttttaatagctaagaattgcaaccatctaatttaaaagcatagttaattttaaattttatgagttataaatttttaagcatgagagttgttaaatttactaaattttaatgatttatataacatttgcatatttatttgccgttttggtgccttttggcttttttaccaaaaattccattaaaatgcaataaaatcgggaaaatacgccccctaagaatttaaaaattttctcaaaaaataatttttttttcttggtaaaaaattttagttttaaaaattttctttttcgaaaacattataaatatttaataatcattaaatgagcaaaattaagttttttggttaagttttacgagttttgctcactaaaaatctttaataaaaaatttttaatgcctttttcgggattttcgtgccttttttcaattttttcatgcctgttatagtgcctttttcgctatttttggtgccttttttttgcgagctctactcattattaatgaggctttttgaccacaacaattggtagttttcatctgcatgttatattctagacataaaattgtcaattaatttgattaattagccaaaacacaaaacaataaattaaaaggaaaaaatatgtgtgcgaaattatttaagcatcatcacttttctgttcatcatcagccatttgatagtggaccaaacgccgcgggtgcaattcagcaaaaaagcggacctaagctcagtgcctctgttccattcctggctgaaaaagggaacattttttgaaaattatttggcatttttatttattggcttaacgtaccgcacaattttgagtgccggaaggaattgccctttttgggcaaatgcgagtgaaatgtaaaggaagcagcgcgaaatcagcaccgggtcaccaatttcgatggccaaacggagctgacgaatggaaatcacaaaggcatgccgaatctgtgggaagaattggggggggggnngggggaaggattttggcgattaaacaattaaaaacaattatgggatcgcttgccgtctcgatttttcgggagaaatcgtttcccccaaaaattttttagaaaatttaataagtaaatccaagaagaaagtcttttaaaattttcagcgtttttctgcaaaattttttgaaaatccagaattctcaaaaattttgaaaatcgcgaaattttttttatttcaaaattcatttttttttgtctgtttttagagaaattttgttttaaaatttttaaaaaattctcgggggggggggacagatagaggggtaaacgtagccctattttttgcgccaggcttttccaccttctcccaccccagctccccttaattggatgatgtaaatgaaaaaagtcgggattttggcaccagtccagccaaatcgcagaatcccgaccacccccaaattaaaaaaaatatataatttattacaaatttccgactaaaaaagcccattgcggacacagcgccgccaagcgttgaaaggcgccaaagctcttaagaaagggtgaaaagacagataatttaagtacataaagataggcgatgctcaagaattacaacggaccggtctcgacatgcagaactgaaaatgagggggaaaattgggaaattgtggcaaaatttgttttgttgcttacccttttgtacgagtgccgagagacgggagtccctgaaaaatgtaattaaaggaaatactttttaataattgcctgtgtgtttgccagtggtgccacccatggccagggatattttacgtattcggagaagggtgccaagcccggtttttattttcggcgattttttgaaaaattttggaaaaatgattacaaattcgtcataataaatttaaaaaaaaattagtttggggggggggatgacccagatatatcaactccaaattccttttctgagcctcgaaatctgatcccgagatttagagaagtggaaatgcgcttccatcctcttccctgtttttaggcaattaaaaaagccaaaagtcattaaacgcgcacataaaaaacagttagaggcacatttttaaatatttttaaacggcgaataaacgcaattatcaccagcgcttgtcaatgtgaaagtccgtcgctttctttgatgtcggccgccgacggcgaagggaaagtcgcacaattgaagcccaaaagtgaggggaggggaaagacattaattgtaattaatcatatcacatccgtcccgttgcatttcaaattttaagcctcaaaatttcggaaattctttcaagggtgtccgaaattctagcagagttccaaaatgtgtgaaaatccgaaatgatatccacacaaatgccatcgaaaaaaactgctcacagatccgtcgacgatggccaaccgtcggcgcaaaagtgtcacccaacggagtcgggtccaaaagttcagtgcctcaaaaattgagcagaagaacagcagagtgcgggacggcacacgccgatgccgaccacaaaccggcaaatccgcagaagacagacgcaaatcaacgcaaattgacatgtgtgttcagcaaaaattgggaaaatgccaaataaaatttgcgttttttaatatcgtttaggccctataatttccaaaagaaggtttgagggtagtctgatcacgaattcggcaattgtgtggaaacaaatgatgtgaattaaaaaaaaatcggatttatggttttttattcgagtttcggggttatggctcgtaatgatgggtcgccatcagggctggacgcaattgaggattacggaaattgcggggtttttggacccccgtaactgcggatttccgcaactgagaaaatcgccgcaattgcggatttccgtaattgttaatccagttgcgtccagccctggt

SEQ ID NO: 1750 - DNA, 982 bp, Heterodera glycines
atttgttaacagatgttctccaaaaatgaccaatttttacgaatttaagccattttcttaagaaaaaaaaaaaaagttttttggggccggcggtgccgaaaggcgccgccggaaaatttttttgaaattgggagttttagtagcatttatatcagcgaaataaataattaagcacaaaaaaaaaattaaaaaagtttggggaagctaaaataaaggacaatctttaaaaaaaggacatttttaatttcaaagatccggcccctccaaaaaaggacaaatctttaaaaaaaggacacttggccgccctgttcaaaagcaatccctttgactcatgtggagtcctataatttgttgtaaaaaaatacaccggacaaaatttttttcaaattaccccattaggtttttccttgtttataggccatggcgaaaggcctaaattttgaacggatgggggggggggggggagggttcaaatttttcttgccacatttagataaaatttttcaaaaattgttagggctgcggcatatattggaacaccttcttaaaaaaacaatttgtttaatatttcgggccaaatattgctgcgaatcaaaatttgagggggctcttgaaaacccaccgtaataaaaatggctgcggacgaggtgggaaatgcctgaaataacagaaaaatcatgtctttgtttctgtacgtgctctccactcttggtggtgcacttaatttttcccccggtaaatggttttttttgcaggaaaatttctaaatttcaatattaaaaaaaaatttaaatttttctggtgatttttttcaatccctttgggagggggggggatgggtgtgctccgtttgctccctccgtcgaatattaaaaaaatacaaatttcgaactaaaagtttttcataagaattcgtagtatattttttaataataaaatttaaagaataatatgtgtcgaaattgttcagctatttttcttg

SEQ ID NO: 1751 - DNA, 2191 bp, Heterodera glycines
aatatttgggttttttcagaatttagcaattttccgtcattgcacagcaaccgctaaacgtacagcaacggcggcacttgcatccggtgcagctcttcaagggctctccaagcctattgttgtttttttttctatctcatctctgaatggagttataacaacttttgtcaactgtttcgcatttaacctacccattataaaaataataattggtacgcaaatccaatcctattctgattattctgatttttttagctagtctctgaatggggttatcacagtttttcgaatccttttttcataacagttacgcacttaacaattggcatcccaaaaatattaattaggtacggtagtcaacttgccgttcgaacatataccattcggtttgtctacgcgtgagatgggagagtgtattcctgataatatttggttttttctgatttagcaattttccgtcattgcacagcaaccgctaaacgtacagcaacggcggcacttgcatccggtgcagctcttcaagggctctccaagcctattgttgtttttttctatctcatctctgaatggagttataacaacttttgtcaactgtttcgcatttaacctacccattataaaaataataattggtacgcaaatccaatcctattctgattattctgatttttttagctagtctctgaatggggttatcacagtttttcgaatccttttttcataacagttacgcacttaacaattggcatcccaaaaatattaattaggtacggtagtcaacttgccgttcgaacatataccattcggtttgtctacgcgtgagatgggagagtgtattcctgataatatttggttttttctgatttagcaattttccgtcattgcacagcaaccgctaaacgtacagcaacggcggcacttgcatccggtgcagctcttcaagggctctccaagcctattgttgttttttttctatctcatctctgaatggagttataacaacttttgtcaactgtttcgcatttaacctacccattataaaaataataattggtacgcaaatccaatcctattctgattattctgatttttttagctagtctctgaatggggttatcacagtttttcgaatccttttttcataacagttacgcacttaacaattggcatcccaaaaatattaattaggtacggtagtcaacttgccgttcgaacatataccattcggtttgtctacgcgtgagatgggagagtgtattcctgataatatttggttttttctgatttagcaattttccgtcattgcacagcaaccgctaaacgtacagcaacggcggcacttgcatccggtgcagctcttcaagggctctccaagcctattgttgttttttttctatctcatctctgaatggagttataacaacttttgtcaactgtttcgcatttaacctacccattataaaaataataattggtacgcaaatccaatcctattctgatttttttagctagtctctgaatggggttatcacagtttttcgaatccttttttcataacagttacgcacttaacaattggcatcccaaaaatattaattaggtacggtagtcaacttgccgttcgaacatataccattcggtttgtctacgcgtgagatgggagagtgtattcctgataatatttggttttttctgatttagcaattttccgtcattgcacagcaaccgctaaacgtacagcaacggcggcacttgcatccggtgcagctcttcaagggctctccaagcctattgttgttttttttctatctcatctctgaatggagttataacaacttttgtcaactgtttcgcatttaacctacccattataaaaataataattggtacgcaaatccaatcctattctgattattctgatttttttagctagtctctgaatggggttatcacagtttttcgaatccttttttcataacagttacgcacttaacaattggcatcccaaaaatattaattaggtacggtagtcaacttgccgttcgaacatataccattcggtttgtctacgcgtgagatgggagagtgtattcctgataatatttggttttttctgatttagcaattttccgtcattgcacagcaaccgctaaacgtacagcaacggcggcacttgccatccggtgcagct

SEQ ID NO: 1752 - DNA, 1156 bp, Heterodera glycines
  unsure (1)..(1156): unsure at all n locations
ataatggtacgcaaatccaatcctattctgattttttagctagtctctgaatggggttatcacagtttttcgaatccttttttcataacagttacgcacttaacaattggcatcccaaaaatattaattaggtacggtagtcaacttgccgttcgaacatataccattcggtttgtctacgcgtgagatgggagagtgtattcctgataatatttggttttttctgatttagcaattttccgtcattgcacagcaaccgctaaacgtacagcaacggcggcacttgcatccggtgcagctcttcaagggctctccaagcctattgttgttttttttctatctcatctctgaatggagttataacaacttttgtcaactgtttcgcatttaacctacccattataaaaataataattggtacgcaaatccaatcctattctgatttttttagctagtctctgaatggggttatcacagtttttcgaatccttttttcataacagttacgcacttaacaattggcatcccaaaaatattaattaggtacggtagtcaacttgccgttcgaacatataccattcggtttgtctacgggtgagatgggagagtgtattcctgataatatttggttttttctgatttagcaattttccgtcattgcacagcaaccgctaaacgtacagcaacggcggcacttgcatccggtgcagctcttcaagggctctccaagcctattgttgttttttttctatctcatctctgaatggagttataacaacttttgtcaactgtttcgcatttaacctacccattataaaaataataattggtacgcaaatccaatcctattctgatttttttagctagtctctgaatggggttatcacagtttttcgaatccttttttcataacagttacgcacttaacaattggcatcccaaaaatattaattaggtacggtagtcaacttgccgttcgaacatataccattcggtttgtctacgcgtgagatgggagagtgtattcctgataatattggttttttctgatttagcaattttccgtcattgcacagcaaccgctanacgtacagcaacggcggcacttgcatccggtgcagctcttcagggctctgcagcctatggntgttttttt

SEQ ID NO: 1753 - DNA, 3402 bp, Heterodera glycines
caatcatataataagcggagcagaacgacgtcaaatggtacggatttacaaatacaaatgaccacctcttcctcctcctcctccttctacattgtgttaccttccaacacgcaggtggagggcaaccgtacaaactcctttcgggtgcgcctgccacgcaaacttcagttcggctcacaatggagtgtgggtttggcggtgttgttgtacccgcattcatggccctcactgggcacaacggaagagcaatttgtccgtgtcgaatggcaaaccggcgagcaggtgcgcatcccggtgccggccagcaatgtgcgaaatcctacacaactgctgaacagcttgcaccacgcactgggcgagggcagtgaggagctggccagccgattgcgtcaaatccagctcagctaccatcagctgaccggagaggcagagacaagcgccaaaaaggaggtggaacgtctcggttcattggggctacaacaacaaccaagaaatcagaccaaacggattgatgaagaaaaacagcaacaacaacaaaaatctgatgaaatgttgaatcaacagcagaatgaacagcaagaggaatggaaacggacagagttcaatgcccattatcgtcgcacactggacacgcttgtcgctgaacgaatggaggaggcggagcgcaatttgttgaacaaacatttacccttgggtctggagctgtgggtgcagtcatatcgcaaggcacgcctgtcctgccgcttcagcttggacgtggagcagcaacggttccgactacagattgacccagtacggatcaaacaggtggagctgtccgagcagcttgcctacatactcggcttccacacgcgccacctgtcttcaccgatgagtgtggctcgctaccagccggacatgaagggcggcgtctcatccttctacgtttatgcacccggactgattgagccggtgatcatcggtgacgtatgcgtgccggtgctgcgcatggtctgcattcgaagtgcacaaccggacgacatggttgaagaggcgtacaccgctgttcagtaccatcagctgatcaccaaagagattgccgaaattttcattgagatcagaaccccaaccggcgcactgatgccctttcaatacggcacctgcacgttgacacttcattttcggaaaactccatatttttgagcacacacgcacatatattgtttatttgtttttcttgcattcacaccacatttatttatttttttgcgcgtccaataaaaatgaacagcgatgagattaacaaaattttgtcacgttgccacatcactcgccaccagtatgttggctgcttcccatgtgaccgaatcccgtcccattcctctccgatgccacactgtatggtggtgaatatggacaaggcctccggtggagggacccactgggtggccatctatgttcagtcgccacacagcgctgactactttgactcctttgcggactggccacccgcatcggaacatatacgtcgcttcttggaccgacacttcaccaccgttcagcacaatgctcgctgcctgcagtctgagaggtcggccagctgcggaaagcatgttatctacttcctacatcaccgttgtcgggggtggacgctgcgtcagatcattcaacacattgacacgcaacggaccgagcccgaccgtctcgtcagcgcctttgtccgcacacatgtgtttggtgacctttgatgctggaaagagactcaaaagaagaaaaagacaaaaaacataaatagacgaaaaatgttgaaaagaaatatttgctgtgacacacaacacatacacacatgcacgtggatttcgacccattggcggtggactggtcccactttgcggaaccgccgccacgcatggacaccatgttgatgagtggtggagggagttcaatgggtggagggggtggtggtggagcggcgccgtcataccccgtcttcaccggacttccctatcaacgcggagcgggcgggattggctcaatgtttcgcagcttccttcgcttcttggtgccaattggtagacaggcgggcgcggcgatcggtcgccagggacttgagacaggatcacgtgtgctctcacagatgcttgaggggcgtaatgtgaaggaggctatgacggaggagggacgtgccggacttaaaaacttgttggacaaggcggcggacaatctgagtcggcagcgctccgtcgcagctgctgccgcgaccaatcacgggggcgccggcagaagtggtcgtggtggtggtggaggactgtttgactttaaacgttatcgcaagattgtgagcaacaacaacaacaacaacaacaaacgcaagtcgtcgtcatcatcaacaaacaacataaaaaggaataaaaaacggcggacaggcatcttacaatcaactgttggcccctcactgtcaacgccagcagcagcagcgatcgccgccaaaacaaaaggcgttcgttttgacgcattgggttccttctgaccaaagtgtggtagcacataaaaacaacagcaacaacacagcaaaaaaaaacaaaagtaaaaaatgagttgtccaaaaaaaatcagtgagcagagtgcgcttgcgttcaacagcgcactgaacgtgtttgccgttccgcccaccaatgtgtcggtgtcgcgttccttcttccgtgagctgttgccgctgtccaccatcagtcaggagggaccgtatctgttccgcatgttcaatgacaacctgtgggccgacatgtctcgtgtctacctgtttctggagttgtccatccaaaaggaggacgctggcggacgatgggtaccaattgaagcggcagaccaacttgtcggacctatccaatgcattggacaaacgtttattcaacaactcaaggtcacacatacaacatccgaacactcttcacttgcagaaaattaccaatatttaggttgaagtgcaaaacactgagttgtatgacagcggcacattgtacccctacaaggcgtatctgaccaatgagctgtccttcccaaacagtgcaaagggtcatttcatggccagcgcgggctaccatccctcgctgaagcatgacaacccgacggatgccggcttcttggcacgctgtgctcgctttgagggaggacgaaaggctcgcttcctttcccgcctggactttgacctgggcaaccaggagctgtacctattaaacaacatggacgtcctgttcaccatctaccgtgcaaagaacacattcctgttgcaaaacctggcgccagcgccggcggcaggagtagcggccaggcagcagtatgccttgtatctgcacgacataaagctgtacatgaaggtggtggaggtgcaaccctcgctgaacctgtccatctacaaaacgctgg

SEQ ID NO: 1754 - DNA, 3071 bp, Heterodera glycines
catactccatccgtgagatcagcgtgcacgccaggcggtcaaatatacccggcggtgccgcaccgcatggacttttcccgctccgcctacattcgaccctttgttgacatgtacgaggcgctgggcatggccaactctgaacgctccatggacatcacgctggaccagttccgcgacggatggacaatttttgtggtgcccatgacctcgacgctggatgacagttgcggctttgaactgctccgctccggcactaccagcattcggctcgctttcaacgaagagattccggccggcggcgttgagatggttgtgctcggggaatttgatcagttgataatgatagactacaaccgtcacattgtgtctgactcaaaaattgcataaataaagttgccgttgtgcaaaagaccattctgttgtttccaaaaaatcgtaacatcatcatcatcatcatcataaacacattgacatcacttcccaaatgtcaaacctaagctggatgattttgtacgagccacgtgagggtggtcgtatggtaccccatccgctgttcgaccccggtccggaaatgtcggcgcgcgtcattgccaccgcaccgcttttttcgacatcatatttttgtttgttttttattatcttttaccttacatgtcatgacaatgcgcgcatcacaccgctccgtgaataataataatttttaagccacccaacacgctaatgaatcagacgacagcgtggcagatgctgtcatctccggcggcggtagcggtgtagcatacactgtaacagaagctgcgttgctgaacaacaccaccagcacactaataggcacgacgtcagccgccgccgtgacatcaacgacggcgatgaccgcggcgggggcaagagtggatggggctgttcagatttggtccaccctgttccttttcgccaactacgcaatcgtgctgccaatgttcctactgtgttggatgatggttgtacactggctccgccgctccggcctcatgccgccgcctcatcagtcaccgtcgacaccccaacacccccaccgctacggtggccttcacaccatatttgaggacaccgttgagcagaaggcagggcatgagaaagacgtacggcaacaaaaagaacaacgcagtcacacttcatcagctgctactgtcaatacagaggccatggtgcgtgaggctcaccgggtgacctcccaacttgctgccgcaattccggagcctatgcgtagcgctgtgacctcctccgtggccattcccatccttgtgtcggcggcacaaagtggcggtggtcgaaaagaagcaacgcaacacaacagtgaggaagaagaagaaaaggaacgcaattgatatagtgatggaagggcaaactcaaatgtgtttactaatggctcagtgaaataaaattgtgttcgccgacggatcatttcctgtaccgtgtgactaatgtgcgtaaaaattgcggagcaaaaaatggtgatggcaacacggttgctcaatttattgcacacccccaagtcgtgccttatgctaaattgggaacaatgtttccaacaccatttcacaactccattcttctcaaaaaaaacatttttatttttttcattcaaatgtttcgcctagtaaaaaacgttgaacaaatatacacagcaaaaaaaagtggaacagggcccgcaaagtgtcaaagaagacaaacggggcagagaggggcggggggtggcaaacgcttgtgttggtgcggatcggggggtgggcgtaaataggcccagtgaacaccgctgaccaaccaacccccaccctcaaggtccagctaaaaaaagtcaaatacggcccgcaaagtgccaaggaagacaaatgggcagaggtggcggagggggtggggggacacatacgcttatgttgatgcacgcctggcggaggggggcgggggtctggtgggcgcaaataggcccagtgaacaccgctggccaaccaaccccaaggtccagctaaaaaaagtcgaatagggcccgcaaagagtgcgccctatatctactgcttctgaaggatacagcccatgggactgcatctgttccttaacaaataatatgccataaaatgtttttttacagaaaacatgagtaaaaaagacctgttttccgggacattgcgacaaccaagcggacccacaatttgaacatttgtgctggtcacccttccaatatggaaaatcgtccttttttttggtggttgaatgcgaccgaacccgctgcagttccttaatagaaagaactactaaaacatgccgtttacaaaattttttgggttgaaaacacgagttacaacctgtctttcgggacattgggacaaccagtgctcagcggacccacaatttgaacatttgcgctctttcccataagaagaaccatcctcttttcttttggtggttgagtgagaccgcacccgctgtcgcgaggttgtttatgtcctgctaacatgctgtgaaacgctaaatcccatccttgtcgtggtcgtgttccggagtgttgactgtgttgtaaccactttagaccgtacccactctttattgaggctgctgatgaggtcgtcgtacgcgtagcccattagctgatcatattcacgcacgtttcgctcctcttcttccttttcactggccgttcggtttttcttcagcaagcggcaaaccctcggattatttttgtccatgcgcttaaaattttttgtagatgaatcatattgtaaataaattgttaaaattcttacagaaaaatggctttttgtgtccgacatggcatcatcgtaccgactttcgctgctgctgtcgctgcctttgctttcatcgtcgttggacccactgttttgcttgttgccgtccttattatgcttcttagccattgctcccgctaaaaagtttattttaaataaaggaataagtaattagaaatgtaggataataagaaaacgcgaagaagaaaaaagcaatgaaataacaataggcattgggaaataaaaatatattttgcgtctctgcatttattggagtgagagcgtaga

SEQ ID NO: 1755 - DNA, 2499 bp, Heterodera glycines
  unsure (1)..(2499): unsure at all n locations
tgcccgatcgcccaaagcataagtagtgcacaaagtcggtgaagtatgagaggatccagcagtttatcatcttgaagctgaaaaagatgaagagctccccacatggtagcttccttttcgtgcaagccaattcgaaatctcgagcaatttagatctaaaaatataaatattaaagtcctaaaaatgtgatcacaaaccaattttacgaagaaatagtgtcggttgtttcgaacccacggtttacaaccggtatgccagatggtggacgtgtaactcattcaacatttaattagttaattaaataaaggtgtaaaaaacctggttttttcgcaactcctccaaataggtacatgattgggatagcagctacaatttctcaaacaagttccgatggtaaacgacgtttgttgttgttgttcattttttcagtgaaacagacaatgaatgaataagtattagagttgggtgtaggcgtcaagcaagggcaataaattattattacagtacaccaattcccaaggttaaaggaaaaatttgaattggcttctaaaagtattgatcagcattaccatgcaaacacctggcgttatattgatattcccggggattatcgattgatggaaggagcttgctgatatttgggaggctttataagagctcacttacactcagtttttatttggttaggttatttttatattttcaaatttgctgttaaccagggcggtacctcaacttaaagagctccgtttatcctggcagcaaacttgttaatttgtttttaggccctgaggtcgtgcattgtacgtaactaatttcccgaagtgttttaggtgccctgtcgtcttgtgcgcttcactgacttttctattgactccattctcggcaaaaaaccccggcaaggtttccttatcaacaaaattttgggcatagcccacctgctcggatctgttcaacacggcgaaggttcttccaaaaaacctgtcaacaaatacgtcaagaagttggaagacagtttggaacacaacgaaaagttccgctacacaaaggtcaagagccgattcagcattgaggacgtgcctgcaaatccggaagcactgctcgcagaaatcttcaaacactgcattgacgaatcgattgcagacagtcgcggaaagggaatagagccaactcatcttggttgcctatcagcagcccgttactcaacggcggtgacattccgatccccatccgtcaaatcacggacaacactgtcaacaccatcctgaaccgcttcactcaagtggcacagagcaaaaaacaacaaaacgtcacactctggggtgagccgtttaccgtggttgtgacaacagtggaccggtccgggctccccgccaaacgacaagtgaagggcggtgcccgtcgtcaattggctccagtgcggcatcaaatacatgatcaatctttgatcaaggttttatctcaattggaagcctcttgacatatatcaatgtgttagtttaagatccggaacccggacaggcacaatttctgtctcttctatgcaatgcaggcgacattggttgccaagaccagaggatggccccgatggaagttttacgattatctacaaaaccgacatggacaacggggagaacttcaacatgatgcaattcagcttctgaatcaaattggtgcacctttgaatttgaacgcgtacgatgctgacatatacgtaccgcgcgttatcaactattggaacaccatccaacaacaccatcgattttctgtcttcatcttcagtgcaacaggccactacaagcccatctacaaatatgtggacaacacctacaacacaccactgctcctttatttcaacaaaaaccattttgatggggtgcagaagcagggtggcctcttcggaaagccttactgtttggaatgtgaacaaccatatgagagagcatcaaaacacagcaaagcatgcaaagctcgttgcattcttagcgcgcgctctggccatgcattcccttgtcttgcatttgtaggcttctccagattttgcacctcttgcaataagaactttaacaacaatgactgcttccggcaccatctccagtcaggtttctgcaagaggtccaaaaagtgcaaagactgtggtgttgtttgggacgtgaatgataacaacagaaatggaagaaaagatcacgtgtgtggtgaacgctactgcaacctctgcaaaaacttccacaatcccgaacgtggctgcttcatccaaccgcttgagccaagggaaattgagccttatcggattgttgcatttgatctcgaaacaatgcaacaccagcctgtcagtcctcgtgagccagagaatagagagcatcaaacaaactttatcgnctgcaaaagtgttctgcccctgagtgcattgacaacggccgatgggcgaaacggaactgcgggttgcaaagtgtngtggtcctcatcgcaccgtctccttttgtcagcgccgctttgtca

SEQ ID NO: 1756 - DNA, 6717 bp, Heterodera glycines
  unsure (1)..(6717): unsure at all n locations
gcctttaaatctataaataaacttgttaattttttctaataaaaaagttttgtttaaaattatttttcctctttattatagtgaacgcggcagaaagttgttgctgcatttcaaaagaagaaaaacagcaattaggtagtacccgacgaacaattgaggccgtatttggagatataattagattaacgaaagaggccaaagattttgctttctcagcacataataacatgatcgaagcacaaaatataaaagatagaaatcctagtgttcacggggtaaaattttggcatgaaaagcttttaagcggggtaagaaaaatccatatgctatttgataaaataaaaaatgaggagaataaccttaaaaatataaaaaaaggtatggaaaaatgccttgacagaaaagatgctgaaatgtgccaagaactggcggatgaggcaaagaaatcaatagaattagcaaaaaactatagacaggaaattgggcaaacatatcggactgcttactcgcagcccgatttaggcattggagacttggccaataaattaaaagaaacaatgcgagaaaagcaaatagatttggaaaggccgagacctcaaacagaatttagagacgaatttattgcatataaaatataaaagaaaaaaaaataaaaaaatttaaaaagatgaattctaataaatcagagaaagctaacaccgttttagtggaagctgctaaaaaagagacagagagagcctggagggatgtagaggcattagcagaagaagttggtgattttgccaaatcttcgcgggaaacacttaatcgtgcaataaaatctagggaaaaagctcctaatgctaatggggttcgggaattgtatcttaaaatgtcagattcaatttgggaaatattcacaatccttgaccaaatcaatttggagtcagaaaaagccgaatctacgtggcgtgatttcgagagatgcaaaacttttgaccaggcaacaaagctcgaggaacaatcgcaaaattcattaattgaagcccgaagattacattttgagtcccgaagggtgcagagccaaatgttaaattatgaaaataggctccaaacaattgtttgggagcatatgggtatataagaacaaaaaataatgatataacaaaatggaaaattgtgccataattgagacatattgtcataaaaacttaaaatttggctttaaaaaacacaaaaccaaattttattttgtcaatccattttttgttaatgctgagcaaaaatttaaactaatactcacatcgctaatcgatgaaatttataaaaaggaacagggaaaatttaaaagcattttgaagctttcttttggttttgaatcattttattgccctcttaaatgccctagcgaaaacacagccgaggctttgttccaacatgtcctattaaaagaagaattatattcgcttttctatcctttggatgatgtcataacactagaagtaactataatcccagatgtcaacaatagaccaagaaattaattttataaaaaataaaattacgagaaattggaaaatttctggaaaaatacttaaacgatcaaataatctcgaaatttttgcaaataaactttttaaactggcgaaaaatttttatattttagcctttagtgccgctgaaatcgaaaatttatatttttcattcttagaaatgctcgataaaattcaaaaattaccaaattttattctgcatgaatatagaaaccaagccttagctatgcaaaaattggaaattggactcagagaaataaacatatttaaatgtcaagaagccgagaatttatcggacctttctttttcaaagatagatgaattcagaaaacgagtgcaaaattatcgatttgacacgagaatgttgtataataaaatcagagtaacagcactaaggcatttatttaaacccgaaaaggaaatatttctctcgccttttagaatttctccagggaaagaacttttttacagcatattccgtacagaacccaaaaaaagaaatttttaattctacattttacaattatatttagcacaaccaatcttgcgtaatttgaagatcatttacaaataatcacaccatattcttttttgaaaattttttaatttctctttagaaggaataagtaatttatttaaaaaaattttccttggttatgtgctcccaacagcgataaaaaagaaaaaaacaatcgttccgcctaatgttatttcggttgataaaaaactaatgattgtcaatgccctaaggcaatttgcgcaaaataaaaaattaattaacgaaaccataatataagtaagaataacatgtttattgaacaaaaaatgttgcggagggtgttattgtatatgaaaaagtaataaaaaaagtgaaaaaaagtaaaaaatttcatcataaatagctgggactagtcagaataaactatcacaaaaatggcatctttgagcgtttcacatcatggttcccatccaaatggtttttattttaatttattttttataaaagtttaataaaatagacatttgcacaaaaacattcgggccaattatccaaaatcatcaattcccaactgtccaatacttcgaagcgaaactcatcggccacgggtgattatttttgctttaatcatttaagttttaatattagcacatatgggatcggctttgcaagccgggaatatgcatcaaatgaattcattggttggagccacgactccatcggttgggactcgatgggggatattcaaggttagatcatttggggtaactgggatacaaattccgggcactattgttaaaataatttagggctggacgcctttggcggccctgaagtgctgaagtggcacacaatgggggctgaagatgtcattggcgctggttttctcgaagggcgcccattttttactctgaaccgggaacttttccgtaaaattttcacccgttttttaaattgaattttttcttaggcattgacgaggtctgcgtggaacccggccgctttgccgcatttccaactgtttcaatgattggcgaggggtcttccgcgggcgtgaatatgggacccatattcatgtttaatttgaaaaaattgttcatgccgtagccaaacaaaccaaaattttttaaaggcgcaaaaattgatgagcataatttccaagaattttgaggtacaatttttcaaaatttgctcccaaaaaaattggaaatcattgtgaattttttaattttaaacatttttctcgagtttttttcattttgtgtgtgagcaaaggatattccctatcccttgcccattagtaccggctacgattttaattatctgttgttgttgattatttttatttgtattgtaaaacattttgttaaaataaaaatatcaagtgtaattgaattatttaataattaggagggagggaaaagccaagtctgattcttccgtaccaaaatctgaatctaattattcaagaaattcattttaactgtggctcaaaaaatggtgaacactactttttccgagaaaaatgttataataattaaatttactcccaaaaattaatgattaatgaataaaaatgttattatgatcatgctgttagtcattaacagatctcatacatcaaagttttgctttgtggcggctgtccctcttttctctccacttctttttttctgcttttttttttcttcctcatttgtcggcgtagccacgttttctttcgacccttaaaaggcacaaaccattctgagtagtgttttaaaaattggaatgtttttgttataggaagcaaaacgccaaaaaatcagtctaaacttggatccgaatcaaaaaccatacttacccggcgttcaacttccgcgccaaaacttagatatgctcggcttctgatagacaaacgccaaaacctttgcaagctcggcatcccgcaccagtgccaaaacataaccaagctcggcattcggccgccaaaaaccaaaacccagcccagtttaggttttgaattttttaattccaaaacagcctaactcggcatcgaccgccaaaactttattttttcatgcacttattttttgtcgctcagaatggtttgtaccttcgcttcctcgtacggttcgctcgcttttccggctgtttcggttgaaccatttttgtattgctcgtttgctttctctcctccccctcctctttcttcctgctttttcccatcatttccctttttttctccatctccccctccaccatcctttgcaccattccctcccgaattccctccagcactgtcatcatcgtctccttcgcctcctcttcgcaaaatcactttgcactggacggcgccatcctcattatcatcatcatcatcatcatcatcgtccccgtcttcttcttccccatcctcttgtctctgtttttcttgtcgctctccttcgggtcgctctccttctggtagctctccttctggtcgatcttcttcttctggtcgctctccttctggtcgctcttgttctggtcgctctccttctggtcgctctccttctggtcgctcttgttctggtcgctcttcttctggccgctcttgttcttgtcgctcttgttctggtcgctctccttctggtcgctcttgttctggtcgctcttcttctggccgctcttgttcttgtcgctcttgttctggtcgctcttcttctggccgctcttgttcttgtcgctcttgttctggtcgttcttcttctggccgctcttgttcttgtcgctcttgttctggtcgctcttcttctggccgctcttgttcttgtcgctcttgttctggtcggtgttcttcttcttcttcttcttccccttgttcttctgcttcttcttcttgtcgatcttgttcttttttcttgcctagactttcgcaccaagctcgatcatagctatagatggcggatttggactgtgcaatgaggaaaacatgatttgttggttttttcactttgttcagggatggtcacagtaacaaagatattcagccccaagacataatttaatgaaaatttttgaaaaaatacggtctggattttggattttattttttaaaacttaaaataaaatagggtaaattaaaaaataccaaaacaacaatttcgagaacaccttcaaaaatggtatgaaaaaaggccttcatcccggaaggctaatcaccccacccccttccaaaatcctggtaccatcccctgctttctagctttataccagctcacaaatatccataacacccagcttttcatttttttgtgctttgataagcgtgctggccaggggggggatacgatccgaaaagaacgagtatccaacaagcaaaattttttaaaagatccggatcgctttgaaaaggggggaaaaaaaaaaggggttcaaaggggggggaaaaatttccaaaattttcccccctcaaaccaaaaaataaaaaaaaaaaaaattttcctttttttttttattttttgtgtgggcacaggggggctttttccccctcgtggtttccctcctcctaaaaaaaaaaaaaaaaccccccccccccccaaaagaaaatttttaaaaaaaaaaaaaaaaaaaaaaaaaaaaaggctttgttttttttttttttttttttttatttcttttttttttttttttttttatataaaaaaaaaaaaaaaaataaaaaaaaacaaccccctctttttgggaaaaaaaaaaaaattttttttttttttttttttttttttttttttttaaaaaaaaaaaaaaggcccttttttttttttttattttttttttaatttaaggccattttttttttaaaaaagaaaaattttttttaaattttttaaaagggaaaaaaaaaaaattttgggcaaaaaaaaaaaaaaatttttttaaaaaaattttttccctttttttttttccgcccaattttcccccttcccacccaaaatttccccccctttttttaaaaaattttttttttaaaattaaaaatttaaatttttggtaaaagtttcctttttattaaaaattaaaagtttcattttgcctttttttataaaagttgttaattttagtttattaggttcagttaaagtgtagacaagggaggcaacccgacccgaaccccgaagttttctcaccccgaacccgaccccgaatttttctcanccgcgggcatcactggtgtagacactcaaaagccatatcncaanttatgtgagcatatnaattaattccctcgtgtctgggtgtgtgctctacgaaaatttatcgcttttanaatccgaaatatggcaaaaatcacacaatgcataattttaacaattaaaattttcttttaggatccaacaatcaaagaacggccaaccgtaagattgaaagttgcactttctcaaataagcataaattgttcttaaagttggttcgcgacccagctggaggaacggcatgtgaaaatcagaaaatagcttacgaagtgaaaaaccaggctttctgcatttggtctgaaggattaaaagcttctgactgttgcagtgaaaattacgctcttgccgatgttgatccgagatatcgtgatcataaaatccaagtcagccggcctattttagttcgatctaataacatgacaatttttcggacagaatggaaaaatcgctttataaacgaaaaattcaatta

SEQ ID NO: 1757 - DNA, 1549 bp, Heterodera glycines
ttaataccagctcacaaatatccaataacacccagcctttcatttttttgtgctttgataggcgtggctgccagggggtgatcagatccgaaagaacggagtatcgaacaaggcaaaatttatgataggatcggcatcgcttgcaagtgtgtgaataggaagtgcgttcaatgtgggtgaattcgcaagttttcccatcgtacatcagatcatacagaagatgatcttcactttctaatttgatttgggtccaatgcctatgctcacatgcttccaccttaaatagaacaaaccccccccaaaaatgcttcaaagcaaaaaaaatctaccttttttgatttatgcacttttacaacacttggtcctgtgcggtaggccaattgttttttcattgggagaatgacaatgggtgagctaaaaagaacgcaaaagatcactgaacaaaaacaaaaaaaaaagttgcaaaattcttcatatttatttttagtgtgctgaaagtgaaaaaacccggtaaaatccaaaaaaatatatacactatgcaagaaagcggcaataatagtttttcctaaaaatagcaagaattatgtaaaaaacgaaaaataaaaacaacggctaaataatcttaaagattgatcgttataaaatatttacgtttttcttgtaaaaatttaccaaaaccgtttcaaaaaacgaaatgcctaccaataaagagagtgctgagaaaaaaacagctctcactttggcgtactatctctgtttttcgacaaaaaaccgaatttacttcactctatagaacttttttcccactaaattttgcacaccgacacagaaaaatattctgcatcgtatattctataaacaatgcaaatctttttggaactgagaggccaaaactgaaacggggtgtaaaatatatgctcaaaaaaaccaaaagattatgcttaaaaatttttggaacattattaattagatatcttatcaaaaattgccaaaaatacccctgaaaatttgaactaccggcgacggaaatccgggaattgatcggcgcacttgagcgaaagtaagcagcaaatgatgctaaaaaaacaaaatttatttgtggaaaatttctgaaatttttcttaaatttatattttgaaatttttttttaatttacgagaaaagagtgccggaagcgaaattggaaagaatagaaaaaaccgccgctaaacaaagaaattattaaattaaaaataaacgaaaaaaattagtgaaaagtctaatatttaatgaaaaaatttaatattatttgtaattgaaaattgatttcaaactacaaaaaaatataattaatcaatgccaattttaagggtttatttttaaatcaaattgttgctgaattggggagttttccttatgaacgaatcgattcttacgcaacttttgggtggaaaaggaagggcagtcgaagcgtaaaagacatttgcgcaaaggaagggagttgtgaatcggctggcttggaaatgaagggcgatgggaggaaaagaaaaggcggggggggggattttgg

SEQ ID NO: 1758 - DNA, 1553 bp, Heterodera glycines
agtgaattatgacgaaatgcaccaattgttgaccatcccgatgccatttattgaacactttctgcaccgacttggcacatttgttgaaaggtcaccagttgggtgattaattaattgatggtcaccaattgtcttaggacaattaaaaaagacgggggacgaggccccgcccacaatataagaaacttctcaatttttttttgaaaaagaaaattataaattcgattacctaattttcttcttaccaatgaattgatcgaaaattttggaaagaattggacttttcagggatttgggaattgagttttgtacaaaactaaatttattggcttcatagaacatgaaattctgaataattgggtaaaattaaactggaacaatttaattcaaattgagatcagttttgtgaaaaaaaaaatttaaatatatttaaagaataaataaaatttattttaaagaaatttggatgaaagcgttaaaacagccgactgggactttataaaaacaattcaattggttgtttcgatggaaaatgatggacaaaaattagtggcacaaaagcggcaaaaggctattgggccggatgttagcattgactgtttcaaattgctctactcattggccattcgtttgtgcttgcaaattggccaaaacgaagttgcgcaaaaatatttgccaacattttcatttgcatggaattttaccgacaaaagggcgacgaaattgtatgtttgtacataattttaaaaaaattgtccaattatatattcaacccaaataaaataaagattgaaaaataatattaaaaagaaatttgtgggttggccttttattatttctttaaaaaatttgtttaatccgaaatttgcctggtgttaaactcaacggattacctattacgattgttgaaattttgaggcctaagttatctagacctaaaattttcaaattacataccaaaatactgttgtgagtataagacgtctccgtcgctatagtttattcataaaaattaaacaattcaattttttctaatttagttatacaaaatcgaatttcttcgaatacaaaatgaatattgcaaatgaaatggttgaaataaatttgccaaattgggatttgccatattttgtgtatttggacaatgaaaaagagtttaaagtggaaaatgttaaaggtaatttgatatttgtacagctaattaataatgaatagcagagcaccaaaattggcaaaacgcaataaaaaaattaaattaatttttgataaatttatgtttttatattttttattattaaatatatattttataaaaaaggaaaaaccttaaaaagtgcaattttttgcgcctttttcttggctgatttattagtggctaatgatgaaattaatttgatttttttttattattaattattatttttttaaaattcaaacagataattttgcttttttgctttatttgtccaacaacaattcaccgacaacatatgaaattgtgaagatggcaaaaatactgtacgaaagttatggtgaccatattttcataagcc

SEQ ID NO: 1759 - DNA, 1073 bp, Heterodera glycines
  unsure (1)..(1073): unsure at all n locations
aaaaacaatgcactgatgaacggtcgtattttacattaattaaaattgggttggcaattaaaaatttttaaaccaatgcattaaaaaaagttacattttttgattatgttaatttttcgaaatattctcttgttttcaaaagtcacagaattgttttgaagattagcatccaaactgccaaccacaagaaaattttttttttaagttttatgaattacacaattagaatttaagtcataaaaaattcactaagtttaaaaaaagctgattttcttattctttcgtagttgtctgaatgactagaaaattttcagataaataccttaatataagggctaattacctgctaaatttgataaaattttcatacattaaaaacttttacaaaaatccatatttttgaaaaattttcatataagaatttgatttttcaagttttataagcatgcggattcttgtaaaaaaatttttatcgtgattaagaaagtcatcttttacaaacatcgcaacaagctaatgatttaaattcccttcccttgtcattaataccattttgccatttagaataaaaggtgaaataaccaaaaattttggtgaaaatatagtaaattttgcccaaatgataaaactcgacttcaatcttaacaatggtgagtcagcagcagtcagttctacgtattgcataatatttggcatttcaaaattcaattttattacaaatacttaaaatagatgactcattaattaagttctccatgtctcatatacggtattaggaggagggttattatttttcgagtctatcaaatctgtttgttattttctaaaagttctctatagcctgccaaattaaaaaacgttgtttttcaatttatgtttaaaaatgtcgaaaaatctagttttgttaaattttgtctaaaattttccatatggtgattttttgaatgacgcctgatttttgatggtttttgaataacgaccgagcaccataaaattaatttaaaagaaataaattatgttttgttattatgttctatttcttttcttttttccanaattttgttttttaatta

SEQ ID NO: 1760 - DNA, 3919 bp, Heterodera glycines
  unsure (1)..(3919): unsure at all n locations
ggaatatgtttcgctgatacannccagaatttagaaaatagtactagacttcgtagagtgtagtcgagagatgttntantaagaaatattgtccggaagttagccagaaagaatagagcatcatctaggattaactgcagtgcatgattgtggagatgaccatgccgaagtggatggtcgaatgacattttgacgcagcaactccttgacttgacgctctatttcgggttgaagtgcgacaggataacgatagggtctctgttggaccggccgtgcgccatcgattaggtcgatgcggtgtatcgtttgtcctttgaagagtccgacttctccaggtttcacaaaagcgttctcgttctgtcggatgatgtttttcagcttttcaattccgtctcgactcagaatggtgtcgtttaatcgaattctttccagtatgggtgcgactgcttcttccttctttggaaattccaaagtctggtccgtccagtccgcctctggcgaaattttgtcactttctaatttgaatttcatccactcctcgtcagtcattatcatttccgggttttctttctcatcttccttcagtgcattaatttcagtgccatcggctattgtttccagccacgcaagtcgcgatccctcatacacttttattacgctgtttccgaaattaagtaatcgtagtggcacaattcgcgttgagcctggacttgttagacatttcccgactcgcagcgggaaataatcgtgctctcgctcaacagtgatgaaaacttcgtctggtcccaaacttcggttaatttttccccaaacgagcgaatcagacagcggtggcaatgtttgggtctcaataagttgtacttcaatcggttgcttctcgatgctgacagcggcgatcattggtagttgcgtgtttccaacacgtacgagtcctcttttgaagttcaatccaatttcttcttcgccttgttcactgatgaaatccatcaaatccgttccaattatggcagtgcatggacagctatcgtcctcactgacgagaattgggaatttgccttcaaaatctcccagttttatgttggcgagtgccgagccgataaaacgaatgggagttgagttcgctgctcttgcttgtggatagtccccttttcggaccatcataaagcatctttgtgccgttgagtggccaatgtacgtgatgtcggctcctgtgtcgaataaggccttcgttttcactccattcatgaaaaaattgacgtaacatcttttcttttttcgtcttgtttgttcaatttggcaaatgttgggaagataattgagcacgtatgctttttggtcgagtaaaggttcctctggtggtgctgatggcttggctcggtcttggagttcgacttccatcacgatcggatatcgaacttgttcggccaatcttcttccggaattaaaacaattcattatggtgttgagcagagattgtagtaaatgaattggcgccaaaaacagagtggaataaattttgattttccacaaaagaactgtgcatccaatcacgattaaaataatagcgattgtgattaggatccatttgatgtatttgatgattccaattgggtcttccatccatgcctttcctttttcaatcgtttcttctgccttttttctgaaactttcgccctctttttgcatcttttccaccagtatttcgccgatggaaaaaatgtctgtgaccgtgcttccgtgaatctcggtctgattaatgtcaactgtccctatgtcagggaagttcaattcaggccgagtgatccgtctcgtcaattccttgagattctgttccaggcgtgcctgttcagattcaaaaattgatccgcgtgtgaagaaaattaatggattttgaaaatttgtctgttgttttgagacaaatcgatgttttgaattggcttgttgaagttcagtgtcattgttgttgaagtcagctgcccaagggttgttaccctgctcatcacagtgagtttcagtcccgttatagctcaagtcgcgcgtccctggcttgacgaaaagtgtgcgccttgccaccagcacgggtagctcgcgaaagcatttttttccaattttctgatcccatagcacatcctcagccttcagttgtttgcaaagagcaatggaccatttttggtcaagttgtgatgatctggtccaaaatgccgttatgtcatctcttttgtagagagagcgggctgcgtcttccggcatctgacgagctaatgcctttgcgatggaaagtgcattatttcgttcgtgacagtcgctcatccatttctctcgcgcattttggatgtttgtccgatgtgtcttccatcccaaataattaagacgagaattttcgtggtcaagattttcttccttccaaagtttttctgattcatcatcatccgggatttccctttttgtaacgacagtggtgggactttcttcatttggttcatttgggagaacaaatggagttggtgtcacttttatcgttggagaaattaaaatgccttcctcatcagcttcttcggccaatcctctaagctcatcaagaatggaatgatacgacgcagtggtcggagcggtgtcatccgcactctttgtggtgtgaggagaaacggtgtttggtgtagccgtggtagagattaatttagttggcgtttgaatagtggttgtcgggattgtcgttgttggtttgattataatagggctatgaatggttgaagtcgggcggattgttgtaggaatattagtagtagtaattggtcgaattgtcggtggaatatgagtagtagcaatcgggcgggttgtgggtggaatatgtgtagtagttatagggcgaatagtcggcggaatattagtcgtagcgattgggcgaatcgtcggaggaatattagtcgtagtaattgggcgaatcgtcggaggaatattagtggtagcgattgggcgaatcgtcggaggaatattagtcgtagtaattgggcgaatcgtcggaggaatattagtggtagcgattgggcggatcgtcggaggaatatgtgtcgttgtgattgggcgggttgtcggtggagtatgagtggcgattgtgggaattatcgatggaatatgtgttgtagaaactggacgaattgtcggtggaatattagtggtagtaatagttgggcgggttgtcatggcgatttcagcaatttggcctcttcgcaaattcggccttcttgttggttcaattctcggcacatttggctttctttgtccaggttttagactcacggtctctcgtctttggcgcgctcgcttggttgagtttactttaccaatgacatgcacaaaaacattgttgtccgttttcaatgcatcgtcgggcactccgaacaccggaaattttctttcctgatttctgcttatcggaaaagtgtattggagctcatccacgatcactgccttttttggccaaatttccgtgattactgggccaatcacaaaatgtgaatgccaaaattcatccgatggaattttccacatgagcaattccacagctcctggcagtctgatccagctgccgtcttcccccaggcttttatcaacttttaaagagtctccccacgaagttatcagtcttttcccatccaaaatccctgcttttccttcttcaatcactgtttgcacattgttgaaacaattcacgccgtaccatccgtactcttttcgaattggcgccaaactttcccatcttgtctcgctcactctgttcatcggtgaatggtgtattgaggcctggcagtcctcgactgnngcttcgncttctttttaaggtcnggagntccngagtcatgnttcggngancccttaaagggacatgtgactgttgtcacattccagcatttaaatgcgg

SEQ ID NO: 1761 - DNA, 3518 bp, Heterodera glycines
  unsure (1)..(3518): unsure at all n locations
ccgtcagcgggtaagaccatcgncgcccccgatgtcatcagacaaataaatggaaattcacttcgttcacgcgccagccagtccgtcctcgantggcatcacttcctccgcgtcctctgtttcggacctgttggtccgcgcccntcgtggccaattttgattttggttgaagttcggttgaaaattgccattgttgtttgttccttggaagttgttgccaagcggtgtgaagttagcgccgcgcggattaaatcctcctcggtatgtgttgagtcccctggggtatcctgtgaatccccttggcgtgaaattccctcggcgaattgtccgaaattcgggattgcctctccaaaaattagattgattttgtccttcggcgttgtttcctctccaagaattgctttgattttgccattctcgttgatctcgtcctggattctctcggctcctttgttgttcacgaatttcatttaattcggttcgcactgcattaacttcggctaaagcaacttcggcttttgcatcttgtgtatttttccacatgtcatcggccaaatttccttgaacttgttccacacgtcttgcctgggccactgcttcctcgagcgtttgcggttcttccatgtacatcactctttccttcagtcgtggtgccatatttgcccgaaaaaagtctcgcgcaatttccgaacggaattgtcgaagtcgggcttcgtttgcatgtttaacatcgttttccaaagcaccgagcaccaaatttccaaagtccatctcgagagaattgtcgggataagcacgtaagacgaggttccggatcgcttgcgcgaattcttccagcgattctccagtctgttgtttccgttgtgccaatttctgtcttgctgtcagactcggagacatttgtttcaacttatcagccatggcatcaattagacttcgccaattatctttaatatccggttcgatgctctcgtaaattgcccttgccgatcctctgaggaacagcgggagaacttgcacacatcgcgcgggtgtccagttgtgggcggtcgcgattaaattaaaggacttcaaataatcctgcaaatctgtcgtcccgtcaaatgtggtcggcatcgggagcccagagcgagttccaccattttcacgcatctcttgctcgagagtcacaattcgacgccgcagggcgtctaaatccatattacgcaactgccttttttgatggatgagccaaagccttttatccctttcggtttgtccttcgtttagtccttcttcctctaaaggattcggtcttctccgcgtgtcggccgtttttgatggaattgtcggaatatgtttcgctgattaacaccagaatttagaaaatagtactagacttcgtagagtgtagtcgagagatgttttattaagaaataatttgtcgaagttcgccagaaagaatagaaaatattgtaggattaactgcagttgatgattgagaattttaagatgagtgaatgaattaaagaatttgtcgttgatcaggcgtaataaaatagtgatgaaacaattggtcgtcggtgattggatgatttgccaatgtgatcgaaatgtgatcgtctaccgtccctctttgatgtgcatttagtgtccattttcgttccctccgaaagcaattaattaattgtccgttttccccgttttcccaattttttcttcgtttttcccgtcagttgttgcctcatttgattcttcgaattcgttttggcaattttgtttcattatttgttagtcttttctcgtgatttgccaaattgtgtttattttcgtcttgtcccgggactggcatttgttagctgaaatttcttttccccaaccctttttcccctgtgattaattaattaatgagctcagatcaaaaactccaaacgtccagggatggggccctgcctggtcgtaggagggggaagggaattgaggcagctgtttaggcaataggcaacaaaattcacaaaatggcgggatgggcaaaacaaggagtgggagggatgggacttgtggtacgggtatacggtagcgacagtaggcaaatgagacaggccaaagttttccttctgccggccaaaagaaaaacatgggagggaaaaaagagagagaaataagaaaagagagagagaaaaagagaaaaattaaattgttattaactaaagcaagttaaacaattaagacatcgaaagtcttgaactgtggcgtgtatcgtgtgcgggccgaaactgtagccgccgttgctttggattcgaagagtgggagaatcccgttttttgtgccgactccatcccgttttgtaccagcggagtggcatggccgatttggatgatcgcttcgtcctttgggctcaattttgtccttattgtccttgtccttgtccatttggctgtggtccgtgtccgccgagtctttccatttgcctcatttggggtctgtgaccaatgtcagcgccgtgttagtgttttgtccagtcgtattgtctcctcaatgtaatttcgggttgatcgttggcacggccttaacacatcacttgttaaaatactttatttgttaatttaataaacaaaattattcaatatttactattcaaagcattttcattaatattactattaattttggttattggttaaacattttagtaatgataaataggaaagaaagaaaaaaaatggtgggagtgattaataaaagaatacaggaaaatcaaacaaaaaaaatataatttttaatgcgaaaaaatagaaattggagggggaaaagtaagaaattgcaaaattaaatcagaaatgtgatgggagaataaatagtataattgcaagggaaattgaaataatttttaattaaatttaattaattagtaatgaaggggggggggggggggtaaaagaaaagcgccgctttgggaagtttaattgtactccccacaaggtccaccataaaatgggtgcgcgcatgaatccgttgggccctgggccaatgccaggggcattggcccaaagcgcggattccccaattgaaggctgttatcaattaacaattggtttattttgcgttgaatgaaaatgtgaggaaaaagttaagaaggcaacaattgatcagatccccgatcgcaaatcccaacagactgatcactccgatctctccccccaaattttatacgggtaacaggtgggcgggtcggtgaaaaaggaaaggccaacaaacagaaattggggtgactggcgacagagaaaaagaaatggtgatagacataggggaaaagaagtcaggaaaaagggaagacataacattcccccacacctgggaaagccgtgccctcacggcttaagctatgcctgggcagaagggaggggaacgaaagagaacatcaaatagagagaagatgagataaagagggagagaaagaaaaagattgtttgaaaatgagaggaagaaagacgatgagagtgagcggtgaaaagagtgttgtcgctgcttttgtgtac

SEQ ID NO: 1762 - DNA, 2705 bp, Heterodera glycines
ctgctgttgttgctgctgaccagtcggatgtgattggtgggcaggggtttccgttgtcgagaaaaaaagggggggggcgagagtcgtgagtgggaaagggtcgtccggcaaacgagagtgggataatgagagagaattatgtgaggaatgggtatgaaagtgattagctaataaattggcacataaatagtgaggcaaattgtgattaattgattatgagttaattgtaaatgtattaagaggggccgagaattgaattatgtcccgggcaatttatttacttatttatttgaaaattgattaaaaatatttttgtatttttgtaaaattttttttttttttttttttaacaaattgcccttacataaaactgcttgaacagcccatccccagattctcttccaccgtctctttctcgtcctttttcgttttctgtccgccttcgtaggggtacagtaagtcggccaattctgacagtcggtcggcggcctccaacagcagcttcctgattttgtagattgtctcctcgggcttttccagggccagtgctcgcttcaggtaggaattgttttttcgaatcgggctcctctccaattgtctttggcccggggttggtgttggccttcttcctcttggggcttcctccgtggcgctttctcttcgtctgagccccagcccttctggcggtatgcacggtttctcatgcaccgcctgcaccgccgacttcagagtgtttctgaacagccgtttcccgctcgtcccgaggctgcttctttcgcggtcacttttttcttctctcggtttgggtgccgagtctaaatcgctttggcattcgaagcgtgccactgtgctggaatagaaaggcatccgatcctttggcggcgccggggggttttcgaatgcctcgcgctctctttccaacgccgctatgtccttttcgcccctttttccatcttcttccctatttaattttgccgtcaatttttcgattttttcccttatttccctcttttttgcatcttcttctgcctgcttcacaatttctcttatttctctgtgtacttcctccattttttccatgttctgttttttctccttttcctcttcggttaagcgcctctttttgattcctctggcaatcattgttttttctcctttttcctccgctcttttttccacattttgttgttgcttctcagacttctttttttcttcttcgtccttttttgccttctcttctgcttccttctgtgctttttcgtccgcttccttcgccgccttctcttccgcttccttccgtgctttttcttccgcttccttccgcgcctcttcttccaattccttccttgctgcctcttccgcttccttcctcgcctcattttccgcttctttcctcgctttttcttccggcgtggctgccggacgtcggagtgcccgtttccattcttctttttcggctttggcctttgctttggccttctcttctgcttcctttcgcttggcctcagacttcgccttcatttgctctttttcctcttttttcctttcttgtttggccttctccgaacgtgctcttcgttcctttatctgttcttcctcttcctcttccgcctggatcttagccttcgcgtccatcattaactgtatttgccgatcaatttcggccaatcggtaatccttcttatacatctcgacttggtccgggtgaatcacttggacttgatccactgagaatggcgtgaggatcggcgcataggggcgaggttcggatttgttgtcacgtttttgttgttgttgttgttgttcgtcggattctccttccgagtcagagtcggaagaaattaaaatggcaggcggtgttggagacgaattttttgatgtagaatgatttgagtgggtaagaagggagtcgaatcgagacattttttgctgtaaatttgtcgaattgattgtgtgagtgtgatggctgattgaatgaaatatccgattaaaagatgaaaatgattgaatattttggggctcgatcgtctcaaaaaaggggttaaatggatttgtttgtcgcgcaggggtgtgatcgcgcagggtgatccaaacatccggtattattggttgtgcgaaaatttggttttgttcatcaataaattgttcgtgataaaatgctttcccgtcttccatcgttaaatttcccgaattttttagaaattctcgaactcccgttccaaaaaacatttcgtcccatccgttggaaattcggagtttgaaattttcatcaaaaatccacattatcacgtatttgtcgtcatcttcaaatatttcccagtcatttttgattaaattttcggaaatggtggaagtttcgggaaaatttgaagtgctgagataagcgaaaaaatttgtgccatccaatcggatctcaatttgatgtggtgtttccatttcttccttgtcttttggttggtccagtggattcccttcacttatacatgccacaattgtttccccatcatgcattacttcgtccgattcttccaattttgaatctcccagctttttgttctcatttttatgttttggtttctcattctccaatgcttcagtgtcctgttccgcttcttcgtttgtgaagtatggcttgcattggtccatatgtacagtgaatggttgtccatcgggttcaagttcaaggatttgcaatttggcttctc

SEQ ID NO: 1763 - DNA, 10519 bp, Heterodera glycines
  unsure (1)..(10519): unsure at all n locations
aatttttggtccattcttagggttgtattttgaaaaaaaatatgtcgattttagagatgtattttctgaagcgatcggttttaggggtatatttttcgtttttattgcattttgtttaatatgtttgggaaacgccaaaatacgtaaaatatttttccaaatagttttgagttttaggttctaaaaatagtaacatagaaaatatgttctaaaaacacgaaaagtagcttaacaacgaccgaaaaaaacatattttcatgcttttaagcctattggtaactcaggaaaaaatagataaaaagctaaaaatatcatccctagcgataatcaaataaaaaattttttcattccaaatatcaattttttttaaaagatggaaatatttaaatgtaatttaattatgaatatttaaatataaagcaaaagttaactcaagtaaaaaatatataattcaagtttaaaaaatgttaaatgcttaaaatagataatctgattttttacatattaatgtttcaagaaataaggaaaaatttctaatattcaaattatttgaatttagtaattggtgttttagattttcggaataaaaatacccggcacttcttttcgtcggggagtccttcttcaacaaattttttcaatgccattcggctcaaaacgtagccagctccgccgctcatatagccctaatcgattttaaatttattaattattattaatttcatttaattgcctgttcaacaaagggtttgaatttgcacccataataaatgggttcttctggcgaatgagccatcagaaggaagcgcaaattctcaacaatcacaaaagtgtcgtcgtcagtcttgagaaaccaatcaaagtcattcttaaattaccaatttattatttttaataaaaatggttggtaattaaatttactaaataatggtcatatgcgtatttaaaggctgcctttgttttgccccataagtgattccttaaaaggtttaaaatataaattatttactaaagaaattaacaatttttaataattcgtttttaataatcaattaaaaattagcagtaaggaaaaaatattatattttaggttaaaaaaagttatataaaaaatatgactttaaaaataaaaataatttaagtttaaaataaagtaaaatttttttatttaaaattgatgtaaaattaacattaaattcaaataaatgtaataaagattttttaaaaggcttttactctcagaaagcgacccaatttctttgaaatttttttcaagtcagttcggaaagttttctgtccaattaaaccaaggctgaatttaatataaattgcatctcaagtgagcgccaagaatggcgtttgttttggaggcttgttatgacttgtgttgtcttcagataaaatatttcaaaaaaaatttatttgctgggatgtctttccgagcggtcaatttcccgtagatcaattgccttatctaccaccatcagatgaggactaccaacgaggggcttccacaattaaaaccaaattatcattcatctcctcatcaatgtggttgaaatgagatgctttaaggcggaatatttgattttatgattgatgaagtaatcaagaattttcatcctcaaattcaaagggattatatccaagggagagggacaaacttcgcttccaatcagtttcgtatgaatcaagaatgacccataacagaatgtgaggatgatgtctccccaagttgacaaaccatttctagcacactgataaagcctcaattctcttaaagagaaacagagagaagacaaacttgttccattagtgctgtcgaaactcgaaaatcaaaatttgattttagcattaaaataatgcaaaaagggcgaaaggggaatggtgtgacggctctttttccctccagttgtttgttcatttttaatccctttctccgcccgttccacatcctgttcctgcccgaaattcacatgtttctctccgccgaaaatttgccccacttttttatcccgcgatcacaactgtgcgaaattgtccgtccattctctcccctataaaaaatcatttgtttgccaaatttccccctccaagtacgttgctccctcaatttgtagtgatcggcccatattatttgtaaatttaacaaattcacttttggctccattttttcactttgtccatttcctatttaaatggccccaaactgctcccaattcacattggtaggaagcataactatatgatctgttattatggagtgatccaactgtgatcactcatcaaccgacaagggaaggaaaaactgttcagaagaacagtccatcaaacaaagagaagaacttcctcgttcaaaaaacttttattcaaatcagacacattctcttgagtagagacgaaattatctgaaagcttatttcaacgaaatcaacctatgggctgacagatgcgacaaagaagacacatgcttttttaaccaccgtcatgccttggtcaaactaaagagcgacaattaaatatgatcggaaaaagaggagcattccccaaatgttatacagtgcccatgttgcgaacaatggcttttattataacgttccaccttcttaagtggtgaacaggactgctaatccaacaaattaatgcaacgagtgtaaactcttttgcacaagtaaagatgttttgataaagattccgaatgaaactcggaaaatagttgggtctctctacctttcgccgggcctagcagtttttgattcaaaattggtatcattcgaaagctctacgtgtttataagctatcattatgcagaagctaaacgattaatcatctcaccaaaaacttatgatttataagaattaaaaattcaagaaaaagctattttttgtaaactataaatcataactttttggtgagatgattaatcgcttagcttctgcttaatgatagcttctaaacacgtagagctttcgaattataccaattttcaggaaattaactgacgaacaaaaagttatggccattcccatttgaaattgtacgaaacgccattgtacgaactgccatgacaccactatatcatcattacagtgacaatacagtccagaacagttgtacaaaaacatctttgccgtttttggttaattttcaatttaacaaaacctttttaaattgtcatattttcatggaattcgtttggtttgtgaatttctttccggtaagcaaatcatctcgccctcgcatctttcactccgtcagtgatcgatcaaattccccgggttcaattcggttgttcccattgctgtccatctgggaaaaccaggccatgtttttggccaaatcgtcagctgaagtgccattctttgttttaaccaaaaatgcgatggcctcttctggcgaaattccggcatttttgtccgcatcgatctgtttataaatatggaattgatgtgagtgagtaaatcactcttaattatgctaattaccatttcaaagtgcgcgttaactttttccatcggttccaatgacgaaagagacaactcatttctactgatcgggattctaattaatattattattagatcattaaaacggattctcattgccaaatactgtaaagtcttgaaatggtctgccgatttctgcgagcatcccccttccccgtccttaatgcaatttttgcatccgtccggacacgtcgcggcgtactgtgggtcgcaacagtagtagcagctgcaccgcacctccaccacgtcgcatttctgcgatgtgtagaggtacacacacccaacacaattgcgcccgaaaatgttgcactttgggtggtgctcttgacgacacctaaacacaaaagaaaaagcaacgtgcatctatctatccattattatattttgactaattattagggatattagatttttaaatattagggcgctatctttcccagattaaaaattttggaattttcgtaaaaaaacaagctcagaaatttgttgcatgatggcactaattgctttgaatatttttgcacgggaccgggactggtacttaaaaaaaggtacaaatgagtaccaagtcccggttttcccagctaaaaagtcccggtttttcaacccgaaaagtcccgatcccggtttttgtctaaattcccgattccactcaaatttttaccaacattatacacatacaattataagcagtattggttaagtattttatcaaattaaaaatgttactctaaaaagccaaaaaaggcggagtaactgcagcatccgttcggataaaccattgcgcggcatggaaaagtctgtgcaaattcagagttaattcacatttaaattcggattaattactttatcgacgaaattcaaaagaaaaatgactccgacgaataacaaagaaatggaaaaattcattttaatacaggaaaaaataatttatattatattaaattatggttaacgcatttataaatttaaaaaatatatataaaaggcgcacaaattaaatgctcagaaaacatgtattttttccttttaataaattattcaaagacgaatatcaaaaaatgcttaactataaaattagatgaaagctatgaaataaacaaaattaattcaatgcgggaaaaaagcataaaataacattttgccgaagaattttggaattttaatgattttaggcaaaaatattttaatgttttgttttgttaatataaaatttgaaaaaatgtaattttcttttgtcatttaattaccatttcatttatattatagccgatcagcttttatgtttaatatgtttaactttagtaagaaagatgccacaaaataacaaaaattaaatgatgtttgtagtgttattttattgattaaaattaaaattaatttcttttatttattttcgcaaattttgcatttcatcaaattacttccaatttcgtgaccttaagctcgatttgattttcttttctaaatggtgaccaggacgagaaaagcgggaattcccgttccgcctatttcgagcagtaactgttggcatttgattaagcaattttaatatgctaatgagtcgtcacgtttcccgggcaaccgatggacaaaaagcagaagaatcggcgtaaaaacaacagatgcaatttcataaaagtgaaagaaaatattacattctttaagtttttattaaaatatttttagggttcctttttcttcaaaatgtcaattcacacgaaattttctgaaaatgcaacagaaaatttggagacgaattcgcacatcggcacgtcattgtcggcactgaagaaaagcgaatggaagccaagacacatgcacgaaattgtcggagtcaccttggtaagtgggaaggcattagaagatgattggacaattttccttatgaacaaagctttaaggcttcattttacgctgaatggcttcgtttttaagttttatttgatttacatattttccacgaataaatattaatttatgcatcaattattataatttaactcctattttttgcattttgtgcatatttacgaaaaaaataaaacaatttaaataatatttttcattcttctaacgaaaaataaaattgaagattgtgaatggtgaattttgtggctttgttttggcaataaaaaggctcaattaaacagtctatcccaactcaaaataacttcaacaaaaatgcaaaggttatccaccaatggatgaaagcgaagcagcgaatgttcgagcgacaaagggacgaatcgtcggagttggccattggcgaagtgaacgcgtcgcttgtgtttgaaccaatggtaccaacccattgaggcatttacactaattaagcacattaattcatgctggtaataagcaattaaatcacgacgccttttaggcagtgacaatggaccgactccgtgccattgaacagcagcgcaaccaaacaatgccatcagaaacagaccatcagcaggatcacgcagcacaggcagcagcagaacatccaccagcggcagcagcagagcagatggggaagaaaaacagcgtaagtgccacgggaaagaatttgcggaacggaagtgccggggcgacaattgaaaatggggggcaccacggaacagcgacggcacaaacgcaagggacgacggcacaagtcacaacttccgtttgtcaatgggtgcgcaaactcagaacagaacgccaaggttgggccggtaaagttgggtgagtttaagttcaatttaattcaacaaccttatttatatcataattaacgaaagatcttgcaataactctctactttaaatcccctcagtgattggaaagcaattaatgtgccacaaatttttgtggcacattaacgactcagatttctgttctttcttggctttttattttctgtgtttgccaatcaacagaatgcttcttcgaacggcggttgacccgtccggtcttttctattgctattggactttgcttgtctacgcggtgttcctttacaacgccgtggtgagcgttctgttcgtttttgacgacactcaaagcgaaccgcgaacattcaccgcatggctttcgcttaatggtccggacatttcttcaaattgctttgctcttttattaaaaatataaatttattcaaaatgtaattttattttttagcattcggtgacttcgtaaatttgtgcgacattttcttcaattcaagactttgtaattatttttaaaattattttaccgatttagttcacactttttaaatatttcagcttacatggaagatgggatgacaataggcaatttaaagcgtttagccaaacgttattttcgaaggtatttcgatgttttttacaaatgtattattagtctcgagaaattttctcggaattatatttaagtctcgggattaatcatctcacatcactaaatgcattaattacgtacattttctcatttatttgcccatttccgtggccactttttgttcgatctcttcgctttggtccccaccgactttttgctgctgttatatccaaatgtgtccttagtgcgcttcaacagaatggccaaatgttaccgggccgtgcaattagtgcaagtttgtgttgttatttgttcaaaaatgcctcaattcacggcattttcactcagatgacaaatgtgaggacaaattacccaaatgcctttcgaattttgcatattctcgtcgtttgtacggtaaaataatccaattttttttgttctttttataatttgttcctttttacgattcttttccattggaatgctgctgtgtacttcaaaatttcgctgatcaacggaatattctgtataaaaaaaaaaaaataaagaaatgttttttttaattattcgaaaatttagcgttggatttggctgcttgggaattcaattacgtaaaaaatcaggtcactcaatgctttagcatcattagatgcatcaaaaataaaggtgatgcccttaaggacccagtttgggctgattgcattacggtattaatgagaacggaggacggtgagaacaaatgcctgtttaacgagacgaacagaggcgacccggacattgaacggataaattacacgcccgaattggccgaattttggcaaaacaggtagcataattaacaaatcatgaaagtatttggagtgtcttgggggaaacggaaaacaattgcatgtaaatcaattgtgtacggcattgcttttaaaattgtaattccgaaaaggggtaaaaaaagcatttccggcatttcgttattaaaaatgatcagagatggccttgcccacaggtccacgaaggtgccgttctccaacttttccaagcagtactccctgtccttctattggtcctcgctgactctgaccacgtcgggtcagcagccgtaccccacggcggcgatgcacaattttctagaaatattcgacacaattatcggtgtgctcgtcttcgcagtcattgtcggcagtgtgggcaacgcggtcggtcaccagtaaagacaattggccggtcaaaaacaaaacaaaacccaagaccaaaattaaaagaatttgaccaaagactgttgccggcccaagagtttcctaaaatcttgatgggcatccaaaaatccaagtttattttatcaaatttattgttcttgtttcaaacaagcatgtttgtggcgatttaatctctattttttcgggttttattgcatatttgccattttttaggattcttttcagattttagggtttagtgtctaatttgtaattttaggtgtctacgatgaatttgactcgttctgagcttcaacagttgaatgatggcatcaaattttacatgaattaccgtaacgtaaaagacgcaatgcaaaagcgcgtgttggactgtatccattacatccgacggcacgcgcaaatgcatgacgaaagggtggacaaatcattaagacaaatttgaaaattaaacatgaaattaatgaaacccaggccatccttggctccattttgcccgcccgactgcgcggcgaattggccgttcatcttcactttgaaaccattgtaaaatcacccgaaattgcttacaacaatgaatggtttgaatgattcccttccaattaagagccgagtgcaattgtttgcccattgtgagacttcgcttctctacgaattggtcttacgcttaaaaatgcaaatggtaattaaatcctaccggattataaaattgacataaaattaatcctgaatatcagcaaaacaaaattcaaagattcgtgataaggtcggggtttaattgattgtcagaattgttaatggctaagtccttctgcatttttctggtcgagctcggtctgtttttggtctgaacaccttcagagtgcctgggcccgaccaaagtcgggatttcttatgctgctcaccaattaatcgcaattagagaatggcaaacagaaatgcctaattcggccactgattttagagcgtattgttaaaataaaactaacaacaaacgtaacgggaaatttaaattttttcgatcggcaattacttttccatcattaagttcgcaccaaatgattttctctgtcgtcgcggcgatttagccaaagttagcgtttcactttttcgactgtttaaagagttttgaaatttttgtaggaaatgtttgtgttgaagcgtggtgttcttgagattattgacgagaatgaacgcgtagaacatttggaaagcggcgcaacatttggcgaaatgtcaattttgaaaccgatcgggccgttgggcaaattgttggcacgacgcaggttggccaaccctttttctatttggcatttggaattggccattctttgttaagccattcactgcgatcgttgggctattccgaggtgtatttgcttagccaggaggacgcgctcgaagtgttcgctgattatcccgaacagcgccaaatgcttatccaccacggtggggaagcaaagcaaaaaaacacttaatttggaagctaattaaatatagggaaataattattagcattgaatagccaaataaaattaaaaaatggattcaattaatgtaaattggttgcctctctttcttcttttgtcattccgtctttccattaagacaaaaaaattatatttaaatgaatttttagtcttgaaaattgagctcatttcatttaaaaaaatgaatttcataaagacaataaggaaaaaatataaacaatataaaccttgaaatattacttgtttatgaaaaaaattattattagccacacaattgttgatggagcgtggcgaggtgtgcggtgccgaattggtcgagccgggcccattggaccctttggaactgtgtggtactgaaaattcggccgaactgcttcaattgctcggcaacactctttgcggcttggacgccacactggacgcactctatgacaaatttatggttagtcgtttatttttcattttatggtattaagctggcccactttaggtgaatagttcagagcttaagcaacagctaacagtgctcgagggaacctaccaaaggaaccggcagaagctgcgaaagaaatggcacaaaaaattgtgccaaaaatagggaccaaatataagttatgaagttttaatataatggcatagttgatcagtcaattaaggagcaattaaaacccggcaattccctcggtttaattagccattggccaaattcgcctccctcccccaatccaatttctcctctttcttcctctaaatacatataacaaaaacaacaagtcaagctcaaaacaaaaataacatgntgttaagttaatttgttttcttttgtaatgacattcactaattgagttattatttattacgtaaaaacaattacttttgttttattgttttgtggcgagtccgccgatctcgacaaatctgtcccagtgacatttcctttattatattcatttactaccggaattttgaacaccaaaggaaaatataagacaccggaaaactggaccctcttttaaaaaat

SEQ ID NO: 1764 - DNA, 1871 bp, Heterodera glycines
  unsure (1)..(1871): unsure at all n locations
atcatttcaaaaaattcaantcatagcaagcttgcttanaagcatacattcctaaaaatggactgatctttgaaaaacattagcagtttttcatgatcactgataatacttgtttttttaaacccaaaattcaaaataacaaacttctggcactcatattaatatgtatatttatttcttggcattaattctgcaaaagtttgcatcttttttctgtcactttcatttcaattttcccatttcaaaatttttgtcctttacaaatttaaattcttatgggaaaagccctctttcgagtaccattaatattctttgtcgcctttgtcttctccaataatcccacactttcgtctttttcattttaagcattaattttcctacaaaatcacttctcagtgggtgggtttggtcaaaaatttttattctcattgattttcaaaaatttacttcaatatttttttgggggataattcgcattctcgttgaaaaggtgaaaaggtgcttcttattttaacacaattttcacatttatctaaattcttcaaaattaattatccttttggctaatgacttcatttatgaatgatttttagctgctgaatttgaatttcaaaggcaaatccagtgatgactcactttcctcaaattttattggcaatttctccgctttttctgtttttgcatttttcttttgcttttcctttgtcttctcggccttggcacattcaatggcctgttgggcaaggtaaacaaaatgaaaatgccataggatttcgtttgtcgttcgattcctaccgtatcgcatgtttttacttacagtacccgattatccgccgccgctgggcatggcaatgaatggcgcgacttttacgggacgacgcgcacttttacccttggggcgaccatgtaatatgatgtttttttcattttttcatccaataaatgttatttagccttttttggccccaattttggtccgggccgagtgccgggatttcgagcgccgggaattggccgttccgtcggaaaattcggcccaaacgcatatagaagtcaccttttttaaaataaagttaattagttaattaattttttagccaattcgatcatttcaccaatgcgttttggacgcggaggttttcggtcttcgggaagtgaatttggtgaattgttatgttattttcataattattttaaatagtttcagctaatccgaacagcccatttggcgctggcagacctttgcccgttgttggaccttatggccaatttccagtcgcgagaaggcaaatgccattccgactttaattgtctcaaatgactcattcattgaatggatggaaataactcataaaaacccataaaataattttaataaattcttaagcatttataaaaaaaatattttttagagatgtttccaaatatggtataacaaatctttgatcaaaaaataaatgggaaatatttattattaattattccgatttattaaattcgtccgaacccatccaccgcaaccgcgtattttaggcctttagattggccaatcgggggatgatttttgcgtacagtttgacccgtccagaaaaacgcgttcattcaaaaattcgttatggtcgtgcaaaagtatgggtgtgttgtgttaatcatcggggagaaaccaatcgctggaatgccagcctaatccaaaaaaaatattcaaaaaaacatttaaattaactctggtaataatgaaaatgatatttattttttatttatttcatcaataaatggcaatcctacaaaaaaattttacctgtcgtaataaacgcgagtcggtgccaccgatgaaaatctcagtggaattttgcactttctaaatgaattgt

SEQ ID NO: 1765 - DNA, 7436 bp, Heterodera glycines
ctgctacaggatgttgaacaagcagacattgctcaacgtgtcaccatgttttcgagtgttgccgaagagtttttgggaatgaaagctgctgaattgctcgccaaggagaaggagccggagagccttgcgaaacatttggacgatttgattgctgtgaagataattgcgaaagtcaacattaaggttgtttttttttgcaatttattacatatttgacaaaccacaacataggcgaacagtcagacgtacactggatttgattggattgtcaatttgttcaagaagtgccctggaaaaaatgacagtgatgtgccaaaagaaaaagatgatgatgatggtgacgttgatgagattgctaccaaaaaaacaaagaaaaattgagagagagagagagaaatgattcatttgttgtgagcttcaaaaaaaaaggatttaatgtgtcctttacttttttaaaaatccattaaaaatgcattttattgttgaagatgatgagacacaaactccaaaatggtcttgatgtgattgaaattttgttttttcttcgtgaattcaccatgagacaggattgcacgttgacaatttttcgtaatgagcacagagagatttgcagttggctctatccgagtggtggatcgtcaactctcctcataacaatccaattaacgttgttggaaaagcttggcccatatgcgtttgtcacgtaaccctaatttttcaaaagaaggaaaaagcactcctaaatttagttttgatcttcatcaaggctgaaaggggatcatgtgaaaaaaatttgaatatttgtgcgttaatcatttctttattgataaacttggaaaaataattgatgaattttttggtaattggtaatttcgcaaatcatccatcatctcattggcatcacgctgagaaatatgtcctcttctcttaagaaaatttatcaaagaataccagcataaaatgaaaacgggaaaagcaatgagatagtgggcaaacaatagaagttgcacgaggaggttaggatgaacgcttttgttttcaaatgttagtacttgtatctctggctttaaactggcgttgactgtagtgtttaagaaggccatttttatggtggcattttttcgcattatgcatcttatttatacagttaattaactaagctttgaatcggaaacaatgtgacggttgtagtctatcattatcatttggtcaaattcacccagcactatcatttcaactccgccctcaggaattgcactattaaatgttgcgcgaatgctagttgtcccgcttcttaagagttcataccctgtgctatcgtcgagcgtcgatgtgagtggaattacaaaaaaggtccaaccagatttgaattgctcttttgtgatgtcgaaagaacgctctgaattagccatgccaagtgcctcatacatgtcaacaaaaggacggacaaaaatatctttggcaaagtcaagcttgtatggaacaattgggtaaatcatgccgccagcgtacacggcaatgtctcgtatgtcaaacggtttaaaattaaatggagagagagcataatttccgttaaatgccccgtttgcgacaagtgcgattgtcatacgtcgaggaattgttgcactgaatacattgtagtcaatttcaaacctaccttcacttataaagcatgatttgatttcagtttttcgcactgcatatgtggctggttgtttttcaagcgttttgtagatacttaaattcaaagatgactgaacatcaatcattttagcatacagttttacgtcatggactctaacgcggtatctggtagtatcgtttgctttcaatgtctgcatgataaaagtgtcacgagctttgtaaattgtaaataaaagatccaaattgttcaacaaataaagttcttggtttcccaggtcaaagtccagacgtgaaagaaattgggctcgcttcccaccctcaaaaattttacaccgagctttaaagccctcatcagcgacgctgtcgtgtgtgcgtgtcgcatagtgaccagttgaagcgaggaagctttttttgacgttcatcggaaacgaaagtgtgttcgtaatgtaaaccttatatgggtacaaatttccgctgtcgtaaatttcagtgtttccaactgagacttttagttgttgaacaaatgtttgaccaattccctgaatggtgccgacttgagcatcggtagctgcgattgacacccagttaccgtccacatccggtttttctattgaaaggtcaaggaagagataaatccgggaaagatcggtccaaagattgtcactgtacaggcgaaaaagatacggagattcttgcgttattgtcactagggggaggacttcacggaaatatgagcgcacaaccgacacatttgttgaaggtactgaaaatatgttcaaagcactatttgtggcaaggggactactttcgctaattttttgtgaacaactcatgattgtgcttctgggggggggggggggggtgttttattaataggttccaagtatatcggtacgaaggcgtttgaccgatttctgtttagtgtgttttttcttccgacctgctggggtgtttgctggtaggaaatcgtgtggtcccaaccttgattgtagtttatttataccttttttcgctttaccaaatgcaccaccttctcttgcatcatttctctttgtgtatcgtttaaagtcgaacccttgacctttttgggcatttatgttgttggctgctttctctagcaaatttttgagccccgtttttccctcactgacaagtgactctttgaggtccctaccctctaatacattggatagaactcgatttccagattcaagtccttggcgcccgatggccgtcccgatttctttcccgattggtattaggtaacgcaatagactcctaaaaacagacccgataccactaccgcgctggtatggaacccctctgaacacattataaccaccgtattggacgactacttctggagaaatttgggttaatgctgaccattcaactttaaaaggatcaaaatcaacgtgcatttttctttcttttttttttttgcgctttttaaattgagttttctagttatttatatttgtttaaacacattttttgcataaatttgttcacaaaaaaatctggtgatatttttgcgcgttttagcagttgcaaaattgcttcaaagtgcatccccatacaccgtccaaatataaagaaaatcacatgctttccgcatgagtgtgagtatggtgcttggagcgaaagttgatgaaactgaatttgagcaaaactctttaaaaatttttggatgaaagggcttagcggtggccaaattcctgtcgaatcgtagtattccacccgattttgctgctcgcaatacacggcaacccaatgtgaaccaggtgaaccgctcggatcaacgttaatcaccattgaataaggagctggtgtggctgctactgctggaatttgatctgatggaaaacaccctaaaaaggtcgaacgcgtgactgggtttcgagcaagaattttatttatttgaacactgttcatttttaaaagtaggaactttttctaaagtgtagcgttaatgtacatgtaccgtattgaaatggcattaggctaccaccggatgttctgatttcgatgaaaatttcacttatttctttgactagtacgcgatggtattggacggagagaaactgctcctctataatttcgtcaggttttccccgaatcgtaacgatacgcaaaactggggcaatcacgtcaccaatcatcattggttcaattagatcaggtgcataaacatgaaaagaagcaactcctccactcatgtctggcataaattttgcaatcgtttctttttcagtgaaatcggttgagttaaaacccaaaatgtaggccaattggtctgaaatttttattttctgcacataacgatcgtccagtttcaacgaaaatctgttcgttgcactgtcaaaatgcaggaaacatgcagagtacgctgattggaaaacttttatccatgctgtcatgcctaattctttggtttgatcgagaatcttcctttcttcgtcatccatcagtgcaatttccgcattcaacttttctgttatcagtccctctaagcgttctaaattacggccacgtagacgcaaaaaatatttatcaagcttttcctgatattcctcttcagtgtcatcccaattccgcagggggaccttgcttgttgctgcacgtttttctctctcaagtagaccaccactggttgctccgtaaaggtcaagcaacgtgtcaacccccgctaaaagggcgtttaataattgttcttcgttttcgtcatcatcatcatcatcatcatcattaacatttcttttgtctctttgttgttgttgttgttgtttattgatgtactcggctctgcccaattgacgtgctgtattggccgcttcagtgaattttttctgtacgccttccactttaactgcgaacggtttgttgccttcttcaagcagtttgtaaagtcttttccacagctcaacggggtttgtcacgttagaggatggaattggtatttgaacattctctccaattttccattcaatttgaacaaattggtcctctgatgtgccgagtgagggccacgaatgggggtatatgatcacacctaagcccacatcccattccgaattaaattgaagttttcttggtagtcgaactcgaaaagagtttgtgcgatttccttcaacatttgtgttggaaggaacgatcacatagaatgagtttgatgaaggcattctcatttgaaattttaaaaaaagagcccctttatatatttttccatgtcatcgagcttgcaggaatccagctgttgtgccgttgactgtagcttttccatttcaccaaaacgtattcaacaccttgctttttcctctttcggacgaccttttcaatgtcatataggatatcatcatcatcatcatcatttttgcgcactagcacacgacagagatcgttggcatagaaacggcccttgatcagggaaccgtcgtcatcacgtattcggtacgtgactggaaaacggtcagtgtacacttcggcaacagtgaacacttcgttggtgaagcgtccggtgtagcccttttggaacacgtgtttgtacttctcaatgcgcacacggtcacccaccttaaaacgtggttgtggttgtttccgttttgctgctgctgcttccgctgtcccaccaatagcgttctgcttgagttttttcctgagcttttcggcattcttaaaattcacatcaactgggcgcatttttatgcttgagttgtacgagtggtttattccatgcacaatttgctgtatcacatcaacccatttttgggtaccccgttccgtgaaatagcgataaaggcgttctttgatggttcggttggcccgctctgccatccctgcgtgaattcgcggcgaggtgtacataaaaaagtttttcacgttcttatttttgaaatatttctgaacctcttttgccttaaattcgagcccttggtcggtcaacaatgtccatggtatgtatttggagcgtttaaacaagcgttcaaaagcagcaaccatgtcggagctctttttgcttttcaccggctcaacaaagagctgtctgctcagtgtgtcgatgcagacaagaaggtacttgtagccgtgattctctcgcgacaatttgtcaaagacagacaggtctgcttgccattcgtgtgcagtccagaagcgagtgttggtagttgtttgtagcgcctcttcgcttgtctatgaatggtgtatgtgcgctgtgtggccaaatactcaacaacatcctttctactcatttgattgttcacctttttcgcctcgcgtaaaagcggctcaacgctggtaaagctgaccgatgagttaacatctttgtacagctggtccaacagctgttctttcttccggtcgactaccatagtgtcggtttgaacctgaagacacttttccctcctcccccttcgcacttctttttatgtccttttccatgcttaaagtcagtcaggcctttgccaaattgtagaggctgttccggaaacaaatacttttttagcaacggatcctctctagccttttcagcaaattccttatagcccacaggcggccctttgaattcgcttcgcttgtccctgttcaacaaatggctgacaattgcctccacgttgctcgttttaaactcggacccatctgtgcgcaaaacctttccctgatcactgactcccagactgtgcccctttttttgaatgtgtgtgatcagtgcatttttggtcatctggtagttgtgttttgtttgaaggcgatcagccgtttctcctcctcctccttttcctgcttccccatctcttgctctgagcattctttttggtgcgacaccacctgttgacgccgtggatgatgatgattgtgcgtcgtcccactgttccccatcatctccatcaccctcttctttttccgtttctccatttccactgctgtttggtgtttctgctgctgctgctgcttttctttgttgtttttgggcaggtctgcgatttgataatgcccccgccttttgtgtgtagtggtgtctttgcctcctcaacccaaacgctgatggtacaatgtttttctccaatctttttggcgttgaatgatttatcgtttgcggcggcggcggcggcggcggcggcgttgctgcatttttttctctctccttttcgtgctgaagtcgaacattgatcggctgctcctcctgctcgcgcaccaatttgttgagccgtttgaattcctgatggtattgcgcggccttttgctttcgttcagctccctgctacgctcaatttgttggatgcgtgagcgcaaaagcccaattggtgtaccgtcggcaccgtctgctgctgctgttgctgcttggggttgaacaaataccgactgaaagacgtcctccggaacgagaaacattcgcattgcgtgacgcattttttgcgctcttctaaatgtttaattaaacgagtgctctcttagctgtttcgcttttatatatttattttttatctattaatcaattagtttttggcagtaatttgtccattaacattggtaagagaatgcttgtcagcatactggctaccaccggaaagccagcaccggtttggtgttgttgttgttgttggtcttgacgattcaataatagtactctgcgcgcggtttttgcgcaacgtgcgcgtgctaagcgcctcaactggtgcttcaatgcacccaaccgttgaatttgtcgcttccctaacggaacacgacccttcaacatattgaaacccatctccacaaaacagagcaactgctcatccaaagcgttctctatcatt

SEQ ID NO: 1766 - DNA, 3723 bp, Heterodera glycines
atttacatttatctttaaatgttattaataatcttaaaaaatttaaaaaagttttataaattaaaaacagtgaaaaattcaatttttttaaaatcttgtaaaggaattttcggaattatatgcaaaaatggttaaaattaatttgcgattaattttttttatatttacgctaacctacgcatttcctgtaaaacttaaggttcctcaaattttaaaaattcattttccgaaaaaatttctgccaaacacatcaataattcacggccatttgttattgccggatggggcataacaaaaccaaagtgttcacgtgaacagcacagtacaagtgaccagctgatgtacggtacaatgcgcatggtttccaagaacgaatgtccaattacttatggtatggcataataatatttaagtgcaagaatgggttactgtagggatcgcgtttgtacttattttaaagagacaaaggggaccatggaaatagaaaaaatgtttattaagagataggcgccgaagggaaaagatcttttcttaaaactaatttgtaaaataaattttataagaaattttgtcaaaaatttgcggaattgagtcaattgaaaaaaagattaacgcatccagacatgagaaataagtttgaaccagcctggatttttccttgaccaaggttttcctgggtttttgtccaagaactttttcctggacctgggattttggccagtagctcttggtcaatcttgaaagccaagtccaggtccaacatagaacccaggtcaaggctttttccaatatgtcttagctctaattaagactcatcttcacttccggcggacccaattggtttgattgcaaaggcattaaatgaaatgaatttgttggacaaaatttgccttgttgccgaaccaagtgtcactgaaccggttgttttattataataataaattacaaaaaataaaattaaattatgtaaatttccaaaatacaatcactaatcactagcttaatccttttgaaaattttttacgatattttatgagaatttacccccccccccccacgacgaggatattgctccccgacatttttaaatttctcaagccatttcctacaaattttttccgagaatttcctctccgatccccgtcttttctcttcccaaagatcagagaccaacttcaaaataaataaaacaaaaaaacgtttatttatttttttaaagggcgacagtggcagtccgttgctaagcaaaattggtgacaagaattgggtccaagttggtgttttatttggtggcagcggatgttctgaaaagcatcccttttccacaactcggcgtcgctgtaagaaaagccaattaataataaattaaatttaaaataccaattttatttatttaatagcattatatacaccgatcgattgcgattggatttcgcgggtgacaaatgatgaagtgaaatgtaaaggatggtgaattgaaatgaaaaaattgatgaaattaaatacatttgcattgtgacaaattttagatgcaaaaattggataaaattttacagagacttacagtatttacgtacagaaatataaaattgaaataatttatattattttaatcaaataatttgttgtattaaaaatgttacttttcttttcgctaacacaatttattattccttttattaattaaatttaatgcaaataatgacaatgaaaacattttgaagaatgccgacaaatcacctgtcaattcaatactaataacgaaattactcattttcgtttaataattaaatgattgtttttctgcgttttacgaattacaatacaagaagaatgaacaaatgaacacagcaatttaaatgccatttttttaaattcgaattttacaaaagattcgtctctaaaaatcaaaaaaattagcgaaatttatgagatttaaggacaaataatagactaaaaaacgcatgatcctttacctaatggatgcccattttgtagtggaattacttgattagcatttgaaaaacgtttgaacacaaatggaaacaccgtttggaatgcctgccgatattccgtactaaaaaaataaaaatttaattaatttaaataattattcgaatacattgtgaagtacaaaatggatgcattcgatgccccaccaatgttcagtgaaaatcggtggaaatttagaaaaaatttgtaggtggttggtaaaatgtttctgaaaaaaattacacgcactcttcgataaatttaatggtacaacgcttaagattttccaatatgtcttaactcaaattaaggcccatctttatctccgggaccaattggtcccattggtgccgggtcgttacttaaaaaaccatcaaaatgaaaatttttgacagaaaattattcataacatcgaacaaaatgaatcaaatcttatatgagaagctaaaaaaaccaatgttttttcgacatttttggtcataattttatgagacataacgaagctttttttgaaattttcgtaagctaatagagaattcttagagctatcgaatgatatgaagaattaaaaaattggtacttttgagcaaagctaaattaaaaaaaaaaaaaaattttttccccaactttttctctcgccgagggtcagagaccaactttaaaataaataaaataaaataaaaattttattttttttaaagggtgacagtggcagtcccattctttgcaaaactgaaataaataataaattaaaatgtaatttatatatacaattttattttattttttaaaattcatgtgaaaagcatttttcctatcaataacaaaaaatgattataacaatcaaggtgccaagccaaaaataaaaaatcaccaattaacagaaaagtttaatatttaatttcataaaaattcaaatgtttttaatcaaattaaaaaaaacaaaaaagaaattaagaataaaaaattcactgatttagaagatacaattcaaaataaaacccaaaatatttcgcttttttcattttttatacatattttgaagttttgagaatttataggaatttcttatgaaaaattaaaatatttttaaaaagacagccaaaaaatctcttttttcaataaaaatgagatcataaattaaatgtaaaagtgctcaaatgttattttaatttatttagacttctagggaaacttttagggaagatttagagtgggctttgaaccatcgtctgtgaatttgcggaccaatgttctaccaactgaactatcgaccctgccaccacaaccatcgcatttgataacgtggcacttttcaaaggagaacttcaatattttcgcgcaaaaaattcccgaataatcaatcacttatcaaatatgtattactttaaataagtgttggacatgtcaacaaaatgattttctgtgctatgtattttcctcctaatttggaccaattttaatacataaattatttttcgcaagaattccgcatttatttttattttttgtaatgtgaaaaaatcagtgcttcttcaaatttacaagtatttaccttccctaattctttttttgatattttgcaaataaaaagatagccttcaatgggtttctttcttattattaaaaattgccccaaacaaattaaaatattaatttgaaacttatccatttccgaaattttcatgtaatttccgttaaattttatgtgaaaatgtgtcaaaagtgacc

SEQ ID NO: 1767 - DNA, 3650 bp, Heterodera glycines
  unsure (1)..(3650): unsure at all n locations
catattttggcacgaaatacggtatttctctaggttgctcgaaagcatgaaaatttaagaaaatttgattgaattttcagaaatttttgcaaattttttgaacctttttcatcactttttgaaaaccggaattaaattaatattttttttgtgctaatagtgcaatccgagagttaagtatgagacacaagattatttaatttagttatgcttaagaaaggttatgacgaattttctcaaaaaatctgaaaattggcactttttgcgaatgacccacaggcactaatctgcttgctgttggtccgtggccacttatattaaccaaaaaataaataaactaaaaaaagaaaaaataaaaagaaaaaagtgaagattgttttttaaatattatgccataatttgctgttgttttttcagataattataaagttttattcggtgccgttcaaagctcaaaacaaacgcacaaattgcgcattaaacgcgtccattatcatgaaaatgcaacatatttggttcttaatgacaagttgaatcctgctagtggtgtttatggtgaaattgtgcacccggattttgctttaattgaagtaaaaaattttaattatttattttttaattaaatgttttttaagagcgtggagccaatacaattttcatctcgtgttagaccaatttgtttgtttggcataggtaagtatttataattttttgtgaatttacatttatctttaaatgttattaataatcttaaaaaatttaaaaaagttttataaattaaaaacagtgaaaaattcaatttttttaaaatcttgtaaaggaattttcggaattatatgcaaaaatggttaaaattaatttgcgattaatttttttatatttacgctaacctacgcatttcctgtaaaacttaaggttcctcaaattttaaaaattcattttccgaaaaaatttctgcccaacacatcaataattcacggccatttgttattgccggatggggcataacaaaaccaaagtgttcacgtgaacagcacagtacaagtgaccagctgatgtacggtacaatgcgcatggtttccaagaacgaatgtccaattacttatggtatggcataataatatttaagtgcaagaatgggttactgtagggatcgcgtttgtacttattttaaagagacaaaggggaccatggaaatagaaaatgtgcttattagggcaattgtggtgccgataggctccgttgggaaaattctttgcataaaactagcgtgaattttaataagaaaatttatccaaaattttgaagatttgagaatcaatttataaaaaacctagcacagccgtggatgatatttttctaacatattttgaacaaacaatgacaattttgagggtttttccattaacattttttggtttttatgttttacaaaatttgcttacttttgatctaaaatcttcagtgtaaaatttagcggatttgaaatgacccaggtagttcaaactaaaattcataaaaattttctcacttatttaaaatttacattggtaattaccaggtctgtcaaaaatatgttcagatgcatttttttttccttgaatgagtcaatgttccaatttttttcttggtttttctggattttttttgtctgtgagattcccggtccaaggtccaacaaaggaatccaggtccaaactttcttcaaaatgttttaacgccaattcaggctcatcacctgtggttgatccaattgtttccattgcaaacgaattaaatgaaataaatgtgttggacaaaatttgccttgctgccgaaccaagtgccactgaagcggttgttgtaataattaaaagaagaaattcatgtaaatttaaaaaatagaagcactaataacgagggctcggaattatggaaattcattttttctttcttggactgtggggaaggcctgaaacgcacgaaaaacatgtttttagcttggatttaagcttctaggatggatttctatatccatattttccatatttcgcgatttatatccatattttggcatttttccaaagaactctattagaacggtcctaaacagaaaaattgacctttttgacccaaaaacttgaaaattttccaaaaaatcattttatcgcaaaattttctggagaatattgaataaacttaaattttcttaaaaattgataaatttattttaaaaataagcaaaaaagctaaaatttcgcttttcgggttgattttcgttaaaatgaataaatcatagcattatcatgtttttttcttctaaaatgatttttaataccatttttgtccgtattgtggccattttatgtccatattttgtaatttttggtccatattttacgattttatatccatatttctccgagccatacaaatcacaaggtcatgtattcgacttttattttgccctatctcgaaacccggaccaaaactcgaaaaaaagtcgcacagattcgtacataaaagtgatttatgaaaaattctaattttcgacttttgtttgaattcgggtccggaattcgaaataggccaaaatagatgccataaaaactcctgaatactgagggtccaggcgggtccattaacattcccaaattggtagcggtgttgttaacaatcctttattcaagagtattatacaatggatggaccacctcttcccgattcgcagtcgggacagagactgattgtggggagaagtggggaaggggaaaagagttggattaaagggaccgcccccaaggcaacaattggtatgtcatatgtgattaggggggggggggtggcgattgggacaatgggttacaaaatgattatgatgtcactttaaaaaattattaatttttcatattcaaatttatgttactgctgatgaaaaaataataaatttaccactgataattatttcttagataaaataaagatgataaaaatttatttgataataaatttaaattatatcaaaataggaaaacataaaaattattatggaaatcgcataatttttcaactaatatctaatttaaaaatagttgaaccattatatttttaaagaattttgaatcaaaataaacgagatgttctttgattgacccaaagaattatatttcacaacatcgggaaatgccatgaataaaaataatgcatttatttaaacaactgctggaattatttgttattcttaataaaacattaataaattattaaaaaaagaaacgaaaacaaattaccaagtaaatcattcataataaaattaaatctaaattatttttactataaaaattaatttatacctttaaggcatttattgtcaaattgggtcattttgataatgtattgtaattagctttttcttgaagaaaataaacatatttctttaaaagaatagaagaatatagtacaaaatataaatacctaatgataattcccgaaaaaatcgataatttattgtataaagaaactncnnncnttttgtgncngnnggnnnnnnngttgncgctgttngtccnggngtcatctcnccncttttaaaagggctcntcngtnnnggnggcctnctgnnngaggtataaagaaagcacataactacttaaaatttcagtaatttgcta

SEQ ID NO: 1768 - DNA, 4281 bp, Heterodera glycines
attttttaagggcgacagtggcagtccgttgctaagcaaaattggtgacaagaattgggtccaagttggtgttttatagagaccggaccgggccgggcccggtaccggtttttaccgggcccggaaaccggaaccggtgatttttggaaaaatccggtttgaccggttttccggtttgaccggtttttgagagaccgggctcggaaaccggtcgttttttaaaatgtaacccggcccggaaaccggccttttggaccggttttgaccggttttataatcaagccaaaaatgtttctttttgttcatttttctttgaaaatgtctttttggcataatgtttttaattttttttgtcaatgttcaagttgaattttttaattctaatgtttgcttctttataattattaaataatgtcttttttgtttagattttatgcaaatgagtttaatttggcaaattggcctatttaaaaaaacgtccaagactacagcaaaaatgaattgaaggaatgggaaattgataatgacctcgatgaactacaacaaaatgaatttgttcgtcctgttatgtcgccccaacccgaaaatccgccagctaaacgacgaatgtcattttttgaacgtctgaaacacattacaggcgcaaacacaagtgaacagggtgatttttggtctctaaaaattaaatttataatgaaattaaggcttccaaacgtcgcaagatgatgacattgaaaaagaaattaaggaatttctcgcgctggaaattgcgaacccagaagcggacccgttggacgaatggaagaaaattgctccccgattttcaatccttgccaaatttgcggaaaaatatctttcagcacctgccaccagtgtcccaagtgaacaaacattcaaagtcgcccgagatgtctttgattatcgccgttccaaattatcacccgaaactgcagaacagcttatttttctgaacaaatctcttccccagatgaattacaattattgaatcaatttttctgtttattttattaaaattgttaaatttctacatataattgatgaaattttgtgggttttttcccaaattaacatgcgaaaatttaaatttttaccaacccggaaaccggtgccaggcccggcaatttgaaaatccggtttgatcggttttccggtttgaccggtttttgagagaccgggcccggaaaccggttgcttctgaaaaagtcagcccggcccggcccggcagatttggaaaatccggtctctagtgttttatttggtagcagcggatgtgatgaaaaacatcccttttccacaagacggcgtcgatgtacgacgataagccaattattaataataaactaaatttaaattaattaaattaaaaattttttaataatttttaaatagcattttacacaccgatcgattgcgattgggtttcacgcgtgacaaatgatgaagtgaaatgtaaaggatggtgaattgaaacggaaaaaagtgaatttaaatacatttgcattgtgacaaatttttagatgcaaaaaaaaatggataaaacaatatttacaaaattataaaattaaaaaattaaattgttttttttactaaaatttgaattagttgcataaaaatgcttcaacggttaaacatttttgtttgcacaaaaaagaaaacgggaaaagcctgaccttggacggaaacaaaaacaaaaaaaaaggatacagtatgaattagtatcgcatattgtggaatttttattccatgcttttaattcgtatatgttaaattaaataaattaattaaatattaatacaaacgaagttgaacaaaaaaaattataataccaacgaagtttaacaaacaacaacaaaatttttttatttgtcaataaagaaaaagtccacaaaagggaaaatccgcccgcttacattgaggacaaaacattaattaaaatgtcctcaagaaagcgcataaacaattaaaaacgagatcgccgccaaaaaataaaatataatgtgagatcaataaaaaaaataaaaataatgaccaaatcactttttgtttaatgaattaataattcgacttttatttttccggtcaatcttacagaaatgaaatagttttaattttatttttaaattgatttaatgagtttatttcaataagctttttatcgagttggttccaaatttttgttacccgccccgcaaaaggtataaattttttgcctaatttatatttcgagttaagtctataaaagggaatgttaaagcgtttagaaggtttaagtatttcaaagggattcagatctgttcggccataaattattttatgagccatgaacagatcagaaagctttctcctgctttcaagtgttggcagttgaaggtattctaatctttgttggtatggaatgggtggaaggctgcatttgaaaagaactcttttggtgaaatatttttgacatttttcaatttttttaatatttttttgaatagatggattccaaacctcaggagcatattccaataacggtctaacataagtattttacaaaataatccaaatcttagaagattttgatttaataacccgaaataaagaacgcatacgtaaatatgcattctttattatttgtgcgacatgattggaaaattgcaatttattatcaatatttatgcccaaatccctaattgtatccacaacatttattatatttccatcaattttatatatttctttggggtttttattccccaagtaaagtacaaaagttttttttaattgagattctgatttgccatttatttgcccattctgataaattatgcaatgctttatgcaaaatttctgtttcggtccttgctttataacaaatatacaatttaacatcatcagcatataatttaattcttactcctgatggccaagcatcaggaagatcgttaatataaatcaaaaataataaaggtccaaggacagagccctgggggacgccagagccaacttttttactggaggataaatcatcccctattttaacgcgaaaagtcctattactcaaaaaatcctttatccatattaaagtttgctccttatacctattttttccaatttgtataaaagtaattcatggggcactgagtcaaaagctttctgaaaatcaatataaatacagtcaacattttttccatttattattgcctcgtaccaatcttccacaactgttattagttgactcgttgtagacctatttctaacaaaaccaaattgaaattccgaaatttttttgttttttaatagaaatttgtaaatatttttgcttaaaattctttccattaccctgcagagtgagcaggttaatgaaattggcctatagttttcgagattatttttgtcacccttcttaaaaagcggaaaaacaattgattccttgcagatgtctggatgtgagccagtgtctaatgagatcctaagcaagtcagtaataacagttgacagagaagaatggcaaatttttaaaattttataactaatattatcgggagaagtgccatttttattcggaagttttttcagaagattttgggtctcgatgatgttaaaatttatatccgatataaagcattgatcaatttctataatattacccaagcatggattgcttgggtcggtttcactattattaaatgaattggcaaataaggtggcaaataattcacatttctcagcactgttatgatagcatttattttcataaattagattaggtatttcaaagggaacgccgacatttgcgccgcggacatttgcgccgcagacacttgcgccgcgacacttgcgccgcagacacttgcgccgcccagccaaatcgacatttgcgccgcaaaaaaaattttttttttaattttcaacaatttattaacgctaatatttgataaaaccctaataaaagttagcaaatggctaatcacaaagataaacgtccaattttttgtcttttgacaaggcgtacatcaacaataacggcaaattcttcttattcttgtgaacgcgcttcatttctccatcggcaccataaaaacaaaagccacattcataattccattctttgaatcccttcattttgagggggcgcggtcgaccatccattcgtttgccgacacggaagacaattggtgcctggtcgacgtccgtggcattcaacatgtggtccacaatggcatggtcctcccgggctctctccgccgctttgaccgatttacatacgggcacatt

SEQ ID NO: 1769 - DNA, 7606 bp, Heterodera glycines
tgttacggtccgcctcttcctctcgaggaagcggcttcttttttagcattggcatggtttctcagcgttgtcgtcaaaacgtctctcagctgttcaactcgattctgtgaagaccttgggaccggcacgcgtacaatgcggtgtttgtcttcttcaggaaccccaatatccgtgaagtggatgtctatccactgctcatccaatgtaccaattgttgaccacgagtatgggtagctaatgctgtgcagcccacacacccaagacccgttgaaatgcaaaggttttggaagccggacccggaatttgtttggctgattgtccggataatccgtcacattgctaggcaaaaacacaaagaaactatttgacattatggatttattcaactgatgagaaatacacaaaaattcaaacgcttttatacaatctgagactcgtcaatccattctcgttcgggatacccaatgaactttacgagcatctctgtggttccatccggttttcttcgctttctgtacactttttcaattctgtaactggtgccggcatcttttctcacgcgggccaactcctgctcataaaaggtgccccggaatttttcaccacgatcatcccggagcttgtatctgatggggcgcaccgccttcagcacctcgtcaatttccaagatttcgtctccatagtttggcaaataccccttctcgaactgtcccttctctctgctcatgcgtacaaattcatctttacggaaacgtggcttcttgcgtttttgcggtgattcataaattcgcttccacaccttctgagcattttcaaaattgacatcaattggtcgcattccgtgaacccgtgacggagtgctgttaattccatccactatttgttgtacaacatcaacccaattcagcgtctccctttcggcaaagtatctgtacagtcgctgtttcacatttcggattgcccgctcagcaactgacgctttcactgacgaatgcacgggctcatgtttctcaatctcctgctcctcaaagaattccttcagcaatttgtttttgaattcggtgcctttgtcggagaaaatgcggtgtgggaccattggcatttgcttgacaagctctttgaatgcatccagcatctcctcggccttcttatttttgagtggaacgacaaacaggcgttttgagagaacatcaaccgcaaccagcaggtatcggtgaccgcgattgtgacgagaaagcgcttgaaagtcagccaaatccacttggacgtcggtcatgaagccagcagctacagtttttgctctcggaaatcgtacccgcctggggcgcatcagggtgtacgtgcggtgtccctccaaatagtgttgtacatcctttttccgtaattgttttaagctttttccgcgcctccttccacagtgcactaacaccggcaaacgcagtaggagaggatggatcgttgtacagcttgtcaagagtggtgttgatcatttccattttttcggctgaaattccttctttattgacgtcctgctgcttgtgctctgcgatggtctctttggtggagccgtcaatgaatacaaaattgggtcctgcctaagccgctcctccaattggtccgctcccggtggtctaatggtaggtcgacccgctcttctgtcaattatatacctgatggctgttcgcaaattgcttcgcaccaatggttgagcattttgagtgttgataattgcgtttccccggacacccatacgatcggcataacggttgcatttgatgtatattagctcaattctctgtgccatggtcagctgatttgacggaatggcaaacagttcacgttgttgttgttgttgttgttcatcgctttgtgctgatgttgatggacccggctctggtgagtaatacactcgtactcttcgcgcttgcctcactcgtttacgtatgcgcagctcaccactctcatcaccattttccggggggtggcgacgtttggtccctctcctaggtgggggaacaggcggcacttgtggggcagcaggaggaggttgctgccgcggcagtgtttcttcaatttttggctctcttttcggaatatgatagggtgtggcacgaggaggtggcttttttgacggtttctgttcatgttttggttccgcaggggggttgtacccggcttgccgtgatgtggatggtcgcggatccagatcgaactttggctcccttttaggtttgcgctcaacttgttgtgatgtggatggctgaggatcgagcagtggttgtggttgtttcttgaggctaggacgcggtggaggtcgaggtgtttcaatttttggctgtggacgagacgggggtggcgagaagggggaggagggtaatagacccggtattttttgcgatgcaaatcgtcattgccatcatcgtcatctgctttctttaactttcttctggctgcaatcctgtgctgtgcagtgtccatctcctcaattgcgtccgcgttgtctggcagtacaggcaattcgccataatattgtgatggtgctggcagagcgaatccgctctccaacatgtagtcatcctcttcgtcactttcgggtagcggagcagcagctgcttcagcaagaaggtcccgcacaaccggctgccgttgttgtatgtcgtttctcttttttcgccattcctccacacgcccatctctccgagagggcggcgcagcagctctaggtggtctcggaggacgctgtggacgcggcggaggactccccggcggggacggacctgggcctggagggcttggtggacgacgaggaggatgctgaccaggaggcggtggtggaggaggaggagggcggggtggtgtatctacaacttctgcttcatcatcagcaccgcctcgcctcatcagaacactcaatcccttgactagctcaacccgtgctggtttgtccgcgacctcccgtctcatttgcaagtatcgcctaagctgttgattgtagctgacatttttagctgaagggtttgttcgttcagccctggcacgcgtcaaatcgtgtcgtacagcatccaaattgatgtcacccgtgtccgtcgcagaggtgagaccccggtaaatttcttgtggtacaagcacaaatttatttgccattttatgaaacaaatgaatgaatgaacaacaatttttttacggtatttatacatttttgctcacaaatgatttggcaacttcaattaacacgggtgttaggagtgcagcgaacagtccgccaacccctgctcccttctgaacaatcatacgtctcgcgcctcgttcacttcgcactctgctcaggcagcgaacaaaatctgcgtagggcatcagcctgttcttctgacgtttgttcaagcgaaatcgagatgcaacaatgttcaaacaaatttccaccagcgctagcagttgatcagcgttcgctttccgtatcagcttgcaacattttttcgcggacctcgttctggccagcgcacaaagccatttggaattctcatggatgagttgactaattttcgcttgttcatcctgactattggactccattctttggtacaaacacaactaagccttgatcctcctcttgctcgtccttaaatatatttgtgcgaaggcgaagcacggggtcagatgaggcgtgcatgtcaattattaaatagccgtatgggcgagcggtcgctttacgataggcgtcaagaaagaagtcgagctcgacgcgggaaaagctcgtacgccaacgttacggatggacaacagcgagttgggtgctcgcatcagtaccaggtactgggcggacaggcgggccactttgatctttcgctcaaacaaattctgcgtgacaaacacgacagcaaattggtggtggtgggactttttggtgaacaagtcggacaaatagtgctcatcaatggacagcatcaagtcgtctaggatcagcaaaagaggctttggcatgcgtttgatcagctcttccggtggaacacccgaataaacatcaacccccgatttttggagaatgggcacagcgggattcatttcaccaaaacagtaaagtgttgacacgggttttggtataattaattcatcggactcggcaacaaatttcaataggaattgggttttaccagaggaggagggaccggaaatgattagtccaaatggtagtttaaagcaaatggtctttattggagaatgaattaaacattatgtgttaacaaattaattctgaaaattaaattgtataaaacaatttatatagacaaattgttcgtcgctgcgttgacgctctcaaaaaattcgtcaagtgtcttgtcaatgtctcctagattctgtacctcttcggctgacttcttcattccgttgcttttgccttttggagtcggttgctttcttttgagcggtgcctgctgcattgaagtgtcgatcatcattgtggccgcagaaatgctatcgtagaattgttgctcatcactttccatttttgaaggagggagtggcggaggcattttgtcgactggtggaagtggaggcgttttcattttttcgagtggcggaagtggaagtgattcaattttttcggctggaggaagcgggagctccgcagtcttcttttccggaagcgaatcggccagcagcatgtttccaagaacgctgagtgcagttttggccttcttccaacgttgtccctccgcatgcagtgcatcgccggtcaaaccggcatcaatcagatcgagtgcaacttttgccttccgctttagctcagccttctgcacttcatcttcacgcaacgaatcagccaacagtccactctccaccaagtccagcgctgtgttggccttttgtcgcaagtcgttctgctgctgctgcagcagttgttgctgttccgcaagtgcttcttggtttgggtatgtgacggccggcaagtccccgtaggggatgttgaacacgcgtgccttgttctttacacggaagaaacagtggccgggcaagtcatatatgatatcaaacgggacaaattgcactcgggcgattcgcgtacaccaaattgtgataccctccttggtgaccataatgtccacttccacttccgtccctttgcaagacttgcatctgccgctctcatcgaatgggacaaaacggggagaggagaggcgaggaccgctaatcgttaagccactagtggtcactgttatgtcggcttctcccagaatttggttgagaagaccacgcttgtcctgcatgttgatagccatattttttagaaatgattgtggaaatttttcgagtgaaggtaccgaaccgaaattccactgctatttatagggaaatctgttgtggtatgtctatgagttagagaaagggaaaaatacgggtcagagaacgggaattggggtggctacataaattgggatggggacgggaatcgggctggggacaaaggagaaatattgacaagcataaaaataacctatccagactaatcataataatcatttttaaataaagccgaattgtcttttatttttttaaattcaatcaatcggaaaatttagtaaaaaaataaatttaaataaattcatttttctttcatcttcccaatcagcagtcttttccgttttacaataatcatcatcatcatccgcagaagcatcaggtttgacgacggcgatcatccagctgtccttgcgccaattgacgcaatgcttccacaatttgttgcggcgtgccgttcaagccaacctgtgaagaaattgttatggaaatgtcttgtaaattataatgagcaaattaccaggacgccatgttgttggagtacgttcatgatgtctcgcagttgagcatcattgaccagttgttcagcaaacggtggttgtctgtgtccgggggcgtcattccccgcgttgttgctctgtccttcacgtggtggcattttctttaaaattaaaaacaaataagacaaaataaaatgaaaagcatcatcccctttaccttaagggtattgagcgtgggaagggattgttggcttgaaatgaatcctgctaagccatcggtaccccttaaatattcacaaatgacgcacatattttgagcccgccccctgaattaagaatattttgcggaatggatatttggtagctccaaacaacagcactagtgccgcgcacaaatttgcataatccttcgttgccggaaattccacaccctttagcagaactgtcaatcacccaccctcccatccatgggattaggattggtcacccccgcgtcccccccaaccctgctcaaatgttcagccaaacaaattgttgaaatgcagtaaacaattaattcgtgttaccaatttgtcagcaatatccccataggttttggctttttccccacccaaataattaattaattaattgaccatccccccaattagtcacccgaaaaccctcccataggttttgattttaattcccccccccatctgtcacttttccctttgaccagctgtcaatcaattagctaattagcccccctccactggtcagctgtcacttttaattagtgtcatgctgcagaggtggcgtatggtttactacttataacttttttggtaattgtctaatcgcgaagcaatagcttagaaatatcttctaaacatgttaagctttcgattgataccaagactgctggatttggttaacaacaaaaaaagttataacctaaaaacttgggctggcgccaaaacgtcggcgccaaaacgatacggacccatatcggagggaccagagcgtttgggcccccgctggctcccggacatttcgacaatgaccgtttcgacaataaaattaaatatatttttttaaataaaattcaaatttctgcaaaattatatggtgcggatttgggatcaatatataaaagtttttttttcgtttttttcaaaatagcattatgagaatggctttagtttgtcaattttcggcgcaaattgcttatttttttttaattaaaaattgaaacattgttttacacctaaatagttgataatgaattagaagcttttaccctgaaaaaactattcttgattaaaaacacaatttttttttgttcgaattcgggtctggagttcggaattgggcaaacccgagttaagatccgttatcagcaccctcaaaaacgcctaaaaactggttttgagcacaaaatttaaaaaatgaaaattagggacaaccattcttcaggattgccgcctgggtaaaaagaggacactacaataagttaaataaatggtttcattttggatttatattataggtccgtctcattttgtcttctttcttcactattaatagggctcggatttttaggtgctaaaaatccctaaataggtactaaaataggtgctaaaaagtgcaaaataggtgctaaaaaccccaaaaaaggccaaaataggtgcgaaaataggtgttaaaaattgaaaaaatctagtatttttatgtacaaaaattcaaaaagtgactaattttttatcaatttcggcagcactattgcaactggtcaagaaaatccgagtcctaactattaataatcatac

SEQ ID NO: 1770 - DNA, 4504 bp, Heterodera glycines
acaaaaaaatggggaggcatttttttagcggcctcttactttctaagtcaactttatatcatttgtcaatgaaatgaattcttcaaaatgggcaattgaagagttccggcggcggaaaatggaccagtggtactgtattttcaaaaaaagatacagtattttgatccgctaataatttgttattttgtccgctttttttctgcccgccccccaaattggtaattgtcgttactctgtggcttcaaccattaaatgtgtttttctgatgcttccccaccccatttttgcttgtcttccgtcgtcctttcaccttggcatgtgccgttgctgctgacaaactgctgctgttgttgctgctgcggttgtgtcacaattggtggaggcgtacagcgaattcgtgccgcatttgctgctccgccctttgacgaggcggcagaagctgaagctgatgatgctgggcccggaaaggaagaagcgggcggggctgtgttggccaacgaatagtcggaaaaggcaactgaggaagaggccttaaaattattagccatcggcaaaatatggcgacgataaattattgtaaatgccaccaaagtgtgggtcatttaaagcgattagtcacggaaaatatcttttagggagtcagaaaattcgaatggaatggcaattccacgatttatattaaaaaagatgaagccaaagcagatgaaacaattggtaagaattcactcactaaactgtcgctctcatcgccgtcaacagccgaacgacttgtcaaagggggacgacgaggcgcggaatatttggcagctgaaattgccaactctcgaaatggctcccggacatttcgacaatgaccgtttcgccaatgaccgtttcgacaataccttttcgacaatgccgtttcgacaataaaattaaatatatttttttaaataaaattcaaatttctgcaaaattatatggacggtgcggatttgggatcaatataaaaaagtttttttttcgtttttttcaaaatagcattatgagaatggctttagtttgtcaattttcggcgcaaattgcttatttttttttaattaaaaattgaaacattgttttacacctaaatagttgataatgaattagaagcttttaccctgaaaaaactattcttgattaaaaaaacaatttttttttgttcgaattcgggtctggagttcggaattgggcaaacccgagttaagatccgttatcagcaccctcaaaaacgcctaaaaactggttttgagcacaaaattaaaaaaaaaattaaaaattagggacaaccattcttcaggattgccgcctgggtaaaaagaggacactacattaagttaaataaatggtttcattttggatttatattataggtccgtctcattttgtcttctttcttcactattaatagggctcggatttttaggtgctaaaaatccctaaataggtactaaaataggtgctaaaaaagtgcaaaataggtgctaaaaaccccaaaaaaggccaaaataggtgcgaaaataggtgttaaaaattgaaaaaatctagtatttttatgtacaaaaattcaaaaagtgactaattttttatcaatttcggcagcactattgcaactggtcaagaaaataaataaataaattttggagacgaatttttgagaaaattttcatttcttaggggaatattttctgaaattttggtcaatttttaggggtatattttttaaattttttgggatcgattcttaggggtgcatttttcgtttttattgcatttttactgtgaaatttctgggaaaatcccaaaataggtactaaaaattcataaaaatgccaaaataggttgtaaactattttaggtgccaaaacgccaaaataggtgtttttaggtgctaaaaagtcgctctaaatcgaaaattgtacggacaaaatgctttttttgggcttctctcatcataactaagccgggaaaaaaataggtaaaaacctaaaaatccgagtcctaaacgcaaaatgatcgaaggtcaaaaaaaagatgaatataaatggaaattggcgatgggttcaaaagcgaaggaatttctcttcccttttccaaatttacaattaaaaaactttaacatttgattttcaattattattaatattatttgttatataatttataataaatcaaatttaaaaaagcaaaacaaaattaagatttatttgattatccaaaatgaaatttttccttacttttttgcttctcgccatttcatttttggctataaaaacggctgccgatggctctgacgacagaaacggagacaaaagtttgccaaatccattagcagttgagggaaaggcgagcaaaaggtcagagagacggagtaaaaactgaccgggccaaagccttaaaagccgaaaattctcggctagtcccaaattacccgaaatcccgactttaaatttggattatttttcgttttttcctaatttaaatgtacttcttgtacttttctctttagtaatcgccataagcgccattatggctacggttacggcggttacggtggcggaagttggggcggttatgagtcgtcgagatggggcggttggaacaacggcggatttggaggaggaggcatgggcggtggcatgggcggcggcatgggcatgggcatgggaatgggcatgggcggaggaatgggaggaggaggatggtgatgagagggcatttttattcattcgaaattaattgttattttatgacaaaaaaatattatttattttaaaaaccaatttacaaaatacgttcaatctcttggcatttgtcacttctttactcaaaaagcaatgactcataaattaatattttattcatttattttatctttttttataagtgaacagcagaaaaactggtcgtcccctgctggtgtggttccttttctcgtatcactttgtgtttattgcgggaattttatgactgttttgtgtgtaattaattagtgtgttaattggtcacgcaccgccgatcaatttcccaaattatccaatttatttcaatggtaaaaagtggaaaagaattggcccaaaattcgttgcattatttggactttgccggggctgctttaccatcgcctcaatttttacaacggatcgccaatttgttgtacgacccgcgggaatgccttttggcaaacccacacagtgaccatatgatgggacggaggacgcgggacaaagtgcaaaacgcacgggcaaagtgagggagggcaattaacggaagtattcaattaattaattgggtacatatcacaaaagaatcctcgcccattttggtggcaataatttggaagaattcgctgtgattttcacttcaaatgcaacaaacgcattgaaactgctcgccgaaaactttggagacgaaactcgcaaaagtcgcacgacgaaaaaacacttttcaagtgatgtgaattgtctgtcggatggtaattagttctttccgtttaattaattggctttttcagtcagtttcgctttggcactttctttttctggttttcccatttctctcaaattgcccccccccccctttcagttgctcctttgagcacccttctgatgctgcgcgattcccacacgtccgtcgtcggaatgcgaagtgctgaaagcttcgaacgattgttgtggtcacttacgaagagttaagacaatttttgccgaaaccgagggcaataaacattttttaaaacttaaaccaaaaaaaataaatttaaaaatggatttaatttattaaatttaaataaatttttgcaaaatttttgcaactttttctaaaaaaaaaaaattttttgggaaaaaaggaatttccttttttttgtccacatttttggggctccccttttgtttccctttgttttggcacccccccccgttttttggcccccgcattttttcccccaaaattggggccctttccttttttgggcacttttttcccggttttttttctttctcaaaaaaaagatgcgcgggaaaaacctcccccgggaagattccctttttttttgtgttatattttttttttcttctttgggggattttttataaaatttctcacaaattttttttccttttttttgggggggggggggggcccccttaggggccccgcccccttcctcccccccattttttttttataaaaaaaaaaaggtttttttttttggggggaggaaagaagatttattttttttttttttttttttttgttttctttttcacaaagaaatatttttctccgccccccctcacaaaaaaaaaaaagaagtttttttcttttttttttttctctactaccccaccaccccccccctctatacaaaaaaaaaaaaaaagggggttgttggtgtgtgtggggagaaaaaaaaaaaatattttttttattttttttttttttttttttttttttttttttttcttttttttttttttttttt

SEQ ID NO: 1771 - DNA, 977 bp, Heterodera glycines
ctctgaatttcttcttaaattgttaagaaaaaaatctcaattgtaattaaaaaaaacaatattttcaacatttatgtgaaagtaaataccaaccaaacaaacaaataaaaatttatgtgagtggatcaaaaatgcaacacaaacaaagtgcgtcatggaaggcactatggggtcaagccaagtgtcactcactaccgtatttgctctttttatttgccagtctccattaatctgcaggtctccaattatatacccctttcgaactaggttgaaaaataatctcccagtctccatttatgtgccagaggggataaataaaaattttttaaataatttaattggcacatttttcaaaaaaaataaaatcaattcaacggtagggatacgatttatagttttttcattatttttttcctgagctctccgtggcctgaaatgcacaaaaaacatgttttttttcggctgttgttaagtattttttggtttttccaaaatttgtctaataaaggtaattttacgcgctatttcaaaaattacacaggtaaatggcttttttgtatggtttatttcgagcctccataactcgcctgcatttccaactaatccgaacattttgttatctaaaaaaagattttgaaaaggagaatcttttggaaatcaaatgctaagtaattccatcatataaaaaagttgtgggtctttcaaatttttatcacgctacaactcaggtcctaaactggtgattaaaaacaagcagtgcggccaaatggtgattttgaaaattttcagttggcaaccctgatcttgttccctccactgcatttagtttgtctaccccgaaaacacacaattaccgtttttcctaaaatagggttccagtggggctctgttttttaaactcttcctaaggaagagcgctctatttaactttttttcttgaatagttctaaaactttgatggggctgacctggtcaag

SEQ ID NO: 1772 - DNA, 7034 bp, Heterodera glycines
  unsure (1)..(7034): unsure at all n locations
gttttatacacttaatttttggcacattttctaggcgtgatatgcgcgagttggacaaggtaggtccaatgtttaattattattgcacttttttaaaaaaaagtacaaatttcacacattttcagaagcagtttatttacatcaggtatgtgctgtcatcattgtccgaaacggggaaattttgaaattttaatgcaatttttatttttgctgcaaaaaattaaagttttttgtttcaacacttcacgctgtacgacatgctgatgaagaacattgacaaaatcaacgttccgaacccgtaggaggaaagaacggaatggtgcaaaaattggcgggtgtttaattgattgataattgaaaatgatcattattttgtgtatccgtccatttgttgatgaattggtcttaaaaatgttgcaaattagtggccaacattggccgcgattggtgtacaaacacaaagttccaaatgcagtccactcccaaaatagagcctccccccttaattagtgaatcccgaaaatagagcgctcttccttaggaagagtttaaaaaacagagccccactggaaccctattttaggaaaaacggtaattgtgtgttttcggggtagacaaactaaatgcagtggagggaacaagatcagggttgccaactgaaaattttcaaaatcaccatttggccgcactgcttgtttttaatcaccagtttaggacctgagttgtagcgtgataaaaatttgaaagacccacaacttttttatatgtatggaattacttagcatttgatttccaaaagattctccttttcaaaatctttttttagataacaaaatgttcggattagttggaaatgcatgcgagttatggaggctcataataaaccatacaaaaaaggcattaccagtgtattttttgaaatagcgcgtaaaattacgccaattcgctatttggcattttcagcaattttgtctgacactgaagcgcacccatatagtgagtgacactgggcttgaacccatagtgccttcatagaaattcgctctttcaaaatcaaccatgtttttccgcattgcatgtccaattcgcccattgaccgtttcattctgtcgcattttctcctctgaaggtccaactcggattggagtaacttcagccgcgaattctcacgctcctcattctcacgacacagccgctgcattttatcaatctgaaagtggagatattattagccaaatgaaagcagttttagaatatcgaatgacaccaacaaaaaaaccgaatgaatttgacaaatcggattgaataattttaatctttctttttcgagctaaaagtgactaataaaaagcaaaggacaaaaggatgccaattcaattggtcctttgcactaaaaagccgcttaacaatgggccaatgccatgccttctctttcattttggtttccatctttgaaagcatcccttgagaaaataacagtttcgaaaattattgaacatttatttgtccactcacattgtacatttcgtatttgactccgacgcggaacaaaaactcatggaaacgaatgacattaaatgcagaatcaaaccgagcgggctggacaaaaaggaaaaacgatgaagggaagtccatgtattgaaaaatctcctcggacacagaaattacaatgaaaataggcaattgctacccgactcattccccccccgtggtaaaatgtgctttaatataaatatgaaattaaattttgtgctcacgtcctctctctgccactgtgccatttggtcagctttcacccccaacaatgcctccgctttgtcctcaaaaatggttgcccaggtctctccagaaaagtcggccaattcgacctgaaaggaaagtggggaatcgcattgcacaacaagaagaacctgcaacatcattatgttcttgtaggtgtcgaaagtgttggcgcacttctcgcaacggtactggttgccctccatggacactttcttcttgcagccctgctgaggacacgcctggcagaacacaaaattggtggtttaaagtgagttttatttggcttttgcgtccgaatatttatgcctttgtcgaaatcgtattcaatttaatgtgtttccccatacaaagtctatttgttgttgggtctgacctgatagatggcctggtcactcttcacagtgacgaccatcgccttgatcgaaaagtactcgcccttgtcattgtctcggctgactccgtcccgtcggataattccaatcatccgaaagtcgcgctctgaattattatgaatttagcacagaaaagaaaattgtttatttaaattaaaatataaaaaatcaactgcagaccaaccaaagttcgcttgcgtgtcagaggcggacccaatgctcagcgatttgatgttggcgtccggcctatactcgcggtaccaaagacaaagattctcagacttttttccctcggggttaaacagcagcgaagtggacgaagttgtggagacggaaaagccggctaaaaaaggagataaaatatggaaatgcctaataaattattgttgtgactggaatgtagtccactcggccaagtggactacatcccagcggtacaccccaaaacacagccgagacataatccagccgtggaataaatttgtaaaaaaatttcatctgaaattttcaaaaaaaaaatcttagaaatttgttcttagaaaattttttgttagaaaattctatgaaaaattttcaggcgatttttcaaaatttaatgacgaattctaagaattttcaaaaaaaaatcgcctgaaaatttttttcatagaattttctaacaagggaacattccgagctgtcagtcagaaaatgcatataaatgatataccattggatagaggagggtcgacttctattgtgaatttttaattttagcggtgcattttgcctccttcaaaagttacagggcctcaaaaatgcgaatttcattgcctcggggcacattccgagaaaggaaaggatcgaaaataaaaccgtcccggtcgtcgcatggaatgccaccgcctcttcgttccacagagtgaggcacacttcggtgccagttgagtcgagcaggaaaatgtcgcgtttgtccaattgacgcatgtccttgcgcgaagtcacctgaataacaaggccaaaaagattttctcttttttgtattcttcggaagggatttagcataaaccgtagaggagccgtcttaaaagtgtctgttatctcaaacctgtgcaatttcgcccactctgtccacaatggcttgtacgtccacacattcgttcacatggttcggcaaatctttcaatgaaatcggtttcagcttcacttctggcacttcgatttgctcctcacaatagacaacctaaagaaatattagctaaaataaaataaaacttattgtaactaaaagcaaacggacctcagagtcacggtccaacaccaattcgtagtcgtgtccagtcgaattgaatcttttgttggccgcccgaacggaacgagggccaccggcgccgctaatgaaataggccttaaacgaaaaagaatatataataagagagactgctaaatgggattttcgaaatagtttcaatatttcgaattcgaatagaaaaaaaacaaacgttcgcattttcgacgattggaaagaatttgtccgcctgttccccgaaggcagcgattcgaattgcaacgccttttgagtccgtaacattgaaagagaaaacgcggaaggaaccacgcggactcgtcaggtctttgatggaagcatcctttccgctgaccacgccacagatgcgccatctgataatcaaataaacaaggtaaaatccgacgggtccgtccaaaattttcaatttctaatcttgaagcattcccgtattaattatagattttccgcctgcctgttgatgtacgggttgatcgcttcgatcggtgtaacgcccatccgtgccatttgcgcgcccgcatccggctggcgcttccgcaacggctgtcgctggtctgagggtgacgagccgcgccccctcttcgcggacccaccgccgccccatgcgttttcaggctcgtctttcacttgggtgccgcgccaaagggcgacactttcggccgctgtctgctgagtgtcggaatctttttgaggctaataagaaagtaatcgaaacaaaaattgacaataaatttgacaatttacgccacctgaacaactcggcgaaattccgccgggtttccactgtgtggttgcgggttgccaatgacaggaaagtcaagcgagtacagcgtataatccaacacttggaagaaacaaagctttccactgaaatatgtataactgttgctatttctttttatcatctcactacgaatattgccaattcataaattttaattattattttttccttacaatttgatgttaaagtggaatattcaaagtgtttgattttacccgtcgacccgtttccaactggtcacttggatgatgccgttgtgggtgctcagcccgtcgtcttggaaccgccgcgtcaccgtctgtggaatgacgcaaccgctgtacgagtacaaactgtcgctgagacgagcccgcatttgctgcccctgtggcggatagccgcccatcgccgacgatgagccaatggtacgagtctcaagcacttgcaaaatcggctgaaagtcggccggcactttttcatccaaaaaagtctaaaaacagaagagattgattagtttgagaaggaaaaactttaaagacctggaaaaatccttgtgaaagttgtggttgatcctccatttaaagattgggaaacgttttgccgtttagcaataaatatcaatgatctatagaatagcgaaaataaacaaaacaaacaacaacatcaacaaaaagcagacataaaataaagtgacttgtgacaagattaaaatttataggtaaccagtgccgtacgggcactgaaagagacgattttaatttatttataaaaaattgaaatagattcgctattaaacactgtctctagcgggcgccacgcgccaaaaagcttttataagaggggaattagattttttaatggccgggaatagcctctttctgttccttttccccttctcttcctcttcctcttcgccttttgttcctctttctttctcttcctcgtctcttgtattcccagggttcccagatcaaaattttcaaaagcctcatttggcaggcaaaaaagcctcatttctacaaatttattcaaaacacatttaaaatgttcaaatgttatatttttgattgtccatgaccaattttagcaatttttgctagctttttgtgaaattctgagcatgaaaaattgaagctgattttttgcggtactttttaaaaaactttcggggaataaggggccggcggtgccgataggcgccgccggtaaaattttgtaatttttaatgcgatttgttaacagatttgtccacaaaaatggccaaattttgtgattttgagcaaatttataagaaaataaaggacttttaggggctgacggtgccgataggcgccgccaggggaaaaattgagaaatttgaccatattttaacagattttcattaaaaaattattaattttgtgattttttagaaaaaaatttgttcttttctggtttttataaaaatttagcaaaattttttggaaaatttgggtgagattttcgttttgatgctctattagaaacccaaattattaaatatttgtaaaacattatgacaatttatcaaaatttaaaagattctgaggattttcccaaaaacggactgggtcagtttagtctggccggtttagtctggccgttttagtctggccggtttagtcagagggtcggtttagtctggccggtttagtcagagggtcgttttagtctggccggtttagtcagagggtcggtttagtctggccggtttagtcagagggtcggtttagtctggccggtttagtcagagggtcggtttagtctggccggtttagtcagagggtcgttttagtctggccggtttagtcagagggtcggtttagtctggccggtttagtcagagggtcgttttagtctggcaagccgttttcgcccataattcttacaaatgtttttttctgtcaattatttacaagtaaaaactttaaaaagcgatggtcgctgctgtccgcacagtctttccactttgtcgtgtgcaattctgcttttttcacttggtgagaagtatgaagaagcgaattgcttcagagggtttaacacaggtattgattgcatttttgtattttccaatagaatttttcatttcaagtagagtgccacgggaccgggaccgggccgggaattcccggtcatccgaggtcccggtcccgggttttgaaaagctcaggtcccggtcccggtagggcaaccgggaaaaacaagcactggtaagaatggggtctgagtgaaaaattagtgaagaaaattggagtcaacgggaaaaataaaaaataataattaatatattctttaaaagtaacacaacccaagtgtgcaaatggcctaatggctagtctacccaagtgtgcaaatggcctaatggctagtctacccaagtgtgcaaatggcctaatggctagtctccttggctttcccttcttctttcccctggttcaatccctctacagaaattagattattttcaatttttttttttttgtatactcgtgggtttcctacatataaagaaaatatgattcctcatagtttttttttaaattgatacatatttatcattttttaaatgaaaatcctaccaattgacttaataatcgcaaaaaccaacctttttttgttgaaaatgagttaacaaattgcacccaaattttggcgctatattaaaagtgacagtttttgaaacaaaaggggggacccttttgttttgtaaaatttttttaagataaaaaaccaggataattttttatccgngggttttaaaggtcgctaatca

SEQ ID NO: 1773 - DNA, 875 bp, Heterodera glycines
taataaaataatgcataaaaacagccaaaattggtgtgacccgaacccttgaccaccaccaccaaaggcaagaatactaaccatttgaccaacgggtcgcttgcctccatccaatttaattcccttttcactttccttcttttttggaagaaatcccgaccaaaagtgcttgtcctccctttttagagcacttcccggaccaaaacaaccctggtatcattcgaaagccaagagtttgtagatgtgcacaaacatattaaagttttgatttgaccttttttaaggtatgcaaaaagcattcaaaaatgagagatccaaaaaaagtccatttttgggccagtttttctaatgtagttcgaacagttctaaaccgatcgaaatggctatagttttgccttatagacattgaaaaactgcgtggattgaccccactcgcgccccgtaaaactcgctagaaagtcttaaattagtttttaagcttggatcatgggtagaaacttcttatatagggaaatgacaaattcaaattcaaggacagtttttttggactaaaaatttattttaaagttcgaattagacctggattcatgcttgaatttttcctggacctgaattgtggtcaagcaaacccaggcaaggctttttatttgtgagcaagggtttatcattgtaagacgcagagatcaaataccagattcgtccttgaatggcaaggacttgcttgaaatttgaaaaataggtacagtatagtttaattcaaaatgtttttgaaaataagcataccaaaaaacattcaaaattttacaatttttaaaactttatataatatttttttattaacttactgtatttactgtatttgaactcccctttga

SEQ ID NO: 1774 - DNA, 3507 bp, Heterodera glycines
atgatcattgcgaccaagtcgaaattccaagttacttcttaataactgttttacaagctaaatttttttttggttttttgtaaggataatagagcttgtgaagggctttcgaatgatactaagattgttagatttggtcatcaatgaaaaaagttatagcccgaaaactgggctggcaatgaaaccgctggcaatgaaccctcctgttccgccctttgaggggggttgaaaaatcgaacccccggggttcaaatacagtaaatacggaatgccattcttggtgcaaattctgttaatatgtaaatcgcacaaaaaatcaaattttcccggcggtgcctatcaacggggataaatggagatggggggattaatggagacggggcgataattagagataatacggtaaatcaaaattacatttacagttcaaaattaatattttaaattaaatttttatttatcaatcactgagcttttttgtagaacgactcaccacgctaaaatacagcttccaaatagagattcaagatcccataaatgcttgattttcttatcgttgctcctaaatcgactttaacgacgacgcccaaaacccaaacgaccttggccccactcgtcagtctgaaatcagcaacctttcttctcttcgtttagggttccccctttctctctccctttccctttgtttctttgtcatcctctctttcatattttccttcctttgtctactattgatctttttctctttccccattatttcttcttcgctttttctcttctccgccgacaattctcagcgcccctttccaatttcgtcctgcccttccatcgcaatttctttcttttctctgctcttagtgtgcttctcgccacattttttcttcctcactaatcactataaccaaacgaattatccattttcgcttcttttccctttttaaattctttttgtaattaaattatcaagaattaagacatattttttgtcgaaaaacagtataagtcggggcagtatgagttggacaagtacgagttgggtttcgtccatattgattgccccttaacctaaacacatttaccaatatgttagctgacaatgaaagagattagcgcctatcttcaacagcattgagttaacaatcacagaatgataaaataagtttgcttcttatgccaaaaactgaagaagcgattcatagacaaaagcgagtctaaaataggcatcaatttaacagtcataatctgcgcaacatctgtagaaaatatatgtaaattgaaaggctgacagtattaaattaacttactttaaaatgcaaactttctaatattgaaatacatactaggtgtatttcccttcaatccagatatcaaacaaaaattgttacttggcgatattcgctggcgaaattcgaactgtctgccctcagggaaaattaattgttggcattggcagctacggaatggcaaatggtgcgatggaccaaagtcgaaacggcactctaactctattatcggtaatgccatgccaatttccatttgcgcatcgttcgtcttctcagcttacatagagtgcccaacaagcattacataatcggttttggctccgttccgtccgtccgctacgttcacaagcgttgcgcctcacacgcttggccagccagcacagacagcccctccccatcaacgcaccagccttctctctcttcctcagtcgctccaccgcctcagtataaagcatacctcctcccccaagcgtcattgccgtccgtccctcacatttccctccattttctccctcgcgtttgcccaactaaacaacgccaccaccccatttactatcgacgacgacggaggaggattcgaaggcagggaggagaagagaagaaatggaggggagcgccctctttcactcatcagcagaggcaaccactgactgactgactgagtgtgttccctcccccccccccgccctcccccattcattcgcctctccccattcagcagcagcagttctcctctgctcaacatcgtcagcagccccacagccctaaatcgacgacaaaatccttctccaatcgcagaaatctcttccaattcattcccgaaacggacacaattaagcgaaaacttgaacagagtgagtgagcggtttaatttgtaaaattcatgcctcaatgtgttttaaactacaagatttgctcccaactttctaaactattttctctgtcttttttctattatttttttttttgttttccatttctaacgcccctctcactctttccttctcattttagccacaccatacgccgccactgccttttttgtccatggtattattttccgtgttaatcatcaacaaaaaaagaagcagtagcaatccaaccaccaccaccatcatcaacaccatcatttgtattaactctcaccagtgatagggccaaaaatagaaaaagtgtgtcgtccttccgagcaattcgcagcagtttcgaaacgcctgcgcatgcaaaacagtcaagagcagcaacaacggcatcagcagcagcagcagcagcaacactcccaaaaagagcaaccaaaacagcagcagcaaaaacaacagcggaaacgcaagtgcgaggacggggaggagcactcggcacgggcggactccgttgccaccaccaacaaaatcgttgccgttgagcaaccgacgaaacccgtcgctgccgctgctgctgttgccgtcccttcgacaagaacaactcggtccagcaaccgaattgccaagcagtacacgcagaacaccagtaaaaccagtcaatctcctcaccaacagtccgcgaactcgaccgattgtcaatacgacaatttccaccatcagcagagggggggaggaggaacacaaaggagaagcggtggaaagagtcagcagcaggtgaaaggggaaaggaagagttgggacggcaaaaagtgataaggaaagggacaatcggcggcggagaacaccgtttaaactgatcaaagaattgaaaaaaacgaatgattcacagacatactgtaaacgcgaaattattacttactccattagaattttcctagccactgtaatttttacagaaaaactgtgtgaactttgtgcgtatctgttgctggggctgccttcccctcccccacccttttaacatttaccccctccctctgcttttacgttggttgatcaatcacttatcccccccaactcccatgtcttctcctcttcctttcttccattttcttttccacccccgctccctccccctttccttccccctctcacttgttttcatcccccccccaatgactaggatttccggaactatgttttgtcaatagatcaagggcaaaaggttcttgggatcgaggcaagataggataaattcgttcaatgcatggtctgcggtttgccatccttttcggatccttagaaatgatgcgtggtttccagattttgttttttttgttagacgaaaatttctcaggcatatt

SEQ ID NO: 1775 - DNA, 1353 bp, Heterodera glycines
  unsure (1)..(1353): unsure at all n locations
atcgaaaaaatttgaaatttcaaaaaaaatttttttttctaacaaggattaggaataattttgagggtaaattagtcctctttaaagggagnatntntgntggngaattgnttggtgggnttnattnagatnattttttaaaatagttattgtctccaaattagggaaaattattttttatttaaaaaaaaaatggaaaaattnaaaaataattgggtatttttaagggnagnttgantgnattnggggnagtggattttgtgntgnaaaatggtgaagtnntngtnagtgaatgtnngtttganttnggnattnatngnaaagtaaagtgaatagagcagcttgaaatgtttccaatcaatttctgaaaacaattaattaattgaggataattaatgaactgaaaaaattattattatttaaataatgaaatcaataattaattaaactaatcgtgaaaattaattgattaaacaaatattaaccaataaatctccaatcaattttttgaaaataattaattcattagggataattaattgaccaattaacaattaattacgataattggtccattaataattacgataattgatcaattaattaataactaatcaattgacctccatcaaaccattggatgagcaaaccatccaacacattggtgccgtaaagccagaaacaggtggccgtgtaggaggacatcatccgctgcacttggcaatcctggaaaatcagggaacccaaaccgtgactaattgaagtgtcaagagtctcggcatgagttttgcgaaatttaagtacacggaataggcaagggcacggcgaaatccacatgttttcaagaggtaagaacaaattatgtgtgcgatatgaaccatttggcggcctatttcttatgaaaaacaacaaaatcccaggaaatgggaattccaaaaaaaaatctttaaacttttttaaagaaaatttttaaaggaaaaaatcttgcaaagaaaaaagtttttgaaaaatcgttagaaaaaatagtgtaccgtatttcctaaaataaaagcccccccctgaaaagaagtctcctttcgagggaggaggggattgaaaaatagaagccccggagtttctattttaggaattacggtagaataaattaattagtcaattaataattaattagtataataatgaattaattaattgcctgattccgccgtgtagcgattgtgaaaggcattgacagagtgtgcgcggtggaaagagtgccggcgaatgagaagaattcggcacggacatggaaataaaagaggggtcttttgccggttggcatcgcggaacgggcatccaacagagagtcctttt

SEQ ID NO: 1776 - DNA, 1028 bp, Heterodera glycines
cgctcagtgctgcacgtgtgaaagcctgtgtatggctcgctgcgtggcaatgtgtcggtggcgggccgcctcgcttggctggttcgctgcgccaatgtgggatgcacgctcgtggggcgacctaacggctgtgctggcgtctgtgcgtcgttgagcggttgttgtggcaggcacataacacactgactggggatggtggtttcgttcccggtcttacgtgccgtaactagcggtgtgtttgtgcttgctgctacgtccgtggccgtgatgagacgacgcggtagtgcccgtgcttggcctagcacgtggcttaagactcaatgagtgtcagctcgggcaccgccagctttttctttttttttcattatttttttttacacttctgttgaagaatgaattctagtcttatcggtggatcactcggctcgtggatcgatgaagaacgcagccaactgcggtaattagagaccgtaattacatggacactcttcttaaaccttgaatggtttcttgttaaaatgccgtaaatttcctgaaatttggcccttatctgaattagtgccgccccttgaaataaaacccaagaaatcccagcctcaagggaaacttttttctaaaatccggcatgtatccgaaaaaattgaatttgtaaaaaaaaatcgaatcgcatcaagaaagccaggccggactttgaaattttgagaatttttagcaataaaaatttagaaattttcatttttttcgaaagtatttttgtaacattttatctgtttttcttctacctgataaaatcgctcaaattgttgatcatttggctgaaccgtcggaggcggttgcatccgatgcgctttgttcaccagctcaaccagggccagcgtggattttttcctgaaaaccgaaaatttcgcttttgattggaaatccaagaaaaaaatgacgatttttcactgtttaatagattttttaaaatttcttttttccgaaaaactctttactaaaaagtcagagcacttgaaatttaaaaaaaa

SEQ ID NO: 1777 - DNA, 3026 bp, Heterodera glycines
attaattaaaattatattttttaaacattaaaataatgcattatattaaaaataataaaaaagtgacggcacactcgaggagggaccaagtcaaaatcacactaaaattacaagagatgctcgagagtcttgggtgtagaccggcattgattcagccctctttcactaattgttatgaataggtctggaatttttagtcccaaaataattaataaaaaagtggcaaaaaaaaaaatgccgaaataatggcaaaatggcgaaaaatttcttaatgtggtgacaattttttgaaatctgtgcttttttctaaaaaatatattcgaaaatagtgatagaatttccgggctaaaaattttgtttttcatgcatttctcagcaaaacaaagccgtgaaaaatagttttttttaaactaaaaatcccagcccctagttatgaattttcggcctaatttttggattttcaaatttcaaaaaatggaaaatgtttctccactttttggcgcgtcgtacacaaaagatgaggataagtggcgcaccatccgttgtgttcagcgtcaaatagtggcggaatggaaatgcactcgcgcgagttcacatccgactttttgtgcgctgtgttaccaccctctgcaaaaaaaaaaaaaaaaaatttcgaacataaattattagttttggtcacgagtcgcaaaattaggtccgggaatctcagcatttttggtctcgagtcgagaaatggctcgacttgaggttcgagaaaagaaatttttctggagtcttgtcttgagtctcactctcaggtttaaacggtctcgagactctcgtatcacgacccgtgactagagtctcaatgttggtctcgagtcgagaaatggctctacttgaggctcgagcaccggaatttgttaggagtcttgtccggagtctgtctcgctctcaggaaaccggtttcgagaaactctcgagtcgcgcgactcatgactcgagaaaaatctcggaattctttgcaagggtatcggttccgtccgagtctcgtataagttcagacttttaattaccctccgatgctttggcattgttgcgcttaaccccagtggccggcttcattgccaaaagtgcggccgaaggggttctaaaataatttacaaaataataattattaattgctaaaaaaataatttaattaattggaattaaaacattttttctgagaataatttgcccactttcgaactggcgacggcggatcaaatgttttgcgatggcgcatttcctgctgaatttgttgcgccacctcctcactgacaatttgcaaggaaaagtcgcggaaaaagcaaaaacggcacaacgacacaattttcattggaaaactaaaaagataatttaaatttgcaaatttaaaaaattagcttttgcattgcattttgagaaatttttaggaaaaaaggagaaaaccaggacaagaggtataggtcctccgggtctgaaaaagccgctggtaaaattcgagatcagtcccgaccggttgggcatttgttctgctgggacagctctagttattcaattgttgtgaggttcggactgggacactatagtctggtcgttatagtctgagccaagtttagagcatcctaacttttttctttactgaccaaatccaacaaagttgatatcattcgaaagctcttaacaagctctatcagcttcccaaaaatcgcaaagatataccgacatgtaaaaatgttataaattaaaatatgcaaacattctaacttttgtgcaatattaatgctgcgactttttaataagtttttaaatcgattacaactagattatcttccgcatctaaacttatatggttttgcaatggagccttattcatcataaatgtacgagtatcgcaaacggacacttgaagaaattgagtttaatattttctgggcatgccccccgagctgatgcgcccagatttatggggagacggaaaccttcaggagtagcttccctatagcctgaactttaatttctgcgttggatttttgctccccataaatgtttgagtaccccaaatggacacttgaaaaaatcgatttttttgtttcataaatatttttttcagaaagtgctctaaagcgcaccaaattttatttacaacttaattttagcactctgatgctttaatatcaaaaaggaagatggagaaaaaattttttaaaaaatttttccttatattttggttatatcgttttgcttttggtggggtgcttggaacagtggaatcatgcgcacccgtccgatctggcaagttaagcaacgattgctgactagccaaaaggttcggtgccgtgatgaaacgaaccagcactgcttaccccgcggcacccggcacggtcccccgaaggaatggatttaattaaattctctccttcggggatttttttccattaggtcgtccgttagcgttcgattgctctagtcaatttttaaaaatttttgttgaaatatttgtcgtgctctgaagggcgtgggagggggggggggggaaggcccaccacgaggccgcgaagcggccgagtgagtaccttcggtgcaggaaaattattaaggaagagagttcattatttgtttattttttgcataattaattcataaatattttttccagaaaatgctctgaaacgcaccaaattttatttacatgttagtttaggcactctgatgctttttctattgaaaagggagatgaataaaatttttaaaaatttttaattcctttttaaacaggccaaaaagtttaggcttaacttttttttcagaaactgatcagaagcgcagcaaactttgcaaagatattgaaaggaagagaaataacctattttaaatattatctagtcagttcatttaaataatttttattcaaaacaatttttttttgggttttcggggcagtccccctgaaccgatgttaagcttaacttttttttcagaaactgatcagaagcgcagcaaaatttgcagggatactgaaa

SEQ ID NO: 1778 - DNA, 3038 bp, Heterodera glycines
gttacgtactaaaaatcgtaaattccgttatatccctatctacatttttcaccaggggttttccgggttacccgaaaagcccggacttttttctcgattcgaagtccaaagctcgacccgaatttttgtcgttcgacccccccccccccattttttttcgacacccttttgatagagaaattcggttcttgaatccgggattaggtcttttgggaagacaataaaatggttcggagtgccgaatcgaatccaaaatgccgtctctccgccccccagcaatttgttttttcagtaaggcctcttaaaaaaaattaaaatgtcccacagattgttggtgaccaggattgggttcacacttggctccaaacagatgatggagtcgccgagcagaacatccgccatgccgtacaccatgtgcagcagggggctgaccagctttgtgccggtcggcgccaacgatttgttggagcgaatttcgatggaaaagccctgggggggggtgagtaatttatgtatttgatcaataatttatgcatttaaggcaatcgaaaggaaatgccattggggtaatttaaaccaatcggatttggatggaaaagccctagggggatattttaattgttcatttttgaattggcgcataattcaatttgaaatatatgacttagtgatcaaataaacattggtgatcacatcccaatgagatttcaattctacccttatttgtgcgctaatttagtagaaaaaaaagaaatttccatgtggagaataagatacggtaataggtttttgggatactatatcactaattgacaaatgcatttgtccgggagacctatgaccaattggcatgccatccttcttctttttttacctgtatccgtgcagccaacacgcccaaattgtacagcatgtgggcatagaaggacagggccgagtccatgaaggtacggttgtcataaccgtaatgcgtcatacggtggatttggtgttcgcgcaactttcgccacaacaaattgccgtgctgtacaaacaatttaaaaatgcaaaaataaataattattttttaaacttacgcaattggagaaatcgcgttgaagcgccagcgcggcgactaattgcttcttgaaattggccaaatgggcttcaaattcggcactggttaagcatttttgttggcacaatgtgtacaattcgtgtagcgaaatcaacgcggttacataagcctggacaaaaaagaaaaattcaatttgcatttttaccgtataaatagtacggtaattagagaccgtaattacatggacactcttcttaaaccttgaatggtttcttgttaaaatgccgtaaatttcctgaaatttggcccttatctgaattagtgccgccccttgaaataaaacccaagaaatcccagcctcaagggaaacttttttctaaaatccggcatgtatccgaaaaaattgaatttgtaaaaaaaaatcgaatcgcatcaagaaagccaggccggactttgaaattttgagaatttttagcaataaaaatttagaaattttcatttttttcgaaagtatttttgtaacattttatctgtttttcttctacctgataaaatcgctcaaattgttgatcatttggctgaaccgtcggaggcggttgcatccgatgcgctttgttcaccagctcaaccaggcgagcgtggattttttcctgaaaaccgaaaaatttcgcttttgattggaaattcaagaaaaaaaatgacgaattttcaactgttaaatagattttttaaaatttcttttttccgaaaaaactctttactaaaaaagtcagaagcacttgaaaatttaaaaaaaagacattaaaaaggacatgcttttcctaaaatttgccattaatttttctaaaaaaaaaaaaaaattttttaccttgaaaaatagtaaatttattgccatttttcaaataaaaatttttgatcaccaagaattcttctcaacatgatctgaacttggcaccaaatttgagaggaatattaaatgaaaattttttttggcgcatgccttaaaatgtttgccaccgtaatccaacaaattcgtgtcctgatccgactccaaacggttggccaccgacaaaagggaccagcacaggaagctccattcgtcaaagtatccgacgggtacagtatctgcaaaaaggacggctaccgtatataataaacagtaggccagccaatttaaaattttagagaggtgaagccacagttcatccagaggaacaattttttctctgacaatttagcgtcaccgaatatttgtaccggatttcatcccaaatacagtttataggagatacaggattggagaagagttacagtacacaatcaaaaaccattgtttggcaatttcaaatctcacggtgaagccccgggaataaaaatttaaaaattttttaaatgtgcctatttttagtgtattttaaaaagttttatcgaacttagctctttctataattaataaaatcgtacaaaatttataggcatactcccccggtacaggataaaattaaactgaaaatatttcaacgcttattggccttaaaaattttttcgaaaaattctaagttctccattatttaaaaaaaaactttgcgaaataattcataaatatttttttttcagaaagtgctctgaaatacaccaaattttgttgtcatgccattaaaatgtattcatgctatattcagagctggtacggtatctgaaaaatccgataccgtatcccattaatggccaagtgcaattaattcaccgttaggcctatttttaaggcttttccccgacaattctgggtccccgaatctttctctccaggcttcaccccgatcaaattttcattttttgatcaaaaattgcccgctgttgaagaggaggaggaggagggaagtgccgcaattttggcctcaatttcgatcagtattttgtacagcgatcggttcagctgttcaacgcgttgatcactgctcagcgatgggtcctcctgcag

SEQ ID NO: 1779 - DNA, 3154 bp, Heterodera glycines
  unsure (1)..(3154): unsure at all n locations
tccaggtccaggtcatttttttcggcaacctggatttttcctggacctggatttttgtccaggaaatcaaggtccaggtcaaatgtgaaaaaaaatccaggtccaggcaaaacaggaaaaacctggattttcctggacaaaattttagaatttattttttcaagtaaccgatgttttttcaagttttcaaaacagattaaataaatttaaaaagacattattattatttattagatatttttagatgctttacgcaaataattaattttttcaaacatttttttgatttttaaaataaatttcaaaaaatccaggtccaggcctggatccaggtctcgaggagcctggatttttcctggacctggatttttgtccaggaaatccaggtccaggtccaacatggaatccaggtccaggtccaggcttttttcaaaatgtcgatctctagtaaaaacccaatttccttaattacctgtctcggaaaaattttttcggcatccgatcataatataacaagagcagaagagaaacacgtacaaccaaagtacaaaaatcgttctgagacaagaaaaataaaatattagtaaaaggatggaaaaacattgctaaagaaaatggcaattagaaaaaccgaaataatcaaagccgtaattagacaaaacaaataggcaccaaccaaaatttaaaaaaatttgtttttttaattttaaaaattttgaggatttttctagttttattgatttcgtattccgaacgtcttactgtacccgaaaatgttagggtatgagaagagaaaagcgttaagccgcggcacaaagaacacgcaaaggcgattggatgtgagaagcgcggaaaaatgtaatgtggcattgtacgctacagtatcaaagaaaagcacggcataataccaaaacggatgaccgtatacctgaaaaaacggtaccaatggtaatcaatcagccattaattattgtcataacagaaactcactgcttctcccgtaaaagttatcggtacagccacaatgatttgtacagtttgagtcatcaaatcacagatgaccatttgccatgcaattgtgaagaatgccattcgacggaactgataatgacccttaagaaataaaaatattaaagcatttctcattaaaatatattttaaaaaataatttaataatcattatataataaaaatgcgcctcttgattatatgttgaagggaaattttttaaatggtcaaattgtgggcaattaaaatgagtcaaattggggaaagaccctcaaaaaggaggcaaacccacaaaaatagcaaaaaagcaactctgactgtttttatgcggtatataacagggatgggccaaattgaaaaataaaaagcgaaatgcgaaaagcgaaatttgcgaaaatgcgaaatgcgaaaagcgaaattttttctacaactttttaatagttaaaatcataaagcaaaaatcatttttttaaattttattccaaatttaaaaatcaataaaacgcttttttgaggcgcgctttttccaaaaaaactttttgggaagagggagcaggggcgccaagcaagcgcggcgcccggcaggcgcccgccgggaaaatttttgaaaatttgattanaatttgttgacagattttcactaaaaaatgatcaaattttcgtgatttttatcatttttctaatgagaaataagagttttggcgcgccgctgagaacagtttttcatcaaattaccaaattttgcgattttgggccattttctaagaaaaaataggagttttgggggcgcggcggtgccgataggcgccgccggggaaaaaaattggaaattttgatcatttataaacagtttttcactgaaaattagccaatttataggtaaaattttgaaaaattttatgggaatttaatccaattcttaggggtgtaaaagtcgcatttcgcgccaaaaagcgaaatgcgaaaagcgaaatgcgaaacgccaaaaaatgcgaataatgcgaaaggcgaaatgcgaaaagcgaaacctcggcccatccctgctattggccttcaaaatttgaacaaaaaaaatcattcagtttcaaaaagttatgactagagctcgcattttgaggcataagcctttttttctgcgcactagtttcggtatattaagcataaataacgcattttccacttggtttgaggcttctacgttgacttttattatgccttttttttgccttttttcgggattttcgtgccttaaatgcctttttggcattttgccgttttggtgccttttttagcgttttttatcgaaaaattccattaaaatgcaataaaattgggaaaatacacccctaagaatttaaaaattttctcaaaaaataatttaattttttttcttgataaaaaattttattttaaaaattttcctttttcgaaaacattataaaatatttaataatcatttaaatgaccaaaattaagtttttttgttaaagttttacgtgttttggctccctaaaaatccttaataaagaattttaaatgccttttttatgcctttttttcaattttttggtgccttatagtgcctttttcgcgatttttggtgcctttttttttgcgagctctagttatgaccagaggaactcgaaaaaccaacttttttttttaattttggtcataacttttttgaactttaatgaaactttttgaaattttgcaggctaatagaaaatgcttagcgctttcgaatgatataaagaattaaaaatttggttgattttgagcaaagttatatgaaaaatgttattcatttgatgatttttttgacttttcatggtttttgactgacgccataaaaccaaatttactcacaaaatcaaacatttccatgtgaagtggtgcaaattcactgttgttattactgttattattattgaaattgttattgttggcattggcatttatatttgttggttgttgcatttggccaatgattagtgacgatgccattttgaatttttttttaaatgaaaaaatatttgacaatttgtgaaaagggagcgaacagagaaacctaaaaataaagaaaattgatagaaaagataatgaagaaattgaaaaatggagctacccgacaaaaagtcaagga

SEQ ID NO: 1780 - DNA, 1885 bp, Heterodera glycines
ttaaatttactcaatttataagaaactaagattttttctataaataaataaatattttttaaaaatttttattttttgtgtaaaattttttttagattttaaagaaaaaataaaatttcatttttatgtacatataagaaaaaattttctagaattttgaaaaatgacgtaaaaacatacaaaaaaaaaaaaaaaaatttgcataacattgttgtgtatgtgaataaatattttcgttattttttttttttgtttgatcggacgattttatggaagggttactgataagataaaaataaaagtgacagatgcatggaatgaaaagaaatacataaaaagcttaaaagataaaaataattaatttttttgctgggataaaattcggattttttgtgggatccaaaaaattgggcgcgaggaataaaaacagaaatttatctgcccaattaatcaaagcaaattaatgagaaatgatcccaactatttttggttacatcgccaatgattgtgagtacataatgaatgtgattaagtgatgacgcatctgatcgctgatcaaaaagtgaccgaatttataaaaaaacaaatgcccaaaaagacggcggcaaaacatttgatggtattttaatgtgccaaaaattgaaccgacaagaatttgattttcctggataggctcattatctcaatactgtaataatttacagttagttattatttaaatatttttttattataatttgtctatatcggaaaattgttttacgttttaaattaaagctaaaattaacagttaaatattaaaatttatttattttagtaaatcttctacagaattaaattaaaactaaattattatttaaatattttgtaaaaatttagttttattcggttaaatacttttgcatattttaaaattcggtttgtaccctaaaatacagaaaatcttgtacccaatacataaagaaaacgttaatagtccgggaaatcaattgatggatgtcgagaatggactcgaaaataggagaaaagcgaatttgtcagaatattatcgacaaaaaaaaattcaaaagggtcaataataattgccttaatttggacgcaatgagtcaaggggtaattaacaaagttaattaactaattaacagacgaatttggcgaagacagaaaaagttcgcgaccaatttttgaggtgcaaatcgatcgtcggttcgaaaaacgagcgtaaatgttatcatattattaattattattatcagcggtaatttaggagaaaagggaaaatattattccgaggtcccagactctcaaaaagcacataaaacacttttataggttttcttaagtgttgaaaatgactaaaccatcaacaaacaaacaaaaaaactagggcccggcgcgggacgggactccgtgcgggattttgcgggattccagtccgcactcacgcatttttggaaatagcgggattaaaatcccgcgagatcctgtcccgtaaaaaatcaaaattccaatgttgttgcaaaagtcgggattttttccatcttacagaccaaggaaaattattaattttgacgaatgccattgaaaatttcaattttgggtaaatatcattctgagataaaagactcaaaattgctcaataacacttgtacaggtttggacaattaaaacatttaaacaggtaaaacctgtcaaaatcggaaattgaattttgcgatattgcgctaaaaatgaacgcgaaacgtgcggacttcttccggagtctcgcctcgcgatggccgccgtaatcgtgtgcgcctggttttaaacgcggataggcgaaaataactcaattttcgaatgttaacgctactttttaaccaaagagtacccatacacttcgact

SEQ ID NO: 1781 - DNA, 7901 bp, Heterodera glycines
tcgcggatcaatttgccgcggtcgcggatcgcgcaaaaaaatagccgcgaatcgcggtcgcgttccacccctgttttggaaataccgaaaaaatttagattaaattttttaaatatccaaaaaaactaactataattgactaattagaaaaaaaattaagcggttggcggcatacatgaaaagggggtaatgggttgccaaagatttttaaggagtccgagggttggagagaggtcggcggccaaattatcaatggaatcaatccataaatttaacgatttaattgcttttcaaatcatttttgcggcacgctttttcaaaaacttttcgtgaacagaggcccggcggtagataggcaatgccgggaaaattttttttgaaatgaaaagtggctttaatttaattgaatttaaatttattcaaaaatatttggcattctgttctttgaattttcaaaaaatttattgcgtagagaccggcccgggacgggatcacgcaggtataaatctcgcttattttgaaaaatttttgatcgaagccccgataattcccaatttcaaaagctttcttctgaaacatcattttatgcggaaaccccctctttagcggaaataatattgtaaaatatggcttctccgttgcgtctccctcaacggatcggtgcccaccatttttggcacaatttcgataattttctttttgacgccgacggcgtgttgtggcgggaacaacagcccctcgagggggcggtggaactcatcggaacgctgctcaaagcgggcaaaaaggtggtggtggtgacgaacaactccactcaaagttgtgccgaatacgtcaaaaagtgccaacgaattggcttcacaggtctttaagggattatacctaaaataaagtttagaaattcgtttataaatgaatttttcaaaacaatcgaccagaaacagcaaatttatggtcgtataaactttctttagaggccgactaaattcgttatttttcagaccttgacgagcagaacattgtcagctcgggcatggtgttggcacatcagttgaacaaaatgaagcgcagtgccgagtttgggtcgacggcgcatttgccggtttatttgttcggctcggtcggactgcaaagactgctgaaggagagcggcatcgacagctttggcacggggcccgacccaattccggcggacactgtgagcacaaataacattgtatttcctccacccccgaaatggcacaattttaaaatttataatagaaatccccgttctgtcgaccagtttttgagggttttctgcatttttattcggttaaccttttgtctctattttcccattttccgtcttttcccataattccgccctccccaaaaggccactttcgtctccgacttgccaagccttgacttgggcgtcccgcggccgttcgccgtcgtcgccggttacgacattcacttgagctatgccaaagtgatgcgggcggccaattggctgaaggagaaagcggtgcccttcttggtgaccaacgaagacgcgacattccccggaccgaacccggacagagtcattccgggcgcgggcgcagtgagtaaaaagggaggggaaatggacaaaaacggaataattcgcagtttgattgaattgctgctggacaaaattgaaacaaaaaaatggaaatttaaattggaattcaaaaaggtcacttccgttttgcgctatgtgtcgggccgtgagccgacggtaatgggcaaaccgagcgccgtctgttggcaatacatttgcgagaaggccgccgccgacacgccgttggacccgctgaggacggtgatcgtcggagaccggtgagaggggaagcacccgaagagctttttttacttactctttttgcccattgactattgtaattttcttaaatttttggttccatgtgaaaaaacgggaaattttgaaattttagccattgagacaaattttggcaaaaaagttttaaaaattgggacccggcggccgttaggaccgccatggagatttgggtctagtttgttaggtatttttctgaaaaattttaatttttcatttcgagggggtagcaactgccctccctggttgggcctggagatgtcccccttcgacccaacgcaaatagtcaaaatgttttcccaaaaagttgcgacacggacattctgttcggccgtctcaacgggctgtccacgctgttggtgctgagcggcgtccattcgttggccgacgcggaacattttcgtggccagggccagtctcagcttgtgcccgagttttacgccgcttcgcttgccgaacttttgccaccgctgtcagtgcctttggggtggcattaatttttgtaatttttttaaaattttgcttttccctttagcaccgaacaaaatgggccagcaaatgctgtgaattgaaagaataaatgccatccatattttatcgggtcactattttcttcatctccctgaactttttttgttgtgtttacttttaatatatgtaaactttcgcgcaaattgttttgttattgtttttgattaaacacttggtaaagataaagaggctgacttctgaacttatggaggggtggaagctttgtaaaaagcaataaaaatttatttcttgaatattacaattttgtacagaaaattcttttaaaaaagcaaaagttactgcaaagtctgggttcgattgatgttgtttgcctcttttgttttagctttcactcgtttgtacattgtttgtttttcttgaatattttaattttactcgctttaaattacatttctttgttatgataaatggcaataatttgtcgccatggtagctcagtcgggagagcgttagactgaagatctaaaggtccccggttcaatcccgggtcgtggcatttctttttcaaaaattttaaaataaaaaatagtctttttttacaagatcatcaaaatgagcttctcttctcttcctgtgaaataatttatttttttaaaacgataattaaaatttttctcaaaacaaaaaaaaagaatgaacaatataatttgtaaacgcacttttcgcatttctccaaatttgtttgttcagtcataatctgctgatttgttaatgacaaataaaaaatgcgttttcccttcgtgtgttctcaaaattttcttcttttcagcaggcataagggcgcgtctctcatcggtcctatggtgtagtggctatcactctggactttgaatccagcaaccccggttcgaatccgggtaggacctattcttttttgttttttaactaatttgctttgaattaaatgtgtgtcttatttgttagtaaattaaataaaatgaataagcattttaatttgaaatttttacttctaaaacaaaaatcgaagagaaataaaagaacattttgaatcactaaaaaaagagttgccttttcgtctctatcccaaagtaatttacaatttctctttttcattggaattgttgccggttttctcccgtttctctctcattttcctcagtttttctttcctttttgtccatactttttgaattcttttgtgtgatatttttatttgtcaggtgtcaaattcgcttttcatttccgtttttgctataaaaatgaccgttgaaactgtcccggccgatttgcgcaatttgcgtgcgtgtctcgtgtgttctttggtgagttttttcgcttttttaatcaaattattatcctacggttcgcgaatggcattttcttcaaaagtcgacaaataattcggtggtaaatttttaaggtcaaatcggaggaccaattcatggcagatggctgcgacaattgcgaacgctttttgaatatcaaaggcgacattgacaagtgctacgagtgcacgaggtttgaagaaaacagccaaccctttttagattaataatttaccaaaaatggattttgctcgaaatttttgggtttttttttgttcggtcatacttaaaaatagggtttatttatcaggcctttagtttgtttctaatcaccactattgttttcaatttggttttcagtgccaactttgacggaataatcgccgtttgtgagccgaacgactcgtgggtgtgcaaatggcaggtcaacgaacagggagagggcgagggtcaatttgcaacaaagcaaaatcatctcttttattgggaatggatccaaaataatccaatttgaattttgtggaaattttccaaaataatgcattatttttggacggtttttgaattcgaaaaatgggataaacagcagtttttatgcttaaaaatccaattacaaaatacgaatatttaagaaaatcaaccgaaaatgccctggcatttatgctgtatccgtgtcggggaatctgccaaaacacgtggtggccgagttaagccacatgggcatcaagtacaagtcgggccaacgcgacaaatcggcgaaatgatggacgaggaggggaagagggacagatgttgcgacaatttttgtagttttatacagaaaaacattatttattattattatttactattgtttttttgcactttatttttgtaagttgtttatgcatatagagaaagttttgtgaaagtttttatgaaacacaggtgaaagggaataagaatcaaaaaaagaagaaaatttcatgtaaaaaggcatttcttttaaaaatcttttgcaagaaaacataaatagcaaaccaaaattgacctagtaaaatgcctttttgtctcaaaaaaatcaaaaaataaatgaaaaaataagtttacacaaatttataggtaattttttatcacgtcaatgaaccatttgaaatttattgctctgcggctaactgaaaaagtcctgcagcaaagtgcgccgtttcagctccgcaacatgcatttggttctccaactcggctctgtccgtgtgctcggcacgctccaccttccaagacaattcctcaatttccttctccaattgtgcttgttgatattcttaaaaagaaaatggtttagaaaactgtaagacaacatttactgtcgccatggtagctcagttgggagagcgttagactgaagatctaaaggtccccggttcaatcccgggtcgtggcatttcttttttcaataattttaaaaaagaaaaacactaattagaaaaaaatttgtaaatattaatgattaatttaatttttaaattaaattaatacgccttaaaaaattggcactaaataaaagatatgaaaaatacgataaaaagattaaaaatacagtagtagtgttatttttgtgttctgtgcctaccgtttgccgcccatccccagctgacattcacaatgtgccatgtcctttttgccgcccggctgtccccggatcggctggcacaactcgcccggcctgtggcacttcagcgcggcacaaagctgaaaatgtacatgaaagtgcgacggctgtggcatttatcaaagaaaggcctaattaaggcaaataatctgacattgtttaaaaaaaatcggattttacctaaaaataagtctgattaatagtgcttcatttttaggcacaaaaaatcgcgaaataggcattaaataggcacaaaaatagtttttttgcttttaataaatttcttaaaaaatgcaaaattttaaattgtaaaaaaattatttaaaaaaagaaattaccgaaaaaaatatgagaagaatttattagttattaatctgacccaccggctttttgatgttgcacagagtgccggcaaagtcagcgccacaaaggcaccgaattcgttggccaacgcgcacacatttggccccgttggcacattccgaacaattgggcaccgcctgaagcaattaaggagtgacgcaatgctttttaatttttttctgccaaatttgcccggaagctcgggatttccctatatcattagggctttttcaaaatgttaaagagaatccaacaatttaaacaaattatttattataaaatcctgattttgaaaatcccgtttggcgctgagttaggtaagtcaggatttttttcggattttttttttttatatatttttctaaatttttgattaagaagtttttgagttagtgcgaaaaatgattaagtattgaaatcccgtcttctctaataccaataaacccatcataattagagaattttttaaaaatataaaaataaaatggcgaaatttttttttgaaattactcactcaattttgaatttttttttaattgttcccatagatttcatgcttgaaattttgaagggattattaactgtgctccacaaaagcaacaaaataccgtacccctacaaaaacaaataaaatggtttgagtacagtaagtaggaaatttgtttgtacggcacaaaaaaagcacacaccgaaactgttgtttcactgttagccagtccgatcaaagtgccaaaaccgccgtcctcatcatcatcatcatcaatggcatagtcctcctcctcctccccctgctgctggtgatcagcttcatcctggtcttcctgatcacctttctgttgatgactcgacgatccgtccactacagtatgcgttggtcctccgtctaccgtatgattttccattgccactgtatgatgattttcctctgccggtgtactgttcattggtcctctcccgtccacagtaggcttttcctctgtcaatgtcagtccatctacagtatgctgatccaccaccgtactcgtttcttcaccagctggtggcattactgtagacgccaaaaatggtggtagcaaaattggcgatgttttctccggttgtgtttgattagtgttattgttgttgttgccgttgttgttgttctgcaacagatgacaattaattaatgaattaatggggatttaagaaaaatttcggcaattttaaaattgcctcaaggcacaaatttagtaatttgttataaaacagttagaagtttaaggttaatttaccaaattgtttttcatttttaaaacttatttaaataaatatatttaaaaatatcaattttcataaagcatgattatgccctttaccgtacactccctttacagtatactgatgcgacaataattagagtatttattttttgaaaataaaacaatgtgcagagtgaattaaataaaaaatcttgtgaatttttgctatggaaatttattccaggcccataaaaattttattataaaaatgataatttcttcacccacccgatggcactcgaccagccctcgctggacctcagattcggcacacacttcgtcggacaaacaatggcattttagctggcagcgggtgcccgtgaacaggccagtcgggcactcacagaaggggcctgcggaatagaatttttcgaaaatttaaaattttaaaattcatttttttaccattttctttcgccacacattttccctcatttaagcacgggtttggcgtgcaatgattggtgagggacaatgatgatgatgcttttgtcggcacagatttgttcttgacagttttttgttcacaccaaatgcctaaaaagcgagaattttttttgggttggggtaatgctaaggcgacgagttttttgggttttttcgaaaattttttaaaaagttttaagtggttagggtaagcgcttaacaactggggatttttttttctaatattttaatgattggggaacattgtgcacctctgaaccagagcaagagtacagactctggataagcaagccccttatgcttttgagagaagtggcaacagatatatgagatggggtgagatgagatgatagtcaatgaagaagcggggcccggcggggggggggcgacgaagcgccgccgctcgaaacgaaattcctctttttgtcgtccaccaaatgtttg

SEQ ID NO: 1782 - DNA, 4333 bp, Heterodera glycines
  unsure (1)..(4333): unsure at all n locations
aaaattttaatgatattatttttaaattaacgcaattttaaattttttcctacccgtaaaatttttgacgcatttgcaatatgggctgatgctgattttgttcccattttcatgatgatgttgaacacattgaccaccatgcaggcatttctttctttaaaacatgcacatgtacttgagaaaaaagaatttttgttttttgattttttcaaggacacattacattttgccaaggactgatgaattaattgactttaagcttccaaggacttgattaattgcttattcttcttctatgctctggaaacaacgatttttcattattcttggaaataaggatcatgttgaacttaaaattttaaaggaacacaaaatttttaaggactttctttgaaaaattgttggagatcattggacctaatttaatttccaaaaataatttttagtcaaatgtaattaaatgagaaattcacaatttaaaaactgataataaaagtttatttaaatattgaaaaattaataattaaatttgcaataattataaattttaatttaaataacatttcccaccctttgaccctgcattgttgatcttcttcatccagtgattgcttctgatcagcagcagaagtgcttcgttttgtagttgcttcatctgcgctttctgctgctgctgctgctgttgttgctgtactcaaatcgcggtgctcacattttgggccagaaaaactaattaatgcaattaatatatatttttttaaatttaaataattcatttttaccccgtcgggcatatacaaaatgcttttgtgccggccggcacacattggcccccattttggcactggccatttgcgctgccatcttctccggcacacggtgctgctgccatcacatccaactcacagtgatcacccttaaaacgcactttttgttatttgcataattttggcaaaatgccatgccagaaaaaaatgtcaattttttgaacaccaattcattgggagagaaacaattttccaaaaattcggaacaacatttgaccatttttcggaagagttatgaatgatcaaagatgaatttaaaaaaggcctaaattttgagggattaaagttgtaaaaagagggtaaaaataatttaaaatattaaaacaaaaactctggggcccaaacattaattatcctcttccttttatgtagtataagccctccgaagattggtgaatttctgagactttaattttgtgggattcaaatttgtttaaaaaaagccggtaaaaaataattaattaaaaaatagatattcattatcttcgctgcttttttttaataattgacttaatttttggtaagtttcagatcattattataagaagaattaagaaatattaaatttgccaaagtaaaaaaaaataataatttaaaaaatctaaaacaattgaaattcattggtttacgacgcttttttggcattttaagccctcctctattatctctttaatatttaatacacggctatgagcactttaagccacttattagttatatgccccaattaatccaaataaaaaatgcaataaaattttatttaaaattattttaaatgcgccaccattttccccgcagggcaaacgcattccgcaccgccagcgccggacgatgcatttggcggcgccacaatgcgcggtggttggcattctgtctcgcaatgtgtgccggtgaaattggcatggcaaatgcagcggtagttgccgcggttgtccatgtctttgcacttgccatgccgaccgcatgggctggttgcacaggtgccaatgtgatgttggcaaatcgggcctgtgaaatgtgcaatttttagtaaaattcaatttctttggcaaattttccatttttaccagggtttggcgttaaaatttaatttcacacttaaattgataaatttgaagcccaaaaattggtgtaaaagcccgaccgaaacatggaaaaagaagctaaaaatcttttaaaaatcaaataaaaaacggcaattttccaagttttcatcatttttagggggtctattgaacagtcttccaaataaaaattttagacaaaaattccaatttaatgaatttatttttgtgcaccagatccaatttctgggcgatattttactccgatttaattccaatttaagacgaactttttttttgcaccggggaatttcggattttatgaaaaaacttagtcataggccttccggactctctttttttttacactcgaaagctgattgcatctccagaaattgacaaatgtccccaacccgaatatgccgcaaaaaatgttaccaatgaaaaatgccattaaaaacaatgccattctcggcactctacccggttttggcaccccagaaccatatctacccaccttcaaaaccgggcgggcattggcactcaaaagtgccgggcaaattcacacatttgcccccattttggcacgggccgcgcaatagcgacaattcgcgtccaccaccgacatcatcaccaccaaaagcatgtgatgaagaagcatcgacggtttcggcacttcggcccacatttgccccttggcactcgtcgatgtcgtcggcacagtgccgtccgtcgaagccggccttgcactcgcagacaaagtcattcttgatcagaggaacattgggatgggtgtttttttagtaacttagaactaaaattctcgcatgccccggggctaaatttctcttgcactcgaaaattcatgtgagagtcaagaataaaattcaaaaatagccgagcaatttaaaaccaaaaaaagaagaaggtaaaatggatgatcctcctattaattggcaaaccctaaaaaatatttattaatttctatttaattttttctaattaataataaaatagccaagaaatttaaaaaaactaaattcaaacctaaatcttaaataatttaataaaaaatttgaaaaacaaaaccaaatttaccatcgagaaacttttcttagtaattcccactcctcttcatctcaatcaatccaccttaattggccggcacgttgcgttgttggcacacggcgactgtccccagcgcaagcacaaattccttctattaagcagggaaattgttagtgtattgttgttttgtattgtttgattaaccattcattaccaaggcaataaaaataaattaaaatttggctaattagtggagccaaatgccagtgatcccggaaaacgatttggtcaggctagattaggttcgagattccagctaatttccgaccaaccaaaacaaatgtttatggtctcgatcaatcaatcccctcagcgggataatattaattaataagggatagtcgagagtcaaaattttctagattcaagaccgagagtcgtcccctagattctcaagactaagacaaccccaaaaaaattcaagaaatctctcgtgtcaagactcgagctgccacaaaaaaaaacactcgagaatttcaccatgtcaagactctcgagtagtcaattattgtaaaatacgcactcgcaatggaactcgccgctctccgggtcctggaggcaaacatgcgcaaatggacatccacgcgaactctgacgacaatcgtccacttctgcgaccacgtcttccactaatttttcgccacataaagggccatgaaaacctggcaaaaaatttttaaaatatataaacatttcttaataagtttttcatggcattattccacaaatgagttacaattggtactcgtcccaagatttcttctttgccacaatcttggtaccggcttaaaatggtcctatgctttttttttgcctcagggcaaacaaaaaatgagaaatttcaaaatgaaaaaattaaaataaaagggcaccccgggactttctcgtttcttgatcatataaattatacctatgtataaaagttaatacagtataataattcaattttctcgcctttagggcattcacagaattcgcccttgtccgtcgttttttggcactttccaccatttaggcatttcatttcgcactgcaattcacataacagcccggcaaagccgctccttgaacaaatttggggagattaagacagggtaggtcaaaatttttcaagaaaattagaatttttagaaattttatatctttttttttacaaccctaagaaattccagtttttttttatatcctaattttctttaaatatagctataaaaaaaatttttgttttatgatgcagcctgccaatgacttctgctgaattaacatgataaaataatannaaataattnttccaaaaattccccagggctaaaa

SEQ ID NO: 1783 - DNA, 1855 bp, Heterodera glycines
ggtgttttttgagcaaattggacgtcattttgttcagtttataaactattaattcatttttactttaataatgctaaaaaatgattttataaaataataaataaaaacaattaaaaaatacagcaaaaaatatttaattatggcaattaagaaaaaaaataaatttaaattttattaatttatttattaagaaaattaaaaaagaatatatggggggagcaacataaagtttttacgtattacaattgaaaccgggtaatgtgaataatgtaattaaaaaattgtttttaagtaaatataaatttggcgactactgagagagtcttggcgccttgagtctcgacatgagaaaattcacaaaatttttgggcggatggtgggatatcgatttcgttgagtcccaatcgttctcactagagtgccacgggaccgggacctggtagcggacaactgagtacaactgagtaccaaggtcccggttttgaccgggaccgggactagtcccggttttttcccggtattcccagccaaaaattcccggtttttcaacccgaaaaggtcccggtcccgggtttgcccaaaattcccggtcccgtggcactctagttctcactactccaaagtgtcagtctcgtgtctcgtaaattttcagtcttgaatatcaccaattcttttttaaaggaaggcttccggaaattaaggaaaatttgactcaactacagtgtctaattagggtaattagtccaaaccaataaaacaaagcaaatttgatgcaattgaaaattaaaaaaaaaataaacattcgtacaaataatacagaaattatatttgcacaaaatgtgccatcagcagaatcaacacaaaaagctgacgacgacgacgacaaatatttgccgcgccgccactaaaataataggggggatttggggattttctgggggggggcggtaaaaattggggggatttgcaattttcgaattttcttttcgcgcgcggtttattaccaccataccaccatctgttctgacagtcagaagaatgcagaagcgattgatcagttttgttgtttggttgttgatcagcccagccatcacatttttgtgagttttgggagggcgacgaacaaaaaaaaaaaagaatttatgcgaaacaaatttttgtgcataaaaatgcgacaaatttttattgggttggtggcggacgaccgacggacggacgaacgaacggaacgacctttacgcggcaataaaatttttgtgtttaattaatttaattaaatattgtatatataattttggaacaaaaatgcggcccaggaaaaaaatggaataatttttcaattatttaaaatgcaacaaattaatttttaaatgagttcataaatttatacgcaatttttacaataaattttatttttaaggaaaattaatcatgtttaaaaattatatttaattaaaaattattaatttttaggttttgttttcgagttttgtaattatgaagtcgtttatcccttggtactaaacaataggattttttgaaaaaataattaaaatattttatttgaaacatatttttgaggataaaaaggaaacgaattcgcttggataaagcaaaagcaaatatttggttgggttgtgccatattaattacgccccacggtgggcaattagaaaaattaataaattaattgccagtaccaaggagacaaaaccaaaacaaacataaagtgattttttgaaaaatgtaagtcaaataaaaattagcataatttttttgaggaataatcaatcacatgcaaagattaaaaatgcattttaattaaatggaaaaaaaaagaaattaaaataaaaat

SEQ ID NO: 1784 - DNA, 2873 bp, Heterodera glycines
atcgatgagcatagaattgggccgacaaacgccaaatgcgaggccaacggaggctgagcaaatccgttgcgacacgtcggactttgagctctgccgcttcgctctgatcagaccccactttggacttgcacttcgccaacacaacaaaagtcacacgagtggcaatgagtgccctttgcccgtcactctctgcggatgggtccgtcacaatttggcgttagttcatccagaaacattaaacatcgccgggttgagaccgaggagtgccgttttgctcctttcgccaaatggcaaatcgactgacaaacttttatcattgtggcccagtgccgaagtgagtttatgccgttttgcagtgtgcttttcaccaaaagatgcccgactaatgccgcaggtgccgccgatgcgcattttgttgccctttcacgacgattctcttttggttcggctggccattcttcccgcttcttccgtcctcatttccaaaatgtttttgcagccgaatttgtcagcgtccgagttgcccttggaactttggccaaatttggcccaactttcgcatttcacattgtaaatcgactctttcccattactttgcctcttccttcagattcattcgttcgttcttttgcgacgctttcgtttgtgaacattttaacgaattggaacttttttattatggtcagcgccttattttccgcatcactgacatggaatttgcgaatgaatccgagggaaaaacgaaaggggagaagaaaaagactgacgaaaaaggccaagccgcggacgaaggaagacaaaatgtcaagacgcatcgaatttcgccactgtgtgcgtttgacattcattggaacgaagtgcgggagaatgcacggcgagaagaggacgacgatcccgagaatctctgttgatttcatttactcgaaactgactttttttcttaaagaaagggaatatgtagtaagaaaatttgatgtctgatgaaatatattcatgcaaggtgatttcgacagtgagtgaattcgacagcatcagaaaaattgtgaattcgacaaggatttattttgaagtaccgataaatttttaaaaaatagaataataaaaattggagcctaaaaatgaagtgatacagtggtggagaaaagtcctgactcaagatgattaaaaatttgtaaacttttaaacttcggctgaaattagctgattatttttcctatatttatttaccccgatatacaatacatgggcgtttcatacacacaaaattaattcaatccaatttatcattctcgtgaataagtcgcctgatcagactttgctcaaaaagaggcagaaaaaatcttgactcacatgagaaaccaccttatagttcatttaaaaatctgagataattcatgctttcttagttttggtcctgatcaaaaaaagtcatacaccaacttggtcagatcactacttcatggtgaccgggacaccacaaaacacgttgaaaatcggggaaattttcgaaaattcctaggggttgggaaaatttccatgaaaatttcgaataagctcgttggaaagaacacaaaaacgacttgtacataaaaagttatacttggttgaaaaatggtaaaaattataaaggaaaggtgacagggagagcaaaatcacgacccacaagccctcgtcgaagattttaaaatcgtgatcctttgatttatctttgagcgtgctcatataacttcatttttaggctcaatttttaatatattcatattttttaaaatttctcggtactgccgaaatcacatagcaccgaaatattgggcaatttaataaaatggaaggggggggggaaatcaatgcccacgattagaggcgtcgaccccgaagggcccgaccacatatataaactacattagaatataaaaatgtgtaaatgcacaaaaatgtttacaaatccaatcttacccagcaaaagatgtctcatgaaaatttgtatatattggaataagcaataatactaaagctgagttcccaactgaaattaaacctggatcaatagcagttcgtacaatgggcgtaaaataaggcataagactaagcataggcctaagcccaagcaagtctaagcttagagctaagcctaggaccaagcctaagcttaatccaaaagcttatgcttattctaagcctttataaaattccttatttaagaaaaataaggttaaaagtgtaagccccaaaacactattaagatacggacgatcggtttcgaaaagagctctttaacgcttcaatcaatggttcggattccaaaatatgctaatagtaagacatgaaagtgacggccacggatttacatcaattgggggtgggggaggaaatgatctcaaatggtgaggcgagtgaaaaaagaaggacatggacacaggagaagtgatcagcgaaatccgatcgataggtcattcattacaacatacagaggaaagggaggcacaaaaggctaattctgcgcctgttggttcgtctgcggccgcttcgcatttttcaactgctctctgtgggtgggcgggttgcacacctccgagtcgatgaactgtctcaacctgtccaggtatgcggcgtgcaattccacgtcgttatggccagcgccgcgcacccacaacggttccacggagccgggacaattttcgtaaattttcatgccgtggctgaattcgattacctgaaaagaattgtcagaaaagcagtcccaatccttcccacatcgtcgtctactccatggatgaccagcgttggacagcgaactcgcggtattttctcgatggaaggaaacgcgtcacagcaacgcgtgcgttgggtggcggggaaggcgacgcgcatgc

SEQ ID NO: 1785 - DNA, 1743 bp, Heterodera glycines
gaaaatgacgaagggagggggggaggcaatttgaatggggggggggggcgaacctggccaagtcgatggaaggcacagttccaatgctctgaccgtacaaaatgacctgctccggtggaatttgataacggctttcgagagatttaagtgccgcagcgatatccgcgtagagatttctggaggcaaaaaatgttttgtagaatgagaaaaggaatggaaaaatgcgaatttgaattaaaaagttaactaatgtaattcaaagaaagccaattataaaaaaaggaattcgtaagaaataaaattggttacttttccgaaggacgacctgtagactgaccataacctaaaatcaaacccaaaattgtaaaaattagagaatgaccaacccgagtaatcgtagctgaacacattgcaccgcagtcgacagccgagcccaaggtaaaagttacacatttggccaatatccaccgcatttccgtgagaaaacaaaagggtgaaatgcgaaagttcgaagggtcggacgaacatacaggcgattttattgcgacgttgagtacgggtgaagaacacctcgacattgttcagctcatctgaacagcgaagcttgaacggccatcgccgtatcgcccaaaacgaaccttgcccatgtggccactctgtcctgccgtcgatcagctccaacgtcgtcctgcaaaagttagtattttaaatgattcgaaattggtaagcactaaagacattgagcataattattcgtctcagtattccatcgaacttaacctaactcaatgactgtaagtcttctcagcacaaatattaccgtcccgagtcgttggtcaaaattcggtaactcggttccggtggcataaaagccaatttggcaacaatagccgaagggagcggcgggcaacaaaagagggaacaaaggtcacggagaaaaacacgccgaggggagggagtcggatcctgggcaatggttgtggccgtcatttatttactttgtgtttgcctgtctttggaaattaattaaaaatcatttattaagcagaaaaaaagaaaacaatgaggcagagaaaaaagaaagtgcattttgaaaaaggaaaggattttacatgctaaaaatctccaaatatttaaaacagaaaattctaaaaaaaattggcgctatattaaaagtgggtctttttgaaaattttttaaaaaagtcatgaaaatacatttccgggggttttcggggccgctgatcacgaatatgacattcatttcgaccaatttcgaaccccggacccggattgaagatcactaaattttcattgcaatttcaaatcgtctagcatatagtaggaactcaaaacttttgaaatacttttcttatccctttttgatataagacgcattatactgtcttcactatcatgtaaataaaatttggtgcggttcagaaccctttctgaaaaaaatatttatgaaacaaaaaaatcgattttttcaagtgtccatttggggtactcgaacatttatggggagcaaaaatccaacgcagaatgaaagtacagggtatagggaagctattcccgaaggattcggtctccccataaatctgggcgcgtctgttcggggggactgccccaaaaacaaaaaaatctattgttacaagtgtccgtttggggtactcagacatttatggagagcaaaaaactcaacgcggaattatagaacagactatagggaagctattcccga

SEQ ID NO: 1786 - DNA, 5086 bp, Heterodera glycines
atgacccaaatttggtaccaaagtgaaggagctgatttaaaagtaccatctgccatccaacccgacaaactcgacagcctgattatgtccgttcttgaagcaagtgagatgatacgctgttcgtcttcagggcctgtatcgccaaagacaaagccttcttgtgaagcagtgcgggttcgacggagctccggagggatttcaacatcttttaaagatttcggtgtttctttgaagttgccattggcttttcgaattcgactggcagttttttgcatgtgtcgtaattctgggagctgtattttggcagcatcgctagagccctgaattgctccatttacaattgaacgaggtggagttgctggttgtgcagctgcggtcactcttatgctgtgtttaatggtttgaacttcaatacgtgtcggagatggagcgtggttatgttgtttagttacagtaatttcgtcgtttattgcaatggcaaaaccactgcatttggccgaacttttggcctgatcacagcgccaataaattttgccaccagcaccatccttatgttttaaataagcataaccatcgtaaagcagtttttttgctcctttttgggtagtaataaatgaagccatattaataaagcaaaataataattttgtaatgagaatttaagtgaattgctagctttataaacttttctataatctcttttcttaattttctctcaaatttgtagatcaaaaaccatacattggctatccttaaatctgtgactgaagcatagctgatcagagaccaaaaattaatttttaagtgatttttaattttggtgacgttttgggtcggtgacctttttgagtggtgacgtttttaagtggtgccgtttttgagtggtgccgttttgggttggtgacgttttgggtggtgacgttttgggtggtgacgttctgtccggtgacgttctgggttgtcaccttccgaaggagaagctgaatttattatatctttctataataatttaaaccaatttaaaacaaactaaagcaaaattgctgaacattccgacctagctcttttgaaattttttcaaaaatgttgtcgggtgtaaattcctccactgacacagagaactcgtacgagttcaggacgaaggttatgggaaagaaatcttttaacagatcgccacatggcacatctttcggaaagcaaaggcgccggctgttttggcaaagtgaaaaacaaacggcgcgtgcggctggcacatccaatatttttgccaacaatttaccttttgggtactgttgacagcagatggctgctgacagccgacggcttttccaattgaatttaatttttcataaatttcatgtttattcatcaatgctaatatttatcgtcttctttttttttgttggaggggctgagtcaccacgcactaccaaaaaccgtgaattattgtttcacgacggttttgaatatcgccaaaaaagtgtatcaaaagacgggggaactcagttctggaattgtgtcaaaaaagactgcaatggacgtgcacacagcccttttggccggacagaacctcttaatattgtatccgcacataatcatgcaagaaaagctgccaaacatgaagtgaaaatttgatattgaaaggattctatattattttgcgacaagtgcaaaaatttgctttgtttgatttctgtggcaagacaccgtagtgatgaagccccgtctctttaggcgcgactttcgaaagaagcggtgaaagatattgccagacaacaacctgatgcacaacctcgcaatgtaattgcacaagaacgtgcacaactttctgatgaagcgcggatgaatttgccatctgcttcgtcattacaacgctcaattgagcgtcaacgagaaattcccgatcgagcacgaattgacgcaaatgaaattgcgaacgatgttattgaggtataaattaatatcgagtcggcaaagggtgatttaatgttcatttttagggaatattacttatatccgagttcttcaggtacttattgtttgtattttaatctgaccatgcaataattaacattcaattttaatttaaatttgctattaaaaataggccttggatgcttcacttggtattgcccctaacagtgttatgttagattttgaaagaggtaaataaagttttttgtttgacttataaagttatagccgcaaaaatgcttatctccacgtgtacggaaacgacgtgcaaattcgcttttgtctttttcatctcggccagagcattaacagaagagtatcaaaagacaaattaattcactattacacaacaaacaacgaatacaaaattctggttagaagcttggctgccctcgcatttcttcaagaatttcaagttgttcctggatttaatcttcttcgcttaaaagctcaagaattgaatgttcaagttattcaagatggaggccaaccaatctcagtttttgactattttggaaggtacataaatgggttaacaaatataatatttgttaacacagaacatatgtacatggtcatgctggccatggacccttgtttcctattgcaacttggaatcatcatgaaagtataattcaagatatgggacgtacaaacaacgcacaggaaggttttcacctggccttgcgaacacagttcactagtgtacacccgccattatcaaagtccaaatgttttgctccctttggtaatcctagtaaatgtaggctcgtcactgtattgaagaaggaggaacgtatagctgctgataaacttcgacaatacgagttggatcccacaaacggaattcggctccgtgaacgaaaaaaggtttacagggacaatgacgtggccctgcgaaacctagtcgaaggatttgatttgcttgcggatccaaacgatgacgaattccttactcatctgagatcgttgcaataccgtctgatgcgaaatgattttgaaaattgggatgggcccgatgtggagtaattaactacattttcccgttggcccttgggaaaggcattttctttttttcaaataaagaatcaacgactttgttgccttgaaaagtccatattaaattaatttaattaaaaaataatttttttttgaattcaaaaatgatttttctaattattttaacacgattttattaaaaaggtgattcccaagtgtcgagtccgcaaatgtcgggttccgcaaatgtcgggtccgcaaatgtcggggttatccgcaattgtcaggtccgcaagtgtcgagtccgcaaatgtcgggttccgcaaatgtcgggtccgcaaatgtcgggtccgcaaatgtcaaatccgcaaacgtcgcgccacgattttggcccattccgaaccccaaacccggattcgaacaaaaaagtcaaaatccatttttcaaaagattcacattttattttgatttttagatttgtttttgaagaattgatgcgagcctgggcgaagtattggcctctcgagtgattcttttaactgagctgctgtaccaaaaaagatttgcgtgtgtggctcagtggtttttgtaagatagtaaagggacaaagggtggtggttcgagtccgttgtgcaacatgaatattttcatttatttttgtccaaaatattaaaaaatcacgatatttgggaattatttttgaaggtttttgccatccaaattggataatcttggtatcattcgaaagctctcgatgaggagaagctttttctaagcaaatgctaaacaattggatgcattagaaaaaagttataggagttcgaaattttattttaaattttagaccaaaataaaagcgattgttttctttaaaaaagcgattgaacaattctatatttttttctctatcgatatgcaaaatatgaagaaattctgtaaggcggaaaaaaagttctatagagcgaagtgaatgttgttattcctaataatagaaatattagatagtacgccaaaaggagacaaaaaattagagaaaaaaagataatgtttttctctggcactctctatttattggtacacatctcgttttttcggacggtgtgtgtataaaatgtgaattttttgaaaaatggattttgacttttttgttcgaatcctggtttggggttcggaatgggtcaaaatagatgccagaatcggttttcccaaccccaaaaactcttaattttgttaaagtcaaccaaattaaaccttcttggtatcattcaatagcccttaaattctctatcttcataccaagtttcaaaaatttgattaagtatgaaaaaatggacgaaaaaatttctttttacgatttttggtcataacttttttgaaaagcaataaaaattttcttgcattttgcttaagatagagagttttaagggctattgataccaagaatgtttaatttagttgactttaacaaaagttatgacgatttttttgtcgaaaaacagtacgcgttggcctagtatgagttgggtttcgtccagggatgtgatctgttcttatttgtaagaaatgttctgatttcgggctatctatatattaattttgccgtgtgtgtcacaaagtaaacaaaaaatttaaataaagttttgacgcgattgtttttatttggatggaagaaatgaagtgaaaaaacagagataatagagataagttgtattgtaagaaagagtgaagaagagagagagatgaagacagttaggaacaaagagcggagagtaaaggagagagaaatgattagagaaacaggaaaaaagagagagaaagtatgggagtgaatgagacagagacaaataagagagagagagagataaaaataagagaagcgagagagaggggggagagagagagagatagaacagaggagagagagagagaaagaaaaaaggagagagagagagagagagaaaagagagggagagaagaggagagagagaagaggagagagatagaaaagaggagagagagagagagaaaagaggagggagagaagaggagagagagagagagagaaaagcagagtagagaaagaggagagagagagagaagaggagagaaagga

SEQ ID NO: 1787 - DNA, 3700 bp, Heterodera glycines
tttactgtctacccttccacccgccgcagccccacgtagacagacagtcagacagtgcactatttcttcctttcgttttgagaatttttgactttctaccaaatgttcgaatttgattccgggactcttaattgatcgagatggaggtcggattcacaaccagcgccctaaaccctggaaacattttttatacgagtttaaaaccatttttttttgtggcgtaccaactgcactactgtagtaccaaaattagtaaatcaacccgaactagagaatggcaaatcaacctttttattagtttttgcggggtatcaatttaaatgttgatatttaattaaatcaactaacattatgccatcaacgcaaatatcaacgtaatttttaaaatttgcgaaaattttttaaaatttatatgagcggtttataattttagtgcgagagataacgcaaaaatgagagagtgctggatctcagtcccagtcatacaaaacatttttgatgaaggaggtagagaaaacaatttcaatagagagcacaatgggaagggagttcatgtctcttcttcgctgattcttttggtaagagacgcagattcctcgctatgttctctattctctctctgtcttaaatctcttcccataacactctctttttaattaatttttctttattcttctttaccaaaaatgcttttgtatgactggggctgaatataacaccctctcacttttgcgttatctctctccccatcttattttccgccaaaagtcatttttgaaaaattgctttaaattttaaaaaattatcccaattttaaaaatagcgttgatattacgttgatggcataatgttatgttgatattaaataaatatcaacgtcaatgttgatatttattaaaacaattttcgctaagagaaaaatgttgatttgcctttctctaatcagcacttaatcatatgttgatgatcttttttccaattacattgatcaaccaatgtacatatgtcatcttatctctgatcagagaacaacaagcaaaaaaaaaaatgaaggacgatgcgccaaacttacggatgcaatattgccaatacaaagcaatgtgatctcttcagagccgagaaaggcaccgaccaaatcggcaaaaatgttggtgagtgtcgaaatgagaatggccgggcccgtgtcctaattgattgattgattgattaattaattagcatcattagcaactagcataatgattattagggtgccccattagttttgcccgtataaattaattaattaatgaataatttttctttattattaattgtttttcattgtttactctaattaatttggcattaatattaattaattggtctttcgtaccaattaattgattaattaattagtgggtagttggtattttgcgctaattaataaaaacattaattagttaattggcaatcccaaattgaaaaagggattattaacgttttaaatgagggtaatctgttcaaatattcaacacctctaacacttcggccaactgatcgaccaccgccaaattcaccgacaaagcgtcgtgtgccattacagcgcggccgccttcgtgccgtcgacgttttgaggctaattgccaagaatggatcattaggaaggcgtcatcaacgcctggagaattaaataaattaaacacgaatttatacataataaaaataataataatttatttaaatttaaattaaataaatagaataataaatttatttaatgatttttaagttttgaatttatttttattaaaataatatttaaacttatttaaacaaaaaaccattcaaataaagataaaaattattataaaataactttcaacaatttgaaattcatttatttttcacacaaattaaattcataattaaggtaattagccaattagttaattgaataattaatgaattaattgactggcctagtgccaagatcagaaagggagtgaccgccaaaattgaactgtgccgaacgccggcaaagaacagaatgccaagcgcagtgccgctggccatgaacgggcacagacaggcgaaaatagcgacgggcaactgcacatggaaaaaaaaacaattagacaaatgatttagtcaattaattggccaaccattactgtgtttaccgtatacattttacggtacaatgagctaattgtaaagccttccccacccaggcattcttactgtacagttgttcaaaataaagcagacactcgagaaatttttgaaaattcttttattttttaaattagcgattaatttattttctaaaattaattaatttttaattttttcctaaaaatgctccgttttaaaaagaggagcccggattttcagaacaggtttcactaagtttcaggattagaaatcctgtttgacaggactcattaggggtccggaacaattctgacaagatccggtgtcatgtccgggctctagttgtgagaaacccctaatttttcccaagataaagagagaattatcctgcattaggtgtacggtaatgaaggggccttggaaaaataggcacaccgaatttgaaaaattaaaattaatttttttttaaccttataaatggagaattgatgcatgaaaaaagcggataatgaattgctgaacagtgagcacaaaatcatcacggcaagcccaaagccaaaataggagcggatgatgttgccggcacggtccacctccacttggacataactgaagaaaatggcaaaaatgtggaatgccaagggtgaaaatggcaaaaaggttatgcaaatgatgaaaatggaaaaaaaacgccaaaaatggaacgttttagggtgaaaatagcaaaaatacaatgccaaaaatgaaaaagtgccaaaaatggaatgctgaacatcaaaaaatgccaaaagtggaactccaagagtgaaaatggcaaaaataaaatgccagaaatgaaaaagtgccaaaaatggagtaccaatggatgaaaaattgcccgaaaatttgagataatcccaaaaaattcaaaattccattaaacagtgtcaaaacttacgatgtcgagatggtcagaacgcgaatatgttggccaatgtatttgctaaatatgggcaaaaaagggcaattattattaaatgtgtttgctgtcaaaaagcgtcgtactccttgaagtagttggagatgctcatctcgtagtcactgaaattgatgttgatttgaccaattattagttcgaaattaattagtcgttaattaacacataattagttctcattataaactttagggaaaatttttagaaattttcaattcgaaaaaaaaatatttcatttaaacaagatttttttctttaaaaaaaatgaaaattcaaatgataaattaaaatgtaaaatgaaaaaagttcaataattttattttttttttttttgcaaatttttgtaatatcgtaaaatattttatttaaaaaattgtttaaaatgtataaaaactttctattcaattaaatcttattaaaaatgccgaatttagtaaattaatttttaaaattgccaattttcaattgttttgcctgatgtcgtcgtctttccatccgccaattcgttcggcacggtacagcaacacaaccatctccacactgtccaaagaggtgaacacgatttgaggacgacgcttctgatgatga

SEQ ID NO: 1788 - DNA, 4030 bp, Heterodera glycines
  unsure (1)..(4030): unsure at all n locations
gatgatgatgatgatgtgtgttnggcgaaatgaatgccgaaaaaatttggctataatggcgaaatgttaaaaaatggcacagttaaaaaattgatcaacattggatcggtgatcagactattttatgtgatcaaaaataaatgatttgaggtcgaagattggttaaaaaagagggcgggggattatgctatatttttattgaaatgccgaaaatttttcaaaaaatcggatttttatcgaaatgatcgtcatacagtaatgctaacgaaatctatgtggcctacagtaaccatcaacagtgacataaacaatttaaaataaataccaaagtgccaaatctataacaattagcttcatgctgcgaccaatgggtgtaaaaaagcgccaaaaaatgaacccccaaaaatgggccaaatacagtagtaagtgtcccaaaaaccgataccgtaacccacctgtatgtttatacgttgtccgaacactgtagaagtgggatagtcaagctgcacattgtgactcggttgctggtgcttggccacccgtcgttggtggtctttgaagccgtcctgacaaattgggcacaaaatttgtgtacaaattaatcaatgaatatcatggcaaccgtgccaaaaacgacggcatgagaatgccagaaaaatggcaaataatttgttttaaaaaaatttctaatttggggttttcagcgtcgaagacaattttagacattgaaattcaaggggaatatttttttctacaatatgctcttggattgatatttatgtagaatttttcttaatttgtgtccttgaatgagtcaatttccagggacacccctcgagggaattccaggacgaaataattccatcaaatgatcgcacataaaacagtcggacgggctcattaattgtgcaaaaacggcgacaaatgcgcgaaaacggctcatcacgttgagtgatccgattgtaaatggtcaaattgttttggatcagttcgtcgacctgaaataaagaaaatgccaattttattttccatcaaatttttattggaacgattaaatttgttgggtttttttttaatttttataaaattttatttatgatttttgtttttacgattgcttttcaatatgctgtataaaatgccaaataaatataaacgatatttgtttcacaatttttgcctactgtatgcataattagtgtctgctccaatgtcaaatatacggtatttggcttgtaaaattttactatcgtataaaataccattatatattctgttgtaaaataattattattttatatgttgtctaaattgattatttacatgtcctcttttttagtgattgtatttgtgttaaatttcgatggtatttgggtttgtacaataattttcgctaccgtatacataaaaagccatcactgtatacgattcatttaaattctctgttgttttggcgatttgatttctctctttttagtgattttttttttattaaatttctacggtattttggtttgtacaataattttttgctaccgtatacataaaagccattcattgtaacggtttttggaagtcgttcaaaatccctgttttttggcgatttgttttctttttttttacctcaaccgtctcgcgcagtgtttccatgcgcatcatattggtgccattccgaggcaaaatcagcacaaagaagcgaatgccaacaccggactggtcaaaaaattcgtcgcgcacatcaaactcatacagtgcccgtgagccgtacggcgtatagccacggatgttgttcttatgtcttaagtgggacaaaaggtcgacagaagaggggaaaatggcacgaagagtgggacaaagtgtcgacataatggggaacaaaagctcacatttcagataaaatgtatgggagagaaaaggcgaagtgggataaaattaggacaaaatgaataaaaaataacaaaaaattggataaaatgccgacaaagttggggtaaagtggtgtcgaaagccgaaagctagacaaaatgtcaaaattaagggaccaattaagactgcctacggcacaccatcaggacaaggttttccggcattttgccccatttctctcggtaaaattggcactccgccaacaccgcacttggtttttgccatttgcccgtcctttttagccgcgcagcactttccggcattttgtcccatcctttttttggcccgcatttttcggcgttttgtcccactttgttggcattttgtccccgccctttttgggcatcactttcggcattttgtcgccatcctttttgggccgtacttttcggcatttagccctcatcctacttgggccccatcggcactttgtctaattttctcggctaaattggcacactccgcatcactcactcacttggtttttgccattttgaccacacatattgcggtcaagatgaagcatatgaacacaattttgtacggatgtgccaccacaaaatgggcccagcggcgataggcacgcgcaacgaccgcatggagacggagggagcagcgggcggaaaacgattgggacgacgtgtcactgtgggcagcggaggatgccgaggacgaggatgacgacgatgccgacggtgaatggcactgttgatcagctgctggaaagtgaacaaaattggtgatcactgatcagttcagggtgaaattttgtagcctgatcagctctagtcaatcaataattattggaagacaacagtcagctgtgcagctctctgatcagtttttggattggacacgcttgtcaaatttggatgtaatttttgctaaatatattgtgtgattagtgtggttttttttgctgtgtgatcaatttgaattgtttatcaccattgatcagatttggataaaaggggtgggtaaataaatctctgtctggtcaatttgtaaaaccccgatcaatgacaaaaaggcattaattctggatatatttgcatttaaaatgtcaaaattaaatgaatcgatcaatttgaattttaagtacattaaaaatgtcaaactgtacatttaaaaggctaatgatttttgattaaaaattaattttaaatttctttctttctgataaacccactcttttgctgctgctggtgttggtgttgttgatcagtgaaattattaatcacaatcgccccattgatgtcgccgccttgttgttgttgttgttgttgtttctgccgatgattactaattgccctatcattatcattcattttcggggctacaaatataaattatatataaaataattaatgactaaatggaggaaatttattttttaaaaacaaaattgtgatcagagagagagaaagatgatcagagtggtcggagtgatcagagttctctctattttatgagatgaacttaatgattaattattggcctgcagatagcatttgttcatgagaaacattacccaaaaattctgtttaagacctctaagattgaaaaaacttaaattcaaatccaatttcaaagagtcaataaaaaattgtgtgttcaatttgaattttcctcctgtttaaataattaattaattaaatttttctagacggcaattaggatggcaagcacatgagtttggccccacttcagttgctggtgatgatgaattcagtgaatttctcgacagaaaattcgttcgtcgatcatgtgatcagattctttacggatacgtgatgcgatcactttatatgaacagaatcttttttagcgatcagagagcgagaaagagaggagagagagagatagaagagagagggaagagagagagaggagagagagagagagtgagaagagagagtgagagagaagaaagagagtgagagagaagagaggagagagaaacgggagagagagagagaaagaggagagagatagagacggatggataaaaaatatacctattatttatttttttgtttttttgtttaattggagtgagaggtcattacttatatgtaatgttaatgacgcatagtaaacaata

SEQ ID NO: 1789 - DNA, 1815 bp, Heterodera glycines
  unsure (1)..(1815): unsure at all n locations
atggaaatggtacatttatttggggaggatggcgcttagatagcctggatagataatcccaacccgcgcggacgattcagcgccatcggattccgtttaacagtgtgtgttttttttttgctntaagtaggattacaccggtgcgggtacccgaccgggttcccacccgaatttccggcttgttcaaaaccgggacccggcttttgtggatccagcaatattcgggttcgattctgcccaaaaacccggcccctgtaacgctattttcagggatgtaaccaaaaggccaaaaaaaattccagctgatcaaatttgatcacctgttttcaaactgtttaaaagacgatccattcattgccttaaatttctggattactctggaatttttattatccaaaatcagattccagcgccatccagacagaattttctgttaccagcagatcatggccctgatttatgtgttctaaacaggacggacgaaaaattcgcctagccatgcggggtggcgggagatgggggcggaaatggctggcgctgagttcgtcgacggcgatcagttggcgaggcaatttttccttctgatttcctgatcagcatacctgctgcacatgatggaagaaggaagaacctgttgcctgccgtccttttttgccatttttttttttgattcgcgcgcgatgaaatggcgaacaaatgacatcaccacccccgagggggcggcagcggcgcgcaacgcgccggcgccacacgcacccaaaaatgaataataatgcatttaattattttaaaacgatatgcgcgaaggggcaggggcacaattgtaatgtagcaacacaatttggttgctaattgcccaattataattaattaattgcttgatgaatttctgtaatagtgcatactttggttgctaattacttaattacccaattaattaattaattactgtctaattgtgttttgtgtgtgcaccgtgcgggaaaatgagaaaattattttttttgttattaaatttttgtttttggtggagaaatgtggttgtttgggcggctacttgggatgacaacaacaactcgtaggaaaatttgaaaaattttcaattttcaattttttttaaataatttttaaatgttgccagcgcccgacccgtcctgtgccataaaaaatgattaatgtgtagcaataattaacacaaaaaaatgtaacatttcttaattaacttttggaaaacggaatgaaattttccacgggggaagcgttataaatttgttaatttaaattaatttaatttcgccccctgatttcgtcacactatttttatgaaatctcccccctgcccccggggaatgtttcaagtgatggaaaaattcatttttaaaatttcaatcatattttcaagacgattgtgttggcttgcaacattgaagtgtgtgtgcgtgtccactccatttaaggagtaattaaaaggagaaattcgctcgctaaattaaattttgaaaaatgtaaatgaattttttttttcgtcgagttgcctcatttgtgagtgatgatggtaattaatggttataaaaataaatttaaaaatttgaaaggcggagatgagaggcaattacgaaattttttaggggacccattcacgcgcacattgttccgccgattaatgggctaagttggtgatcggaaatgggaacattaaccctttcattgggggtctaacagtttggggtgatcagaaatagaaaaaataacgctcctctgtgtactgatcagtttgggaagtgatcggaaataggagataatagtcgtgatcag

SEQ ID NO: 1790 - DNA, 1690 bp, Heterodera glycines
  unsure (1)..(1690): unsure at all n locations
aaacattgatttgtgaaaaagtgtccccaaaaactgctggcccaaatcaaattaaaaaaatatgaatatgtatgagttcggttgggttttaaaattggagggatttttcccggttccatgacatttcgcctactttcatttcgcctactttcatttcgcctaccaagccaaaaacattcatttcgcctactaattagtaggcaaaatgaatgtttttggcttggtaggcgaaatgaatgtttttggcttagtaggcgaaatgtcagtaggcgagatgtcggtaggcgagatgtcgagtaggcgaaatgtccgtacacctttttcccaactcgaaatcgatgtttgtggcgggtaaattctttgaaaattgaaacaaattttcaaaaaaaaacgattaaaatgaatatgtttgtttaaaaacggtgccctcccccaatttttggggttaatcacatttattattctgtgtatttattgatcaagtaaaatttaatagagtaaaatggagaaaacaacaaatttgacaaattgcatttttatccccagcaacaccaaaaattgagaaaagaaagggcagagaaaaaagaaaacgggaaatttggggggaggcaaaaaataattacgaaatcgaaaaatctcaaaaaagaaatggccatggagttcaatttttggtcattggggccaatcaagcgtaaaatgattaaaattttgggggcccaatcaattaaatcccaattaactaattaattaaaaaaagagagagtcccctcatgtaatgccccaaaacaacacacagcgacaaaagacgtgtggcatggcgtgaccaccaaacgccaccacccatcagcagaaaatgttatgcattcattgtgaaaagagaatggggggaaagttgcgcagcaaaacgcataatttttattccatttttggaccaaaaatcggcgacgcatttttaaaagaaagaaaagaaaggggaaaggtctcataaatgaacaaaaaacattgcaacaaaacaacagcaaaaattgcacggaatatattttttcgggggacgggagaatacagtatatattgggcacacagaaatgagagagaccgtacacagagagagagagagagagagtccaacgggatacgaacaaaaaacaaaaaataaattaaaatgaattttggatgacaatttcatcagagtaataatgactgagatattcgcctaccgaattcccctccgtaaattattttacaggatggggcggggggaattgaattcgggtcatacataccaaggctcggaaaatttgtgacccaaataaatggaaaaacaaatttccgaaaatttgggaggcgaggtcaaagcaaatctcaacattacaacccagaataaatttcttggcagtttaatttatacaggttttgccagctcaaaacggaatgaataagcaaggggatgtatgtgtgtgtgatcaaaggtgcgacgacgacgaggacgacggctcattggctaatcatggaacagcagcgcgttcagtttggaccaatagggcgtgaaatagcgcgattttgtttctgacgacgaacactcggccaacagcgtggccaggtcgttgcgcagcttggccacggatgcctgtggtggaaaaacaatttgtatttgaaaatcataatttaaaaaaatacatganaaatctag

SEQ ID NO: 1791 - DNA, 5231 bp, Heterodera glycines
  unsure (1)..(5231): unsure at all n locations
aatggacgacaaacggagggacaaaggaagacgaaaagaggggagggattgccattattagtgttaataggaattacaaagggacaaaaaacaaaacaaaaacaagcagacacagtaacagacacaccgaagaaaaatgggtgcgaagcaaatgggaaaaacatcctttctttattttagttttcccaaatttcggttgttattcctagagttgtacgggaccgggactggtaccgaaaaaaaggttggggtcaattccataccggccgtttccatgccataggccattttcgtaccaaaagtataaatattaatagacagtgaaattaaaacatccaataaaatttttcactactttttagacttagctccccaaaagctttcggatgataccaaatttatcaggattcgatcgttttaaaaaaaaagttagaagtgtcaaatctttgaatttttcgaattttgaaccgagccaaaaataggtttaaaccaaattccgcaacttccgggaaacccaaaaccgggctcaaaatcccggagctttagggacttcgggttcttacagtacctgctggggttaaatttgaatagttaaatccgggtcttacttcctaattttcgtgccaattgtaaattcgaaaaaaaattcacgatccaatttaagaatccggggactggataaaactggtaaaatagacaaaacaatattttaaaaattttttacttcggcttgtaaaaaagtatgatggtcattgttttgaagctttgcacggttctttttttgttagaagtatttccattttcttctctacaacattaaacataaaatatattgtcttataatgcatgagaaacatcaaaatgttgaaaatccccttctatttttgaaattttgccgaaaaaatttttggtacgaaaatggcctatggcatggaaatggctggtatggaaacggcggcatggaaatgggtcgatccccaaacatacataggtggttgatatttgctaatacttctgccaaccataatttctaaactctaattgtacatatttatttatatgcaacgacatttcatgtaaataatacatacaataatcacatgacaatgacaagaacataattaaggggacagaaacagtgggaataataagacagcaagcacatgataaacagaggttatcgaaaggtcacatttcatctgaacacagcgaacgctttcaaagggtaaattaacggtccaattggccaacagagcatcacaaataagccatccgatcgagtgctgaaaaagaacagataaacattgaaaaaaacacatttattcgattgtttgactgaccgttgacgatctcagcggcgcttgtccgccttcttactgctgctgaccggcacaaaaatcaagatggattggcccgtctctggcgctaaacgagtgatcagaatcaatgcaatgctctgctgcactctctcacttctgttcttcgcctcctccggcgttagcactttaatggacatgtccggaccaaattgatccatttgtgagtatcccgagtcggctgctgaaaaggaaagaaaaagatgaatggatgctaacattgagaatttagaactgaaatcttgaagaattgctcaaaaaccacacccgttgcttctgcaatgatcggttgcgtctcagccatcgatgtggaagccaaatccatcggtgttgatgaaatggatgattttcctgcggaggtagtcggtgaggccgatggtgctgaagtggtcggtttcgttgagatggtcggttttgctggagcggtcggtgccggtgctgctgaagtgggccgtttagttgaggtggtcggttttgctgagattgtcggttttgttggagcggtcggttttgccgagatggtcggtgaggccaatacagaagttggtggtgcggcctgcgctggaaaagcgggcgggtccacgcgcaatgtcggcaagaatttgtactcgtccgaaagtgccggctttacgggcgtcgcacttgctgaaaccaaaaaacgcaattaatgccatttcaaaaaagcaaacaaaacactccgacatacaataaggtccatagggtacggcttgtgaccgctgttgctgcgatggcgttttttgaacgaaaatttccttgtttataccggcaagcgtcgaatagcgcgaatcggctgctgaaaatataaaggttttggagctgttcggagacacaaaacacttgagtaaacagcacttacgatcagcgaagtttgttgtcggtggctttttctgtcaataaaaaacaaattaaattaattcatttgataaataatgaatgaatcatttattcacctttttcttacaacaagcacagcattgggtgacgagtgtgagcacagaagcaacgataatgacgaacaattgaacggagagcaaagagaaagggatcattacaacaaataacaagcgcaagaatggcaggggcagtggcaaggcattgcttaaatacaaaaaataacacaaaacaacacgaaacacacgcgaaaaacatttgccatcataaagagatactgccaaattcaaaattttggtatctcaaaaaatcatcagattaggtagatgaaaacggttaataggtaaacatgaggaaaatttgttttacctaattagctaggtaattaatatttgccaaaattgatcaattaataaatcggactctaaaaaaggcaatcttttcattcaatgcattttcattgattctttgcttttcattgcactatacatacttcatataatcttgataccgtccttttcaaaggttatgtcctttcgcaggcttttccaatttgcaatagaacaactcgaattagaataaaaatatatctttttcgatgctaatccattcattttagaaagaaatattatcccagtattctaagctaaaatgaatgcacccgaaaagcattattatataaatcctcgaaaagaaggaaaatttgagtccgaaaatcgttgttcatgccccgaggcggagctgtacgccgtcgaatgcaaaaaggtgggaaacgtaattagatttgtgctgtttgtgtgaacttaacaaatgcggaccgaacaattccataatgattttgctaagtcaactaaaccaagaaaaagcaatttgaaacattcggattttgagttatgtaatcccaaaattcggtcgatccgcttttgcccatattatcaggcctgccagattaaaattttcaaaagcctcattttgggtcaaaaagcctcatttttacaaaatgtattctaaacacgtttaaaatgttcaaatgttatatttttgattgtccatgatcaatttgagcatttttttttgttagaaataagcattttttgtgattctaagcttgaaaaaccgaagttgatttttttgcggcgctttttccaaaaaaaaacttgggaaagggggaggccggcggtgccgatagacgccgccgggggaaaaattaagaattttgaccatattttgagcatattttcattaaaaaattctttattttgcggtttttctcaaaaaaccacaaaaagcctcaaagcctcattttgaaaatttagcctcattgacccatcaaaaaaccacaaaatgaggctaaagcctcagatatggcagccctgcatattattaatggcctctctttcgtctttttccatttaacgcaattttctccgcttttaaggtcgtgtgcaacaaaatgaaccagaacaaccttgccattgccaaatgcttcatcgtgaccctcttccttgtgcgtgggttttgttgtcaacatcatttgctgtctctgctaatggcaccgctttatccgttctttgcccccgtttagattggtgtcatgttgctcattgtcattattggattagacatttggcattggtatatcactgctgagaaagacgaagcagcagaagatgccacggttgacacaaaagcatctgccaaaacaccatcagaggccgaatcgttcttctcttctctctacccgtatctcggcaccatcgttacgtgcatcgtcactgcactttgtcttgtcattatttgccaacttggtgcggattttttttgtccgagaaaattaccatttgcacaccatcgtaacacacgaaagcacatattatttattcatactgctttgatgcttcataacttttcagaagaatcaaattaaaaaatggatattttttacgtttggtctcctaaaaaaactacgggggagggggcttttggcttgcaccctgtggttataaaaaatgaaatttttcaggagggcgggaggcaactctaaaagtgtcaaaaacccttggtgaatctgaacataacttatattttttacaatttttaagaattgacacacagcgcgctgcaggtgaagtacaaatgtcgccagtgtggccacgaagcgtacaaaacatacgatttgatgggtaatggtggacgatgcaaaaaaatgatcattaaatgtttttgtttcccatttaagaacagttaagcaggggctttggcgacactttcagcgaatggggacgctacacaaatttgtgcgacccgccgccggaggtgacgaccaatttgcggaagaccaattacaacgacattgaggaccaattcagtgccatgtgccaatgctatatgccaatgtttcacaacagccaaatgtgggccaagaaattgatgaaacgcatcagttgaagagacgaagagacatgggagaaattgccaacgaaaaatggatgacaaatggaacaacaacatttgttatatgaccaaaaagagaatgcatttattactagggccgcaacttttagtgacgaaaaatctcgaaatagttaactaaaatagtgagtaaaaatgccaaaatagtgacataattttcagccaaaaaataagccaaaataatttttattcactgattgcagttgcaaatgagtaggactgggatttgtaagaccaaaaacccaaaataattacctaaaaaaatttttttaattaaaaatttttgccaagaaagtaaatttttgagaaaatttttttcatttcataggagtatattttgaaaaattttagctcgcttcttaggggtgtatttttttaaaatttttttaggtcgattcttaggggtgtattttttagttttattgcatttttgttaaggaattttccaaaaannatgtcgaaattagtgaa

SEQ ID NO: 1792 - DNA, 4682 bp, Heterodera glycines
tcgcttcttaggggtgtattttttggttttattgcattttgttaaggaattttccaaaaaatgtcgaaatagtgaaaaaatagtgacgatacgccaaaatagtgatttctagtgactgataatgacatcagaatcgaaaaattttaatgcagaaatgcgttttttgagctcctttcttcaaatcaattgagcaaaaaaaaaaagttttttcactaaaagttgcggccctatttattacgtccaattgttcattatcgtgtaaaataatgtctataaatttcaattatgcacttaaaatcctaaataaatgtttgtttccatttcaaacaccggttttatgggcgaaaaaatatcaaaataatggaatacatttcttatttatgtttttttgaaaataaattaaattgaggcaaacattttattcactggtgtcaatttatttctttttttttgagacacatcaatagagctgagatttttatgaaaaaaacacttgattttcccatttttaacacatatttagtatatatttcagtattttttggcacatattttattatatttcagggtttttagcacataaaagtcccagccagcagctctactgatcaacaaaattttttcatcattatttgataagtaaattttattccatagaatattttaatagagcagaattgctatggttatgtgattgatcgtcattataaaataaatttttatgaatttggttacaaaatatttttagaatgctttactggtcttcacaacaaaaaatagattattcaataagatgtttgaataagaataaaatttatataatgtaagattattttggcggatttgtaaacgcttaattctgccgattcatttggtcgagcaaaacattgtccatgaaattgcgaacgtcgctaattactttggagaggctcattaagtaatattcatcacaagtcgggcaaaacttcagcagcaaaatgacataaggctgcaaaaattggaaacattaagtgaaaaatgagccaatttatggacaaagggcttctgttggggttttagaatatttcacatttaacaaatttaaaacgaaaaaatttaggaacaggtggcagatttaattttaataatttattttttcattatttcgaaataattcttttgttaatattttaatgaaaaactgacagctgtgtcgagcggcacaaattccacttgcaatactttggacatgagcacagagtttacaacggtgctaggtcgtttcttaaaaaccgccacattgggcgttttttaaaaccgccagggcgtttcttaaaaccgtcagggcgtttcttaaaaccgccaactcatatgattatgtatgtatatccgttaaattaaatatacaataataatcggttagactcttttgattatacaaattcatattaaaaatttagcttacgaatctgagtcaaaaagaaacaacagcatcagtatttttgtattataatgatggacattttgaactgattaaacagccaacaaagataaattaattattttgttttatttctgtgataatctttataaaattcattcccttttgaaagttgcaaagaaattctgtgggacttattgtggcacctctctattagactcttgtctaatagctcctgtaatctggttttgcaactttcaaaaaagtaacaaattacgaattagcaattttatattcgaaaattttgcagttgataattgttgctataaccacgatgtgtgctacataaataaatatcagaaacgttacgattgtgatattaaattttgcaattgccttaatgaatatcctaattgctttctaacaaaagtctgttctccaactcatatcttaaatatttttttttttagaatatattatgctggtcagttcatatttttggagaacgttttaaaggataaaaataattattttattttaccgtcactagatatgcatatgtattttaaattttttattgttatgtaaacttctaatatatatatatatatatatatttatatacataatcatatgagttggcggttttaagaaacgcccaaagtggcggttttaagaaacgcccaatgtggcggttttaagaaacgcccaaagtggcggttttaagaaacgtcccagcaccatatttaatataattttattctattttattttcagaataataaatcataaaatagctctaatttaatctatttaatttatcttggtattgagcgatagcccaagttatactctgccatttatgaaattttaaaaaatttacgaaacatttacaaaaacctataatcaaaaaatttagataaaataatttgtcactaccttttttcaaacttcaaaaaaaaaattttgaaatttaattgaataatagaaaaatcttttctccgtttaattatataaagaaacttaaatttggttgcacaaggtatgatttattattaagtaaattaaatttaaatattaattaatttaatattattatcattgatacgtttttaagttcgacctagcacccttaaaaactaaaaattttggaggaattttaattttacttaataaaagtgtaaattggatagtttcagaatcacgatatggcaataaaaactcgggttcaaatggcacaaattttcacatggatggagggggcgaacgatgttgacattcttccaccaggcggaagagttgcaaacattgctacgatggattggagttttaaggcattgagtttattcaaaaatggtaataactgaaaacgaataaaataaatttcctttttaattgtaattaatgaatttaatattcatagattcccgtaattcggctgccactgagcatggctttcccgctcatttgctgctttcaaaaggctatttccaagtcagtctgagccgtgccatggtcgagttcatccagctggaactgaacctgaccgagttagtcagacgtttaaatttgattggatatggacgggacgaaatcctgctcaccactttgcactccgccgatcagcttaatgcaccgggcggatttacgcagacgtgcttcagccggaagggtggcggacggaccaaccatttgaccaggtgttttttaacgggatttaatttacaaattaaaagtcttagcatttttggcatgaagcatgaaattgtcaaagttttgtcttaaaatttaattatctgggctttccgaacaggctaaaagtattgaaacgtattaaataaataaataatttggcaacgcctattatctgtttagcttaccacccactccttaaaattggtcaaaattaaaagaaaaaatcccattgaaaaaaacatttatttttaatgactaaatttccttactcattaatacaaatttgttatctgctcattttcccccaatttagggagtctttatggatgccgaaccctttgtgtgcctctggccattcgtttcacagcatttgcatgttcggcattgaagatttgccgcaattagccacctttccccacctttttgtcaacaaatttttgccctccttcgattttggcgctgcgatttgtgtgtacgaaagaatgtttaacatgacatatttacacacgggaggagaacaattggacaaaatggaggcgttggtgaacaaatctgtggttgagcagctgccgaatgtgagtaattattgttgtgtaagaaatatgaaaatgagccaagtcataaattaatttttttttttttttaatataattttccaaaatttttaagaaatttcaattttaggtgaaatttcagcgatttaaaagggatatgattttacgcaacaaaaacaataagcaacaaaagcgtggtgttggtgaaaagcaattaacattcgaagaagtgatggggtttcagtgtgaagtataatgacttaaagcattcaatttataaataaaatcaggaaattaattgatgcaaaataaactttataaaatattgttttaatttataaaaagacaaatgcacttatgtaaaattattttaagctgacccatccaaaaatgaattatcgtattgtatatttacatattattaattagtatatgattttcgaaataactcaattacgaaattcctaattaaaaataatttatattaagaaactattgtttaaaatgaacaatataaaaatccaaattacagctcataaagcttctcaaacaattttagcacttccatttccttctacaatcgcctttatacatcccattatgagcgctaaaattatcataataccgaaaatcgcgtttgatctatccctaaaaaaaatgctctaaataaaaatcttaattacgctcaaaaagattctcatacaattttagcgcttccaattccttctacaatcgcctttatacatcccattataagcgctaaaattatcagaatgccaaaaatcgcatgtgatctaagcctaaaaaaaatggtctaagtaaaaatcgcaattaccctccaaaagcttctcaaacaattttagcgcttccaattccttctacaatcgcctttatacatcccattatgaacgctaaaattatcagagcgccgaaaatcccatgtgatctaagcctaaaaaaaatgttctaagtaaaaatcgtaattacgctcaaaaagcttctcaaacaatttt

SEQ ID NO: 1793 - DNA, 3425 bp, Heterodera glycines
  unsure (1)..(3425): unsure at all n locations
ttattaattagtatatgattttcgaaatacttaatttacgaatttcctaattaaaaataatttatattaagaaactattgttttgtattaaaatttgttcattcagatgatttgttttattaaatttcaattttatcgtaattttaatccaatttttttaaccattcaaacatattaaattgaacattcttttccatcttcatcaccaattggattctgaattatccagttattcttcggccacttcctgctgctgttgttgaacaggaatgtccaagttcggcaggttcgggttggtcggaggaatgtactgaattttttatttataaatagaattatttgttttcatttatttttaaattaattttttatttaaatatatttcgtttttataaatcattttgttttcttacctgacctctggccacgttgtgtgccgacaagtactggtattggcttccgtcctggttgtcccccttcggaattgagtcaatgtcgcgggcaaccgcactgagaagcaagttttttttttgaaaaattgcttctaaaaattataaagcgcctaagaataatttattttcaaattccaccgtaatattttggcatttgtattactttaccaaatgagtcagtagcacatagaattttcaaaattcgctatgcctaaatgtttttgtgtcaggtgtcagaccctacatgttcagcatgcccgagctcagtccaaattctgcggtgaatttgggcgttttgcgcggcttcaacggctgatagccgtggtacactccgtccttcagctcttgatagccggtgtagccttcgcccttatcgaccattttttgttgttgtttagcgatgaaataaaatctaaatcagatggacaaaatcaatgtataaattagtgtataaatggaggaatgaatgaagcattaaaattaatacgtacacaagggaataaaaacagtaaaaaaataataataattagtagaaattattttagaaatataaaagcccatcccaaaacatttggaaggcaattaacaaaatggaacttggaaagcgattggaaatgctgctcaaaatgaaaagcaaaagcacaggagagacggaagtgtgaagcaatttggccaaaaagtgaacgagggggcgtacggaggagaagcatttgacggggctatgagcttttgaacagccctccgccggaaaaagtgaacaaaaatgaagtcggtcggctttttgtttgaaatcggcgccgttctaagccaagtaaaaatgaaaaagctccgttcgatggaaggaatgggcaatcaatcctttggaagcggagggggcgggggcaaaaaagaacagacggacagatgtgttggcatcgccgttctgatcgccaaatcggtggttaggcgattagagaaacggtaaaactcagtcccaacttcattactggatctataaattatgtgaatttaaataaattaaaaagcattttaaaaccttttcatcagtatataattattctttttaatttttggattccgcatgttttggccaagctgaaatttagagaaaaaccggcccagatgaagagtttagatgtagcgaaattcaagaaatttaacctattatctttttttgtctatagaattaagaacttactagcgacattaattaactttctggcagtttgcgcaaagcatttacaaattggaacacttttcaagactttaatncattagattaattttattaaggttaaaaatgtaaaatgaataagtaaaaacatcacattagtcacaaataaaaaatattagacaaagatacattaacaataaaaaagaaaagcaaaagaatcctcaaaaaattattaaaaattaattataataaaatattccgatcactgtcaaaaaatattatttaaaaattaatttgaaaacttaaaaaaatatgaaaaattcacagcttttaaaatgaaaaatagaattttgataactcatttacaaaatgtggtatttaattcttaagaaaacaaaatcccaaattcccatttagccgtgtttttatccgagcacgacatccatcgaaaccatattttcagcagcagaaggcgttgcgttcgtaatgacgttgagattgtagtaaacggaagagccaattccttttgtctttaaataaagaaaaatgaaattaattttaaataaatattatttaaacaatgtttcttgattgatctcgtaaatgattacatatttatttacctcaatgagttcaccagagtggactaattctttgattgccaaatccatcttttcataaatcttaaattcaaaggtttgaaaaaataatttaagcacattaattaattaaaattaagaatgataaatcaataatttaattaatattcaatgacaattatcatttggtgtatttgtgattatcattcattaattgtgtgtactagtgaaaatagatgcttatttttacaaataattaccgaaataataattattattgctttaccaactcaaacattttttgaaaagtaattaattagtgcatttacgcgggaagtgtccttgcccacgtcaaaggtgctcataatgtagttgagaattgcgcctttggccgaccccttttttgatttcagtgcgacaatcgctttcttcaccatctttgttttaaaaaactttttaatgtaacatgattgatgaatttttttcttaaattaccaatttgattgagattttcgtgctcactggtacagtagacgaactttctgcttcttccgtctctgcctttactgtagtggaattgtccgtttcctttgtctcagttgtcgaataatccgcttcttccgtctctgcctttactgtagtggaattgtccgtttcctttgtctcagttgtcgaataatccgcttcttccgtctctgcctttactgtagtggaattgtccgtttccgtcgaataatccgcgtcttccgtctctgcctccaccaaagtcgaattgtccgtttcctttgtctcagttgtcgaataatccgcttcttccgtctctgcctttactgtagtggaattgtccgtttcctttgtctcagttgtcgaataatccgcttcttccgtctctgcctccaccgaagtcgaattgtctgtttcctttgtctcagttgtcgaataatccgcttcttccgtctctgcctccaccgaagtcgaattgtccgtttcctttgtctcagctgtcgaataatccgcatcttccgtctctgcctccaccgaagtcgaattgtccgtttcctttgtctcagttgtcgaatagtccgcttcatccgtctctgcctccaccaaagtcgaattgtccgtttcctttgtctcagttgtcgaatagtccgcatcttccgtctctgccttcaccgaagtcgaattgtccgtttcctt

SEQ ID NO: 1794 - DNA, 1610 bp, Heterodera glycines
  unsure (1)..(1610): unsure at all n locations
tcaatattttaattaatattcaatgacaattatcatttggtgtatttgtgattatcattcattaattgtgtgtactagtgaaaatagatgcttatttttacaaataattaccgaaataattattattattgcttaccactctcaaacattttttgaaaagtaattaattagtgcatntacgcgggaagtgtccttgcccacgtcaaaggtgctcataatgtagttgagaattgcgcctttggccgaccccttttttgatttcagtgcgacaatcgctttcttcaccatcttttgttttaaaaaactttttaatgtaacatgattgatgaatttttttcttaaattaccaatttgattgagattttcgtgctcactggtacagtagacgaactttctgcttcttccgtctctgcctttactgtagtggaattgtccgtttcctttgtctcagttgtcgaataatccgcgtcttccgtctctgcctccaccaaagtcgaattgtccgtttcctttgtctcagttgtcgaattgtccgcgtcttccgtctctgcctccaccaaagtcgaattgtccgtttcctttgtctcagttgtcgaattgtccgcatcttccgtctctgcctccaccgaagtcgaattgtccgtttcctttgtctcagttgtcgaattgtccgcgtcttccgtctctgcctccaccaaagtcgaattgtccgtttcctttgtctcagttgtcgaataatccgctttttccgtctctgcctttactgtagtggaattgtccgtttcctttgtctcagttgtcgaataatccgcttcttccgtctttgcctccaccgaagtcgaattgtctgtttcctttgtctcagttgtcgaataatccgcgtcttccgtctctgcctccaccaaagtcgaattgtccgtttcctttgtctcagttgtcgaataatccgcttcttccgtctctgcctttactgtagtggaattgtccgtttcctttgtctcagttgtcgaattgtccgcttcttccgtctctgtctttcccttagtcaaattgtccgcttgtgccattaccgtagtcgaattgtccgcttttttcgtctctgacgccaccgtagtcgaattgtccacttcctccttctcagctatcacagttgtcgagttcgatttttcaatctctgcatttcccgtagtagaattgtccgcttcttccgtctctgcctttaccgtagtcgaattgtccgcatcttccatctttgcctttaccgtagtcgaattgtccgcatgttccatctttgcctttaccgtagtcgaattgtccactttttccatctttgcctttaccgtagtcgaattgacagcttctttcgtctccaccacctttcccttagttgaattgccattgcccgcttcttccgttttagctttcatggtagtcgaattgtccacttttccaacttctctgacagcaacctttttcgtaacgtcttttttcattatcttaataatgtcaaattatttctactcacctcctttttttgtgtttgacttaccaccgtagtcgtgctgctttgttgctttcgtgtcacattgtccaactgaccaattgatttg

SEQ ID NO: 1795 - DNA, 715 bp, Heterodera glycines
  unsure (1)..(715): unsure at all n locations
attggtctaaaaaatcctaaatttactntattacgctcagaatattttatttcattttataaatattaatttaaataagcatttaatgtgtgcataataaaatgaaaaatattcgattgcttaaaagcagcagctaaaatgattctgcaaattccattaattggcgataggaacaaaatttatgatgatgatgatgatacgatggtgatgaagaatggcgatatgttatgaataaattattaaaagaattttttgatgtcagaataaaccaaatgatttgaacacataaaataaaaaatgtttaatatactttctgcacccgaaaaaaatgaaaagcaaagtgccataagacttgttgataaaaatattaaaaaataataaataaaaactgaccgaatactttaggattaattacctttctatccgcttttcagtggtatattttttgtctttatctcataatttggataaaaatagtctaaaaaatttctataaataaatttttttaattgctcaaaatttaaaataaagcgaaataaatttggatatttcatttttaaagagcacaacaaataatccaagcattcaaaatttgttgtttatttctgcttggcaatggccaaccaaaaaatggtgaacaatttgaggaaaagggtgcaaaaatgcatggacgaaacagcagcagataagcagaaaacaacttagtgcaaagttg

SEQ ID NO: 1796 - DNA, 6438 bp, Heterodera glycines
  unsure (1)..(6438): unsure at all n locations
agggcttctattgttcaccggcctccaaaggtgacttatattcgagggggggggcttataatcgaggaaataaggtatcttatgaatttnctctttataattttttgagcctggaaaattgagtccacgtcacatctcagttccactacaacatgtacaatcgtttgggcgacattttggatttgttgtcattgtgtaatgcatgcacatccttcatcatctattgtacaatgagtgcacaattttgaaaagtcagtgaagatatatattttaaaatttagaaatatttattcttttaattttgaaaattgaacatttttttaaaagttttaatttaattataagattaattaaatataattttaaaaaataatataaaaattcaccatttttataagggattatatttttataaaattaaattttatttttttttttcatttcatttatacgcataagcgtgacgccgaaaaataagaaataatgaaacaatatcaaataaaacaaacaattggtcacttttggagctggggtggcaaagaaatcaacaaattcagatcagatctttcaagaagtttggcaaactcattagaatttagtaatctcgtctctttaggcaaaagtctatagagacgagaggttcgaataaagaacgaattgtgtctatcattggttgagcaataagctgttcttatggtgagttcgtttttgtacagggttttgggaaaagaaaaggattcgttattttgtaaatttattttacctaaaattatttcatgaaaaagttttaagtctatttttaacctacgactctcaagcgacttttgatcataaatgtttaacaattcagcataattaggtaaatcagcagcataattgttacgtctaaatattactctcaaaaaagttttttggacattctccagtttttcaatatccttttttaaataaggattgaaaattggagatccgaattctaaaattggtctgcaataaatattaaacaaatttacaagtattttcgtatcaccagttttgattgactttaatatagcaaaagcagatcgtaatgctttcttcgagataatttcaatatgttgtgcccatttcaaatcattagtaaaataaatgccaaggtctctgactggttcgtttccgggatttttagtaattggaaaatcatcaataaaataatttattttttggtttttgtgtcctaaatgtaaagttaaacatttatttgaagcgattttaaggccgtttaatttacagtatcgattaaatttgttaataaaattttggagtggagaaaaggaaatatttgaaagaacatgataggccttaagatcatcggcaaatagtttaattttaacattttcagtttcgcagaattttggtaaatcgtaaatgtaaataagaaataacagtggtcccaatattgagccttgcggcacaccactgagacagggatattcatcagagaaatcagacccgattttgacgaaaaactttcggttttttaagtaattctgaatccattttaataaggaattatttataccaatgttttggagcttagatattagccggttatgtggaaccgtgtcgaatgctttagctaaatcaaaataaattacatcaattgattttctattttctaaagcaaaactgaaatcatccaccacttcaagaagttgagtagtaacagaatgtgctttacgaaaaccatgttgacaatttggtaacaaattatttttttcaacaaaattttttatttttcctgctatattttcttccaaaattttggaaacagaacatagcagggaaatcggacgaaagtcgactgggtttaccggattttgaatttttgggacagggcaaataattgactttttccatatttctggaattttggcagtcatcaatgagaaactaaaaatatggaaaagaggtcggactaaattttctttacaatttttaaaaaaatattgggaattccatcaatactagtgttgttagaatttgaaagtttggaaagagaaaaataaatttcatatggagttatgttaaaatattcgatatttttttcaggattttctatgcattgaaattgttctagattttgatctgtaaaaacggaaaaaaattgttgcgctaatgcattcgacttttccttatctgagaagagaatcagactatttttatcagtaaatgcaggtatcatagtatttttagtcttaaggaaagaatttataaattggaaacgttttttagagtccaaggtccgcaaaaacttattttcgcgatttttataaaatttatttatttctacatcgatttttttcgaaacttctaagaattttatttttatatggtctttgtgaatgtccttccaaagctgtttacgatagatgattagtttcaaaatatgttctggtagtttttcaacttttttcgttgtttgtatgggaacataattccttatcaaattatttaggaaaaacataaatttttggtaaataagctctatgtccgggcaatcagaaaaaaataaattccaatcaaccattgagagtatgccatttatttccaaataatttgcttttttgaagttataaaattttttagaggcatcactattaacctgtaaatttatgctgaattgaattgcattatgatcactattcccgaatggaggtccaactttaacattattcaacagattttcattgtttgtaaataataaatctaatagattattgccccgtgtaggagagtttaccattaatcttagtttaaatccctctaaaaaggaaatgaaaaatgattcaaggtgattgtatctttttcgaaattttggatgctaaagtcttttgcttttaaaagaggaaaattgaaatcacccaacaaaatgcatttttcggaagccgagattaaaccagagagttgttcgaccaatttttcgaaatcttcttgtttttcatgggaggtgggtctataaatcaaaataaaacgtatttttgtgtggttaagaggtgaaaataggtcaacacaaagaatatcggaatttttgttttttgtagttttgataatttcaaaaggaattaaattcgatattatgaaagcaaccccgccaccttttttgttaagtctatctgatcttattatagaataggggagattttccaaaatttgggggttttctattttgttactcaaccaactctcagatacagctatgattttaaacctattttctaataacaaaaaccttaacttgtccaatttgttcgccaaacttcgtgcattgaaatataaacaatttaaaaaaggaagtgacctcaaaagtttttttcattgcctccgcgtcgcgtcgtgatgttttcccccgtttttttctttccaaattccatccacttcttttggcgctgttcccgctcaatttccaactcctccttcgtcagggatggcctgaccagaagacgctcccatccaggcctcatcttcagctccgtccgacgacgcccccactgcatcagcgcaaaacgttggaaggttgaagccggcaggaccaccttcaccaagcgcggtcctttcctcttctcatcaatcctcctgcccatcctgtagaccatttgcgggcacacttccacgtccagccggtccaacacttcctccaccgttttcgcgtcatccttcgcacgcagtgatggcacttcctcctccgattccggaagaccgatgagcacaaggctcctttttcgttctttctcctccgcgctgccaatgccattgttgttaattttgcgctcaatttcacccaggcgttccgcaatggcgctgaactgcgcagtcatttcggttgccaaggtgttgttgttgttggttgaaattaatttttcaatagcagttaagcggctaataatagctttaagttcggccattgtataatcttaattggactgcctcaaaaaacattctctgtatattagattagattttttaggtttataaaattaagttttaagtattttaatgggtttttttacattattatatatacttttttaatataaaatttttttttcataccttgttcagcattagacaaaatttatttgaaaatttcgttgaccatttttagtatgaaaacgttcaaagcacattttaaattcctttttgaacagtcgacgataatcagtactggaagaaaaataaaattaacatttgaaataaaaataattaaaaattaaaatgagtccgataataacgcataatctttaatattaattaattatttcgataataatgacctgttaaaataaaggacaattgcatttgatcctgccgctgcatttagcagaatgccagcaataaaaaaaattgccaaattcgaattggagagctttaatttttttgaaaattatatttaggtaatataaaattaatttttttattacacaaacatatggcgaaatgcaccaataaattgatatattgccaaatttaacaaatacccgccaatattaatggacaaaatgatgactaatgaccgtaacactcgtgcgttcgtctgttgatttactgtaaaaaaatactttcaaattttttcataatgccaaaaattgccaaaatttctgcgtcggatgagcacaaaaattgccacgtaacaacaagtgctacacaatgaaataatgaatgtgtgggtgatggatttatacccaacggtgccccgaaaagattcggccaccattccggtggttggactgaaacaaaatttgaaaattaagtatatttaattctaattgcgccatactttcccgcattttcaaatgcatttgcgagcacataattcaatgaatatgcaccataaattgtgcaaattaacagataactgaacaggtacacatatttgaactgtaataaaatgtccatatgtctaaaaacataaaaataaataaatttatggacagaatgttccttggaatcggcatttttgagaaagaaaaaatgtccattaataaaaataaattttggcattctgtttaaaataattctcaattataactaacgtatcgaaaatgattttctttttcaaagttttaagtcaaaaactgttaattttcctcactttaaaggtgaaataacagtaaaaagtcggtcaactgcagcacaaagcattgccattaagccacaatttatagcaaaaattgaaggctaaaaattggaatatttaaataatttttaactttcaaaatataccttcataattaagtcagcagtgagaaaactgacaaaatttgtgcccgaaatgacaacaaccaggaaaaaagtgtgcccaatttggtggaccaattcacaaagacaaatcaaagccatcagaaaattggcggagccgcggagggaactgaaaaataggaaattaaattaattaaaaatggaaagtttaatttaatttatcatttaaatcattataaataaaataagaaaatgccatggcatttacttggatctggcagtgaccactaaaactgtgccgtttaacacaatgccaaccaatgcaaccaaatacagcgcaacggccggcacaatcaaatcggcggatggaccgatagaacggtaggccaaataaagctgaattataaaaatcaaaataaaaatttcttatttattttaacattaaaaataattaaaattaaattaattattaattcattaattaatcacttttaccgggtcatttgaactggtgttaattgaagtcattttgaattctagccttttaaattaattgcattttatttttacatttttttccaattttacttggcataaatccaaaattttttcaaacttttgcaaagtttgaaaatttgaattgcttataattagtgctaatatttttaggcaaaagcctatttttttcttgagcttcccgtggcctgaaacgcacaaaaattttttgcctattttggcgtttttcccaaaatttgttaacaaaaatgcaataaaaactaaaaatacaccccgaagaatagttttttgggaattttaaaaatacaccctaagaatcgacccaaaaatttcaaaaatgcatcccttaaatgtaaaaatttactcaaaaattcatctccaatatttatttttttttttttggctagaatttttgattttaaaaattatttagctcaatactgatttggcctaatttttttaccttttttaataaagtttgtcattttacacccctaaaaaatgagttttttagagcctattttccatttttagtgcctattttgggggttttacactccttttccctttttttgcttgaatctgaagaatatggctgggaattaaagtcaaagccttaaaatgacttaaaaagtgttctacactttgtttgaagcttctaacatgtatttttgtgactttttt

SEQ ID NO: 1797 - DNA, 3192 bp, Heterodera glycines
aaacaaagtgtagaacatattttaagacattttaaggttttggctttaattcccagccctactcatcagatgcaagcaaaaggaaacggaagagtgggaaaaagtggaataaaagacaaggataagcattaaatgagggagcgcttgtcgtggcccagtcgattaagagcatgcatttagtcaacggcatggaaaggccgtgctgagacgaaccggaaatagataggctcatccgtgtcaataaaatatttaaatttaattatacaattcaattgggtgtcgaaaaataacaaatttaattatacgattaatattaaaaatataaactgaaaaaataaaataattccagctccgaccaaaaaaaaaaaatcacatcgaaacgaaaattataatttaaaatcttgaacccatcaaattgattgacaacgaagcttactagataaggctttttcatttttagaagaaaaaaaaatctactaattttcttgacaaatttcaaccaatatttgcgtaaatttaagtttttcattcgtttttccagaaattttatgtgctttttccataaattttgcttcatccctattcttttttccactaatgttacaattgaaaaattgttctgcatttattaatatggtacggaaaatagcatttatttcgagcgcagaatttttgaagaaaaatattgaagaatgaaggaaattacgatatatgtagttatttgaaaagtttaaaaattataattaatcgtaaatttaaaaaattattgcattaaaataattaaatttaaatgttttatttacactgacaatgagactattttcggttcgacctagcacctggaaatgccgtgggttcgcgtgccatcggaccaatgcacttttatgtactacactcttcattttaaggatctttaaaaataggaaatttttatgtattctttttaaattattttcactagaaagagataatgcggaaaaattcaaatgaaaaattttattcgaaggctgctaaaaataaggcttaatcacatcacaatgaaaaagacaatttaattaaacaatttgagcgcaatgctttcgaaagtgtcaaatttaattttgcattggcatttttattgctttagttaaccaattaaggcatgcattcgcttatgaaaagcaattaaggtcaagccaattgaattatattttgaaattaaaattttttttatatttagctctaaaataaacaataaaaattttaatttacattaaaatttgaatttatgtgattataagaccttttttaaattagtattttatattttataaaattttattttgtgctattatctaaatcattcatcggataattttcggattaaatataaaaaaactcaaaaatagttctatttgttggccaacagcaattaaactctaattgtaagtaaaaaagccttgccagataattactacccatttaaatttcttttgcccgcatttaatctgtgaaatggtgtaaatggggaaatgaatttttggtcttctaacaaataagctacattttactgccattttatgaaaaacttttctttaatcggaatttgttcattttacgtcgtcgctatatgattaaaggaaaagataaatttactcgggtagggaaagaaactgaaaaataagacaaagattattaattgagtattaattagttaggacaattgcaaaaatttaaattagctaaatgttttaataaatcttcacacaaaactcaaactttcaaatattttggcatctgttggatgatacagacggttgtcaatcttccaactattagaacattattataaatctaaaagtggcacccaatttaacttgccggtttcttttattttgattttattaaataatattcccaggggtttttcaaaaggtcagtcacatgccattctggcacattgacagatttaatttttgatttaaatattgaaaaataaaaataattaattaaaattgtattatcagtcggagaagcgccgcgcatcgttcgtagcggactcccgccagccggagagtatcagccgcaggagaccgaagtcgaatcgaatcccgtcctcatcgagtcgagagaaataggcagtccagtccgaccgttcggagcagctcaaaagggtccgacaagtctaaaaggtgatgcgcaacaaacaaagtgaacagagtctcagctttgttagccctcaagaaaaaggattggcgacatattttatttgtgaaagattttgaaaattttcaaaattaaatctatggatgatttcacgaaacgacttatctaatttggtatagtgtgaaaaagttttgtcttcattaaattgactctgactgactacaatcgccggtttgtgcgcaccttttctcataaatgtgccaaattaattttttttggcattttgacacatttgtatttttccatgtgaactcattagagatttttatgcattgcacgcattatgaaaatttaaagcttatgccagtaagaatctgttgcattgtcatttataaagaacgccaaaatgaaatgatttggccaagttaattgaaactaattaaattttttttctaaattagaattaattatattaaaattttttatgataatttattattttttcaaaatttatttatgataattttattattatttgttttgcatatggcaataatgaatagggctgccaattttatgtaaatacatattttttactggcttctccatgctctaattagtaggaaaaacactttcttttttgtgttttgcgaacaaaagttgggacttttattttcatatttttacatattttgggatttttctacatattacacatatatacctatttttatacatattttggactttttcgtacatatttcgcaatttttgcgtcatattttcattttttttaatatttgaggatttttgagaatttatagaaattttttgtgaaaaattaaaaaaaaatttttgaaaatgtatcctaaaaaatttaattttttttcaaatgatatatcaaaaattatttttgaaatactaaaatgtaactaagcctattttggtcatttttatggcatttttgtgcctatttcactttttacaaagaatttttttccaaaaataaccatttaaaaaaaatttatttacatattttagtacata

SEQ ID NO: 1798 - DNA, 3097 bp, Heterodera glycines
tatactataatgtgacgactctttacctgtttagtcctctattcacttatatattacattgcacattcgtcctcatcgcgtttctgcgcgagtccttcccgcaacatttccggctcaacatccgggtctcgccacaattcgtttccctcttcatcatattcggcttctgtaaaacaaatgccaacttttattcagcattctgagtgtccatatttaaatatattttaatattaattgctgttttaatgcttgggcgattttatacctaattagcttatcaaagagaaaattatttttaattgcgaatcatttagtaattaattaccattttgatgtccccagccaacaatgtgcaagttattattggaattaaaatctttttcagaagtagaattggccaaacaaattggctccacattttccataaaagtaattggttcagctaactaaattgaaaatcattgaaataataatattaattaaaatgcaagcatcctccctctatcaatgcccgcaaaaattgacggaatacggtagaattacggaattttttaaatatctattaataattttgaaatagtatctaaatttctcatttatttgctgagttcgtttttttcaatatgtatttttcattatgggcattttttattttaaaacactattcctgcaaaataagaatttgcattttccgaaattgtcataaaaatgccggaatgcaaaatgcgtaattcggtcccacatctggtgctccttcttttatgtgaagggctaaacaaaccttcatgatatagttttttttggactaatgtcaattaacataaagccttctgctgattattgtttttctctgtcgctgacttttatgatggccaaatcgttcacaaatgtgagctcatcgtactccgaatggacaatcactttcgctaaattgggctcaattgcctcctttgagctgtgattgtatgagccgaggcggacaaaaatctgatcagagaaaaatatcagacttcctagagctcaattttaaaaagtaaaaaatggaacttagccaaaggtggcgatttgcgctcttccggcgtcatttgcctcctcttttttaaaatgctcaatttttaatgccagttttaaaaatccgttaaaaattttaacttcctcccaccaccagtaggcaaatttcggtaaatttccaaaatttaatttaaaaaacattttgatataattagttagtgagtcggactaaaatcaaaatggccgttagtcaaaaaagcatcaaatgaaaatgggagaagttatgaagaattttctgtcaaaaattttcaatttgatatttttttgactaacgccattttgatagtttttggctatcgtcccagcaacaaccctactccaagtgaatttatttagactactcaggtacaacattcaatagccctacaattttgtgttcaattcggcaaatcatatataaaattaattaattagtgggcctaataaggaatataaaaatattttcccttcgattttcattaaccttttcgtgcatattttctcgctgttcgcctttgaaagacatgaaacaatgtgccgcggtcagcacatgctgcggtccaatgattgatgccgtacaacagaatttgttgccatcatcgccacaaatgccggcctcgcgggcaaacagtgccaccaaccatggccatttgttgtttgactttaccggattaccgtggctgatcttaatgggagaaaaaagcacaataagtaggcaacatacaataaggccaattataggagaaagatccttaaattgtggaaaatttagaaatttttgtatctgagtctgcttaatcattgttatggttttcgtatattataaagcggattttatctaaaaaaaatctgaaaaaaatgcaaaatttcattttcttaaattcaaaatgctaaaaatagatttaaagattagtattgaataggcaattcaaaaatgttcagcaattatgccgtttttttcccaaaacactgtcaaatgtatgctaggattaacaaataaaaaatttactttaaattgaaattttgccaattctgctgtttcttggtaatatttgtccctttctcgaaatgtgccgcattcgtaagcatttattcggtgcacaagcaccaaagaaaatgccaacaaaaaatatttgtaaagcattttgaaaacaaataaaaaatttttagtaaattatgaataagcaaaaatgaaaatggaagtgtaaatgtgataaaatattgaataaattaaatgtttaatcatcacatgtttttctttttgacaaagcgaccaaatttattctctccattacgaaaatgatttacaccagtgtaaattattacgatgaatatgttaaaaaattttaatataaaaaaaatttttatgaaaaaactgttttaatccgatttataagccgaaaaaaggagagaagaattttataataaactgtaaattgctaagaatttaggaatgtgtcaatgtcaaatttgtaaagaagattttcaaaataaatacagaataaaaaaaattaattggtgtttttaaaaaaaatattttatgtttgtgaattttcaagtagggttcggaccccgcccccgcccccgtccccgggggcgggacaggtttttggggctcacccccgcccccgtgactctgacccccgcatcccccgcccccgcgaacttcgcccccgcgggggcacgggggtgaaaatacacccctaagaatgacatattcatggataaaaggcaaaaaagttatacaattttgatttttttaaccattttgacaaattttttatgaattaaagttaattttattattggtcattgatgtgtattctgttagaaatcgagcttaaatttcaaaattcgccaggcggcctatcggcacctccggccccccaaaaacctattttttcttaaaaaattagccaaaaatctcaaaaatttggtaattctttagacaaaatctgtgtaatttatgccaaaaggaattgaattgaggcgatacattgactaaaggaatgtggagccatcacatcattcataaaaaattaatttt

SEQ ID NO: 1799 - DNA, 1246 bp, Heterodera glycines
tgaaatttatgaaaaatataataatagaatacatttttgatcgaataaaatgtaaaaatatttgaagcaattttgcaaaaatcttattttttggcctttattcttattttgaaaattttgaaatagaaaccctagatttagacaaaaacacacataaaaattgactattctggcataatttataatccttaaatttggtcatttttagacaatatctgtgcaattataccaaaaaagaattgaatcgaggcgatacatcgaataaaggaatatggagccaaacagatcattcaaaaaaaaattttttgtgagattttttggagctaattaaaaacaaacccccgcccccgtccccggtggcgagaaatttctcacccccgcccccgcacccgcgactctgacccccgccaaccccgcccccgcgaaaagccacccccgcccacggggctcgaaccctaattttaaacagtcaatgttaattgaaacaaaggtcccttcaaaaaataaatatgccgaaagcagcccaataaacaaataataatattaaaaatatttattaatgactttgaaggagtgctctaattactgtggtataaaagaattttttttgatcagtttatcaaaaattaaatttagcttgattatttcaaaattttcattgtttttaaaatccgtaatatgttaaacatttgattaaaattactcttcgatatctttttcatgccaattcatgataattgatgataaatgtgacatacttttcttcttaggaaaccagggccctgcgggccctgcgaaagcgccgggggcgctttcaacgctggctctagtgggagatataatttggcatgcaaaaagcatctattggccgctaagcggtcctcatagtttatgaatatgagaatttggaaatgatcgaattttgcctttcatgctcgttttttcgccttttcttactgaacatttatttgcaaattaattttgaatttttcatataaaaaactgatttttgcattatttaaaaaatctttttccattgccccaagcaatcctattgactgacgtttttgagttagaatttaaacataatccaatttgttaagaaagacatgagacagaattgatatataaatgaattaaaatttaaaatcattcgttcataaatatcaatttgtcagaatcaggtggcaaatcacacccaaacacagcattattaataagttccttttcaccattttcctcttcc

SEQ ID NO: 1800 - DNA, 6325 bp, Heterodera glycines
tgtttaaaatgatcaacaaaaagtgtctccattttaacgtacacctgcacttgatcttcgcgcgtgccgtgttcaacaacaggggtcagttgtctccaatctccgccaagaacaaccacttttccagcaaacggtttgtcaacggcacaaacatccctcaggagacgatcgacgtagcgaaggacttttttgctcaacatgcttatttcctaaaaattaaattgtttatttaaagcggaagtgataattacatcgatgatgattagttctacagcgcgtagttgtttcgctcttgcagattcaaacgcaattttcggcgatgaatcatcatcaatgtcattaggcacggagaactgtcgatgtaccgttccaccaccaattagcaacaacgcggcgattcctgtgcttgctgctgaaatcaccgtgccgtttagaagctgaaacaaaaacagagatgaaaatagtcgttatatcatacctttcgcccttgctcattattgttagcaatttgatcaatttctggctttccagcgaggcaccaacggatcagggaattgtatagataagttttacctatttataaataaattattagtttaaagacaaccggtataaaataccacatccgcctgcgccctcaacaaaaaaacatcgtttttcgcccttgccgttaattgagttggaaatttgatcaaatgctgcacgttgatctttggtaagccgtctaatgtgattaaccaccaatcgagctggtgtccaatgtttggaactttcagcaccaaaaaaagcggtcattaatcgcgattcactcaacacagctgattgttgtgaaaaggaatagtcattcggcaacccatgaagaccaatctcactaaattataaacaaattgaaaaacctaaaggagtattacctgcatgaggtatccatacagttgaaatagtattccaaattacgcattacttcgcccttgcgagttgcgagagatatcatttggttatcatcgtcaactccagatcggtgaggcctcatctcatcaacaaagtcttcaaagagtttttgcggatcagaaggacgggcatgaacaaccaacaaagcaaaatagtgttgcagcttgttcaaatccattttgtctgcgcatgcatctcgcatcgcccctacaaaaatgtagtcgtcttccaacagtcgcaaatggatggcagctgcagtgaatgtttttaacacttgcccattaactgtacgcaaatcaacaaagctttttggtccttgtctagacaaaaggagagctcttaaattaaaatattgtttatctaactttatttctggtatagtaacctaattgcaaataattcatgacgctttggggaaaccgtgaagacgcggaccaacatccgcgcccctgcaccctctttcagcggacgttttcgtttgatccaatcgctgtttttctggttccagcttaaatatacaaacactaagtttatgctttaattgtacttactaataaaaatagggcacacgattataagttaattcggaaacagctggttccttcgcacacaatgcaaaaaaagctgttagacgagttttgtttgcaatccttctgcgcccttgctcttcatggccttcttcaataacgattgtttgccctaattcgtcatgtattgaaagctgatagatttgatgagacatggaaacaatccgatacgaattgagccgtaaatatgcttccattgaagtcatgtaacggactttgaacgttgccgcaacctcgtcatagtcgtagacttcttcatttgtagacgcaccgcccctgcgcggctgcataacctttacgtatgctttctcaaacccttaaattcaacacacgtattgttcgaaaacccgacttttaggtataccttttagcaaatatttaaaaatatatttgcacgccttctgaccaaatacatattcgacattaatgtgacagccgtattttaaaagtaggaatggattgtagggtataacacggctatcatcaagaagtaagacgcccctgccacgtttgtttcttttctggtagaatagaccacacttctcctgaagttataatatttgaaaaaaagtataaacattattacatatagtcgtgccggaccactcatattctttccgcgccattccgatggaattcgtttataacgcacttcattacaatcacgttctgggtcgtcctccggaagaaaatgttcagcactgtttaaatcagctggttgtgcattttccgcccctgcaagcagagttgaatcagagaagtcggcaggcaaacgcacataatttgtgtaacgcacttctaaaaataaaacaaagaagagaaacaacaaaacaaactgcgctataaattacctgagagctctgtaaggtcggtatatggctttggaaaatgttttcggcatcgggttcgcccctgctcatcgacctctgtgcacgcagaattgcaatcatgcagcatcattgtagtaacataatgccatagccggcgctgctgatttgcttctattgacatgtcctccattggtggaagcggaggaattcttgcaaacacatattggtcaacactttcaggtgttaaaaccctctcccgttcttccaggataagaagcatatggatgtgtggcatgcctaaatttcaaatgctataaatattttctaaaaaattcaccacgcttttggtgttcaacgctatagcaccatcctgccacttttccaagcacattcttttcaaccaagtcgcgcacaaattcagcagccttatccataaatattctgcatacaatatccgcacgatgcgtatattgttggcgcccctgcaaggcctctttgagttccggccagcttgggtttccggtaaaggtgacaaacctaaaagcaacagagtgaccgatatttcacattatatacctaaccatgttggatttcccaaactccgaacaattgtcatcaaatcagcatatttttgttgatagtactgccttgatcccgcaaaggtctggggcatcaaatacacgcttcccaatttggcattgcgtccctgctgctggagtccttgctcaatggctttgatgtaatctcgagcaagagtttggcggtaatttttacgctgctgaattgccttgatatggtccatctcattgcgctcaattcggttgagaacagcaatgacgaagaattcggccaaacgacgggcaaaccatagccagtggaatgcccccttgctattttctcgtaacgccaaacgatagcggtaaaattgcctctcggaaatattttcctctgaaccggttttcttgataccaagttctcgcttctttgtctgcacaccaaaaacaggttcaaaaacagagtcattttgagcaaccaccaccttaatatgtactataatcaaagaacatgtaaaaaagtttgtacatcattctccacttgccgcccctgcgcactctcaggttcaggctcgttgtcaaattcggtctcgaaatcgttaatgtgttcagactcatcattaacggttgatgcattattttgacttgaatttaaatcagcacttatctaagaggcaaaggaagaattaaaaagttggattggagtaattaataaaaaaacctacattgcgcccttgcaaaaatgccttcttcatgaaccaacgccacccagcagtgccttttggatgaagcagtgggaagcaacaggggtctagctgtggcattccgcttttcaactccctcattttgcccgccttgtcactcagccagaaaccttaaaaacttaattcataaagcaatagtgcaagttttaccattaacttctggagcaaggccgtcttcttgcacccatattacggccacttgcttagctgtgggagcatctgcacgctcgataaccgtacagtcagcacggctacgaacagcatccattttcaggtcacgatcggtcaataagacgatctcaaagcattgttttcctaacacaatttacaaaagcacatagaaaaccaaaaaatattattttatgacttttcattttttctaatagcttattgtccgactgctataaaaaacattatattatttttgggtttttgctatttattataaaaatatttatttaaatagttaatgctttttattgttctaattttgaagatttaaaatattttttattaattttaataagtgtgtgatcattccaaatttctttttatatttaaataattgatcataatcattgctgtttcagctccttgagtcaccgattaatagttttaaatagggttcgagccccgcccccgcccccgcccccgggggcaggacaggttttttgggctcacccccgcccccgcccccgtgactctgacccccgcaacccccgcccccgcgaccttcacccccgcgggggcacgggggtgaaaatacacccctaagaatggcatattcgtgggaaataaggcaaaaaatttagacaattttgtaattttttaactatcgagaaatttttatgaaataaaataaattttacttgttttttattttatttgtggattggtggatagtgcttcaatactaacagtacttttgtctgagttcgattccggctaacgttttcctttaattaatttattttttctgattaatacagggtttctttatgttcttgtttctaagaaatgttctgatttgggggtaatgccttattttcatctaaaactcgcaaatttctgaaaaatttggctaatttgttaacaaattgcattcaaattcaaaaaattttcccggcggcgcctatcggcaccgccggaactctcccctcgcacattcatcaagtttttttttgaaaaatgtgccgcaagaaaaaaaattttaaaaatctgagttccaattttgagtaaatcacgataatttaatatagttaaaaaacgaaaatttatcgaaaaagtcttaatttttttggtgaatatctgttagaaataaatttaaaattcgcccctatcggcacgccccccccccaaaaaaaaattttttttttcttaaaaaaaattacccaaaaatccctaaatttttgttactttttagtcgaaatctgtgcaatttatgtcaaaagaaatagtatcgaggcgatcaacaaataaaggaatgtggagccaaagaaatcattcttaaaaaatatttttttgtgagatttttggacctaattcaaagcaaacccccgcccccgtccccgcgggggcggaattatcgtgcccccgcccccgcccccgtgactctgacccccgcatcccccgcccccgtgaaaagccacccccgccccacggggctcgaaccctaaaaaacaatcaaatcgaaaatttttttgttgtgtctatccttgcttaaaagcatccatatttttaattcttgattaaattcaaatttaaatagccctatttgttctctattatcatgcaaaaattcaaaaaaattcgttagtttttcaaaaaacaaaagttatgaccgaaaagaatttaaatgtgattttttaagttcttatagtcataacttttttgagagttaatgaaatttttgtaatcattcaggctaataaaaaaacatttagggtatattaaaaatttggttaatcttgagcaaaaataagaaaatcttaagaaattaaaaaaaaaatccttttggattaacaagacaaaatattaattttaattaatgttttagaaatttacatttcgaaaatttatttaaaaaaataataaataatttcacattcaataatttatttgactttacattagaatgttgaatctataaatttccaaatttcttaataaattaattaatataaaaaaaaagaaataaaattaatttattcattataatgagaaaaaatataaatcaattattccattcaataaattcaaggaatggcaatttttctcttaatatgtgcatataataaaattatatttctttcacattataatgtttctgtgttaaaattaggggggttttcgccagatgctaaacaaacaggaatttaccgttaattcacatttcccattttccaaattattttccatttttgatccttttaatttctgaaaaaaaaactaaatttttttaaagaattttaatatcatgtattcttccttcccgtcaaaaatacgcaaaattctgctcctataatatgtcattctattatagtcccgggggactctatttttctacccttctctgagggtgggaggatttattggagtgggatggctctaaaggagggggggggggggggggggagatctgt

SEQ ID NO: 1801 - DNA, 9576 bp, Heterodera glycines
  unsure (1)..(9576): unsure at all n locations
ctccgnctggtcaagcatagtcctcctccaacagctgcaaaacagccttctcccgtaaaaactacgcccgcgtctaagctaaagcccgcgaaaacggttccaaaaccaccaccacctcctcctaaacaaaaaacaccaccaaaaccttcaccgatacttgagtcaccgcctcggtatgaagaatcgaacagaacaattgtaaagccaccagtcatacaaccatctccacctcatcttgaagaagcgaacaaaacaattaccaaacagacgacatttgatactactgcaaaagaagtgatgccgacagagcctgttgcagctgctttaacacaactagcagatttaccagaaaacaacttcagctttcgaatcaatccgctcccagttgtgccccgctcagtatcgattcaataccttgatgatgttgaacgttttaaagtttcattcaatgatcggttgatacgtcatttgtcattctcaccgcagttgggctatgtgctcgggtttgaaaacccgcagcacgtggtgtctaatgaggtagcaaaatatccggtggatttgcgaggcggaatctcgagttttgccgtttactcaaaaggactaactgagaatatgattgttggaaattcgctgagttcactgctccgtgttgtgtcagtcagcggtgcaacacccaatgactacaatgagaaaatttacgattcgcccatttttgcgcgagtgctgccacgggagatcaacgagattgagattgagctgcgcacaatggacaagggtcgcctcgtcccattcgcctacggcacgacgctggtcgtgttattatttaagaaagtgataaatttctgaaaccactcattttttgtattcattcattcattgaacgtaaaaaataaaatggttcatattgtgtttgaccctcgcagtgccgggtacgacgagtatgtgcaatacggtagcggaatagaacacgaacatcacttcattgggtccagtccctttcaacgagggtatgggcagcggggagcaggggttggagacgtgtttcgcggtctttggcgcttttttctcccaatcctccgccgcgttggcaccacggtaggatcggaggctctgagcacgggtcagcgagtgttggagcgagtcgggaacgacggaatgccacttaaggaggcactggtaagcgaaggaaagaaaggaattgataccgtactggagaagggaggcctaccaaaacagtttggcagtggtggaagaatgggtataaaaagaagaagaaaacacgcaccaagtcaccatacaataattggccgaacaatcagtaaaccagcaagaaaacgtgttcgatccgacgcatttggactttactaaatggcattccacaaaattgacaatgacagtgtgaactccatcaccaacgccttggactttttccgcatcccgccaaccaacgtcagtgtctcatcctccaaagtgtttgaactgctcccaagtaaccctctgacggacaccccctatcacttcaagcttcactccagccaaaattatattgatctctccaaatgctatttgctatctgagtttcgaattcgtaaagaaaatgcaaatggtcaactggttgacctcgcagctgatgaggttgctccgattcaactgattggacacacattcatccgtaacatcaaaatgagcatcaatggccgtgaagtgttcaacgcaaattctctgatggcctacaaatcgtatttttcacacgaactctcctattcaacagcggccaaggactcgcatttgaatgctgccggttactaccgtgacactggtggtgtgcttgaggtgggagacggatgcactgcacgacgcaacctgtttgtaggcagcagaacagcacaattcatggccaaaattgacgccgatttgtttaaccagcctctctacttgatcaacttttgtgagctggacattgaaattttgcccaacgacaacgaatttgtcctaatcacaccacccggtgttgctgcagccactcgctaccatttcgaagttgtcggtctgaaaatgtatgtgaagaaggtgtccctgatggacggattggcgttggacattgcgcgaaaacttgagttgaaaccggcacgatatgcagtgaggaaaacgctgatgaagtcgctgttcatcagtcatgggcgttttgaatttacgtctaatttgttcatggatcaaattccccggcgcatcacaatgggattggtggccaatgctgactatgttggcaccgtttcacgcagccccttcaactttcagccatttaatgtgcgtgaaatttctataattgccaatgggcgctcctaccctcaagcagcctacgacttggactacccaaacggaaagtatgtgcgccccttcaacgacatgaacgaagcggtgggattcgccaactcatcggaaagcaacgggattacactagcacaattcggtactacgcattgcatttacgtgttcaacttgacaagcagtggagacgaccaagcgacgctttttgatctgataaggaacggaaccacagcagtgagcatcaaatttaatcaggcggtgcccgctggaggaataatgctggtggtgatgggcgagtgcgactcgctggtgatgttggataaaaatcgatcgatcagcactgacatcactatttaaggcacacttattttcattttttccataacgataaacatgtattccaaaaaagttggcgtcattttattccttcttcggatttctcttcccgtagtgtcatgccgagaggaaattcctgagtattcagaatatataagaagaaaggcaatgcttacatcgacaacaactaaaacaattccgtctacaagcacaccaacaacaaccaccacctcctctcccccaaaaaacgacaagttaattgaagagcaagtgtcagctggtctcacgccactcatccaattgtgcaaagaccgaccagaagaggaaaatttttttcagcaagtcatttgctgggcggtgtttgcattgtacttgatgcttattgtcagcctggttctccatcaactttgctctattttttggctgaagaatggacagcgtgcaaatcacatcaatcttgaacgaaaaccgggggaccgcacgagtctttcggggctgcttcgccagtgatcaattaccgcctccggtcactctacagtatcccgcagcgctaattgtgaaccgggacccacattacaagggagggtctcattggtgtgcaatttatgcgaagggaatggaagaaccagtgatttattatgacagcttagcccaaaaaataccatctgtcattgtgtcatcattcctgaataagtttccaatgggcctaagaaaaaatattcgttcctatcaatcccaattagtgtcaacgtgtgccccacattgtattgtttttgtgtatcatatgtcacaaggtcattcatttcaacaatttattgagaaaatggaaaaaaccgacaaattccgacatgtatgtaatgataatgatgaataaattggtcaagtaaaatgcttagaaaatgctaaggaaaaaatgcaaattgtcaggctgactaagctcagggagaattcggacatacccagcatactttttcaagtgtgggttgaacagccaaaaaaattcaaaaccatcacttcggacctccggaaaaaagccatgagaaagcattacgttcatcggttgttgcagaatccacggcaaatgttgtcggaagaaaattccacagcaaatgggtcgcttcatgtgccaaggagttggtgagctcattgcaaaatcgagcagaagcccaaacaaattcccaatgccaattgactaaaaattttgtgttgttattaaaaatttaaaacttttcgcttacatttgttgcttggctcatcacaaaataagtctcgaacaaattcgttcccagtcgtccgtagcacaggtagtgcaggagctcatttcggctgaggtcatgcggcagttcttcctgtagaagcagtctccccactttcttcttcttcggtgtccttttctcctcaaacatcacatcgaataatgcgataacacccttctataaataatttatgtaataaaataaaaatggtgaaaataccaaatattcaaagcacttttggcgttgactacggaaacactcgaattggtaacaaacaggaccaattggagtccgcttcacattggcaaataggcagactaatggcacaaaactgatcagctcgctgttcaattcagccggcaggcgtcgacgaagtttgggctttttctcattcattggaaggttcaaaggattagggcgtttcattttaaagaatttgaataaagaatgatttcgatttcttgctgggaatcatttggtggtgcgcaagtgggcgtggccaaagtgcacacatcgtacacccggtcattttcccgattcattttaaaaattttcatcttttttttttgcacatctgctgttttcctctccgccctcacttgtcctgtgctttatggggaccgtatcatttaattgtgattttgggaccgtataattaaattaatatttttgctgttaaccagggcggtagctataattacaaaaagctccgtttatcctggcagcaatttgccttttaaggcttgaggtcgttcgcttgacttgactaatttcccgagtcgtttaggtgccctgtcgtcttgtgcttcatgggtggcggtgtgctgctcttcaggccatagtttgtttatgttttttgaaatttttccatctccaaatgtttatttattcattcatcatttcacgccattttccatgccggcgctcgcatataaataccgagattttactcattcctcctcactccactctcagattaaaaaaatggaaccacgaaaacgatcctctaacttttccattgatcatattctctccgcgcccaaaaagccccgtcaaggcttcctgatcaatgaactcttgggtgtcgtgcacttccttggatcggtgcagcaaggcgaaggaacatcaaaagaggcaaaggactacgttaaaaaattcggagaacaacatcgagcacatggccaaattccactacgtcaaaatcaagtcaaaattcaccattaccgacttgccgagtacacctgaggcactgttggctgggattttccaacactgcatcgacgaagcaattgttgaaagccgtgagcgcaacatcgaacctacacacctcggctgtatgatcagcagtcctctgctggaaggcggcgacatcccaatcccgatacgacaaatgacaaacaacactctcgacaccattctcaaccagttcaaaaaagtggcgcagtcaaaacaacagaaaaatgtgtcattatggggggagccgtttaccgtcaccatcacgactctcgaccgtaatggactaccatccaaacgtcgtgtcaaagggggagctcgtcgccctgtcaaaacggccgttcaccaccgaattaatgaccaatgcctgattaaaattcgtaataacgacaaccacttctgccttttctacgcgctgcaggcaacaatggtcgacaaaacatgcaattggccacgatggaagtttttggactacttgcacgacagacacggacagcagggacaactccatcatgatactgttaagctcatgcagcaggtgaaagcaccaatggatttggttggctacgacgcggacacatttgtgcctcacgtcgttgactactggaacaacgcgcagcgacaacaccgctttgctgtgttcatctttggatcgttgggacagtataagccgctgtacaagtacattgacaacatctacgacactccgctgctgttgtacttcaatgaggaccatttcgatggtgtgcagaagcagggtggtctgttcggtcaaccgtactgtttggagtgtgaacggccatacgacaaaatgtcaacacacaacaaaacatgtaaagcgcgctgtgtgctgtgctcacgtgttggaccagcttttccatgtccatcatccaccggcttcatcaaaaagtgtaaagagtgcaacaaaaaattcaccaacaacggctgctaccagcaccatctgcagtcaggcttctgcaagcggtcgaaaaagtgcaaggattgcggtgctgtttgggatgttgtcaacaacactcagaagggcagaaaagggcatgtgtgtggtgaacgcttctgtaagatgtgcaacaactaccacaacacggaaagaggctgtttcatccaacccattgagcccaaggaacgcgacccctaccgcatcgtggcatttgacttggaaaccatgcagcacacgccatctgtaaagcctgagaagcgtgagcatttgccgaatttcatcgcagcacgagtcgcttgccccgactgcattgaaaatgagagctggcgagaggcatcgggagggtgcgaggtgtgcgggccaaacagaacagtcgccttttgtcaacgccgcttcactgaaacaacagtcgacaagcaagtggtggcggaaaacccattggaagcgtttgtcagctggctgataaacgacttgccgttggcctacgacacctacgccttctctcactttggcggccgctttgatatggtgctggtgttccgcgaactgttcaaacgcggatataacccggacatgttgcgcaaagtaataattgactattttccataacttgtgtataatttttctattttcagggaaataaaatgtacgaaatgcggattcgaaggcagaagaagcgcaaccctaacattgttttccgggattccttcaatttgatgccaatgtcccttgcctcgctggttccatcatttggcttggatgtggaggacaagccattctttccgcacatggccaaccacccagacaactacggaaagcagatccatccaacaccagacgactatttggtcaagggtatgatgccagataaacgacaaaaattcgacgactggtatgaacaacaccgtcaggaaccattcttcctcgacgaggcgttggcaagctactgcaccaacgacgtggagatactgatggcggcgctggtggcttttcgtcatgagtttttggatgtgacgaaacgaaatgaaggaatcgttgcggagcgtgcggccttctatgagcaccacgacggcattgatgtgttgcgggagtgcatgacgatcgccggcgcatgtatgaagcattttcgcaccaaccatctgccgaagaagcacttggctatcgtcccggaacgcggctacgacaacgcacaaaaccagtcgttgctggcacttcgcttctttcattggcatgcggaggagcatggtgttgtggtgcagacggcgcattcggctggcggagagaagaaaattggccaatattccgtggatggctgggtggaggaagaaagaagagcaattgaagtgaatggatgcgtgtggcacggctgcaatgaatgcttccccaataacaacatgatgatgccgaatggaaagacagctggggaggtgcgagagcgggatgagaagcggctggaattcatcgaaagtcaagtgtcacgagtggatgtgtactgggagtgccaaattaaaagaatgctgaaccgtgacccgtacatgcgcgaaagttttggtgattatgtggatgatggcccgttggacattcgcgaggcgttcatgggtggaagaactggaccactaaagctgtaccacaaagcgggagagggcgagaaaatctcgtactatgactttacgtccctctacccgtacgtaaagtgagttttgtttcgatcattattcacaatttataattttttatttccagcttctccaccacttacccgattgaacacccaaaagtgctcatcttgaatgaaaatgtggagtggacaagcgcacgcgacaacccctacaaattgtcgttgctcaaggtgtgggtgattccgccgcgaaagtgtgatgtaccagtgctacccgtcaaagtcaacaaacggctctgttttccgttgtgcatgcagtgttgtctagactacccgaagggaggcgttgattttgactaccattgtgaacacgacgaccaacaacgcggatgggtgacaacatgcacatcaattgaattggacgcagcacttgaagagggctaccgcgtgaccaaagtgttccgggtgctgaagtacaggcatggcgacgacaaacttttccaaccatacatcgccgagttcatgtcgcagaaaattgaagcttccggatttgacgccagcatcaagggaaatgaagagttggagcagcagttcatcacagaatgtgcggagaaattcggaatttcaatcgacaaggacaacatgaaagtgaacaagggcaagcggtcgttggcaaagctgtgtctcaacaacctgtgggggcgcttctctctgcgcaacttcggcctcgcccagaccctcatcaccgacgacccttcagtgttgactgaatacgtggaaaacagctcaatcgacatcatttccgttgatgagctagacgaaaaacatcaattgatcagctacgtccagaaaaaggagtgggtggaggagcacgagtgctccaatattggtgagattttaaaatgccgcctcctctacacggacaccgactcgctgattttcgtccacccgatcggcatgaatccattggagacaggaccaaacttggaacaattcaccgatgaataccccaagcatgaaattgtggagtattgtagtggaggagcgaagcaggttaatttaccgtttatttagtgcataataatttatactttatcatttcagtatggactcaaacttcggcgtaatgggcaggacgaatttgtgctgaagctgaggggcatcacactgaactacgacgtgatgcagaaccagtccctatgctacgacacattcaaagaagaagtgttgcggtatgctgaaaccggagagtatgagccaataaatgtgatgtaccccaactttttgagaccggacattaggggtggcggacacgtcacttcaggccccctccaaaaatgttatcgcccatatgtaggcaaagggatagtgggccctaattatgatgttctcaatttcggacacattttgtaaatttatcgtttatcattcattgtatctctcacatacacataccccatacacacatatacacaccccatacacacgtacacacgcatgtaccacctttgtttttcatgttttataccaaaaattgtgtaattttgtcattttatttgcgtttttaataaaaatacatgcataattaagcaatggaagttacaatttgtaaattattaagcatttgggaatgtcatttttaggtagaaaagtgcagaattaagcgaaagaagacacaattagtaaataattaaggagtggaagatacaattttaaaaagtgcacgaacttgtcatttttaggtagaaaagtgcataattaaggacaataacatgcatgcataattaagcaatgcaagttacaattagtaaattattaagcatttgggaatgtcatttttaggtaga

SEQ ID NO: 1802 - DNA, 1741 bp, Heterodera glycines
  unsure (1)..(1741): unsure at all n locations
ttcagtgttgactgaattcggtggaaaacagctcaaatcgacatcaatttccattgatgagctggacgaaaaacatcaattgatcagctacgtccagaagaaggagtgggtggaggagcacgagtgctccaacattggtgagattttttcaataatttttgtataattttgggatttttcagtcatctcactctggactacatcaaaggcccgccttctgctgttgaaagcgatgcagaaggtggtgagaacgcctggatgccgcctcctctacacggacaccgactcgctgatctttgtccacccgatcggcatgaatccattggagacaggaccacacttgggacaattcaccgatgaatacccaaagcatgaaattgtggagtactgtagtggcggagcgaagcaggttttcaccttttaataattcataatttatactttatcatttcagtatggactcaaactccggcgtaatgggcaggacgaatttgtactgaagctgaggggcatcagtctgaactacgacgtgatgcagaaccagtccctatgctacgacacattcaaagaagaagtgttgcgatatgcccaaaccggagagtatgagccaataaatgtgatgtaccccaactttttgagaccggacattaggggtggcggacacgtcacttcaggccccctccaaaaatgttatcgcccatatgtaggcaaagggatagtgggccctaattatgatgttctcaatttcggacacactttgtaaatttatcgttcaccattcattgtatccctctcacacacacacaccccatacacacgtacacacgcatgtaccacctttgtttttcatgttttataccaaaaattgtgtaattttgtcattttatttgcgtttttaataaaaatacatgcataattaagcaatggaagttacaatttgtaaattattaagcatttgggaatgtcatttttaggtagaaaagtgcagaattaagagaaagaagacacaatttgtaaattattaaggagtggaagatacaattttattatgtgcacgaacttgtcgtttttaggtagaaaagtgcagaattaaggacattaacatgcatgcagaattaagcaatggaagttacaatttgtaaattattaagcatttgggaacgtcgtttttaggtagaaaaatgcagaattaagagaaagaagacacaatttgtaaattattaaggagtggaagatacaattttattatgtgcacgaacttgtcgtttttaggtagaaaagtgcagaattaaggacattaacatgcatgcagaattaagcaatggaagttacaatttgtaaattattaagcatttgggaatgtcatttttaggtagaaaagtgcagaattaagagaaagaagacacaatttgtaaattattaaggagtggaagatacaattttaaaaagtgcacgaacttgtcgtttttaggtagaaaagtgcataattaaggagtgaacatgcatgcagaattaagcaatggaagttacaatttgtaaattattaagcatttgggaacgtcatttttaggtagaaaagtgcagaattaagagaaagaagacacaatttgtatataattaaggagcggaagttgcaatttgtataaacttaaaaacgaatttgtcgtttttaggtagaaaagtgcataattaaggaaaattattgtgtttaccnnataacgtangatggttggctgcattc

SEQ ID NO: 1803 - DNA, 2443 bp, Heterodera glycines
cacacacacacacacacacacacacacacacgtacccacacatgtaccccctttattttctctattttatacctcaaattatgtaattttgtcattttatttgcgtttttaataaaaattcatgcataattaagcaatggaagacacaatttgtaaattattaagcatttgggaacgtcatttttaggtagaaatatgcagaattaagagaaagaagttacactttgcatgaacttgtcgtttttgggtagaaaagtgcataattaaggacattaacatgcatgcagaattaagcaatggaagttacaatttgtaaattattaagcaattgggaacgtcatttttaggtagaaaaatgcagaattaagagaaaagttacaatttgtaaattattaaggaatagaaaatacaatttttattatttgcatgaacttgtcgtttttgggtagaaaagtgcataattaaggacattaacatgcatgcagaattaagcaatggaagttacaatttgtaaattattaagcaattgggaacgtcatttttaggtagaaaaatgcataattaagagaaagaagttacaatttgtaaataataaggagcggaagttgcaatttttataaacttaaaaaacaaattgtcgtttttaggtagaaaagtgcattattaaggtaacatacatgtgtttaccaataaacgtaagacggttgactgcattcgtagcgaccaccaccatcattgtcgtcaatttcttcgacttcctcaactcgaccaaggcgtttgacaggaatgaagtcatcttcaatttccataaacaatttgccaagccatcgctctttgttggtgtagtcctcatccacaatttcgagtagctccattgggtagtatctgtcttcgccactccagaagtatttctccacaacacatggcacgtacgggagatgcagcttgatacggtgccgagcgtagaaatgggcagcaatgttaatgttgtatggttgtcgaagtctgccgtatgctggggtcaaagccgctccatggtccgatattccgtcgacaaaaaatgttttctgcattccattccggtcctggtatgtcgtccgaacctttttccgaccagctccttcagtgccttcactcggtcctcaggatgattgagcttgtcgcggagtgatttcggggaacagccgagaatttgggcacaaaattcgatgacaaggaccattgtagcagaacaaatgagacatagctgacaaattgctggggcttttatactcccagaaaattaggccacgcccacttttgaaagctatttaagccgagattttctcacacaatcaaatcattcttgcaaaatcatcatcaacaaccatggcaaaacaatttgtacaacatgaaactgcggaggagcaacaagtgaaagctaagaagccaaacgttgatgagcgatttctttggaaaatcacgcggggccaatttgtactagcgattcggctgtgctcaggttaatcaaaaatttttgacgaccaaattaattgacagctttcagaggactggaacaatttatttcacaacaaagacaaggcacgtcggctggaagatgggcgagtggcgattggactcgagatgtgtgaaaaatgtgcccgaatcaattgctgtgtcagtgacatgattgctgatcaaaagaaaaagccaaaaaccaccaaataattcatcaaatttttcgcattatttggataattttgactaccaataaacatttttaaatttgaagtgcagaagcagatgtggggagtgggagggttcatgatcgcgcgcctcctcttccattggtcacgccattccgcataaactgctcatttcaattatattcccaaatccacaaaaatgtccccatgccgtcgttttaaatctcgcccccagaaaaaaaattccgaatataaatggcttcatattgtgaagcgtcaaaacagcagcggcaccaacaaaaccatttcaatgaaatgtgcgtggcatttcagagtatggaaatgtcggaatcggcaagacccctgcctggcggatcaataaatggaccaaagtccttcggtagaacaatttttgatatgcattttcagttcttactgtaatttttaataattttaggatgtgcatttctgaaagaagaaatcgacaaacagatgacgaatctgattttcacaatcacaaaaatcgaagagcgcttaaacggactacccgacccgcaagcggcgcacctttatggaatagtcaaggagcagctcgaaagaactattcgtcaaattgagaaggactgcttgtgaatcggtattggtgaagggaattattttggtggtgatgggattattttttaaaataaatctgggaaggcacaattaaacaatatgtttattgaatttagcaaaaaaaaaaaaatatgcatatgaaa

SEQ ID NO: 1804 - DNA, 1854 bp, Heterodera glycines
  unsure (1)..(1854): unsure at all n locations
tacgataaatttatttatttaatatcaatttcaaagaaacacttgttcaaaagcaagctaaatttttaaaaattattacttcaagaaatttcacatcgtttcgaaaattctgatgatcgcaagattgtaatttattcttcaaaaactttcaataataaaataattatatcacaaaaaagtaatttagcgatatgtttacaagtgtcacaaaaaacaggcaaattgaacaaattgaaactaacaagatgattatctaaatgattttgagtattgaaaagtaaatttaataatttatttaaaaataattttaacaaaatttaatgtatgatttatcaaaacagttagattttttgcaatgtaacacagtgactttgcaataataaataataccaatgtagttaaaatattcaaaaaattcaattttaaattaatttaaatttcaataattactattttgaaaataaaattctattctctatctaataaattgtatgaacactgaacacaataaaaatgattaatttagaataatccgacaataaaaaatcgataattttacgagttaaaaaataaattaatattatggttcactttgttacagcttttggcaataaaaggcaaaaaattgcgttatttaattaagcagaattaattttgaatttaattcattaaataaatatcattcagcattttttgaaaaggagtaaaaactaattttttttaaatttattaataggaacctttttttgaattttatttaaaattttaacgatttattattttatttaataattagaaactttaatctacagacaatgaaattatgataacaattgtaaaatgactaaagctaaattttattttaacttattcatttaactgatttacatttattgattactaattagattcatttttgtatgatcccctacatttgacttcattttaaccaatcctttatcaattcctctttctcttgtccgaaattagcaatgatgtcgcagaattggaaaaaggtgcgttttattaaaaaaataaatttacatatttataaacctgatcatctcatcgttaatattcgattttacgactgaattttaatttacattctatttgattggttttatttaaaacataaatatttttaattcataatcggtaatctgcatgtatatgttctgtctaatttctgaaattcagcattcttgatcaatgaagattcaatcttggaggcgtttttctctgaatattcattttcgtggatttaccagaaaagttcagagaattattgtttattgaaattcttcaacagtaacggtttgttcaaaataaaatgtatttagcattatgtaatattgagaaatggtatgagagaagaattatttctatttaaaatactttatattatttatacaatttttagtggcatatatatgcaattagagcttaattcattttttcaatttgtattctttatttataggtgttttttctttatttttagtttagatttttaggccaaattttttattttttacaagaactgctttagtcatgaaaatattaccatgttttaagtaggctattaattgatttataatttgtcatctttagcgtgttggatttagttttcccagttatatttttacttttttcttanatttctagttatcttgtttattattaaaacataaatttgttcaattgacccttgtttgtgatagttttgagcattttgtctaataatattcaaaattatttacaaaattcataaaaagataatacacccataagaatcgaccctaaatttgaaaaatatccatacgaatgaaaaaattacttataaataatttc

SEQ ID NO: 1805 - DNA, 1554 bp, Heterodera glycines
ttttacaaaaataaaagtcttcaacaaataaaaattttttgaaaatagtttaaaaaactcataaaatattaattttaaaaaccaaaaataaaagataattttataatggagttactttatgtgaaagatggtaagacttggattcaaggggtaaagcaaaaatacgtttaatgattcttaaatggtgtataattaataggaatgaccattttttggcgtaaacccactagttcatggtgaaatgcatttttttcaaagtttaaaaatgtgttgttaaatcttaagttctttgcaataatcctttattttttgcttatatacaagtatattattatttttgctttaaaatggatcacaataccttttggaatagaaaaaaattaattcaatatatgggaacagaagaaaaagttgtgaaatggggttcagaccatgggtttataccaaaaactgctttttgttatgggaaatggcctaaccaacatgcaaaacaagaaatggttttcgagaatgagggcaaagtagggaatttccgatgcccaaaatgtcgtaaaaagcaatcactcttaattaatacatggtttgaaaattgccacatgcccctttctaaaattatgaggtattttaaattttttttaaaaatagattttgccaattttctatttagtataatgtactcctatgcgcacgaggagtcttacgaaaaatgcacaagggaagcagttgaaaacgaaaacggcaccttgttaggatcagatactattacagcatggttattttttacgaattcatttttattaaattggaatattaggtacaaatattgtcgtgaaatgattgtcgaccattacattgttagggagggtgagcgtgatcaaattggcggcgtaaataaactagcacaattggacgagagcaaattcgggaagcgcaagtataatcggggccgttgctctcgccccactacttgctccgtcttcgaatgctcccttttgcgaagttaaaaataaggttaccattatttctaaaactaaaataatggttttcatgttaaggaatgatcgaatacggatctgaggattttggccttgtggcttgcccggaaaagattgattcgagtgcggatgttctgattccaataattcaacaacacatcgcgcttgggaccgaaattcacattgattgttggcgcgcctatgctcgactgactgagtttggctacttgaacaaagtcgtgaatcattcagatccggaaaatcgtttcgttggtatttaaataaaaatgttaaattaggatttatttttgtaaattttatctgcggatggcacacatacacaacgtatcgaggcgagttggaggcccgcgaaggactggtttcgtgagatacgactacctgggttccattttgcagaaactttggtcgagtatcaatggcgccgggagctcaaaaataataaattggatccattttcacagctccttcaatctgttcatcattattacaacaaaaatatttgaaaaattttgtatatattttttttaaattttgattt

SEQ ID NO: 1806 - DNA, 1259 bp, Heterodera glycines
aaagaccaattgctaaagaaagtatcagcgaaaaatgaaaaatcaatccaatttttttgatcagagaatggagagatcgattttgaatttgtcggggccaaagttcgccacaatttcatcaccttcaaaatacaacgaaacaaagggaaacaattgggttgcatcagatggagaaattaacaaattggtagcatctgcaaaagaaataattaactaattaatcaggtaattatttttttgcaatccaaacgacgtccattattcatggattgaagtcattttgatggaggaacaaaacggagtaaaaatggaaaaataaattaaaaaaaataaaagataaatgaatttgtaaggtgatgtcgaatgcagaacagcaataggatgaaagtgaatgttttatgacccacggataattggcgacgaatgtctgcgaattcgtaaaggttattttaatattgagaaccacttactctgacgactgttcagataaatgtgtcgtagagtaagtgactaaataaatatatggatgatcactagggctgggaatttaagtcactaaaaatcttcaaaaagtcgactaaaaaagtcataaaaaatcgccaaaaaatcacaaaaaaatcataaaaaaaacacaaaaaagtcctgaaaaatttggtgaaagttaaagaaatccaatttaataacattttgatcggattttttttattgccttttcaccgatccaaattttatttttcggaattttctttgatttttcgccattttctttgatgagtttccaattttgcctcaaaaagtcaaaaaagtcataaaaaatgttagagaacacttttgaagtcattttaaggctatttagagcagcaaaaaaaaagtcatttgacttaaattcccagccctaatgatcacaggaattaaaggcaaaaatatgtgaataaataataaaaaataaaattaaggtctagtcttttagcatagttaatgcacaatacattttcacaaatgcgtcaccgggaaaatcttggtcatttttcggaagccatcgcaccactttcggggcaccataagtgcctgatccggaacccggaccggcccggttaagaacaaaccaatgccggacggagtcatcgcattcgacagcttgacaatttagtgagttaatcttcaaattagataaaagaataagaagttatttatcggggcatttctactcataaattaataaactctttcattcccccaaaaatcttacttgttagttt

SEQ ID NO: 1807 - DNA, 1614 bp, Heterodera glycines
  unsure (1)..(1614): unsure at all n locations
aatgatcatcctataatatcgccgttaagaancataaacgtattttgcttacacctgaatccaagtctagcctgaactagtaataagcaaaatattagtaataataaaagtaatttaaattcttttaaatcaagtatttataataccaaagataaaaattttcaaattaaccataataagggctgaacatctcgcataagccgaagagaatggaaaactcattgagagaaggggaaagatgttcttgaattaaataaacgttatgcctcactgccccgccgtacatgcagtatcccccgtcatgggaagccatggcgaagttttaatcgtttaaaaaaagcatattaataattaaaaagtttcaccaaagcgattataaatatggtatcatgacaattcgtacaaaaggcaactcgtacaaattggttagcaaatcatttgaaagtctaatctataactttccataaacatactatcattcaatcattttaatttatttctaaacaactacatactattaggttaaattaattaatattttcacttataaaacgaaaaacaattaaatattaattatacccatttatttgttttaaattttttgttacatttcatttttactttaattaatttataagtcagatatgtagattcttttaactattttattatcaatttcttgtaccatggatacatactcatttttgattcgatcaacctgccatgccaatagacaccgccgagaatttataaatagattagaataaaaatattttgacagaatttgaaaattaaacttttatcatacaattgacatttttattttcaaaataccgtttttcaagtacaacattgtaaataagtgcagttaaaattacccaagcatgaaaatcaaaatttaagcacgactttgtatctatgtccgaatcatagcactgtaaaaactataagaacaaataaaacattttaaattttgtatgataataaatagcttggtataagggctttctgtctgcaaattattatgataatcaaaaaagctttttaaccgggttttctttctttaatggaaaacttaaaataaaaaattggtttcaataaataaaaaaagcttctcttttcttcgatactaagagtacaattatagtgatttaaaagtatataaatttaaattttaaaatttaaataaaatctatatccctgtctaattcttgttagagatatatgatattcaaaaaattaaactatcgttaaaagaatccaaggcattcaggaagtattgttgaccgcaatgtcgacaagtgtatcgaactgaagcatatatatttaatagcaaagcggaaacacaacatttattaataaatcaatttacatttttttgaaacaaaaaagtaatataacacccaagcaaatagataatgcataaaagcattaaaataaacactatagttaaaaaaaaattaaaccaaacaaaccactaatttaaaacgctaagctataataataaattttaaaatatactttgataataatactttctgttttaattatttagggtgggacataatttttgatacccaaattttttttattaaaatttttttttgaaattca

SEQ ID NO: 1808 - DNA, 6196 bp, Heterodera glycines
tgttaactcaccccattctgtacgcgtgctcgtaaagtgaccacaatacgtcgggtgtcccagtttattcggtgtgaaaaattaatcaagcaaagatcttcgctccaaaattctgaactggaacggtggtgtgaaagccgcgggacaattgggcggaaggtatgcggaaacatttgcagataatgtgccactgcttgccgaggaacattgaaccgtcgcggagacacaaaatggtggagaaattgaagcggcgggcggaggggccgtggaacacgcaaagcaggacggaacagacggtaactctgaagttgttgttgcacatgcggtggcagctgatcagcaacaacactgtacatagtgttgatctcggcgttgtcgattacctaaacgtatgtttaaaaagcattatcaggctttgttggagtgttaaagaatttgaatttggcgcccatcgattattgattaatgttgtgacgtgtcaatccctccccttattcattttgtttatttaagcactccttccttccccactttgttccttctccattcatttgctattttacattttatattttgtactgcatttctcctccgacataaattgtgtttattattttattgtgtgtccaaagttgagacacaacaattggcgcagtcagcagccgtgcttcacccattcgaagacacaccgaactgcaacccaacctcaacaaaaccaatagtcccaagacgggtgaggtccgctaaatttagcggttaaattcgacaaaaaccaatagaccctaggcgggtgaggttccgcaagacgcggttttcttcaatttcgacatccaatagtccctaggcgggtgaggagccactctgcgtggttaagtgcgatcgtcggacgagtcaaagccaatggacgccacccaactgcagcaagtgcttgatgcagtttttgcacgatttgccagaaatgcggcacctgcaaacgcggcctcatcttcattggcacacgcgactttggcaagttcattggacaaccggatcgccaaattccattacgacacggaatgcggcaacacatttgaccggtggtttaatcgatttggagtgcttatcgaagaggacggaaaggaacttcccgaagcgaccaaagttcggcttctccttggaaagttgggcgacgacgaatacagcaaatacagagacagcattagcccgacccaaccggaccaggttaaatggggcgaatcgctgacaaagctcaaggatttgttcgccgaaacccgctcacttttcgtccgccgcttcgaatgctttcaaattcgacaaaagccgagccaagacatcacatccttggtggcacacatcaacgccgcttgtgaaaatgccgacctcagcttgacgaaggagcaacttaagtgcatcatcctcgtgattgcacttcgcgacgagcaccacgatttgcgccaaaagtgcctaaaaatgctcgaagaagcacagaaaaacggcacgcaaatcacgctcaagcaaatcgaagaggagttaaggaccattcagctggtgaaggacagcgcactcactttggcaaatcctcctgttgcaacccatgccattcacacccggccacaacagtggagggacccgaaaggcaaaacaccgcaacaacccaagagggccaacaatgccaaggagcaacgcgcacgtccaccaaacaccaattacggcaaggcaagccgcggatcaccaactcatccgtgcggctcatgtggagaatcggatcattggcgtacggattgccgattcaaggacgccacatgccataaatgccaaggacaagggcacattgcaaaggcatgccgacgcagctccaaccaagcgaaaaatcgcagagagcgatccgtccacactgtcgttgtcaaatcccactgcatgggaattggaaccgcagcaggccgctggtggcgactcacgttcatcatcaatggaattaagattttgataaacatcgacactggtgctcaggccaccattctcacactcaaaacgtggaaaaagctgggttctccaaaactcgacaaagccgacattgaaacgcggaattgtaatgaagttccattcaacgtcgaaggaaaatttgtctgcaccgtttgccaaccaaatcaagcacacaaaaatttggcctcaaatccaattggaaaagtgcaaattcctccagcccgaattgctatttctcggccacgtcatctctgcgaaagaattggccccgaccccggacgatcagaagcaattcgccaaatgccgccaccacataacttgagcacacttcgctcattcctaggcgtattgaattattatggaagatttattaagtccatgcgcgaaatccgcgaaccactggaccaacttctccgaaaagacgtgaaatgggaatggaccgacgaacagcaaaacgccttccaaaaggccaaagaaatcatgctgtcggatctactgctcatccatttcgacccgtctcttccaatcgtcgtagctgctgacgcatcataagacggaattggcgccacaatcagccctatttttccggacaaatcagaaaaagtcattgagcacgcgtcatgcaccctcaacgacgcgcagaaaaactacagccaaatcgaaaaggaagcattggccctcgtttttgcggtccagaaattccaccgaatgttatttggtaggaaattcacgcttctcacggaccacaagccattgctggctatatttggctccaaaaagggaataccgatttatgcggcgagtcgtcttcaacgctgggcactgatcatgtccaattacgaattcgacataaagtacatcaacacgtcatcctttggacaagccgatgtactgtcacgcttaatcgccaattatccccggccggaagaagacattttgatagcaaatatctgcacagagacagattgctacatcaacaccatcctccaaactgcaactgatcaattgccgaccacgaaagcagaaatttcagaatggacaccaaaagatgaagtcctccgaaaaatttctgatcacaccaaaaacggctggcctcaaaagtgcaccgaccccgatctctcaccttattttcctaagcgaaaggaaatttaagagattgatggagttttgctctacggaaagcgagtgatcgttccgacccaacttcgtgaacgcatcatcaaggctctacacatggcacaccccggaattgtgcgcatgaaagccctcgcccgtcagcacgtgtactggcccggattggacttggaaatcgagcgtatggtcaggcaatgcgaagattgccagagcgcccaaaagagtccacccaaagcaccgctcgctccatggacgtcttgctcacgaccattccaacgcattcacattgatttcgccggtccatgttcagatggccactcctatttgattttgattgactcattttcaaaatggcctgaagtataccgaatggaccgaatttcgacaccagcaacgctccaagtcctccgatccattgtctaccgcctcggatttccagaagaaatcgtgtcagacaatggcactcaattccatgccgcagaatttaaggaattttgtgacgaatttggcatcaagcataccttcaccccgccgtatcatccgcaatcgaatggccaagctgagcgattcgtcgatgcgttcaaaagggccatgaagaaatgcgccaaagatggaaaattttcggcagaaaagaagcttctcgcctacaggacgacgccgaattcggcactcaacggactttcccccgatcaattgttcttcggtcgaagactttgcactcagttgtctctcgtccacccaaaggaagaacaagccgaagtcattgacccagccaaaatccgcaaatcgcaagctgattatgcgcgaaaaatggcccgtcaatttgatcaacaccacggagcaaaaccggtcgaatttctgccaaaagaccccgttttactgttgaacttcaaccgtggaaaacgattttggcttaatggaacgatcatcgaaagattggaaaaatccccgacgtatcgcgtccacgttccggcactcggaagagccgtccatcggcacgtaaaccaattgcgccaccgttatcctcttgaagagaacggtaacgatacggtaaggatcccacccaaggctcaagaagagcacgaccgggacccctcgcagaatcgcgagcctcctccgcaaccggcaccaattcgacggattcaggcaaagcaacgatctccgagtcctcctttggtcctgcgccgatcgcaacgccaacggaaacggccggtccgcttctcgctaaacccccgagggctcagcttaaagaagggaggtgttggagtgacaacatttgaatttggcgcgttttaatttatcgattatttgtgacgtgtccacccccactccccctcattcatttgttatttaaattctcccttcttccttcattttgttccttctcccattcatttgcaattttataattttgttctccaattgtcctccgaccaataaatttgtattttattattttattgtgtccgacattgagacacaacatgcgcaatgattggacttgcgaccaaagaaatgccattgtacggaagggttggcacttatcctaacagttacggacaccgaagcctttttttctcaaaaattataaaatattttcagatttatttcatataaatttcaattaaaatttttcttaaatttcataatcatgtcatttattcgaggtgttcaacaaaatgctgtctttacactgatcatggtaaacggtgaaatacattataaaaattaattttaattttaaaattttttagcaacttttccaaatttgactcactgtgaagaattgcgactgttgaaggccagaattgagcaattggaacaactgcaaagaatggagtcatcttcagttgcaagttcggaagtgttcgaacaaaatgggaatggtaggaaaaaacagtgatcagaaacagtgggggatacggtagcaaattacatgaggaaactgtagggaaaagcatttggggagtggggatacggtagcaaattacaagaggaaactgtagggaaaagcattttaatttttcggaagaaatttatgacacaatgcgatcggaaaatggagaacaaaatgaaggagttgctccactatcagcagctgatcagcagcaactgaaggcgcgtgaaaaacggagaagggcaattaattgttaaaataaataaaaatgaaaatcgaaattttattttatttattttaatttttttaggaatttcgtcaaaactttggcaaaatgcaaatggaattgcgggaaacaatcgaaaaacttgtggctaaagttggcgaattggagaagcaacaacagcgccaaaaggtcaattaaatgggagggaggggacaaagtccacaatattctaaaaatttaatttaatttgaaattttcaattttttcaatttaatatataaataaataagaatttttccattaaatattttaaaaaaaatgttatttcattcgacagaacaacgcgggagtgttcacaaaagtgaccgttgcaatggttggaaataattttaaattataataaattttaaattcagcagcaaaattgttgggatggcaccgcttgccccagagaattggaaatcattggtgccaaacgtttgatggtccaatacaaaggaaatcgcttaaaaggtaattgtcacaaattaacaaaaaaattattaaagaaatttaataattaaaattaaaatcactttaaatacgattattttaattgaaaggaagtcgctcaatgttcacaaaacgctgcattctgagcacaaattcgtccatttcttacgtcgaagtgaaaatcatcagtatgaaaatgtaaataaatcttagaaaaataaaaatataatttaaagtttataatttataataatttttaggtgcgcaatgattggacttgcgaccaaagaaatgccattgtacggaagggttggcacttatcctaacggttacggacaccgaagcgatggccttttttgggtcaacggttcctgccaaattggcagtcaaagtgccaaatttggcatcggagatgtcatcggcagtggcgttattttggcaacgcgccaaattttttcacgaaa

SEQ ID NO: 1809 - DNA, 4253 bp, Heterodera glycines
  unsure (1)..(4253): unsure at all n locations
acaaagcatttgatcgtgcctatcaaatccggatttgtcttgtcccttgaaatggcacgccgaccgggggatgtgcttcgatgagtttgtcgcattggctgcccgtgcggagtcaattcaaaaggcaacaaacaatgtgccaaacgaacggncgaaatattgaggaaagaacccgtccntatgcagcaaaacttttcaagatttgcgcaacaattcaaccccaacaaaagcaaaatttttcacaaagttttcaaccgcgtgaaaacactgtttgttacaattgtaatgaaccagggcacttttctcgcgaatgtcgacgaccaaagcaatattttgatggaagggctaaccaaagccatgcagtgccggccactggggccaatagttttcagatgcggccaaatggtcctgaaaagcgagcacttccacagacttcgacaaaagagtctgatcaacgtcggtcacaaaactttttgaagcaaaattgcattgttgtgcaagaagaagcaccaccggaagctttttgccgtggtgttcagctttcatcagaaatcgctgaatttttcgccaacgagttcaaagaaaggaaagacggaaacaatcagcgagaaatgagttccgacagagttggaaaaattttggtcatcaaaatcgaaacatttggtgcaaaaacggaagcgatgatcgatggtggagcgcaaatttcgttggttggcgcctcatttctgtatatgctgatcagagaaaaaggattggatttgcaaaaaacaaattttgcacgcacaaatgacagaattgccgacgtcaatgggaaggaactccgatgttttggcacactcacattgccaattctccgtaaaggctgtgaacaagtggccatacatttttacgtaaccagtgcaccgttcggattcgacatgcttttcggaacgaaggccgatcagttttggaattatggcgcttcggcaccggttacaacaccgatcacgtgaccagcgacgggaagatgacggaaaagggcctcttgatcctaagggcttgggtcatgtctcaagtgaagggaatgccaaaagaggaggctaacgagccggaaaagaaggacgaagagaggccaaaggcgggcgtgagtcaagaagaaagaggaagtgggcactttttagaatatatttctttcgtaaaagtttccataactgagcattagcggtgtcgctttggttgttgttgctggtggtgatgttgttgttgttctgctctgctggcgcgttttgttgattattaaaagaattcatttttattttgcaaaaaaattcttgtgattaaaatgaagttttgcgtcatatttcgggcttttatatagggaaaaggtacagtgctgcgcgctacgtgaaagacgaagttacggtgctcctacgcacatataaaagcggttgaaatgtgtacacaaaatctcatttgtatgaaatgcatttgcttatcgcattctcgcgcattttggactgttcccctgacgaagtgggcgcgcgaatttgtgctagtggtgcggaccgagaaaacttgttggaggaatttgcacacagtaagctcgtcactacatattccgaccgtaatggcttcacccacacactcttctttggtggactcactgaagagggcgccgactcagtgcttgcttatggcaacctaaggcgtccctacaatgtttgcgttgcggcccattattactcgcggcaccgcattatgctaaaatacccgcaattcccatgtgtaattgagaaatgttttggtcaaagggatggaccctttcacaaatattacccgcttgaactgataaaagtcgtcgatgactgttttccgcctgtgtacgcgagtttactgtctcaaaagcgtgacggagcatcatcatcatcatcatcatcatccctgtcatctctgcgaaatttaccatcactttccaacgatgacgatgatgatggtctctggtttggctcgatgtccacacaaaatagtgttgcgacaacaccgccttctccgtcttgcgcttatgtgaagggaatcatatggattgaaaaagagcaaatcaaaaatattctcagtcaagcaattaaatatggctaattgtgcatttttctacccaaaaaccttaactactgcatctaaactgacgcattttttaaattaatttttccaaaaccgctacttctcttactaaattatgcatttttctacctaaaatttgcaacttgtcacgcttcattattttaaatgttaatcttccgtttgttaattatgcatttttaaaaagtgcagcccgtataaattatgtctttataaaaccaaaatcatgtacaatagcattcatccccacaacccccttagttacaatagggcggtaacgtttcgatagccggacagaaataaccgtcccgtccttaatgttgggtctcaggaaattggggtactcaatcagaattgaaaaaatgtcatcatcatcatcatcaccatcatttgaatggcacattgaatagcgtaggacactccttttgaacgtgtcaaagtggagaagctgacaggcatcggcgctcagtgttatgccccgtactttaagcaccgttttttcctccccgctttgacggtgccgcatccgcagggcgtactgtttgcacccaccagaaacaaactccacgagttcatggtccggccattcatccgaaaggtcgcctagatggggtcccgtctccagagggcacccgtccgtctcacgatgggcgaaacacacactgtccgtgtcggtgtagatgagcacagagtttggtgcgcgaacaaccttctgcattagccgcaacaagtgtaggcgcgcgactgatgttgtccaaagagaaagcacaatgtttgagcactcgtgttcctccacccattcgtttccggccgcataggtgaccagaacgcattcgtcggtgagttggtcaatggagctgacctccaccgctgggttgtcaagcagagcgcgcagttccgcgggagagtcggtcacaatcgttttggacaacccattgcgtaaagagaaacgcccccaaagggagttgttgcacagttttgcgatggtccgcttggccttgttgtgcaccatcttttcccgctcgattcggattcagaatttttcctcacattcctctatgaattgctgctgatcttcctcggtttggccaatttcgtccgggaagccgctggcatgcgttttcatggccatgaactcggcgacatagcctcgaaaaacgcggtcgctccattgcgtgtcgtcccactcaacggagcgataataggccgtacaccggtacccgttgtgaagcgcctcctccaactcaattgacgtcacagtggacacccacccccgctcatcatcttcgcgatgcgtgcattcgtagtcctcattgaccgctccatgcgggtgctgcagagcgcacgtacggcacagcgggaaaagaagccgctgatcaaatttcactggcagaacaggcacatcaatgtgatggggcggcacaacgaacactttgagaatgcctcggaccggcacttggtcggcgcgtcgccagtcaaccgcctgctctgcttcaccaatgacgttcactcgtgttgggtgacccacggggtatgctgtcacagcattcgtgtgggggtagagcgaacgaacgtcgtaatatttcatcctccacccctccggcacctcgtagtgtagtcgttgtggacccacacgtcctccatggtagcagtccttcaaacggatagggccgctgtccttgtactgcgcaaaggtgcgcttcatttcgtcgttgtcgcgcttctccgcgttgatttcacactcccaaaatacgagcacttgttgcacctgggatgtgatgaaggacagccgtcgcgcatcgtcctcccgtatccgctgcgccgttttcccattcgccatcactgtttggggctgaaaacggtgacgcgggtggtcgtgagcgtgccagtggcagccgttgacctcaatcacggtgtcggtcgccgcgatgtatccgtccacagtgtactggccaatttttttctctccgccgggcgagtgtgccgtctgaatgctcactccgttccttttggcgtaccaatccatgaatttgagcgctacaaggctttgtgtgtttgtagtgtcgtagccgcactcgggcacaatcgcgagctgatctcgcttgaggtgatgtgtcgaaagtgcctcatgaggcact

SEQ ID NO: 1810 - DNA, 8817 bp, Heterodera glycines
cgtcgtcctcgtcatccaagcatccatgtcgctccagtggatcgctgatcgccaagactccgttcgaaaagcaaccaacgcctcaattagtatgtgcgtgtcgttggtgcagtaggccgcgagctgttcacacaggtcgaactgctgatggtggtgttccgcgtaccactggtcgaatctgcgctgtcggtcgggcgtcattccgccgtataagtagtcagcttttgacggtaagcattgtagagtgcgcccataatttgcctcaacattcgccaaatgagggaaaaattccttatcctgcacattgagtccgaacgctccgggcagagcgccgagcggcaccggcataaggttccagctgtctcttacgatgatttccgggtttttttcacccctcgcaattttcatttcgtataatttgttgctacgacggatcatttgcgggcaaaacccgttgaggaagaactgccgaaacagcatgatgttgtcaaaacgaccctgaaatgggcgaagagcattgtgggatagcgcggatcgaattcgctgagcagccattgagcaaaggccgccattggacaaggagtgatgaattgggcatcggtttgagtccgttcgtagccgctttgggagaaggtgacggtgcgctgccgaccacaaatgctgcatggcacttgtagagaatttcgccacgaattttcagttatgcacttggtgcaggcgacgtggcatgagatgaagttgacggaatgaagtcggcggtcgccgctgccctcaattcgtgtattctgtgttgtttcacagtcaaaggcgatcagtctgtactttttggggcggcgcgcctttaactgttgtatgaagcagccccgctccggcttatggtagcatttacaggtgtagcagaatttctcaccgcaaacatgtccgctgcgtccttttcgtcggttttgtctgatattccacacaattccgcactgtttgcatttgttgaattgtcgacacacattgctcgacaaatgatgattgaagcagtcttggctcatgaaatccttgccgcatgctgtacattctctgtaataattgttgtcatccgctcggcacggtcgccccactcctatgcgaccgcagtttatgcactttgcttacattgtagcgtgtgatcattggcgttatcatatgggcattcgcacgaaaaacagtagtagtcacgcccaaacaccgctttgcccaccccacatcgaattccgtcgaaatggtcgttgtgatggtagagcgggatttcaatgttgaagttgtccggcccatattgaaattttggccgataggtgcctgtagcgccaaagatgtacaccttaaatcgctgatttgcggtggcgtatttccgattccaatagtccacgacaatcggcacatagacaaccgcgtcatattctctcaaatcggtgcgaatgtttgcaccgctcatcagtccgaacacgtcttccagtcgttgcccgttctgacagttaatataatagcagaaatttcttctgggcatctctttgctgtggtattttctgcttgcctccaaagcgtaaaaaagacaatatgcatcatcgctgttgttgattctcagaagagcactctcttttacgatatgttgtactgaatacggtgtccttttcccactgccacgcacctgttgtcgttgcggtaactgtgcaacatccagcgttgtgatggtcacagtgaacggcgagccccacagagagccctcccgcgattttgactgtgccacttcaagaaagcggttcatgattgaatcggcggtgttgtcggaaatgcggcgtatgggaatccatatgctcggatttagaagatctgaagagattgtagcaaccaattgatccggtgtgatgccgttctgttgtgactcgtccaaggcagttgacatgcagtgagcgaacaatgcgcgcagcattgactcggggttggcgggcaaattttcgatgacaaaagtcgactttacgctctgcactttgaatttttggttgtattgtttgtcggcgctcagagtgcggatgcaatttttttgaaatttctgttccccgtcatcatcgtcatttctccttcttctctttgtgggcgtttcgttgccgcccaactcaccgcaataattgtggtcttccagcgacatttattattattatttttattttgataatttatttttgtgaaaaaagtgagcctttcccgcgtgagttcgctatatatatgcggcggcaccaacagcgcgcaccgtgcgccgttttgtaataaactaatcaatcatttcccttatgcgctttgccctagggagataaaaattggcaggcacacacatacggattaatcattttattcagaatgcacaatgaatacatgtcggggctttcactagcgtctaatatacgcagaaatgtgtcaaatgggtgacctaaggacatgtgataaatgaacacaatacagtgaattgcacatgtggtagtcagtggggactggtacgggtgcttatttgtaacaaaacctttttgaaatttatccagaaatgatgtttttacaatagtaggaattgtttttgtgagactatcaaagtaaatgaccgcttcctccgtcttcgaaggggcataaatcgcgcaccaatgggatccttgtttgtagtgtgggtcattgttcacaactagcgccgctgggtaccgtagcgtgtccggcgctgggagctggtcacttgggaaacagccccggaaaactcgttcggtttcccgactttgcctcaaaatagtcgaaatctgcgcgctgtccatactgagcagttacctccttcttcttctttaaccaacagatagaacaaagctgatgaaggatcaggctgacaatcaccattaaatagagcgcaaaaagagcccagcaaactgcttgctgataaaagttttcttcgccggggcgatccttgcacatttgatgaatcaatgttgggaggagtgttgcgactggcaactgctcatccgcaaccaattttgcagtttttcttgtaggagtggtggttgttgttttgctgctgctatttttgtttttgacggtggtggtgtttggtggtttaccagtcacggcgcctttccccgtgcgagttgataccacacgaggcataacagtggttgtggtaatggtggtgatggcggtggtggtgcttactgcccccttgggtttggttttgtttgcattagccgatgcacatttttcgataccaataaaaacaatcaaaaagaataaaatagcagtagcgcttttaaaatacatttttatttttggttaacagtgaatgtaacaaatgtgagagaaatacactaaatcggcgccttttatatagtggtatcggtgcttatcgatcggttcttgtccagcattaccagcgagtcgcattcgcccattacgaccagcatcagtccccccactggtaccgcacgattgaattttatgctcaccgcggttgttccgttctttatcaggtcaaagagcgcggcttggtcgtcaccgctgcttgtcaagttgaacacatagatacaatgcgttttcccaaattggggaaaggttattccgttgctttccgaagagtttgcgaacccgaccgcctcattcatatcgttgaaagcgcgcacatatttaccatgcgggtagtccaaatcgtaaggggcctgggggtaggaacggccgttggcgatgatcgcaatttcccgcacattaaacggttgaaaattgaacgggctcgcgtgattgtgcccgagtagtcggcatttgaaacaagccccattgtgatgcggcggggaatttggtccatgaacagattggcggtaaactcgaaccgaccctgactgatgaacatcgatttcatcatagttttcctcactgcataacgtgcaggctttatctcaagctttcgcgcaatgtccagcgctaatccgtccattaatgacaccttcttcacatacattttgagtcccatcacctcgaaacggtaacgaggaacaacaccgccgatggcgggtgcaattagcacaaaatcgttgtcatttggcaaaatttcgacatccaattcacaaaagttaatcaagtacagcggctgattgaataggtcggtatcaattttggcaataaattgggctgttttgctttcggcaaacaaatccctgcgttgaatgcagcccggccccgtctccagtgtctcgcccgtatcccggtaatagcctgcagcattcaagtgtgagtcctttgctgttgttgagtaggagagttcatgtgaaaaataggttttgtaggccatcagtgcatttgcgttgaacacttcacgcccgttgatgctcattttgatgtttcggatgaatgtttgcccaatcatctggattggcgcaatgttttcgtcgtcaatggtcaggtccataagttgaccattcgcattttccttccggattcggaactcagtgagcaaatagcatttggagaggtcaatgtaattctgacttgaatgaagtttgaaatggtagggggtgtcggtcagagggttgctgggaagcagttcaaacacctttgatgaagagacgctgacatttgtcggcggaatgcggaaaaagtccagcgcattggtgattgagttcacggagtcattgtcgattttatgaaatgtcatcctgatggtcgctgctaatcagtagagtccaaaggcgtccgaccgaacacgctttcttgttgtctgctttacggcgattgggggtccaccaattattgtttgatgacttggcgcacgtaatcgtcttctttttatacccttctgtccagtaccaaactgcttaggcaatcctcctttgtccagcacggtgtctattcctcgctttccctcgctgaccagagcctccttaatcggcattccctcgttcccaacgcgctccagcactcgttgcccagtgctcaacgcctctgaccctactgtggtgcccacacgacgtaaaatgggcaaaaagaagcgccaaagtcctcgaaacacgtcaccaacgcccgctccccgctgtgcgccatagcccctttgaaagggggtggagccccgaaagtagtcgaaatcgtctttttccaatccacccccgtgttgcatcatcatgtaatcgtcatactgcacaatgcttgggtcaaacacgatattaaccattttttattcaaatcaaatacaaaatgaatgacgagtgaataaatcagaaatttatcactttcttaaatatcaacacgaccatcgtcgtcccatacgcgaatggcaccagacggcctttgtccattgtgcgcagttcaatctcaatctcattgatctcccgtggcagtactcgcgcaaatattggcgagtcataaatcttctcattataatccccagggatggcaccactgatagacacaaccctgagcaacgagctcagcgtattgccgattatcatattttcggtcaatccttttgagtagaccgcaaagcttgagatgccgccccgtaaatcaaccggatactttgacagttcatttgacacaacatgctgagggttttcgaagcccagaacatagcccaactgaggcgagaaggacaagtggctgataatatcattcttgaacaccactttgaaccgttccgcatcatcaatatattggattgacaccgagttgggcacaaattgaagtgagtctatttcaactatgaagctgttttctggtaaatctagctctgatagagtcaacgcagccgagacaggttcgtcgacggtcggaagttgtttttcttttgaaggtaattcgataacagtccccgtcgtaggagaggaagtgaaagttttggtaggagcagttgttgttgttggctctggctgaggcggatgtgttgtagaagtgggaggaggaagtttaacagcaggcggcttaggcgatggtatttttggcgttggagagacctgggttgtggtttttgttgttgattgaggggtcggtgttgttgttgttgttgttgtttttgtatttttcggtatatggacggttgttattggttgtgtgggagtcggtgttgctgttgttgttgttgtttgaggggtcggggttgatgttgttgttgttggctttggctgtagaggaactgttggaggagatggcggtggcggtaacgttgtaggttttgttattgctgtttttggagggccaggtgtcgttgtcgtcgctattttttgttctgacggctgaactgcagatggttttgtcgggacaggtgttgccttttgctgttgtgctgatggctttgcgatagagttgggatccgttgttgctgttgttgttgttaccggttttacggatggaagagtcggtgttgttgttgttgttgttagcggcttaaccgccggaactggggctgtcgctataggagacgggctttttggatcaattagtgtacctttttgtgctccttcgttccgcaagtcatcatcatcatcgctcatgtgttgctcttcgccagcattcggatcgtacaacgggggagagccgagtcgctttccgtgctcatcaaacagcacgggggattggggaggagtggtgttgttcacatctcttctgcctctcttccgtggtggtggagagccaagcggctttgtccaattccgatcggcctcctcttcatgagggagcggcaacatttttgcaccgatatggttcctcagtgtagcggcaatgaagtctctcagctgctcaaccctgttatgtgatctcttgggcaccggcacccggatcactctcggtctgtcctcatccattgtgctacgctgtgtgaagtgaatgtcaatccattgtgcatccaatgtgccaatggttgaccatgagtatgggtagcttatgctatgcaacccacaaacccaagagccgttaaaatgcaacggctttgggagccggacccgaaatttattgggctgattgtccgggtaatccgtcacattgttagacaaaaacacaaagaagctgttcgatgacatttttatttcacataaaaatatgaatggaatacaatacgggcggtgggtgcttttatacaacaaattgtgactcgtgaacccattcgcgctcggagtatcctatgaacttgacaagcatctcagtggacccatccgccctctttctctttctgtacaccttttcaatacgatagcttgtctctgcatcctttcttacacacgccaactcctgctcatagaagctgcccttaaatttctctccgcgctcgtcccgtagcttgtaccgaatggggcgtaccgctttcagcacctcgtcaacctccaatatttcgtcgccataatttggcaaatagcccttctcaaactgtcccttctctctgctcatgcgcacaaaatcgtctttgcggaagcgtggcggtcgtcgtttttgtggtgcacggtgtccataatcatataatcgcttccacaccctctgagcattggaaaagcccacatcaatcggacgcattccgtgggcacgtgacggggagcggttaatcccgtccacaattttctgtgctgcatccaccagttcagcgtctccgtttccgcaaaataccggtacagacgctgtttcacattgcggatggcccgctcggcgaccgacgccttgaccgacgaatgcacgggttcatgcttctcaatttctcgctgctcaaaaaagtccttcagcaatctgttcttaaactcggttcccttatcggagaaaatgcggtggggggccatgggcatttgatcgatgagcagcttgaatgcctccagcatctcctcggctctcttatttttgagtggcacaacaaacaggcgttttgagagcacatccaccgcgacaaacagatagcggtgaccccggttgtgtcgcgatagcgcttgaaaatcggccaaatccacctggacatcggtcatgaaccctgccgctacagtgctggccccttggaaagcgcaccctacgggggcgcatcagagtgtatgtgcggtgcccctccaaataatgttgaacgtcctttttgcgtaaatgcttgatactttttcgcgcctctttccacagcgcggtaacgcccgcgaacgccgcgggcgacgatggattgttatacagcttgtcaagcgttgtgttgatcagctccatttttttgggcgaaattcctttttgatttttggtgccgtccgcgtggttttgctctgtgacggtctctttggtggagccgtccatgaatacagaattgggtcctgctgaagcctttcttccaatatggccgctcctggtggtctaatggttgggcggcccgctcttctgtctattatatatcggatggccattcgcaaattgctatgcgccaacggcttgccgtttgcggtgttaattgtatttccacgaacgcccatacgatcagcgtaatggttacatttgatgtatagccgttcaacccgctgagtcatggtcagctgatttgatggaatggcaaacagttcgcgttcttgttgtcgttgttgttgttcatcactttgtgcagatgtcgatgggcctggctcgggtgagtactgtacccttacccttctcggctgtctcactcgttttcttatctgcacctcatcatcttcatatacggggtagcgacgtttggcccccctcctaggcggaggaacaacgggcatttcttcgtcgtcaaaagcggcagcaggaagaggctgttgctgttgtggcgcttcaaggagagtgggttccctttttgggatacggtatggcatg

SEQ ID NO: 1811 - DNA, 1406 bp, Heterodera glycines
caagcgttgcgttgatcagctccattttttcggacgaaattcctttttgatttttggtgccgtacgcgtggttttgctctgtgacggtctctttggtggagccgtccatgaatacagaattgggtcctgctgaagcctttcttccaatatggccgctcctggtggtctaatggtggggcggcccgctctttccgtctattatatagcggatggccattcgcaaattggtatgcaccaacggcttgccgtttgcggtgttaattgtatttccacgaacgcccatacgatcagcgtaatggttgcatttgatgtatagccgttcaacccgctgagtcatggtcagctgatttgatggaatggcaaacagttcgcgttgttgttgtcgttgttgttgttcatcactttgtgcagatgttgaagggcctggctcgggtgagtactgtactcttactcttctcggctgcctcactcgttttcttatctgcacctcatcatcttcatatacggggtagcgacgtttggcccccctcctaggcggaggaacatagggcatttcttcgacgacaacagcggcagcaggaagaggctgttgctgttgtggcgcttcctcgacttttggttctctttttgggatacggtatggcataggtctctttgttgtcggctcatgttttattttgggcgtcgggggaggcgggttatacccggcctgccttgatgtggatggtcgtggatcgagatcaacaaactctggcactctttttgccggagtggggtgaccggttttctttgatgtcgccggcggtttgaattctggctttggcttttgttgttgttctctcttgacgttaggacgcggccggggtgtaggaggcctcggctgctcaacttttacttttgcgcgaggcagtggtggtggttgataaatcctatattttttgcgttgatcatcatcatcgtaagcctcgtcctttttcaattttcttctgatggcaatcctgcgctgagctgtgtccatttcctcaatttcttccgcattgtcgggcagcacaggcaaatcgccatagtattgcgatggtgcaggtagcgcgaatccattctctagcatatactcatcatcatcatcatcatcatcatcactttcgggcagtggcgccgcagctgcttccgcaaggaggtcccgcaccactagcggcggcggctgccgttgctgttgttgtatatcgtatcgccttttccgccattgctccatacgaccacctctccgagaagtcctgcccggtctcggggggcgttgtggacgaggtgggggacttgttggtggcgaaggacccccgggtccagccggaggactgggcggtggacgacgaggaggtcttccaggcggcggaggaggtgctggagga

SEQ ID NO: 1812 - DNA, 1031 bp, Heterodera glycines
aatagaggctttttaaataaatatatgaaaaaaccaggggaacaattccataaattcatgaaccaaataaataatttaaaattattttttagaaaaattacccttgtgttgggtactaaaatttgtattccgaaatagaggctttttaaataaatatatggaaaacccaggggaacaattccataaattcatgaaccaaataaataatttaaaattattttttagaaaaattacccttgtgttgggtactaaaatttgtattccgaaatagaggctttttaaataaatatatggaaaaaccaggggaacaattccataaattcatgaaccaaataaataatttaaaattattttttagaaaaattacccttgtgttgggtactaaaatttgtattccgaaatagaggctttttaaataaatatatggaaaaaccaggggaacaattccataaattcatgaaccaaataaataatttaaaattattttttagaaaaattacccttgtgttgggtactaaaatttgtattccgaaatagaggctttttaaataaatatatggaaaaaccaggggaacaattccataaattcatgaaccaaataaataatttaaaattattttttagaaaaattacccttgtgttgggtactaaaatttgtattccgaaatagaggctttttaaataaatatatggaaaacccagaggaacaattccataaattcatgaaccaaataaataatttaaaattattttttagaaaaattacccttgtgttgggtactaaaatttgtattccgaaatagaggctttttaaataaatatatggaaaaaccaggggaacaattccataaattcatgaaccaaataaataatttaaaattattttttagaaaaattacccttgtgttgggtactaaaatttgtattccgaaatagaggctttttaaataaatatatggaaaaaccaggagaaacaattccataaattcatgaaccaaataaataatttaaaattattttttagaaaaatt

SEQ ID NO: 1813 - DNA, 5346 bp, Heterodera glycines
ttttaaataaatatatgaaaacccaggggaacaatttccataaattcatgaccaaaataataatttaaaattattttttagaaaaattacccgttgtgttgggtactaaaatttttattcggaaatagaggctttttaaataaatatatggaaaaaccagaggaacaattccataaattcatgaaccaaataaataatttaaaattattttttagaaaaattacccttgtgttgggtactaaaatttgtattccgaaatagaggctttttaaataaatatatggaaaaaccaggggaacaattccataaattcatgaaccaaataaataatttaaaattattttttagaaaaattacccttgtgttgggtactaaaatttgtattccgaaatagaggctttttaaataaatatatggaaaaaccaggggaacaattccataaattcatgaaccaaataaataatttaaaattattttttagaaaaattacccttgtgttgggtactaaaatttgtattccgaaatagaggctttttaaataaatatatggaaaaaccaggggaacaattccataaattcatgaaccaaataaataatttaaaattattttttagaaaaattacccttgtgttgggtactaaaatttgtattccgaaatagaggctttttaaataaatatatggaaaacccagaggaacaattccataaattcatgaaccaaataaataatttaaaattattttttagaaaaattacccttgtgttgggtactaaaatttgtattccgaaatagaggctttttaaataaatatatggaaaaaccagaggaacaattccataaattcatgaaccaaataaataatttaaaattattttttagaaaaattacccttgtgttgggtactaaaatttgtattccgaaatagaggctttttaaataaatatatggaaaaaccaggggaacaattccataaattcatgaaccaaataaataatttaaaattattttttagaaaaattacccttgtgttgggtactaaaatttgtattccgaaatagaggctttttaaataaatatatggaaaaaccaggggacaattccataaattcatgaaccaaataaataatttaaaattattttttagaaaaattacccttgtgttgtgttgggtactaaaatttgtattccgaaatagaggctttttaaataaatatatggaaaacccagaggaacaattcctgtcgtggcgacaaaaaatttgcgtcgaactctgcggggtgaaggggacgggaaggggatgaaatgggcgaggcgcgcagagtagccggtcgggggaacgtagggggtcgggaccgatcggagagcgatgagtcgtgccggtgttcgtccaggcaaatagaccaagttgggcacaattttaataagagtatgtttattgtgtcgacctcaaacttgggtaattaaaccgtcccaatcgggacggtgagggaaacgaaaaatgggggacaaacatgataatgtgaacggggaaaagggggcacaaaaacggtgacagtaaataaatcacaaatggaaaatgtggcaaaatcaaaaggggtcagaacggcgaaacggcgatgggaaaaggaagggcattcgggcaacggctggtccaaaaggggccacacaatggcaaaggaaagggagggcactcgagcaggcgcggacagggagggcactcgcacagacagagagcagcgaaagccgggtgcagtgaaaggcggtgagcgggtgccgggaaacttcggagggaaccgtttgtctcgaatctgaaatttccggaaaagtccacccctttaaatacgattttttttgcatcaaagtacgctacaatttctcattttaattaaaatatgtttttgtgtgttatccgtttggatttgccattttcccattaattgtttgcttttccgttttccctttacaattccaatttctttaatatattaattattaataatttgtttacgaacaatccttaacagaattcgcaatttaatattaattaattttcgttcctttcgttcctgaggaaatgcacttttccttttcaaacaattttccgttattcatttcaaaaggttttttcatttttatgtaattatattttcgatagttttttataatattatttttccaaaataaatgtaaaaatattttttattatttatgttttatttttccccattttattttctattgttttttatttttcctcttttttattttgggttttatcttaggatttcgcgttgtcgcgacaggcgtctttgaacttcaggttgttgtcaccttttttgatcaattcgacccgaatttcatcacttgaaatgccattgataaacaaggcacaaagacacatgtcaatgctgtcgcggctccattctgccttggcgatcaaactgcgcaatagcaccgaatagtcccttatcgattgccctgtctgctgcttggctgaaaacaattcatgcctgcacgcggcaatcgattttgcttcgccaaatcgttccaccatcagttgttcaatttcggcaaggtccatggttcggacatcctcaggctgtgccattcgccgaagctcttcgtacacctgacccatttcggtgaacaggagcagacgctttgttgcgacatcggtcacgcctttaagctggatgaagaattcgaaacgttcccaccatgtcgcccagcacatctctggcaaaaacggtctggggccttttccagcctttattaccgctgccatagttggacttttcttaatttgtcccactcggatcaaattcaagatgctgatcaactgtaatccgacttggatttacagtgattcaattgttatccgtaccggattaacaatgaaaattggtgctgctcaactgctattcaacccgaattaacagtgagaataaattgttatccgtcccggattaacaatcaaaatcgatgaaggccaatgttatccaactcggattaacaatggcactcagtttccagtcttgccttccaatcaaatttttctcttgctctgttcggcctcgatcagtgattgaaattgttatccttcccggattaacaattcaattcctccaaattcggcgattcgtcgctggctgatatccgtcccggattaacaccagaaattgagagtgccaccacctgggtgaacagctattccaactcggaattagcttcctctcctttttgacggttttggaaacagctattccaactcggaattagcaatccaaattttgctgcttctcagctctttcgccgctcagcttcagttcgcttctgctctgctgactgcgccaaattttgttgtgtccgagaacaacagatatgaagaaaagacaaatatttatttggagcacaaatataataaataaatggtcaagcgaagggaagtgcaatggaaggaataaatgacagaatgaacgagggagggagggaaggcatcgcttatatgtgggaaggaatgtgcctaagggaaaggagtgaacaaagttcactccacttattgattggtctctcaacaccacattcgtccctccttcttaaagccgtgatcaggccgagggatcgaagatcttcggcttcttgcgcttccgcgttgaacgtcgaggttcagcgttggcatgctgttgtggctgctccggttgcggctcttccggcggtggttgcagctgttcatcgtccatcgcttcgatcggcacttcatcctctgagtccgaattttcctcactttctgaactcgaattgtccgaattctgatcagtcaaattctctttcaactgatcgaaatgtcttttccaaattcctctcgctgttcgaacgaggaacatggccgtgccaatttgtcgggtgatttgtccttggatccatttggatccatcgcgataatttctcgcgtacactcgttggttcacctcgaattttttccttgaattggccccgcgatcgaaattccttttcattcgttccgcatatgactcttttggcactttggccgcttcaaaatcattcgccgctgttggtttaaccaaatccaacaaggttcgaagcctgcggccgaagagaatttccgaaggtgccaattctgttgcaggatgcggtgtgacacggtatttaaggagaaattgagataacgcaatgtcctgcttcatcccctccttttggagcttgttcattccttgcttgaaagtttgaaaaaatctttcagcagctccattcgactttgaattgtatggcgcgatcgtcgtgtggacaattccccgtgatttgcaataatcaccgaattctttcgagctaaattgtccgttatcggagacaatttgcccgggaagtccatgcgctgtaaacacaattctgagcgcctcaatcgttgccagtgccgttgttttgcgcattctgaccacttctggccatttgcttttggcatcaatgatgatcaaccacattgatccccaaaacggtccgcaaaaatcaatgtgtattctttgccacggtctttccggtgattcccacgggtgcaatggcactttccgctcatccggcgcctcttcttggcaaattttgctttcaacttcattgcgaagtgaaaatggcatcggtctcggcttgcttcttccgaattcgtcctttttggttttcacggcacaaattgtcgaaattccaaaggctcggttcaaatcgattttcaatcccatgatcaaatcgcggccacatatatttttgtgcttaccacttatgacatgaatattggactcaatcgatcttcctttgtgcctcacattcagcgttgcctttcccaaaatgccaccgatggattttccgccataggccaccaatccattggatggttccagttttggcttaccgatgcttttccaatcaatctcgtcaatcaccgtgacatctgcacagctgtcaagctcaaaattcagctttccattttgaattaagagttgaataaaaccagtgtcggcagatactccgttgacttcgtgaatgacgctgactgtctttggtttttgaccagggttggcatttccatcactgcttttgcttttgcaacccacagcccaatgcccccattttccgcatttgctgcatgtcgaattctgattcgggcacacatttgcaaaatgtcccggttcaccgcacccaaagcaacatcccgtgcttttcctcggcttccttggtcctctttgctgattgccaactttcgcaactccggcattgcattttgagcaattgcttgggaatccaaatgggactgctcccacaaaacggctgattcgacg

SEQ ID NO: 1814 - DNA, 1185 bp, Heterodera glycines
cacccgaaatgaaaatgaaaaatttttcagggaaaattggcaaattttaaaaaatttgtaatcattttttttttaacaaaatgcattaaaacatcaaaaaaatttccagcggcacttatcggcacccggggcctcaatttacccttaatttttgaactttgactccaaaatcgcaaaaaaaagaagtaatttttttgcgaaaaacggcttcaaattcctgtctttgcgctcagacacttaaattttaaaaataatcctgaagaaaaacatttttagaccgaaaagcaaaaaaaaggtcttcggctcccatccgaaattttttcttgttatggacctgacccaaaaggcgcccaccttttgtttttttatcgggccataaaattcatgtacaagtgcagaaaatttattcatcaattcgaattacacatttaggccattgtctccaccagcggaggtgaaaaagaacgtaaagtgccatctttaattcggcggaagtgaattagatttgggaaattaccgattttttgacttctcgatgcatatgaatgcaagaatttacaaaatgtacaatttcattttatttataaattataaattcacagaaattacaatttacagtgaaaatgtcccgttcgaaaataaaattgaaaaatttgtcaaaaaattgaaaccgaaaatcaggagaaaacatccaaataacttgtcccaaatatttcagcaaatttccattcgtgaaaatttttttgaaatttaaaatattaaaaaatcccctaatttatccattacaaatgaatgcatttgtcaccgagaaaataatgggtggggggggggtggcagaaaatttaaacaattaaatttaagttggttaatttttaaatctattcatgaaataaaaacaataatttaaaaaaaaaagaattttttaattgatttacacaaacccatcctaagtttagactttttctttctcatttatagccaattttatggtgtttcgtaaaaaagtcttattttgaccaaaaaaagtaggtttattttttttacggcccatttaccattgtttggcattttttaccttattataatttaactatttcttcctggcattcaataaattgctacaagattgatttgcacgtttttcattatggcaaataccattaatgccattatcaattaatttat

SEQ ID NO: 1815 - DNA, 4935 bp, Heterodera glycines
tttatattgaaggtttttgtaatttaaattaaataatcaatttctgcttaaagagtacatggaaaactcagaatttgaaaaaatttttataaacaaataagcgttgaaatattttcaggtaaacttagtccacgtactgggtattatgcctataaaatttggtgcgatttttattaataatagaaaaagctaagttttcgatcgacctctgaaaatcctctatttttttaaaattggctcaaagtcactaaatttggacgattttaggacaaatcaactccaaatctaaatcctcaaaattaaaaaatggatgatttgtagcaaaaatttgtaatattatagaaaaatctaggaaatagctgtaaaaatatacattcaactgggttaattaactgccgaaaaaattatccaagttctatgccggaattttgccataaaatgaaatgcaaaatgttcgtaaaatatttttggcaataatataaagaaaagacaggcattttggcatatgataaagtgcaaaaatgttggccaaatatttttggcaataatataaacaaaagacaggcattttggcaaaacaaaaaagctaaattagggacccccattctttaggattgccaatttttgcccatcccttcctgttacacgttcaattgctgacataattatattcaaaatttcatattccttcttatttggcgcttcgtcagcataaattattttcaaatcatttattgccttttcacatttttcggtttctttccattttatttgccaattagtttggccaagtttttaaacaaacttacaccattttcggctaaaggtataatttggccaaatgaaatgcccaagcgattggccattaaaaatgcagcttctttcgtatgtttttgcaatttttcataaatttgcaaatcggtacaacctaaattagcaaattttcatttatattaagaataattggtaatattgaaggatttaaataattttttaaatttaaaaacctttaggaaagtttaattctgtttcaaaagaaaagcgaaaattatttttttgaaaaaatcagttttattgcattcgttctttcattaaaaaatgaaaagctttttaaaaattttttttttattgagaatttgtttaattaataattacctcctttaatgttattaagtgtagtgattaattgtttgaaacatttgataatgttgggtccttttgctccacaatatcatatcgttctctcaacaattttgctttatttaaaatcggctcattttttctcccataacttttagttctatcttcgaaaatttttgcgtaattctaaaaaattctttctttaaatagcccccctatttatgcttcccattttgtatgaaatggcaaaagaacacaaaaagtatatttagaaataaaatgtaaaaaatgatatcatttttaaaaatttttaaaataatatagactatttgatgacaggaagttttggcagctggaaatttggtcattttgacattaattaaaaataaaaaaaataaataacttacgatgtgatttaatccttaaattatcaaagctgcgcttaaaaattatcacttttaaatggaaatttaaatattttttaaataaatggacacctgtcaatcttattatatatttaatcaattcttggcaattaaaagtagggctaaacgtgtattagtttttgcttgggtttagagtcgaaccccccagcttataaggacaccaaaatatcgggagtccgtatattctatctaaaagtataaaattttgagttttcaacataatgaattttcaaataatacaaggatttttaatgccattgtaagtgaatgggcaattcataaatactttacattgattaaaattaattattaaattatacgttaagcattttttacaatttaaaatatttttatttttgaaacttataacatgcccaatttcgcgatgcccaaactgaaatttttcggcgaatttcgaccaaaaatgcatattcataccctttttaatgtaaacttcattaaaaaaaattatttttttaacctcatcaacattgattaaattcaatgatggcttataattgtgagttgaaaacactgcaataataagtgaaaattgctcatccaattcacagatgaattcgcgcaatattccgtcgtcggcttcattttcagccattttgtcaaagtaaatttttgccaagaatttgctggattctgttctgggcgagttgcatcaatattgttgctgaactgctcgagcagccacgtttaaatgcccagccgagtggtggtatacgtggcctgacgagccaacccagcggatagacctaagaagcgggggagggcatttgaacggcctgtgcccgaatgttggtcaacgggtcggtggatatggcgatcagtgtgggcaccgaggtgccaggcattgacaaggccctgctcgagcgtttgccggatcacttgggctgagttgacacggacaacctcactgaaagcggactaaatccatcacaaaaatgggaggaaatcaatttttatttgttatttttaattaaaaatattcaataagaaaatgaaaattggggctgactcgtagtggaagtagcagttgagtatggctttacagtactgctggatgatggtcgagctgatgccggacaaactcagctccatctccttcaagtcgtcaattgcgcaaggggcgccgccgctgctagggctgtgcgagaagtgatttttacctggaaccgagaaacgagaccgagaccgagaaatgaccccgagaaacgatacgagaaccgagaaatttaaatgaaattgattcaaaaatacttttttaaatcaaaaacacattaaaaaggggtaggtcaatcaaccagaatttttgcgaaggagtcttgagggggggggggggggggggagcagccaattttgcgatgggcttccacttcaccggcggacccgacaggcggcgccggtaaaattggattttttgtgcgatttagtaacagattttacccaaaaaggccaattttttatgaaaaaaatattaagtttttggggtccggcggtaccgatagaccggaacggaccaactccgtctaaacaaatgaatcaatatatttttttgttatagagaatgtcgaatcttctaaccatttaaagctttcgagtttgctgagttttatcaacaaagaaaacaatttttgaaatctacttaaacggagttggctagacggagttcgccccataccgcgataggcgccgcgtgagaaatattggaaaattttgatatttttcttcagacttcattgaaaaaatggcaatttttaggtcaaattttgaacggggaaaatttttttgggatttttaatgaattttgttaagaaaaccgagactctcgcacaaccctagccactgccaacgcattgtcagcggaatcgcgggcgggcgacgcgaaactgaataatttgcaaaaacatttgaaattaaaaaatataatacggtcggaggaaagagattcaaatagatgtgatagaaaactaaaagttttgaagcaagtgatgatttaattaaagaaaaaaatgtcagtaggaagacgaaaatttcagtacgatttgtgtctaattttttttcccaatttcgcattcaaattgaacatttgtcatcgttttataaacactttcttttcgcaattcctttttcatcaaattaaatttgtttaacctttatggcattatttttgttttttgaagttctttgacgtcgatggttttaggttttcccatatatcgtcaaaatttttttttacgataaattgactcatccttcaatttgtgcaacggattgtttcccatgaaaagtgcgattgttgtcgggttgttgatatcggagaaagatgattgggtgcatgcgatccaatgaattacttttttgtcgaatgatgaaagaccctcttaaaaattttaaaaaaccaatacatatgcacatttaatataacgtaccacttcctaagaccaagtgtgtttcgattgtccctttctcacctcgcttctgcttcaacaaatcttcatacttcgcctcatattcgctgtttttgtgttttgatttaaggtggtttatcgcattggaggtgttgccttgcttgcacttaatattcttactgcattcagcacattcgtactcaaattcattgttgttgctttttttataaagcccgatttgccaaatcgcacttccagagggcatgttgactattgctgtaatgttttaattatattaataaattaaaaaagaaatgaaaataaagcaaatagcactatgggtacgcgccagtgtcagacaaaattgctcataacgccaaatagcgcatttggcgtaaatttttgcgcgttaattcaaaagatatactgattactgccttttttgaagaccaattaacattaataaactttattcaattgactaaactctttatttaataatattatagaaagcggaaaagatgtgttcaacataatattcagatagtggaaatgtgaaatggtgaaaatgtttggaaaaatgaaatttgatcaaaagtttgggtatttatttccattttcttgattgttttcgacacctcgatcgtgaagggcattcagcagtgtcacgtgtttcaccaacttctcaacaaccttctctggagtgccgagatgagcataacgaccgacctggatttataattttaatgggaaaaattattcattaaaccaaattgttgcacattctgtgcatatgctccattccctgttcactgatcagtccccaccagagatgagtgcgtgcaaatggaacgacgtgagcagcgagaagatgaagcttcggccggactgggtaacgaccgccgtcatttgtccgagttgctgcc

SEQ ID NO: 1816 - DNA, 4715 bp, Heterodera glycines
aatataattgtatcaatttaagatttgatcttgttaaactatatttagctgtttgtacaattttatttttgaaagttatttttaaatatttttattatttgtcaatacaatttttttaatttaaaataaagatttcgacactgccgtatttattgaatcagagcccactttcgaggggttgaaaaatagagcaccagcagactccctctaaaaggtaaatatgaatttttaaaaaatattttaaaaacgaggaaaattcaagccgaggaaaaatccaggttgctgaaaatggcctggacctggctggatcaggaaaaatccaagcctggatccaggtattggttgaactagtaataacatttttgaataaaaatttattagaagaaaatttttttagaagccttcaaaattcttaataattaaatatttttataatttttaccaattttccataaaatgattacaagtctttcctatgcctaattttcagataggcaatctgagaatttaaaatttggattttttttgagggttggaaaaattttttgaaaataaaaattgtacagcaaaatcacaaattcaaaatacaaagttctccgcggcgcctttcgttaaaaagattttttgaaaaaaagacgccgcaaaaaacatttataaaatgaaaaaaagttagtcaatagttttttaatttttaaaattaattggttaaagaaaaaaagaatgttttaaatgtactgtgttagaatttgattattggcgttttattttgatttaattatgttgccccttcactatgggtacgcgccagtgtcagacaaaattgctcataacgccaaatagcgcatttggcgtaaatttttgcgcattaattcaaaagatatactgattactgccttttttgaagaccaattaacattaataaactttattcaattgactaaactctttatttaataatattatagaaagcggaaaagatgtgttcaacataatattcagatagtggaaatgtgaaatggtgaaaatgtttggaaaaatgaaatttgatcaaaagtttgggtatttatttccattttcttgattgttttcgacacctcgatcgtgaagggcattcagcagtgtcacgtgtttcaccaacttctcaacaaccttctctggagtgccgagatgagcataacgactgacctggatttataattttaatgggaaaaattattcattaaaccaaattgttgcacattctgtgcatatgctccattccctgttcactgatcagtccccaccagagatgagtgcgtgcaaatggaacgacgtgagcagcgagaagatgaagctttggccggactgggtaacgagcggcgtcaattgttcggagttgctgccagtggcagtagaacattttggtccagtgttcaagcgaattgaggtcctcgggatgaaggattttggccctggaaagacggtaaatgttccgcagatcattcattgcatccatcagcaagaatttcaatggtccgggtggaattggtgccgtgaatgaagcgaagttttcttggtcgaggattttgtatatgtcgccacctgtcaaaatttggcctcgataactcccaccccatccccatgattctacccgtgaattgttttgtccgagggtgccgtcgcacgccgacatcagacagtcgtttccgaacaacgtccccatttccacgagcatccgcttccgaacaaatggcgtcaataatgcgctgaccattgcctgaaaattttgaatcgtgttttaattcgctttcttcaccatgcaaaagatggaaactcggcggtacaacattcgtcaaagcaatgttgacaaggggagggccaatgtacaattttggagtgggggaggcgacgggcgagcaccgacaatgttgttcgacaattggtctcttcgagctgtgcacagtggacaagggaaggttgccgcagatccctggtgccccatcagtgccgaagtgaatttgaggtctgcacagagaagcctgaaatttaaaactaacattcctgatatttattatttctttacatttggactggaatggtccgcttcctcccggcaatttccactgaaacggtcttcagctggttcaattgcgcaaaaattgagccaaatttgttctccaaatttttccggtcatcattcccaaaataaatacccaaaatggagagatttttgggggaattcgggtgatcaacgttgccgatcaccagtcccaactttgtcgttgccgccactccatcgccccctttgtcacccgtcagcaccaacacaatttgagagacaaattgctggtggagtttcagtcggccttcatttaacattttaaaattcgattatttttctctctctcaccactgttcaccaaatcctgaagacggccctcgatcattgcacgaacgtcaacggaaacgagcgcacgcgtctcaccattgcccgtccaatggaaattgaccgcctcgcacagttccgccttcagacgcttcactgctctcgtcggtgcccaaacatcatgtccttggccggcgaaagaccgcttcaacgcttcacgggccttgaacgagatgcccgcgtccaatgtgatgagcagatcattcgccgcgctcagcctgttgtccccctgctggttgttggtcacgtcggaaagtgccttgcgctggcgacatgccgaagccgatcgctcaaggcttgttgaccggtcgcgctgggccttgagctgtttccgtagaaaggcattcgaccggcgctgtcgctgcagttcctcctcggtccaaacgtggcgccgtcgcagctcgtcaaacatgtggacttaaaaataataaaaatgaaatgaattaaaaaaaactaaatttttgtttgaatttctctcaccatcatcgagaccaaaggcaccggcgcactttgaagtcgatggtgtcgacatgaggtcacagcgtgccgtggatgttgacggcattggttgaatttgttggtcttcatcggcaggcgttgaagggatttgcacatcggtgtccaccatctccaccgacggcacgtccatttcctgcggtgtcatcggtgttggagttgatggtggtcgtccgtcgttgtcccgcgccggtgcctctgatgtcggcggctcatcttcggatggttgtggtgtttctgcatcggtgttgggctggggagcggcttaaatttgggaaaattgcatattttatgaaaaatgaatgtaaaaactcaatttcgtggcccaacgggcttctgtcgctttggccgttcgcgcgcgtctctcctcccgcttgtcctcccactttttccaacgttcctgggccccttttttgcgctgtagtttacttattaaatttcttttggccataaaatctaattaaaaaatattttttattaggaacttcttaacttttgagtttgagcacagacaataataattgagcatagaataatgcagaatttttttctctatcgatatgcaaattttggtgtaggtttaacgtatagaaaaaaagttagacggagaaaagtaaaagttgttttttacattgttaaaaataaagagatagtacgccaaagtgagagaaattataaagaaaaagagaaacgacgagatagtactaggcttttctctgcacagttgggcgtacccatagtgaaatagtgataatcttttcaaaaacctgagaatttcaaacagtatactatgccaaaaattgttattaacgggttatgtctagggctgggatttttaggtgctaaaaatcccaaaataggtgcgaaaataggtgttaaaaattggaaaaatccagtgtctttatgtacaaaaattccaaaagcgactaatttttttatcaatttcgcccacacaattgcaattggtcaagaaaataaataataaatattgtggatgaatttttggggaaattttttgtttcttaggggaatattttctgaaattttggtaaatatttaggggtatatttaaaaacaattttttgggcaggttcttagggggtgtgtttttcaattttattgcatttttgctatgaaatttctggaaaaaggccaaaatacgtgctaaaactcgaaaaatgccaaaataggtgcttgaccgaaatccagttttaggtgtttttaggtgctaaaaagtcgctctaaatcgaaaattgttcggagaaaatgctatttttgggcttctctcatcataactaagccgcaaaaaaaaagtggaaagaaagtcgaaatttaggggtctatttttcaattttttgtattttccttaagaatttttctcaaaaatgccaaaatagctgctaaaaattcgaaaaatgccaaaataggttgtaaactattttaggtgccaaaacgccaaaataggtgctaaaattcgcaaatgccaaaataggtgctaacccccgttttaggtgtttttatgtgctaaaaagtcgctctaaatcgaaaattgttaggagaaaatgctatttttgggcttctctcatcataactaagccgcaaaaaaataggtaaaaacctaaaaatcccagccctagttatgtctcttcaattcgccattcggttttatttttagatttttcataaaagtcggtcgattgtttcggttttttgattatttcggtcagtcggtttcggttaaaaaaccgaaaaaaatcgaccggtccgatctcta

SEQ ID NO: 1817 - DNA, 3145 bp, Heterodera glycines
  unsure (1)..(3145): unsure at all n locations
aaaagtcagaatttttgcatattttaatttataacttttttacatgtcggtatatctttgtgatttttgggaagctgatagagcttgttaagagctttcgattgatgccaaatttataaaatttggccagctgagaaaaagttacgatgctctaaacttggctcagactataacggccagactatagtgtcccagtccgtttttgtcactcaaatttggcaaaatgtccaaaaatatttcaaaatgtttttttgaccttttcatgacttttttcacattttcggcaaaatttgaattttagtcaagaaaattactaaaaataagtcaatcgtagacagcgagaaaaagatttacctacatcaaaagcattgaaatgcttttgattagcactgggctagcgaaatggataaaagaaagggaacgtgccgggccgaaaatagaacttttcccgagtttgggttcctcgggataattgtgattttccaattccatatttgattgtccaaatcccttaaaataattctccgctttttataatttccatatcctctctttttacttctccattatccatttaacttgatcgatttatttattttaaaaaatggaaaatggttgtgattaaatgtgagaatggaattgtgatttcaatatgaaaatcggtgaaaaataagattacgtaaatgagaaattggtgaaaatggaaatggtccgagttctaagtgttcttttagtgaaaatggccgaaagaggagaatcctgagggacggcccggggaggggagtgggaaagagaaccaaagatgaattttatccgggaatcgaaaggggggggtgggaaatggaaaaaggacggagaagttttccttctccggagccgctcgggaattttccgggggtgagtcgacntgactgaaaaggaggggatggagaaggaaagggacgggaggagagtaagtgggaatctcgggatgaatggggctctcctccgctttagctgtgttacccttggcttttaaagggaacggcgggatccgatagcgagaggcggggtataatgcgattgcctaatcgaagaagaggattattggaaaatcgcgggaaagtgaaggaaaaggaaagggaaaggaatttgtaaaaggtaagggacctaagaattagaaaatgcctgtgggttacataaagaatgagctatcttcttgaaaaatgaacgtattttttgaatattttttttcagtttttgtgacatattttttccatttttgggggtttaggacatattttggttttttggcacatatatatgtgcatatttggaattttttaggacataaaatccagctctgatatgaataacaacagtaactcatcttcgtccgttaatgcatttggagagtccgaccaaatttacgtgtacaccgtatgggtgaccatcattcagcaaattttgtcactttttggcattgccctaaacagtgcactcgtctatatcaccatcaagcacaagtcagtcactagaattgtgttagcattgttttgaaatttcgttttgaattgacgacgttatttttaattctaaactttaattaataaatcgcgctgggatttttatgtgctaaagatcctgaaatatgtaataaaataagtgctaaaaagtattaaaaaatgtgctaaaaacaaaaaaaaagccaaaatatgtacgaaaatatgtgctcaattggaaaaaccaagcctatctgtgcataaaaatcctcagaaaacctcatttatcatttcccctcaaatacatatttatatttttgcaaaatttaaatttcaataatgaaattaggaaactccaccgaagtttcggctttctgttggccatctgttctttttgtgatgcactcactgaattggccactccattggctaccggtaaaataattaaataattttatttttattattattttttaaatttttagttctcgtttttcttcgtgtgcggattcctctgttgacttgtgtttatgcccaattttttgctttcactggaagtattaattcatttataaatctgttttggataagcgttgatcgatttgtggcattggcatttcccgttttgtaattatatcaattattattaagaaaattaaatattcaggaaattaatcaaactttctttaagttttcgtaacatatcaagattttccggaaaatatgtgctaattgccaatgtcttttccttgtcaattgcattttatattatttatttgtcgtttttatttgctctacaaaatcccgaaatgtaattattaataattgattaattgactaattaataataattttaccaattgaaaggatggtctattgtgagcctggtgatatgattcaaggcgaagtatttttggttgcttctcttatcatggttatttttactttggctacaattgtcatttatattataatggggattatgttaaaaggtaattaaaattaaatgacttacggtggttgttaaaaaatgcattttgatttcccagtgatcagaagtgatcagaacaacagcaacaattcgtcccagtcccaaattgaaatcactcgtcgcattttcaaatcattggctgtgatcatggcagtgatcttttgcttttggtttttgtttgcactgatcaccaacattttggcacgaggactgatcaccattgagccatcactgcaatttcttatcattcgattagcagcgcaaatggtcacaattgctggagcgatcaatgcaccaatcctatatatttgcaggcaaatttagaattaatattaaaaaaaacttttttaataaataaaggttttttagcaaagaatatcgtgatatattgaagagtgagttcggttgggtcataaaattgtgctcaattcggattcgaatttcatttgcccatccgaaacccaatcaaaatgctgttactgttatggttgtgccaagaactgtgaaaaattcaaacgaaaatcgagtgcatatccgatgaaagaaaagaaaatgttttaatagcaaaaaattgagcgttatttttacaaaatagattaatttatgctttttttagattgatcatagaatcaaataattatggataaaaaatcttgtacgtcatttgtcactt

SEQ ID NO: 1818 - DNA, 1342 bp, Heterodera glycines
ttaaacagtatgtttattgtgaacctggtgatatgatacaaggggaagtttatttgctcgttactcttatcgtggttatttttacgttggctacaactgtaatttatattatcatggcaattatgctgaagggtaaatttaattacttaatttctaaaataaattttaaaatagtttttaattgtcacattagtaaaacaaatgaatctttgttgctcaattttcagtgatcagaagtgatcaaaacaacagcaacaattcatcccagtcccatattgaaatcactcgtcgaattttcaagtcgttggctgtgattatggcagtgaccttctgcctttggtttttgtttgcactgatcaccaacattttggcacgaggactgatcacgagtgatccgtcactgcaatttcttatcattcgattagtgatgcaattaaccacaatagctggggcgatcaacgcacctgtgctttacttttgcaggtcaataaaataaataattaaattgaattaaaaatacccaaaataataaaatgagattaaaaaataaaataattaaattgaattaaaaatattcaactataacattcattaattgcttttcgagtgaataaaaaaacttttattttttctacgaaaaattttgttgccagaaaactgaattagtaaaaaaaatgaaaatacattaatatcactaacaaatattcaatattatttcatttttagctctgaatatcatgaaataatgaaaaatgaatttccattggccaaatttttactgtgctcaaataatcataattcgccagtcgttgttgtagctgtcgggcaacaaattctcggttctcccaacatacaagcaaatgcatcataatagaagaaattttgaaaaattttaatttgtcataataaatttcacaatattttgatttttatacgcataaattataatttcattgacccaaatataaatttggttctagtcagttttatgcgtcccatgtcatcaaagaacttttcgcgaacaggggtccggcggtgccgataggcgccgccgaagaaaatttagaaaaattgagtgtgctttattaacagattttcaccaaaaaatgaccaaattttgcattttgagctaatttttatgaaaaaattcataaaatattaattttttttaaagttttccattgaatgcttttcttttttctgttgttgttcccttttgctaattgctcttattgctttcttctgactgctgaccattttctattaattaattaattaattaattacttatttgcaccttttccttaatttcctttcaacctgttcgcatcgaaaattactg

SEQ ID NO: 1819 - DNA, 1569 bp, Heterodera glycines
tcattcatttccacagaaaatcgcacttggatcaccggacgaacaaccccgcccctctcgttcgtttcgtccccactttccagcgaaccctcgtgaccatcgcttcgccttcgggtcgtcgtcgtcggcggcgacgccaacgaatcgtcggcacggcgtttcgccgggggctcacttccgaatcggtccgtttcctccttcactcgcgaatcgaatcggctcgatcgcatttcgcatcatttctttcgaatcgcgtctccagaaactaaaaattgaggaaattttggggaaacgaaaaagtgacactttttcagattaaaataaaaaatacttgaagttttaattcccttaaaaattttaatttttaaaaaaaccgaaccaaatgtagaccaattttggtttgcatttttttgttgttatcaaatggcaaaaacatgaacctttgcattttgctggcgtcgttttgttgccgattcgcttcggttgtcctgtgggccctccgctcggatttggggctgccctttttcggttgttggaaggcttcggcttccttaatttttttaaattatttcactccaaaatacatctccccactcaattttcagctttttataaacaataaccttttctgttttgtgactccgcgttcttcgagtgttttcgtcgacgcgtccgaatcgtcgctggactcgctgagctgttcatattggccaagacggtcgaggaggaagtttttgtcacgcgacagtttaagcaatttccgctgcaggttccttagctcttcttggtaatattcattctcctggattaaattgtttgttaaggcgggaggataaattctcggcccgcaattattcaaaattaccaagaaaaaataggtaaaattgttgattcattttttaaaatatctttaaaatttcaaaaaaatctcctgacgtatcggcaccgccaaaggctataaattcctacttttttgccggcgctttgtctttgaatttcaattttaaagtgattttccccttttgacccacataaacaaggtatttgaacttcttcttcaagtcccgatatttctgcttcggggaaacgttcggttgcgcttccatttcggccattatcgcagcggtaaaccgttgcgatccgatgtaaaggtgcgggtgcggaagagggggcgggtgcagggacgggtcatgcgcactttggggtggcaatgtaggcaccatttgttgctgctgctgctgttgtacaaaaattcgctgggtttggtgctgcggtggcgccggaggggccgcgtgcatatgcaccacttggctaaatggggggaaatggtccaatccggcgctaccgcagcaccaaacccagttaaaaatttttttcactttttttggactaaaatttttttgttttattttgatacagaatttgcttttttaccatattttacgcatttcacgaaatttaataattgaaaacaagaaaggacgaatcaagaaggaactcattaacactttggattttgaaatttatcaaaaaccaaagggaggacccttttgatttgcacttatttaa

SEQ ID NO: 1820 - DNA, 6579 bp, Heterodera glycines
aaatttattcatctccctttttgatagaaaaagcatcagagtgcctaaactagcatgtaaataaaatttggtgcgtttcagagcattttctgaaaaaaatatttatgaattaattatgcaaaaataaataaaaatttctaaaaatttgatcgtccataaataatttgtaattgatcaggggctcaccaaattttgcagggatacgtatcggaacactacaaatgcttactaattttcctagattttttaaacccggtgaaaattttttgcagacaccaccattttgcacttaaaaaaatttcaaaaaactttaaaaattcatagaaaatttaaattcataggtactactgctaaatcaacgcagagacgcctttccttgacctttttaggcccctgcaaaatctggtgcgcttctgatcactactcgaaaaatgagtgattgaattttcactaaaaagttaagcctaaactttttggcctgtttaaaaaggaattaaaaatttttaaaaattttattcatctcccaatttgatagaaaaagcatcagagtgcctaaactaacatgtaaataaaatttggtgcgtttcagaaccctttctgaacaaaatatttataaattaattatgcaaaaaacaaatagataatgaactctcttccttaataattttcctgcaaccaaacgtactctctctgccgcttcacgctcgagtgcaggttctgacacacattttaagggaattttggcgctagttaaaaagtgacagattttgaaaaaaatttcactttttttttgtcaaaatttttttttttgttagttttgatacagaatttgtttttttaaacagatggtactaatgacaaaaaaaaaccaacaaaaaaaagtgaaagattttgaattttatccaaaaaccaaagggggggggggggtcattaaaaagtgaaagattttgaattttatccaataaccaaaggggggacccttttgtttcgcaaaattttctttgataaaaactcgtgaatatacttttattcgccataattgtgttgttaatgcttaatgttcatcattctgtatcaaaataaacaaaaaaatttttagaccaaaaaaagtgaaaaaaattttcaaaagagtacgctttgcaactagcgcctccaatcccattgaaattgccacttttttgtacccggattgttctattcgaatcgccgtggtgggatgctgctgctgtgggtgttggctttgctgttggctgatcagtgtttgctgctgcgacgggtgatgggtcgcgtggcgttgtcccatcatcacttgttgttggtgagaaatgtgcgtgtggccatgctgcgcaagcctcggctgtccaacattgccaatctcatgctcttgaagggcttggacactcgacggttgcgattggaacaatggcccggccattgatgggtactgctgctcggttgggtgttgctgcggatgtgccggccttacgccaggctggggacggatgtgttggctttggttcgtctcctgctgcaacggatagtgctgctgtggtggctgatggtatgcgacgtgtggtcgctgttggaagtgttggctttgactcgacgtcggcggtgccgtcgctgcgggactttgcggagtgttccgaaggtgctgagacggatttgaatgttgagcctgagtcgattgttgctgcatcattatctttctcgaaagaaaatttgtaaaattagcgataaaaagtattaaatcaaaattccctttccagtaaaaaaacaaacataatgccaatttttaattaaatatttatttaaattttaaataattaaatttaaaattaaaaataattcaattcaaaatagtagggttcggaccccgcccccgtcacccccgcccccgcgactctgacccccgcaatctccgcccccgcgatcttcgcccccgcgggggcacggggctgaaaaccacccctaagaatggcatattcgtgggataaaaggcaaaaaatttatacaaatttgaatttttaaccatctttgacaaatttttatgaaataaagtaaattttgctgttaatttccaatgtatttgtggtttggtggttagtgcctcaacactaacagtatttcttgttaggagttcgacaccggttgacgttttcatttgaatttatttttatctgattaatgcagggtttctttatgttcttattgctaagaactgttctgattttagggcgtattttcatccaaaagaatgaaatttctgaaaattttggctaatttctaacaaaattcataaaaaaaatttccttagcataaatcaataaatttggtcattctttagacaaaatctgtgtaatttatgccacaaggaattgaatcgaggcgatgcatcgactaaaggaatgtggagccaacaaatcattcataaaaattaatttttttgtgagattttttggagctaattcaaatcagacccccgcccccgtccccgcgggggcggaattatcgtgtccccgccaccggccccgcgactctgacccccgatcccccgccccgcgaaaagccacccccgcccactgggtccgaaccctaattcaaaatattaaatcctgtgaaaagcgttttagctaaaccgccaattataggcaattatgatggagatctttggaaagctaacagaggataattaaaaattatgtaataatatattaggccaaaaattaatttcaaacataaaaatattcaaaattttgtaggaaatatgccgaaatcatcgtgtttatctttttttgctaataaataggacatatactgtaaaacgtcgaaggacacttttaacgagtttatttatctacatcctaattaggtaattaattaatttaatattaaaaatgcgttttctttattccatcaatgattttccgattaaattcccgaaaggcgagatcgcaatttcgcttccatattcgttttgatttcatcgtaaaagcagcgcttcattttctcgaaatggtcgtagcatggcaaatacgaatagtccaatttggtcactttgcccgctcgctaatttttgacgagtaaaaccaaaatttttaaaatttaatcagccgaaccaactgacctggtcacaaaatgttaggcctaaaatgatgaattgccgttagaatggctttttaaaatgctttcattcgccttacatttgtcacccgccgaagtctttccaatgcccacttttgtgcagcattccgaatggtctctgccctgggccgcacaatattgaaggtcagccttaattggccataaatcggtcttttgattgaaaccctttggcatttgccaattaccgccgcgtcaattgggcacgggtcgtttttgaagaacattagctgaagctaaacaaacaaaagggtgtacggaagctcatttttgtgccatttacaagaggcacattacgcaatataattatccccaaatgccaaccacatctttggtaattatccccaaatgccaaccacatctttggtaattatccccaaatgccaaccacatctttggtaattatccccaaatgccaaccacatctttggtgtaagtgttgaaatgacacttccaaaggcacgagtccggaagttgtctatctgacaaatcaaacaactgctttggtttgatcaatgcttcttttggcactttccctccttaccttcgcagcactgtctgaacaaataattcggattctgaatggcattttggtctctgagtttgctaagcgccgtttgtcaatgtttctcttttaccgtcagtttcaagaacattccctggtcaatggtgcccggtggtcgattgccctcgtcgtcaattgggcgcgatttcctgcgctcgaacccataaatgtttctcagcggctttttcgtttggttggccaaaaagtcgtccaccggcacaatgagcccgtcctgtgccatcgccggaggggaaatgtttgtgccaatgccaatggatatgcttcttccatccctctcactcacctttctggtcagtgctgagcgtgctttgtttcgagcgcacccgtaatgacctgagcaatcgttggttcattcattgaacgattcgaacattcattggacggtaccgcacgtgtagccgggctgacaactcgcgggattacacgccaccggcgccggctgacacgccgggccacagcatccaccgccaccgcaaatgccattggaggcgcactgagagggacaaacattggcaagggaataggcgctgatcaaagcgaccaaaacaaagtctgatcactctgatcagcgagcagtggggacaaaccgcctcagagaacggaggaataaacaaaatgcaaaaaaggacgaaacgaatgggcaatttgaatgccgaagaggaaagcattttttgattaaaaatcaaagagaggaagaagcaaatggaaaaggaagagaagagggaaaaatttatatggacggggataaaagagagggagcaaaaggaacaacacaaaagcacaacaggcttaagggtaattattcatcggagcattgttaaaagatggttggtggcactcaaatgggaaaaagccgaaggaaaagccgaaggtggacagagggagagggggggggaatgagtgtgggaagaggcaaaaagtaattgcactttgggagggggaggagtgatcagtgatctgagaaattgcaaataattagcaaaaaattggggagagaagaacgacggcgtttgatgagctgatcgaatggagaggacggcaaaaaaaagtgattgatggcaatgccaagaatttaatggcaaagggaagaaaaataaacgaatttaaaattaatttattcacgaatatcattgacataatcaaatgtacataaaaagagaggtggaagttgtgaaatggcaacaaaaatagacaaaaataaaaaaggtaaccaaataaatcacattaatgtaataaatttcccatttgttaattgactttcgtttaaaaaacgaaacccgatgagcattttggacggaaaaattgcacaaaaaaaacacagaaaacagaaagaaaggtccgatcagcgactgatcagaagttgccggtcagcaccatgccgtgtgttcgcatattttggtctgaaattgccaatgttccttttgttacgtccgcttttcctctgcttacctccatcggataactccgatcaaaaaagtgtccgtttacataagcggtgggccaaattcgaacgccggccctgggaaaagcagcggtttttgtgggagttcgattcgttcttttttgcctgtgcgtgttcagcatgctgacgtaattgagcacctccccggtttgcgtttccgcgcattgctttagtcggaattgcgtgcggggcgaaagccgcgacagacaccgccggtaggcttcgtccaaattcttcagtccctacaattttaataattgccatttatttgatgccactttccccccttaatcaatgctcacttgaatgcacgtcaccaagccaatatgccgtcgtgggaaatactgtgaaaagggggggggggataattacagaaaatatgggggaacagcagaggctgcataatgtggctaatggaacaaacagtggcacttttgtgttttaatgccatgaattgttgccaaaaccccttttcaccgatatggcacagttctgcagtcggttcaggtcgcattcggtgggcccgtgcatacatttgcaaatgatccgccggtcgcgcgtgaattcgcagttgcctttgccgaagggaatcacctgaaaggaattcgatcattcacacttttggccacacggagtttctgaaggacctgcagattcataatgccggggaatcgggaatggaattgccaaatctgttctcgaagcagtcgcgtgcagaaggggcattgggactcggtgaacagctgagaaaagaaaagtgacggaatgccaaattcggaatgattcaaagtgaacgacgacaatttgaatgtgtgccaaaagtttttctgatttcttaccgttacgttgacacgttgtgtactaattggaggaaatgcgcaaatgaagagaagcaatgaacaaaggcaaaggccaaagggacgcgaaagtgaagaattggccatttggcattggcaaattcagcggttttgagaaaaaacgaaaggggagagagtgccaaagacaaatgctaaagcaaaggaaaagcataggaaatgctatcgaagagtgacatccccgggcattatggccaagtaaaacacttataataatgcctatttaaaattgcaattacaaagtgagtcattgcccccccccttggcacttaattcggccgattgataaccgtccattccgctcccctaaattcgtgatttttgcaaataatcgagaggtcaaacaaaacgggggctgagcgtgggctgtggtcatttatttattccttcagtttgggaggggcggcgagcaaagcgaagcgaaggagcaaagaatcaaattcaaaagagacaccacagcagtaataaccgcacctcacaacaaacactacgca

SEQ ID NO: 1821 - DNA, 320 bp, Heterodera glycines
ggaggtgaagcaattttggaaggacaacagcagaaatgggaaggaaggaatgacccagggggtgaagcaatggggaaggacaacaggaaggaagggatggcccagggaagagggggggggggggtcacaacagaacttatcgttagcccaacggacaaatgttgaacagaccacgcttttccatttgaataaatattggacatgacaaataaatggtcggctttatgtttaattaagttgagcaaagaaatgtgtagctgttttgtttttgccaatgagaacgtgtcgtgtacacatattattattattcattgctttgt

SEQ ID NO: 1822 - DNA, 3126 bp, Heterodera glycines
ggacaaaagcacaataaaataaaacaatcgaaaacctgtattagtacacagaaagctaatatacaaattcatacaaaggcatgtaattcataaggagcatataaatccatcaattatttttctgcatatggaatttcaggccaatagcccccgcccgtcgggcgccaacttttttttttttgctcattatgcaatctttgattgggatttcatgaaattatcagtgatgcttaatttttttatcgctcagttggccagcacataaaaagagagaaaccccatttgaagtaacaagacacggagtccagttaaaattggactttttgtccagaatcctgttcgggttcgactcggaaaaccggtaaaagattagcaggcaaataacctatggttttatcaatcaaaaataacatatgactttacaatcatggggtacaatttgtacatttgaaatcgaaataaataggaataacagtattatttggacattatcaacaaatcagaccagcttgtacattacattggtcgggataataactcgaaacataacacatttatgggacattatcatcatagaatctgatcagaggacacaggatctactagacgaatcgtcgtcatctttgggtttcttgttgctggccttctcctcccaaagttcgatgtgttctcgcagctgctttttcaagttctcagattcattgcatgcgccaccatgttgatcagaatttgcgtcctcaagaacctgaaaaggttcaattgaattccaataaaaattgttaatccctagcctttttggcgaaatcgattgcggtttcttccatgtccaaattgtcgtagtagaagatgcagaagttcagtccgagcccaagccgtgtagcatttgctggccgtagtttgtccttggctatgtcgaacgcctcttggtatgcttggcgagacttgtcaacaacacctccgattgcctccgccgccatgtaacggtagacgtcagccttcatctttaggtagaacaccttcacttcggggtcgtcggccctcgagatcaacttgtccaataactccttaaaattgaattttaaaactaataaattggtccatcctctcaccacgagctcgttgcatgtgtcgtgcaactccttgaccaacttttcgcgatatcgcttgagcatttgcagctgcttttccgtcccatcctgcgtccattcgatcggagagatctcccgtaaggcgaagcgaagcggacggatgacagctttgtacgcaatcgacagcatgttccgctcctcttcgttcaagacgttgtccaactcaaccacctgaaatgggaaaggaaaagggatataatttgttattcattaagctatacaatgatcaaaaccaccttcttcatcaactgtcccatgtcgtagtaacgaacggcttgatccgctagtttggcacgatacaagattaattccctgttgctctccattattgataagctgaaacggaaattttacaactggaaataaatttttgagaaaacaacaaaaagttataatatgtggaacaaattttttttttttttttttttttattcagaagaaataaaatatccaacgaaggggtgaccacttacacgttagattttagtaaattaatatcaagtccaaggagctcttttacagactgaatttttgtttaactcaatccatttatttatacgttttttgaaactgtcaacagatggagcatctgttatatctttgttgagtttagaccatattaaggccgttctgttgataaaagaatttgaagttttactggattgtgattttaacacaactttacgtctaagattataagggatgtgaccagaaaattgtgggaatatgtcttttttaagatgagtgagaccattaataattttgaatgcctgaactaaatcaattgtttttctcctttcttctaaagtttgaataaatcaagtctttgtttgtaaggtatgtaaggaagtctgcatttaaataatgcaatttttgtaaaatatttttggcatctttctaatttatttatatcttttttgtatgtcggattccaaatttcaggcgcatattctaaaagaggacgaatatatgtcttataaactttggtccaaattagagtgccacgggaccgggaatttttgccaaaacgggaccgggacttgtcgggacctgagaagccgggaccgggacctcgattttttttcgggaccgggaccgcaagaaaaaccgggaaccgggaccaaccgggaaattttaaaaattcaaaaaaattttaaaaatttaaaaaaaattcaaattttaatttatatcaagtgaaaataatacaaaattatttggtttttttatttaataaataaattaatgaaaattttcaaacaaattttcttcaattatttcaaacaattaatcatttttggactaaatcatcgaatattaatagaaattcagatttgattttcacatcactttttttcggagcgctttttcaaaaaacttttgggaaagaaggggtccggcggtgccgataggcgccgccgggggaaattttaaaaatttgggtgcaatttgttaacagatttttaacaaaaaaaggttggtttttgcgattattaagctcaattggtaggattttcatttaaaaaatgataaaatatgtatcaattaaaaaaaaaactatgaggaatcatattttctttataggaaacccacgagtatacaaaaaaaaaaaatttgaaaataatctaatttctgtagagggattgaaccaggggaaagaagaagggaaagtcaaggagactagccattaggccatttgcacacttgagcagtgttacttttaaagaatatattaattattattttttatttttccctttgactccgattttcttcactaatttttcactcagacccccattcttaccagtgcttgtttttcccggttcccggttgccctaccgggacctggaccgggacctgagcttttcaaaacccgggaccgggaaccgggaccgggacctcggatgaccgggaattcccggcccggtcccggtcccgaggcactctagaaaaacagattcatatttttttaacttaa

SEQ ID NO: 1823 - DNA, 1427 bp, Heterodera glycines
attgacggcgcacgaacagaaaaatgaatttggtaactgacggaagaaatggcattggcacgaagaaaatgctaaacaattcgataggaacaaatatcagtgatttgttgaaaatgtggggccacacctccttgaaattgttgacccaatctaagtccgtttgtttgttgtaatctacgcaacgcaatcgcttgggtcgaattatggccacaccagggatggcactgaattccgatttctgaaattttttataaaattcggaatttttcaaaaattttcgatttataacttttttggggtcgggtttcagaaaataactcagaatgccatccacagaccgggtacacccctaaaacgtcgccgtctcgtataaaaactaattttctgaatttccagaaaaataaaaaaacgacttttttacatttccttgaattttcttaataatttttttcgaatttatctattttttttgatttaggctaggtaactaaattttaaataattttttaaattaaaataaaaatttgcggctacgttttgtccccccccccccccggaccacacctccttgaaattgttgatccaatcagtgttcgtttgttctttaatgtcttcgcaatgcaatcgcttgggttggccatcttttctcggagagtgcaaccatttggacagaattttgccagcagaaattgttgaatttggcccatcaaaatcatcaccaaacgcagcgggcgacaaatcaccggaatagattgaaatcaattggttgagatcagtgagaattgttggcgaaatgagactacgcaaattgtccaaatgatcaccatggggaaagcccaaatggcgaatgtttgccgaaaaaattggccaaatttcacgaccaaaaatgtccaaaatcggctggccattcgtagagtgtgatgatggaatccacaaatataaattggtgcctcttttgtcgaaaatttggtgatttgaacgaagaaaagcgatgacggagtgatcgatgtaactggaaatgaaataaatgcttttattgccatagctctgattttcaattaccatatcttaagaactgaaaaaagttttgttaggtaaataaatgacgaatttgtgcttaccgtcggttcattttttggcaattagcaaaatttgctgttgaatttcgaatgatgtcacacaaatagcagaaaaataattgcgttggataaagcctggatttttagggttttcctattttttacggataatacttgatgagaaaaacacgagaatcgcattttattaaaacaattttgaaccagttcagcttcaactgttgccaatgggctcgaggggttggacaagtgccaataggaggcgaaaaatcattgccaaaaacggaaggcgcggaaacattttgacataaaatgacgacggatcggaag

SEQ ID NO: 1824 - DNA, 3279 bp, Heterodera glycines
atcggaagaaaaagggaacgcacataagaggaccaccaaatagaaattgaccaaaatggaaaaacataactcgtactgtctttcgacaaaaaaatgccatagttttgccctaatggacttatttaaatattcttggtataactcgatagccctaaagattctctgtatacaggcaaaatttcaaaaaatttgatgaagattgaaaaaaagtcatgtacgaatttttttttacgatttttggtcataacttttttgaaaagcaataaaatggcggtgccgataggcgccgccgggaaaaatttttgaaaactgatggatccgttaatagattttgtccaaaaaattataggtttttgcaatttttagagaattttttttaataaaatttacgaatttttgggccctgcgatgccgataggcagcgccaggcgaattttaaaattaaaaaaaataaattaaaaaagaaaccgtcaacctgaatcgaactcacgacagtaagtaatgtcaaggttgattcactaaccactacaccacactacacatcaatgaccaataataaaattaactttaattcataaaaaattttttttaaaaagattcgatcgcttgctggcggcggctagcaggggaagggtactgtagcttgggatgggtttttgtaacaataatatactgtagctagttggcatacagtaagcggtgggccttttggaaaaagttgctactggatgtgcgccagtgggaatccatcagtaaaacaatccgtcggttatggacaatctgtcagtggacaatccgtcaacaaattttttttttaattctctgacgaaatgtcctttgacggaacgtcagtctactgacgaattgttcttcactgatgaattgtccgtcactaatagaattgtcttccgaaagattatccactgacggattgtccggaatccggataccgtcaatggtgggaccgcattccgggagtttttgcgacggaattacacattccggcatttatggcttgccgaacacctccatggcatacacatttaaaaatggcattttaaggcgaaatcaaaacattcaactggctccactgctggtggtggactatcagtgccggcgccaaacaatcggaagaaaacgccaaatcaacaacaacagcaaaaaggaaacagcgaagggggaggagaaggaagagaaaatggggggaaaagagaggaaaagggaggagaaaaaggagcagcagcggaagcagaggaaaaggaaaagaaaattgcagctgaacaccatcagaaacaacaacaacaaaagcaagaagttcaagcagtacagcagcaacaacaaaagcaaattttggtgtgaatggagatgaagatggataacagcaaaaatggagaaacaagggaagaggtggaaaaggaaggaaatagcactggggaaggaggagagacggaagagaaagagaggaaaaggaaaaattcggcggaaggaagaggaggaggagagaatgaagcagaaaagaagagagaggaacagcagcaaattgacactttttaaaattttgcctgctaattgctaatggacgtcgtaaatcccgcgtcaaaatcccgaaaattaatgtcacaattttcaagcagagagaaattcatacactcgatagatagcaagccatttttatgcatccgattgatttaccaattgagaggtttttgatcataaatgcatttgatcactgatttaattatgatcagtcggtcattcttctcaattaattcaattcttcttctgcggctgatcattgtttttttgttgttttgtccgtcactcatttcgcccttttgtgatgctttgtcccgtttcttctgctggtggcggagacaatggccttaattaagcgcaattcgaattatttaaacaaaattaaatgtcttttctaattgctcacccaatgctattagtgccaccaagcaaaatgatcacattgtcccaattattgtcccaatttccgtctttccaatgaaccgccgccgtctccccaaatttgcatcgtttcattatccaattgttgttccattcatttttcactttggccaatgtcagcttttcctttgtccattcgtttaccaattcaaatggcaccatttgcattggcgacacaagaacagaaaaatgaatttggtaactgacggaagaaatggcattggcacgaagaaaatgctaaacaatttgatttgaaaacaacaatcagtgatttgtcgaaattatggccacaccagggatggcactgaattccgatttccgaaatttttgataaaattcggaatttttcagaaattttcgatttataacttttttggggtagggtttcagaaaataactcagaatgccatccacagaccgggtacacccctaaaacgtcgccgtctcgtataaaaactaattttctgaatttccagaaaaataaaaaaacgacttttttacatttccttgaattttcttaataatttttttcgaatttatctatttttttttgatttaggctaggtaactaaattttaaataatttttttaattaaaataaaaatttgcggctacgttttgtccccccccccccccggaccacacctccttgaaattgttgatccaatcagtgttcgcttgtgcgttgtaatcttcgcaacacaatcgcttgggttggccatcttttctcggagagtgcaaccatttggacaatgcttggccagcagaaattgttgaatttggcccatcaaaaccatcaccaaacgcagagggcaaccgaccaaaggaatagattgaattcaattggtcgagatcggtgagaattgtcggcgaaatttgacgaagcaaattgtccaaatgatcacgatgggaaaagcacaaatggcgaatatttgccgaaaaaattggccaaatttcacgaccaaaaatgtccaaaatcggctggccattcgtagagtgtgatgatggaatccacaaatataaattggtgcctcttttgtcgaaaatttggtgattggaacgaagaaaagcgatgacggagtgatcgatgtacctaaaaatgggataaatgcttttattgccataaatctctgattccgaattactcaatccgaagccatttaaaacggattttgctgggcagcggacggtccggcaacggaaatggcacaaatttgtcatccatccacacagacagcttcggttctggtcctttgtccttgcgacgaatttcgatcgttctccaaattgtcaattcgcttt

SEQ ID NO: 1825 - DNA, 2177 bp, Heterodera glycines
  unsure (1)..(2177): unsure at all n locations
gatcgttctccnaaattgtcaattcgcttttgccattgaaatgtttgtccaccaancgcanttgaaacgtggcgaaagcaatgccaatttgaggccgagttgaggacggtcaaaagaggggaaaatgtccatccaaacgtcgttgcaaatccaactgaaatgggaaaacagtttagtcaaataaacgacgaatttgtgacttttaatttaattaccgtcggttcatttttggcagaaataagcacaatttggacgagttccgaatgatgtcacacaaataacagaagaattaattgcgttggaaactttatttttatataattagaaaagcggaaaaccaaaaattctaacgaaaatcacattttatccaaacaacttttgaattttgtttgccttaaattgttgcaaatgggcccgaggggttggacaatatgccaatgggagatgaaaaatcattgacaaaaagcgagcagaaaaagggaatggcagtgctttggaatggaaggaacgcacgcaacagaggagaatatattttgcaaaatgatgacatttgccgggcgttttagcccctacccccaaatcaatcaataaaaaatcaatttgacggattatttttatccaactttcatttgcaaatgttagacgcgcatttgttttttgaaatttgaaaactgaccaacgtaataataaatagggcttacatttttagatttttacctatttacgagaatttttgattttaaaaattatttttctcaatttgtcttaattagggaacggatttttaagcgcgaaaaagtccaaaataagtgcttaaataagggcgaaaaaagcgcgaaataagtgcgaaaataagcatgaaaaaattccaaatgtagaggtgaaatttgttaaaattgctgttttctctatgtaaattagttaaaattaagtcaaacaattttatttactgattgcagttagaaatgaagtacatttagaaattttcaggatttaagggtcgattctcaggggcgtatttttccgaaattttttgggtcgattcttaggagtgtattttttgaaaatttttaggtcaattctcaggggtgtatttttccgaaatttttttggccgattcttaggggtgtattttttgaaaatttttaggtcaattctcaggggtgtatttttccgaaatttttttggccgattcttaggggtgtatttatcatttttattgcatttttgctaataaatttccgaaaaatcgcgaaataagaacgaaaataagcataaaacgctaaaataagtacaaaaacttattttaagggcgaacctctaaaataagcatttttaagcacgaaacgccaaaataagcatttctaagttcgaataagtgcgttaaaacacaaaattttcgaacaaaaaatgtgtttttcgtgcatttctcgtcgagttaaagccgcagaaaaaataagcaaaaacttagaaatccgttccctagtcttaatatttgttgactttttaataaaatttttgtcattttacacccctaagttcggaactttttggcacctattttcccatttttagcacctatttttggggttttttagaacctaaaacctacctattttggcagtttttagcacctaaaaatgtaagccctaataataaagagtcaaactaccgtatttctctaattatatgcaagtcaccaataatctacccctttcgaagtaggttgaaaaataatctccccttctctatttatctgcccgggggataaatagaatttatatttttttcgaaaaaataacttcttttctatttttataataattaattaattccaagttgaaattctttaaacaatttttttttaattttcaaacagaaatttttcttgaaaaagcctgcgaaaaatttttctttgaaaattcggtaatagttaagaatgttccccacctttttctgaaaaaaattttcaaaatttttttttcgagaaaatggcgtttttagggttttcagggtcgaggaatccgattctgagactcaattcgacccattccgaaccacgaacccggattcgaacaaaaatcgaaaattcgatttttcaaaaaattaccatttactcaacaaaatcgaacggaaatggcatgaatgtgtgaatgaatcaattattggcacggata

SEQ ID NO: 1826 - DNA, 2046 bp, Heterodera glycines
gcattctcgccgcacatgcccacgatttttatccgtgccaataattgattcattcacacattcatgcatttccgttcgattttgttgagtaaatggtaattttttgaaatcgaattttcgatttttgttcgaatccgggttcgtggttcggaatgggtcgaattgagtgtcagaatcggattcctcgaccctgaaaaccctaaaaacgccattttctcgaaaaaaaaattttgaaaatttttttcagaaaaaggtggggaacattcttaactattaccgaaaattctattaaaaaattttttcaaaaaattaagcgatttttttttgaaaatattttgaaaattctcagaattcgtcataaatttgaaaaaatcgcctgagaattttcaaaaattttttcttgaaaaatttctaaattttaaaattcaaaacggggttctgaattttttcagaaaaataacaaatttcgagaatttcagaaaataaaattctcccgattttctttatttttaagctttataccattaacattgtccaaccatggagtgagcttgaactttgctttattattgacgcgatgacattttttggagaaatattcaaaataaatttcaaaaattttccactaaataaatcattcgaaaaataatctctctgtctccattaatctgccagtatctaattatctccccctttctaagggtgttgataaataatatacccgggcatataattagagaaaatacggtatgtacataagggatggcattccgccgaggctccaaaaatatgcgaaatgaatgtttttgggttagtaggcgaaatgtcaataggcgatatgtcggtaggcgagatgtcgagtaggcaaaatgtccgtacacacagcggcccaattttgtgctctcagtgcaaataggtttattatttatttagtaatcagaacgccaaaactttgcaaaacttaaaattttttggggattttcccttgtaaaaatagaagagccgatctcgagttaaaaactagacagctaaaacatgaactgtttttacgacacttaaacttgaaaaaaaatttcattatgaaaaattgtaacactccaccttttattcgaattcggaacccggattaaatagttgatccgtagcgattcgatggtcccaaaaactccaagaaacatgttttaacgactattttttccaaaaatgagggggaactatcaacagtagtacagggaaaattttaattctttatttttgtttaaaatttttgttaaaaagatttcattttttatggccaaagctgagaatcgaaagctcaaaaatggcattgaaaaaatgcaggaaaaatttgataagaaagaggagcaattggagaagaatttggaggaattacagaaaaagttggtcgaaatggatcatcagcagaaagaacaacagaaaagcattgatcagatggaaaaggtgggaaaatgtgaaaaaaggaaaatgaagcaaattgatcagcacattttgaatttgattttcttttttgctaaaatgccgtaaaagatgctacagacgaacgctgatgccgaaaaggagaatgatgacaacatgaaaaataagaaaagcttgagaaaaatgtcatggcacaaattgatgtgaaagtgcagacgaaggaagttactgtcaaatagttaagggaaatgagcaatggttaattactgtacctaccgtaacattattattataattactgtcaaatattaataggatttgttccaatttaagttattactgaaaaggcaattttgattgaatcggtgaattggagggacaacaaaaacaccaaaagcagcaaggggagaaggggacaaaaggcgagttgtaattatttatttgagcaaaccacaagacaacatgtaattgcacttatagcggaaaacaaagtaatgaatacaattagaaaaatatgatatggtcaatacagtaaaataaataaaataaaataaaaaagggatgaattaccactcaggacttattttctgaataaaattctctcagaaa

SEQ ID NO: 1827 - DNA, 1226 bp, Heterodera glycines
tctttacacagttacaagtgactaattagcgtatcacttgtctgactaaaaagttttgagtgaattttttttttgtttgttttagtcaattagttgagtcaaataatattttattatacatatatttatatgcttatgcaagagcacttaaacttattagataatttgaacgcaactgtctttacaacagttacaagtgcactaattagcgtatcaaataactgactaaaaaattgctgagtctaacaaaattcgaaagcaattaagaaaatgagttagttaatgacctgctgtgccactaattggcggttgcttgtcgtgtcattgctgttgtcgaaatgcttttcaaggatgtgctcgtagagcagctcgtacagcttcattgccttcaacttttcgatgccatccttcgtaatgtgccaacatcgattcgctgcgtcgtcgtgccattctttcccctctccctccggcgatttttcatttttcggtgccggtgccatttcgtcaatttcggcccattcgctgtccaatgtttcgcggacaatacccacaacggttttcaacatttttacatcattttttttattgcgagcaaacactttgtttaattggtccactaattggatatagccaatttttgacaaaatggtggcaaacttttggccaaatttgtggactacctaaaaaaacattggttgctgagaataaaaaaatgtattagacattataccaaaatatacctatacattgattattaatataattatatgaatttaacgaaacggcacaattaaatttaattattttatcaatcagtgagtttttttcgcatcgaccttgcacctttttatcatttagttatttcttctcccatgtcaccctttgggtatgcctccgcttttttccggtgcaccccaaaacgtcgtcggccgaaacgtcgtcggaagactttttgaaccataactttgttcactgtcaatcaaattaagaattgttggtgttgttcgataactctatgtgtttattattaatttgcaaaatctcaaaaattttggttaagtttcaaaaaagttatggccagaaggaactcaaaaacccagcaattcgaacttttttttgctctgatttttttgtgcataaataaaaaatttttgaaaatttgcacgatactagcatttttccaatgctttcgaataataccaagaatgattaatttggatgagaaa

SEQ ID NO: 1828 - DNA, 3039 bp, Heterodera glycines
ttatattcattcaaaataagaaggaaaaaacctaagtatttgttttgattctgatgaaagttgtggctttatgatttttacatattttcggattttttttgttgcattattatttacatgcatatctcacagttttttgtacaaatttccactttttgagaaatttttcttagaaaaactcgtaaatttagaatttttaggcagttttatcaattaaattttaattacaattcttaaaaagaaaaatgctcaaaaacaagagtttctaaacgaaattcaaaataaaatcaaattcatttgttagtccaaaatgtatttttaccataaaaagttaaacatgaaattgcaaaaaatagtgtaattttttgtatatttaaaagaaattaactgataaaattaaatattttcaagaaatttaccgaaacttaaaattacacaggtaaagctgaaaatattcagaaaacttacgaacctctgtttataaattttaaataatcattacaaataaactcacattaataagatgaaaaagacgcggaaattgaaaacggatgcataaaattttggctaatgttgtgcttaaactatccaatagtctgtactttttttctgaaaaagcttcttcgcgttcttcgctggaattaaaccatgaccaaatggcgaatttttggcgttcctaaaatttatttaatttaatttgcatttgaaatttcaaacgtatgaaattgaatgaatttggttaacaaaaaattgagtgcccattttttgaagctttttaaaaatttttttcatttgttgaagatttttagtccatataatccatattttggtgttttgtggaataaatacatatttcgtcatttatgcgttttttcccatattttggcaattttttggaaattttcacaagaaaagagcaaaaaaaagaccgacgactttttgggaaattttcaaaaaaatacagaattttttcgaaattttggcaaatttattaggtattttttcgcttcttcctaaaattttcattgacgtcagaatgagattattacaaaaatttctttgagatgtattaagtttgtttaagcaaatattgaatatttttggaattttgatggtttaaaatttaatttttgtcagtttttagtccatattttggtccatatttggccatttttgagctttttagtccatatttcaggaatttttagtccatataatttcgagtcatattaattagcatttgaaattgagaattaaaacggataaattgaatgattttggcaaaaataaattgagtgcccattctttgaaccaccttttttccaaacagaacatcatcgcgttcggcactgaaaatagtccataaccaagcgacgaatttgttgtgttctattttctgaaattttattaattgacacatttttgtcgcattattttttttattgttttattttccaacatccattaattaattaattaacaaacgttgttagtcacggcacatattttctgctgttctcctccctccaatttgggcccaaagttcagcccaaaatatgccatttcataggcaatgattccaaacgcccaaatgtccgtttttgaactgagccgcatcgaacgctcattatgcagcatatagccccaattgcatagcttatgatgttcggggctctgtaaaataaaaatatttttttttataaattcattgataaaataattaaattttaattcttacgcatagaaatcagggggataggattaaagaagattttggagaaaagcccaacacaaagaatgaaaaatatttttcgtttgtttcttaaacagatagatatataaagtaaattaaattttgttggcttaattgccaattaaaattataaatattttggcaattggccaattaaaaatataaaatgttttggcttaattggcgaaatattagaaattttttagtagtaaaaaataaaattataatttttaggctaaattggccaattagaattataaaagattttagcttaattggccaattagaattataaaatgttttggtttaattgaccaattatctttttttggtgtgggtggcacttgcctcgtaatatttggtggtcaatgggtcattgatgacgaaccatttgcaaaagtttgccatctgctgtcgttgtacatcctcctcttcaacaatgaattgagcagttccgaaatctatggctttcatcactgaatcctctccattttccttttttacataaagcaaattttgtggcttcaagtccaaatgcataattactaaaaataatttgaaaaacaaattaattattaatagtttaaaatattttaaatgcttttttttacttaaaaatttacaaatattatttctttaaaaaaaaacttgagactatttgctttttaaatacattattgttttttcttgtttcctattcaaaaaataaacacttaatggctaaaatgcatgctgacgcattttataaatccgccaaaatgggtttgctgcgttggcacccccacaaagtgtccaagccacgaaatgtccaaaagagtaaaaacccacgaaatgtccaaaatttttcaaaatttataaaaacaaaatgagtctaatttaggatttttagggttttcggggtcgctgaatacgaatataccctttatattaccccttgcctaaccttaggcccatctgaataataaaaaactcaaattcgagacttggacatttcgtgggctggacattttgtgggtcagccagcggctgcgttttataaatccgtcaatataaatcagcatgcattatttaaaatttattattattattcaaacagttttattgaaatttgtatttttttataagcattagttaattttgtttatcaatagcattgctaaaaaagcaaccaatttttaattattgatataattcgagagcccaaagagttctgtattagcctaccaaatttcaaaaaatttttgctaattttgaaccaaattaatggccattgccaaaaatatacc

SEQ ID NO: 1829 - DNA, 1453 bp, Heterodera glycines
  unsure (1)..(1453): unsure at all n locations
attttactctatttattattaggaaatttaatttgacatgattaatactcatttacgaaatgacccgaataattactttaaaatgcgcttacaaaatagtatctatgaatttaaacctttgttttgcctatataattaatgcattcatcttatttaaaagtgttactcagcatgttgatattttttcttcaatccaaatcaaggaaacgataaatggacttactccccctcggaaatctatctccttagttaagaatacattttttcgcatcttcaagtcagagttaatgagactaaattagagatttctttgctatgagatgagctttaattctctaccattacctaacaactaatagacccaatattctcctgctagacatgcccatagaacttgtggcgattctgatcatcttatgcacgactatattactacaagtttagtatctgccgaatttcaattgccttttcaccgttcgaacctttgctttccttcggcatttgtgtgatcaattttaataactcatacacaaattaagaggtcctacctaatacatagtaataaatttatataatgttggtactcaaaattttgtgatttttcattaattcaaatcaatgaatcgaaaatgcacttaacaccgaaagagttctgtattagcctaccaaatttcaaaaaatttttgctaattttgaaccaaattatggccatgcccaaaaatataccaggaatcagcatttcaaacattttcggttaaaactcatcacattttaaaattattattgaaatgcataataatttttgaaacttaaattatcatttatgttgaataacaaatagatttgatgcataattatattctaacttatcagtggctttttataagcattgttggcgtatttataaaaagcgcatggataacggaatttataaaacgcattagcaccgctaaaatgtatcagataatttctcgaacagggattccggcgggactctcgattatcccccccccccttcgttcccccaatttactttggtgcatgtcgcgcaacgtctcaacaagttgccgaatgtccggctccaattgttcatcaccaacttggatttggccttcggcccactccttccgcttttgcttcatgtgtccgatgaggtcatgttggcccaactcgagaatggagaacacaatgggattgggattgccaagttccattccatggtaaccgctaattaaatcatttttaaaatatttttgaatattataattgcattttttacattatacatttctattgcaattgcatgggcagccaaaattaaattaattaaaataatttcaaaaatattttcgatgatttgaaaactatgatgattaaatgttttgaatcaaatttgtgaatgataaaataagtaattatcccaactaatnntatcattagcagacnntctaga

SEQ ID NO: 1830 - DNA, 2278 bp, Heterodera glycines
tcaaatttgtgccttataaaataagtaattatcccaactaactatcattagcaatctccaattaaaattaatttactaagcaattaatttgatgactcgctcattttttggcaatgcatcgaatgctttctgaattttccactccttgacatgcttttgccaatcactggtttcccagtctatgtaagtccttttcaatgccacacatttgttgtacggacgggcaccaattgcgtacaatacggcatgctgcacctttaaaaaaattaggccatgaaaaagccagaaaatttggcttaaaaaattaaagacattaaacaattgaatttatttggattaaaaactctgatttaaatatttatcttttagacctggggcttcgatcgaaaatttttcaaaatcagaacattgggctcaaaaaatcaaattttgcggtcgacaatcaaaacattttgcgaaattgcttcaaatcagttatttttaaaattattcgacgaaaaaatgtaataaaaattatattttttcgcctccgattttcatcgttaataattttgtggaggaaattagcaaatcgttcgggatcaaaaaatcagatttttaacatttttgtgcggcgcatttttcaaaaaacttttggtgaatgggcgaggggatggggtccggcggcgccgataggcgccgtcagggaaaaatttgtaatttttaatgtgtattttttaacagatttttgtccaaaaatgaccaaattttgcgcaaatttccttgataaaaccgtgacattctgccataaagtttcaaaaagttcatgagtttatttaagaaatcagaacaaattttggcctttacctccacatcaggacaaatctgataaatcaggacagatcgaagcccagttttagacacggctaaattctttattaaaacgaacttctgagaatgatccttcgcctattggcttttcttctttttgtagcttaagtttaattgttgcgttgtccactaaatttgtcatttcaagcgcttcattcatttccgataaatttgactgtccacaatggcactgtcccatgggcaatttttgctgttttggcacaatttcttctttggacattatttctatattgccgtttaacgcagctgctaaatttaacaaaacctaatgaaaaaaacttggtattttaagaaaaaatattataaaatttatgtaaatgttttacaatttttcttaccattttttgtagtgacaaaaaaacattttaaaagaaaaatgaaaaggagaaatccgaaacgggaatttctgatgaaaggcgatcacattcattgtttgcttgaatttttgtttttttctaaattagcattgaaataaaaaagaatttcccgagattaatggtttgattttttatggcatagtcaacatttattaagattgtacaaagttcgagaatatattcgggaacaaccattgaaaataatttaaaaaaattttattcgtaaatttgatatgatttattaaataaaaatgttactattgtaacagaatttagagaacacccaaaaaaagaaaaataattttaaaaaaccccaaaaaatcaaaacaaaacactaagactcaaaaaaaaactaagtaataaaaatacaatataaatctttaaataatataaaaagtaaaaatatatcatttatttgaaaaagggaattaataattaaattggaaaaatccatccacaagcaaaaaataataaagtgagttggcaaataaatattcacatgtgaaatgaaagaaagtctattgtgaaatatatatatatatatatatatgtccataaaagcagaaaagtggtggtggtattggaaaaatgacactgagatcgattaacacttttttaaattatagttaaagctttttttaaattgtaatacatgtggatccatgccagaagagtggggtgggaggaaacggattacaccagcaggaccgagatatatcttaatcccaggaatcgggcacggaccccaaaacaagtccaaaagctcaatccgtttatacatggctctttatcatgtcggattatgacaagcgagatatttttgaaattaaaaatgagtcaataaataattatttctattttataataattccaagatgtacttggaaatgagcataagaaaaaaacattcaaaattctacaatttttgaaattttataccaatttttttaattaaattgtgcatttattaagtgcaaaatctgttacaaatcgcataaaaaaatcaaatt

SEQ ID NO: 1831 - DNA, 4114 bp, Heterodera glycines
  unsure (1)..(4114): unsure at all n locations
tattttagaaatttatcgaacttaaaattaggcaaagcagattcagaaaacttacgactctatttataaattctaaataatgattacatataaactcacattgataagatgaaaaagacgctgaaacttaaaacaaatgcttaaaattaacttttatggattttctaactgaaaatccctgccctattcatgcgtcccttgcttttccgngtgtccttggttttttcgnctcgtcgttctttctctnttgctgtggcttnttgtgtgtggcttggctgncggcttttctggntttccctgttccgggtgcggtttctttncgtggcgggtgcctttcttttcgccggcttcccgtgntgggnttgtcttccgcgtcgctcttttccccttcacttttcgcttatgcttttttgaccgccgcccattttctttttgagtgccatcgcggaagagcgaggcgggcacgggcagtagccgctgtctttgcccggttggccgggtgccccgggctgcccaggctgaccaatgttgccagacaggccgggcagtcccaggcgcaccaggagggcccaggcggtccctcgcctccggcctgtccgggttggccttgactgccgggacttcccggttggccaggcgcaccgggagctcccctcgggccaggaatggtgttactaaaaaatatgtaatcctaattacttattcaataaactgcttactaaataacagcgttatttccaggctgtccgggttggccgggtgttccgctgcgtcctggttgcccaggctgtccttggggtccggacgcgccaggcggtccttgtcctccgcccggagcgggcgcaccaggttggccaggggctccttgctgtccgggcagtccctgtgctccggggctgccgggtgggccagccggacagagtgggcacgggatgttctggggcgggcacggaggagctgtgtgatattagccatgataattatggaacgcgtagcgattgctcaccaggttggccaggtgctcccggctgtccgggcagtcctgcgcctcccggctgtccgggttggccaggcggtccggacggaccaggtgggccaggagggcagtttggccgttgtgggggaccgcaatggcaatggccgggcaattgacgcttggcacggaagatggagctgaaggggttggcacgggcctttgacggcggtgccacgacgacttgcacgtccatcagatcagtccaggccgagtcggtgttcacgcggaaggccttgggaatacggtaataattacggtatttttcaattgtttttttacttcaacgccatcgcgcactttgttgcttagttggttcatctccgagtacagtgatggcagtgtgactacggtggcgataatcgccagcagagagcataccgtgccaatgcccaagacaatgtgagtctcttgcatattatgcgctaaatttttaaatgttttaattagccatatcacaacttaaaagacttaaaattcgaaaattgacttattttaaccgcgttctgcggaaaaagattttgcattttaatagaaattaaagaattttaaataatgtcaattttattccaaaattattcattttattttaaataattttaaaaatttttcgggaatttcaaattggtgagcaaatgggtgttcttctgctgttgttgttggtaactgctgattcacttttatatgaacccaaaatggcaaaaaacttgctaattgttgccgtaatgatttttgtttcgggtttattactcgttcatttgaaattaaaaagcatattttggacattaatcatatcgttgtggaaccgtttaacgctcatttgatgtgttaaaaaagaccatcatcatttgtgtccattaattagttaattactcgcctccatttccaagcgaacatttttttgatcaaaaaacagctcatttgtgcgtgaaatgtgatgaatgacgaattgaaaagatgaaagttatggatcctacattcatttgtcaattaaagaaatataattgtacagataattttataagcattttttaatttatgaaataataaagtgatgttaattaaatgccgttctaaaaaacacacaaacagtaagaatgccctaattttctcggcggaatcaatcagcccaggcggacccctaattaaattgccatttaattaaacccaaaattttaaaatgaatattttttagaaaaaatttttttttattaccaaatgcaaattcgactttgagttccgaagtctatagttttattttctgaataatataatgcaaaaaatatataaaaattgaagcccaataggggtctcgatcccctggccttgagattaaaagtctcacgctctaccaactgagctaacgaggcagtgaaaatcgttgtgtttaccttaatgaataaaaaattattaaaaattttgtgcgccaaagttcactaaaaattaaattaaatatatttttttttattgagtatctctattcatcatgtgattttcggtgctggacatgtacgtcacttggccggtgaccgtgttgccgatcaaacagccaaaaacgtccaattcgggcgtggcttcgacgttcagccacggttccacattaaaattttctaaatttttttaatttttaaaaatgctaagcctaccataatgacaatttttgacattttgatttttgttgccattattttggtgctaattaaatccaagatttattgctgattccttttctgtcgctttgcttgccacccgccgcccttttttcaatgtatgccgtaagctcccaaaaatttcttatttttaaattcagtcttaaattaaaaaaaataatagaactctttaatttttaattttctttatatcaaatcccaataaattttcaaaaacttttttcggcggacgaaacattaaattgtgagcttttaagtatgacaagtttgttttgagctttgaaaaagccctgctccgttagtttttgagcaaatatttttattgtaaatttattttttattatagtattttattaaaataatgaataaaacactgtctctccataaaaattattaattgccaaacttaagatttactaaaatttgtccaagctgaatttgctttttatagaatgttttaaggaagcaactcaaccgaaaagggcgaagtcgtactaattttgtgccaaattttttttcggcaaaaggaccaaaataaataaaagaatgcccatttgattggcatttggcattcattttgagtcttttttgttttttattcctcaaaagtattcatagtttggtaatgaaaaaattaacattttttaaataatcgaataaaatattattgttaatttttttctttttaaattatttatactgtttaaaaaattttttttttcaatttaagaaaaattaaagaatttactgacacaatgctttttcctgttttgagcacccttaaattagcaatgcttcttcatcgtggcacattggcacgagttgccagtgaaaagaattcaaaaaatatatgcgatacggtttggaaggaatcggacagttatttggtaaaaattaattattttgtcgaattttaattttcgcctttcaaaattaattgaatttacaaaaattaattaagtaaagactttgtaatcaaagccttaaaaaaacaattttgcaatggaaaaaagatttattttttcttgtcaaatttttcttttttttcttttttctaatttttgaatacgaatttgccaattaattgcccttttcactcagttattcgcgaaatttgcaggcatttttcaattttcatggcatttaccttcattaatttagaaatgctgtacgacaatgagtcgcactgtcaaaatgacatgccatttgtttttggaattcaatttgataaattttccaaaaagttcatccggcgaattggcaatgccatgccaatgatgccaattttgaagtgaccatccatcgatgggatggaaggtatgattaaaatactggctaattccattctattttttatttatcaaagaagaatttttttttaaattcatttttttaaattaatcaattttta

SEQ ID NO: 1832 - DNA, 3751 bp, Heterodera glycines
aaggttttattttgtaaataagataaaaatggattttccttcctaaacaattaaattaatttattttacaatttgcttaaaataaatttaaaaacttatattaaaattaacatgaatttaaaatatttcagcagaatatataatttaaaatttgtctaaaaatactttttaatgcattaggaggctcaatggtgtgccaacattgaacgaatggattttgctaattgctcttttggcggtgccaatgttcttccccgttggatgccaaagtgtcgccacattgggcgcatttctatcataaattgtggcctgcgctccgcgttgcaacttgcccacattggttcggctgttcaaattcgtgccaaacataatcaaattggtgatctgcaccgggttgcatttgaatgcactcgattgactgagcttgaccttagtgccaatgaggtcagtttaatttgtgctagtgtaaagccttaatgttagattattttaatttgggataaatttataatttggtcacccaacaaaaaatataaataaataaatttctgtataatgccggccggataatttatgggcaaactcttctctcaatctgtaaaggggcaggcatgagcttgccaataaattggaaatatttaaataattccattaaaaataatttttttattgtgaaattttcagtttgttcgaaaaatcttgaaaaaactttattggtcactaaaaacttcaaacttaaccaaacttcaattatcctacctctattttatgacacagattgccaaaatcggtgcccacacattggcgcgatgccattttttacgtttcttggacctaagtgataatccgatgggcgagttgccggacaaattatttcaaggatgccgacgtttaaaagatttacgattggatcggcttggattacgggtgaacatttgaaaaataataattttatatctcctcagcaggatgtcgcaattggattttgattttcaaaaagaacctcttcacaacaaaagttttatgaaaattaattatttatatttttaaaataattaaatcaattttggataataaatttaatctaaaatgttcaacaatttttgtgtatagcgaagagaaagaaaaaaaatgccatgttttctctgaccataacttaaatcatggataataaattagggctaaacggttaaaccaatggagtaggactgagtaaattaattaatgatttcattagaaatccattttttttactgttttgttcagagtgtccgtgctgagctgtttctcgggctgaacgcactcaaatcgctttctctgtccggaaatccgttgtcccgcatcgatccgttcacatttttgcccgcccggtcaatccgcgctttacgcctcgacaattgcacattggcacaaatgccattggcagtcacacaatgttgcctattggacaggtgtttttttttgttttgttttagtcgccaaaattagccgttggtcttataagattaaaaaaaatttttttttcggaaatttatttttaataattcaaatgaaatgtaattaaaagtaaataaataaattattgattggccaataattacaatgatttaaaataattcttatatattttttcttcatttttggaggttcaattaaaaacagttgaactttatttctgctaaaaatttgctaaattttaatcaataaattcactttaaatttgatgtgcccaaaatgtctgccaattatttattaaatctcaattgaaattacaaaaaattcttgcaattaaatgcgatcaaatcttcaaaaagcttgtcaatggacgacaaccgattggcaactcgtaactcaatgcccgccccgctgttggcccttcttccccgcctttcccacttttccttcgccaacaatccgttgttgcagctgcccttggcacttttcctctatgagcataaccgtgccgaagaggcactgctcgaagacattgtggacaccttggtaatttgcataaatcgatcaccattttaatccttcgagaaccattaaatgattttattaacttaaaaatgaatcaatttccaatatttattattaattaattattgtttaattttgccgatcaaattgcccgtctggcgcttggagccctgcacgccctatctttggcacttccatttgcgcaatgccagctctgcggcacttcgtcgtcgaatggctgcgtggaatgcgttccgaatgcaccgcgacggtttagcgcattgtgaccaactatacgaaacgatcattgacggcattggcatttacaggcaaaaaaaaaagacgaaaaaatatgtattaatttatccaacaaatttttaaaattaaagtcctggtcatatgtttgtgatcacggatattgtcctaactttataaatggaataatttttttggtgatctgctatgaattctgtataagatgcaaaaactgcgtccagctctgttcagaatcagtagtagacgagttataagttctttaatttcccatgatatgcaaaatgatatattactttttaaaccgatttaaaaactggttaaactgattttttttttgaaaaatgccgaaacaggtcaactgatatttcaattaagctatttttgaaactaaaatcgttaagattaactaaaaactgataaagtagtgccctgtttgaagtcatcataaacatatgatcatgactgtaggaaattgaacttttattaagttattttctttttttttcttttttaatttaagaaatttatatgggtttttgtcttttcatgcgcaatttttattttaaaaatttttagactttttgtagggaacttcgtgaacacaatggttgtgaggcgactcgtcggctgcgttcagttcgcgctgatggtaaaaatgctgtgggaattcgctgcgattcggcaacaccaagcaaagcgacggaaaaggaagcaacaaaaaaccttggctttaactggcaccaaaataatgccaacaaaaaaccaaatgtcaaaaaccaagccacgtcagtaggaccatcagcatttgcctacggtccaaatggcacggatactgtcattttgggaagtgatttactgtcgactaatgcctgtcaaaccgcatacagtgtgctgccaatgggtggaagtgcaagtaaatcacatttattccgcacaaatttttttattttttgaatttccatttaattttcaacgttttcgcttttttaattttatctttttccgaattcatattttagttcatcattttttggcaaaaattcaaaggtttttatcagtttttgaaaaaaaaatgctaaattattaatttacaattttagacattattttttgaatgaaaaaattttaaaaagaaaaaaagagatatttaaatatatttttttctgcgaattttaccattttgtgtcttttttttgtatttttggtgtcataatttacgcaaataataatgatttttttcatataaatgacaattttttttatttattcataatttctaataaatccaatagaactaatccgatttaatctcatgtagattcgtccctaatcaccactaatcgtcaaccacctgctgctgcgtcttttcttccgccgttttgtacccctaattatcattttcatcatttgcttcttcccctttcattggtcacaaattttgcccttcttttctgcctatttgcattgatgaaaagatggagaattgaccgttgtg

SEQ ID NO: 1833 - DNA, 1463 bp, Heterodera glycines
catttcagaaagatgaaactgctgcaaaaagccattgatattctccgaaattcgttccaacccaaatgaacgaatttgtgtagcaaaagacgacaccaaacgaagttgaaaggcacattcgcctcttattagccacgggtcaattaggagaaacaatcgcatataatcagtctttaattcgttttctttgttaatttacaaaatggataaatgatgtagttagtggtaatgatctaatggaaacaacaaaagggagattcactgtggcgttgaattggctgtagaattaggcgaagtctattcctttgctttttcgatggaaattgttgaaatacgtcgcttcaaattgattcttatctttggcatccgtgggcatttgatcacgggtcctcggctgttttgtggtggctcctcctcttcgtctccactttcactttcctccttcccatcgtgttcactgttctcctctccgtggctcttccccgctccctcttgctcataatttgaaatccatcgtttgtaaaattcgtcaaattcatcaatttgtagactcacttcgctttttttattgccacacgcatttctcgagcgaaactaaaaatgaaattatctttttttgcttttagtttttaatagtcacgccttatcagttctcaaaaacaatgaagggtttgaactcttcagagaagcgagaagccgttggttgcatccgaccgttgcgccatcaatgcattcgatcagtcccaaagagtccctttccttcggtggaacccgcccaaattcctttcgctagaaagtggcaagcaaattgaaccattaagcctcatttatttacccatccgatgttctcgacaatcctctgattgaacggcttcgaccgcttcgccaattgcactgatgccatgggctcttccggcacattctgtgccatttcttcgttgacgaccgtccccacttcaatgccttcttctaattggtccattgattttgcaacagtttcttctgcaacatccacaacagtgttttcttcgtagctttccttctcggcatcttcctgattgttctcgttattcgtcgaatgcaccaattcacaattggtagtaataatgttgttgttgtcgctgttttgctcgttatttccttcaacttctgtgctgatattcgttctttcgatctcataacaacccaaaatttcgatttcatcttcgtcatccgttggcgaatttctccagtccgttggtgtttggaaagttgacggctgttgttggatttgttcgtgttgcgggatgggcacaatttgttcactttgtaatttctgttgcgcctcctcctcatctttcttctgtttgttgcgcattttcttacggatcgcgcaagttcgattttttattgtgtggtctgtcggaacagaggctccgatttcttgagcccttctctgaactgcttggacctaataactttaa

SEQ ID NO: 1834 - DNA, 10490 bp, Heterodera glycines
tggaacagcgtcaaaatgtgtggtggatggcgaaggggggacgaaagaacggtcgacatcagacaaaaaagaagtcgaatgagtgacaggcagagcaaaagcatcgtttgtaaccgaaacctataaaatacgatggatttgaggcgaattaaattctttgttctaatttgagagtattttacctccgaatgattgttcggtgtgtcaagcaaaatgatgtcgtcatcacttccgtcttcttggcctattttggaggtgtctaattctgttttcgagaataaatttgttgttaatatcaactaattccctaccatcattcagagaaattgcaaagttttggatagtttgtgcattcgtcaaatgtccgtgtgatggagaaaactaagttaatgatttttaaagtaaaaacgaaagaatgcaaaaaataccaaatttggagcgatggaagcgcgagtcaaattagagttttgaacagaggcaacgacacaatcaccagggacaatgttgtactgaactcaaaatttacaacaacaaaaacacatgtgaacataggttaaaaaagatagaaacgaaccaaaaaatagagaaaaacatttaccattttggcgtactatttcattatgttaatagagaaaaaccaaatctaatgcgtgatgtttaattttttttttcgagatgttaaatctatttcaaattttgcataccgataaagaaaaaatttctacatcgattaatattgcattttttaactcataaaatctaagcaaatcttcatcaaagagcttccgaatgatactaattgtaagtggtaccacctaaactatacgttaagattgtctaaattttcgaaaacaatcaacacttttcttctctataaaatagcatgccaaattgagaatgctttctttgtattttatttgttcatctctcgttttttgaaacggtgtgtaaacaaagtgcccacccatcgccacctgttgttgggaagttgcggtgttcgccgtgctgtcgagaattctgctgatgttttgcacaacatccaaagcagtgcggtaaatggccgtcgccactcgtccatttgagtgagtcaaagtctgccgctgttgctgcatggaatatactgaaaaagataattcacaaaaatgacccaaaccaaaacaaaataaattaaaccattttaaaaaggtattattccaagagaaaattatatttataatttgtttaaatcttcgaattgcgccaagtgtacattaaaattaacaaactcaacgaaaaatggcaaaaagtgagtaaattggaatataaaacaaaaatggtcgaatcaaaaaatcacagtcagaaattcttctttcgatcaaatcgcaattcaattaattcgttgctgttgttaagagatttcgaagaaagacgtgaacgagcgaccgtttcagaagcggtggaaggacgaagaccaagcagttcagaggcaacttcaatcggttccgtttcgcccgttgttgagttagtcgcagaagttgacggaagagcatgcaaataccggggaatgagttgttccggaacactgctgaaatgggaatgaatgttgaaaatattaagttaaatgcaccaaccttcgattgagctgttcagcaatttctcgaattttgtttatttttttgccctgttcttcggtaaatggcccagttttctcgagctctttgaccaatgatgtgatgttctgtgtgcaaatttgtttcaacagatcggagtcattaagacgtgattggagttgtgcaacttgttctttcatcagttcaatttcatccgcatattgcgctgcatttggctgttgtttgacttcgatgtttttagtgctagcgaattctgtcgaaaattgtccttcttttacaaggctttcttggcctttgtgttctttccgggttaaactgctgaagtgaatttgttgggcactggtcaatgcctgtcggcctaaattcataaaaaaatgaataaatcctatgtcatttcagtttttcaaatttgcattttgaataatgtaccaattttgttgaaaacattctccaattgtcgtgaccttgtcagttgtattggcggtgatttgcttctgttcggatgcgtttttccggccaatgtcaaatgcgtttggtatgctttgtgcacattttcaagagacccgcaaaacttctgttatttaatcaaacaataattaaagcgcctctcctatacctttggagcgactaaatgaagaacataatggatgaaagtttggatgtctaaaattaaaattatgaaaataaaaaaagtccaaaaaagattaccgacaattggaggataacgcatcagacaatggatacaggcggaataatcaccgtttagtaacacatttcgaatttggaccaaaagagcgacaaaaatacagtcgatgatttcgagggattgttgctggtggcattccgcaaaaattacgtcccacaaatacaataaatcgggcagcgaaaattctcggccaaataacaagcgaagccacctcctatcttaagatgcctttacaaaaaaagagttgaaatgcaaattaaaccaacactccgtaaatttgcggtaaaatatccaaattgcttaaatggtggtgcaaaggcggatcaacttcaagcagtaaaccattgcaaatgtaatccaaccggcgcaacaattcagatgactttccaggcaaacttaagaaaacatatcggaattgaatttaaaacgtagaaaatgcctttctgagaatggctctctttctaagtgacttttaaaggttgcgacatttgcgttgactgaaggcgcattatcgctcagataaaagcaacggatcaacgacatcaaccgagtgaacaatgcacttacagagagaaaattaagcgcaattaaaaattgactaacaatgcgtcgtgctctaagaaaactgggtcatttaatacaaccaaacaatggacgtcaacatcggaaaaatcactcccattaggcctggaagtatggacttaaaaacgataaaataccatattaccttaaaatgtcctgttctttcatgtcttggaaggccttttggtcggaatccagaacaaatagaattggaccaagaagttcgtgcattcccttaatgcattctttcagaaacaaataaaataaagagatcatttttcaaacctgaatataagaaatctgcgaattgagttttgaatagaaaaacagcacattgaccattgtttgtttaacatcatcgatttggaaaaactttaagtcaggacacctgtcaaactcatttatataaaaacaaaaaataatttttacgttctgtcaacgtctttctcgatgtttttcctcgttgattgattctcaaaatgtctgcaccacggactctaaaatttcatttcaccagtattaaacaaaacaccaacttctgcactgagcgaaagtggattgttaccatcaaaattctttccttctggcgaattattaattcttgggtttgactcaatccgatgtctcaattcggtataatttcgacgttcttgaccaatgacttcgacccattgtgtcctgtcctccatgggcaaaactcctaagagaagcctccaaacaatggatctcagatgtgaatttcgcaaatgtcctcgaatgcattgtttccgaagctcaaatggtgcctttccgaacaatgtcctccaatcaattcttaataataaaatattttttttaattttaaaaattcataaaatcttacaagaaaggcccttgttcttccattagaaataataaaataaattgtatttccactttttttctaataatcttatcagataatgttcatatgtatatataaataagaaactgtatgtaataataggaaaaatacatatagccaggaacagagcccggatcctgttgggtttttatacgcctgatccttatccttgttaccctgataggaatccgaaaaatataatttttaattgaaacagatagggaccatctctaaaaatttgatcctgatctaaggaaatttgactaattgcaagatcaaccggatttatttttagcataataaaaattaattaattggcaaaatgtttttgtccttttttcaaattcatttttaatcaaggttcccttccagacaagttaggtgggtgggtaggttcaccaaataccaaatgatcgtttctgatttaaagctcgcatttccagaacattacttttaaattctcatttttcgggtttcggaccagttcgaaaatagggttcaaaaacccatttccgtgactggagacttagttttccaacgaaaattgaaaaaaaattcgcttttctactttattgtttcagctccattctgttctgtgtctgcacttgaatcccttctatacttctatattgtgctaaatcccctctttacttttcctcataaatgcaaccatcccttggtccgtttccacatgtttattctactgttggtaatattggaaggtaaacgaaaatgaacgacataactttatcattttgtctgtttaagtattgcacaatttccctgtactgattcttcttacacaattttggtgtttggccgtggctcgacgttgtttctcagtggtgccttctcttttcaagtgctttatggttgcatcagtgtcaatggcttccttttcacttcgggtcgttttaacgcgtcgaattttacaactgtttcgattccgcatggccatttgccgggtgtgtctttgtgttattgcattttaaaattttttacgcctgtggaattgaccccaaaaaaatcaaattaatttgacattttgttgctatacgaataatttattaaggcgtccttttctatctgcaacgaattgtctacagaagaagtacacatagagaggatccaaagcagacttcgggagtttgtcaacgattccaaagtcattttgccgtttatcgaggaataccaaccggtggccattttactagtcaaattggagatggacattgtatcccgttttgtcaaacaacaatctcaggttttcgaattttatgaaatcttccaatttttttttaaattttagtatcttttaaatattttttcgcgtgttggcacacaattgggtccaaatttgttttgcatgaatgtcgctgaatcgggcgaagggagcaatgccaattcatcatggagtacaaagaatgttgaatcgttgcaaatgttggaggagaattaccgtgatgttctgctcagaattggcaaagtgctcgaaaccgaaagtgtggactttttgcatttaaacttacaaaataaattgaccttttacctgataattgatgggttttaggttgctgtgttattcaaactgttggcaacaaaggcgtgggaaaatcgactatgtgtcggtatctgatgaattcattgaattctaggaggttattccagaacccggattattgaataattcatcgacttttctaagccgttctagcactccagaaatttgtaaggtgtttttgctcgatttggacgtgggccaatccgaatttactcccccggggtgcgtctcgctgttcaaaacaaccaaacctttaatcagttagtttgctttattggactgtaaataatgcttaattcgatgttgttttttggtgccccctttgtttcgcttgagccttccttttccaattcatatttcttcggctccaataacattgcggtggattccgattcgtttttgaagttggctgaacttcttattcaacgttttattgattatgaaagtgcgtcggaatcctctggtgaaaagtgtgtgctcattgttaatacgcctggatggattgaaggtcagtttttttcgtttcgtaacaccaatttatttccttcaacaaattaaagaatttgataaatttggtttctttccctaaacctaaaagattaactttgctattgggaatggtatgacttgcttttccaatcgtggttcttttagaccttggctatgacctgatgctgaaaatcattaattcggtaaaacctaacattttggtgtgcatcgataagattggcaatggcatcaatttcgaggtaatggccatagttttcttttttgtaattattttaatttaggttccaaagcacctacaaaaaattacaatgagaatccgtctgaattggtccgtaagaatttttgaattccatttttttattttccaaattctcactccattttagtgaatgtccccaacttcctccgcttggaaattccgctcttctccgcaattttcttgtcatcggatacctcgcacaaacatttcggcgcttcaaaccaaaactgccctcgggtcagtgctctccccccccccacccaccctcttacttttaattttacttccttaagtcggcatggatcttcgactctccgacactctcgcttcttatcgagttccgtttcgttcaatttccgtttacactcatcccgaaattttgcacattgaagaccatcttattctcaatgtcctcaactgttcctttgtcgcactttgcaaagttgaggatggctctgaaatggtatttcattcgcattttccctattaaatacttttcctttttgagtgctttgagcgtcgtcctctgttggctgacaattcgttgccctcgcgtttgttgctttgccgccgcggcactgactgcgctaacaatggtccctctccaaacagaaatgagaaattacacgagggagatggaatcatcgaactcaacgccggatcaacagatgaaatgaggacacttcccttacgctgcattggctttggattaatccgcgcgattaatttggagcgaaaattattttacataatcactccggtggagcagcgaaaactcggacaagtggacgttttggcattgggtaagaaacaacttttagaactgaaacactccactaaattaggagcaaaattcaaatatttgcaagtttagtcatttctttttgcaggacattgtctgaacacgcccgaattggtcttcccaacaaatgtatctcacccatccttaccaattcatttttttcaaatggatatttttcagccttataccgaagctgttccgtatttggttgaattgagcaacaaaaacatcggtgaaaggcacaaaaaattgttctcgccacttcgggtcattaccggcgcaaaaagggcactgcacgcgagactcatgcaaatgggagcaacacaagtgacggcacatttgcagaaacggatcagacacaactgaagaacgacggaggaccgaccgctgacacgggaatttatctgtttatcattacgcttatttttgttttataaatagaaaattatctacttgtcgtgatttcatgacttataaaaataaattgaatttttttatttatgaaattaattccaataaagtttgcttaaaacatatgtcgcttggctgtgtacaaatttaattatctgggagattctttggcttattgtcgaaaagttgctgcgctcggcatttccctgtcgacccactaaaaacaattttttcaattggaattttgccggttcatttggatctttttcaccttgagaagggcgtgtgcattttctcgggcactttcttcccgtgccgtgtcaaattgtcgccgttttgcactgatttcctcctccgcttttttcgagtcgctcgcgtcaccgaccgaacgaatcactgaaaatgcaatggaatttgtcttttttcttcgtggcgttcacccgaattggcccacagcaaaaggccaacgtcggcactttttgtggcccattcggaagcagcttttagcacatccctttggagaggaatgaagaaatttgggattaaaaatgggagaagggcacttggaggaaaggagttttgcgagcagaagcaacgcaatgctctgaagccgggccatgtcctcctccttggagatggcaatggagtccatcagctgtttcctggaaaagccaaaagagtcaattagggactaattaatggcttcttcaattaacagtcaattagtgactaattaatggctcttcatttaattaattgggctcctcacttgcactcgttgtgtcgcgcgtgcagaaagtagtgaaagccgtgaatgagatgggccgcggaacggagtgaattcgcttgggaagggatgcgcgagggcgaaagtgagtcgaacagttcgtagaattgggcctctcggccggaggaaaggaaaatcagtgccaggccgaggttggccaatgtgctcagttcggcgtcgtcgttgggtcccttcagctgacaaatgaacaattaattaattggtggtcctaatgatgggccaaacgaagccgaccgactgaccttcagagcggcacggaactgtcgctcggcattgtccgagtcgcgctgataggaggcgtacagaccctgaaaagaggaacagggtataagggaaaaccgaacaagaaaggaccaaaaggatgtgcagctgaggctcaaaatcggatagaatatggggacgacacgcgacggaacattggctaatggaacggaacatcgccgcaatctgagggaagaaagggaggaaaaaggggaaaagcagcgacagaacaaatcacttacagtcgagagcgactctcgaggagagcccagcacgagatgagtttgggtcatcgcttcgtgaagaaccaattccatccgagcgacaaactctccgagacgaaggcccgccttaattggtacaattgggttggattccgtctccccccccccacccattggccccgaccattggccaattgctctttctcatcaatgcctttatcccttcaaaatgtttcagtgccgtgccaaaatagcggtgagctctctcaaagttactgtactgaatgttgcacagtacggtaagtgtgtaggccaaactgaaagtgaaatgggcggccaaataaacgacaaatctgcaacaaaaaaaaaagaacccggtgagaaattcggaactgagccagcgaatttgaacggcgtacgaattggcgacgttcgaaggcgtggagggggcggaggcttttgcctcctccgcggattggacggtaatgtgaagctgacgaaggcattgtttcgaacttttcaccttttcaattgaacattttaaatgcggcggattttggcccattaaccattccgatgacgagaaaatagcacaattggattgtgtagcaaaaggcgcggatgtcgttgatcgccgatgggtcgctgttagccgccacctgaagatcggaaacgctcactgatcagtgcccacaatcccttcaattttgttttaccgtctgcaatatttcgcccaattctccgacagactttcccaattcctgctgatcagtcatttgaatggagagcacctgaaagaccgaacacaaagcattgcttggggaatgatcgagcgaccagcgatttgaccagccgaaagtaacattcggcgatcactccgccccctccggggccccgcgagaattggacgccggcacgaacgatgtccaaagcgccgttgaagtcgcccaggcgaaggtacgcctcggcgaagaggaaaagcatttttgtgtggacggagtgacacttttgcgaatcgggcagctcagaacgcaacagctgaaatcaaaaacaaattaggaaggggaaaagccaagtttacgggataaaatataaaaaagagccattgcaacttaatgggaatacattttggacctgaacgcaatcggagaacaatcgccgcgcgagaaaaacttcggccaaaagagtggccgtcttcagccgcggctgttcaaggccgggacccaactgtcgcatcagtttatgctgcaggggaaagggaataatttagtaaaattaaaataattttagttaaattaaaataattatgaagcgaaaaaaagagttaaattaaaagagatctatggaagccaaacacattttgctatttgggcttttgtttttaccgcttggcacaaatggaattgggccaactccaaattgttcgtgtataaccacaaaagttttcccaattcgaaggaacaaagtgcgaacagttcagaagagcaggggacgcgcagcgaagtcaaaaattgccacagggaaagggaaaagcattacgatagcttacggtagatgaggacatactacaaaaaccaaccataacgcatttgatggccattttatatttattcgccgtgcggaaaatttcagccattgcctgaggtcatttagccaaattcaagaaaatgagaagcggtgccaaccattaggctgatcgctgcttgatcagaattgaccccgggcggggccggcactcggctgagctgagggaacttatccattctgctgaagaatgccaatttaatttaataattcttttgttaattttgccctgaaggccaattaggaaaaatggagacagaacgccaaatacaaatttgagtccttctaa

SEQ ID NO: 1835 - DNA, 7461 bp, Heterodera glycines
caacccattccagtaggggtcagttccgtctggccagttccgtctcgccagttccgtcttagtactcaaagggccggttccgtctcaaatatttttggactcaaattttttaaaatcaataactaatttagaaaaaaaagtaaaaattcttttacttcgcagcctaccgcagcctaaatatacctggttttttaaaagttgtggttaattaaaagtatattcgaaaataaaaattttttgaaatgaatttaacattgcaaatgtccagtaattctgctcgggattctcagtcttggtcctcgtgtcgggaaatttagcagccttaatgtgtccagcactttgtttgcagcgaatccggcacccattttggaccccgaacccgaatataaagattaatttacataaatttcgtctaattttcaaaaatacacccctgagaattttcaaaccaatatactaaaaacatttgtgaaacaccttttacttggttaagaattaaaaaatttagcctattaaaatatttagaaatttttttattatattgtatattttttgaaaaatttccgatttcttgcaccgcaaaaaagtgggtttgaaaagaaaaaaatagtcaaatttatgaaccgttaataatttgatttccgatcaactttttaccgtcggatccaatcgaaaaatcttagtcgacccatcatcagccccttttaatgcattccgccagcccctaaaaatttattttcagcattttttgatttttggaaattttatgaattttattgaaattttttcgaattttccaaaatcccacaatcccgcaaattttaaatgcgggatttaaggattgcgggatttgcgggattaatcccgcgggatcccgtcccgcaaaaaatgttgagttccagtcccgcagcgggatccgcaaatttgaaatttccggtctctagtgtctatcgttgtgattaatttttttttttttttttgcatttcttttaattgtttttttgttgttgcacaatagttcgagtaaaattcgttgaaaattggtaaaaatattttaaaatatatttttaagtgagcggcgcaaatgtccatttttgctgagcagcgcaagtgtccgtttttgctgtgcggcgcaaatgtcgcggcgcaaatgtctattattactgggcggcgcaagtgtcgaggcgcaaaagtcggtacaccgctaggcccaggcccgcgcgttcaaagatttggtggatgtcggcttagtgatcatcaccaagctggacggacacgccaagggcggaggcccactttcagcgtatgctttccaaaatttaagccatattttggtagttgcacgttttgccaaccccattcccaacgccttgaaaaagttgccatttttatgaattttttcccccttttattgtgtccgtctaatttgagtggacgacaaaaaggaaaagtcggcatcaacatgccccgaatacaggaagtggcactgttcaaggagatgctccaagtttcaaatgctgttgtacgtactttatttgcataaaattagtctatgccaaaatgctggctttagctcgtaaaaaattggtgcaaaattggaatccattcccaaaaaattgtacttttcgtctatccccccccatttttaggattattttatttttgagtttttaagactttgtcattaaaatttcacttttttgtcaccaattcgtatctccacacggaatttttgagagaaaaatagtattttgggctgaaaactttcgatttttcttgtttataccccctccacttttcctggtatcgtacttggtttcctgctgtttttacacgaaatttgctgggtattgggttaaaaaatgacaccttttttttggtggatttttgtccctttatgatttataattttctttttattttgtatatttttcaaaaaattttcaaaaccggacaacattgtgttcgttatgaacgcgcccactggacaggtaggtgtattttttacattggcaaaaaaaatttttatttttttgttttccccccaaaaattaggcctgcgaggcgcaagctcgcgcgttcaaagactcggtggatgtcgctcagtgatcatcaccaagctggacggtcatgccaagcacggagtttcagtgtatgcttttcaaaaatatcaattccacccatattttgggtattgtaattgttcattttgtcagacccccccccccctctcctcaacacctcgaaaaatttgatatttttgcaaaagaacaaatcgcatgcggaattgtcgactcaaccagcaaatggccaaaatcatggacccgcgcgtgctgcagcaaatgggcggaattggcggtctccaaaaacatgtaaatgccgtcaataaaaatgggagaagccgcatagctatgttccgagttgatggtcgaaattgttgtcccgagtgcagctaaaaatttaaatttttggaaaccaaatgcataaatttaaacaaacattcggccttttcaaagtcatacaaaactaaaaatcacatttttgatttgttttttttgtaaatttcaaagggttgacctttgcttgggacctccggagagatgcgttcacggagaaagttcagtgcttcttcgtagtagcgtcgctgtttcccaggcagaagacaccacatacagatgcacattttctgattcactgacgcaccaatgacgaagaactgctcccacatcgctggagcgcatttgaaagttccgtcgaggtgccacgtgccacattggcgcaaaatgtccagagtctaaaggaatgccaataaaaacagaattttatagccaaaaaatgtaccttaacactgccgaaaataaggacaacgtccttttcgccttgcctgacattgcgactgtcatacaagacgatgtcctcaccgcccttttcgcgtaacgttgctgggatgacaaaggccagtgggttctgcacgtcgacgtttcccagcaactttctcttctcacgccgcatcatttgggtcaacgcattgtttgaactcatggccacaaatgcttcatctgttgctgatcgcctcacttttgctaaaagtcgcgtggtcttcagacacggctcggccaggacactttctttgattttctgtcgccttgattccgcctttaacacagcattaattatttggttttaaatttaaacaaacttgttgtttctgaggcgctgggggtggttgtgttctttttgacccaaggttccagtagctccaatttcgtcattgtttgtgatgtttgcacatgctgagcaactacgaattgtgcatctccaacggtcccctgagtggtgtgtgtaacgaaatcctgaacatttggagtttatttttttgcgtcgcttcaaacgtaccattcaaccataggcaatgtcccccaaaatttgtttttccgcgctcaaaggtcattactgagacttcagcctcgttcaaagtctgttgttcagcgttgtcgaaagttatcacggcattcggttcgccaagttccacttccaaattcacggcatcctcatttgtgtttgaaatgtctgaaatataacgcttcttccgactttttttgttgactttcaagcttattacgaatcatttggtccaaatgaatagaaaaatctaaagtcgtcagtacaacacacatttaaaataattcttgaacttatttcatgttcgggtggatcaagggatagacaaggggcaatgtaaatgtcatattcgtactcagcgactccaaaaaccctaaattagatccgttttcctggtttttatgtgcattttagacttttggacatttcgtatttttacccttatggacatttcgaggcttggacactttgtaggggcgccaaaataacgcctgagaaattacaaaagaaaattttcaagaaaaaaattattgaaaaatttttttagagaatttccttaaaatatcagttttaaaaatttttggcaatattatgtctcggcgaatggtgtgtgctgattcttctccttctctttcagtttgtttgctgacaaaattgaattttgtgactttgggccataaaaaaatagttcgggattcaggacgagaaaaaatgggtttctggattcgaatggaagtctgttttttgtggaatattttttaatgtgtatattcgattttatttgaatttatctgcgagacagcgacggtcctaagacttgatttttattctttacctcgcacaaaaattatatgatcaaaaaataaaaaaatgcgagaagagagtgatagatgacgcagggaagaaagagaagggaagtgaaaaataattggctgggaagagacaacagatggaaacacggaaatcgagaagaaaatggatggacgcacacaaaaaatgcggaaaaaatattgtatttgttaattgaccgatcaattagaatcaattagtgtgtgtttaatgatgggtcggtgggtccgccgaatttttgtctttgcatcccagaagggatggacatcgagctaaaagaaaagaatttttttacaattctgctaaggtatattaattttttgaatggtgaaaagaaacatttttgggcgatattcaaacctaagtaattgcttgaaaattattttgaattggccaatgcctaaaaaacaaatcggtattctgacgaactcctatttgggatgatggaattaatgcaggattttttaaaatctaccaattagagaattaagaatcacttttgctcaaaaagccaaattttacatatttgtgtaaattattttttttatggtttaactcacaaaacgaaggtgaaatttgatcgccttgcgcgtgaacgactcctcggtgttgtcgccgcttttcaacgcgtctaggatatccttgaccattcatcgtgtctggcacaagccaccaatccatgcaaagattatcacccacgcgcacgttgcgttttcgaaaggagccagaatttgcagatccaaatgaagcgatcgaatgtaaatcatgaagaatctcaaatggaagaacatattaaaaataaggaaatttgtcaggcataaaaacaacaaaattccattcctcatctccagatggcgtcaaacggcactgttggccttgtatttcgtaaatacagatatagaaaagggttttttacgaagcttatttgggaaaataaattcaaaagaaacctctttgaccggcatagattagggattaatctaaacgaggttcattgtcaataacactaaaaaaagaaacgtgcccaaataaattgctttcgaaaattaatttcacatttgttttcaaactcaaataaaaatggcctttattggtatttaaattcaaaatttagaaattaattagaattaataaattaaaaatttagaaatttaattagaattaataaattaaaaatttagaaagttaattagaattaataaaatcaaaatttagaaattaattagaattaataaattaaaaatttagaaatttaattagaattaataaattaaaaatttagaaatttaattagaattaataaattaaaaatttagaaagttaattagaattaataaaatcaaaatttagaaatttaattagaattaataaattaaaaatttagaaagttaattagaattaataaaatcaaaatttagaaagttaattagaattaataaaatcaaaatttagaaatttaattagaattaatttctaatcgaaaagcagagaaaattgccgtattcctccgcccaatgtatagcctaataatttgatggacaactcagccgtacaataaaacttacaattaagcctaagcttaaacctaaaccaaggcctaagcaagcctaagcctaggcctcgcctgaagcttaggcctaagcctaagcccaaacagcctagcttaagccattgtacgagttgccttttataaattctcgtaaagctgagttgtccatttcgaaaaacaattcctttaaaaatgttttttttcagtaactcactccaacaaactactaatttaattgcaaaattcaatctatccaaaatgaaaatgaactaattgatttatatgtacaaaaactatagcacgaaattttgaaaaaacagggcccggaaacccggggtgaacccggacaggattccggactaaaatggcttaacggttttttcaaattaagaaaaacaggagccagactagggcctgggaaaatcctgtacaaaattgtgtcctgtctgggctctaataatgcatagccctaataataatttaaaatttatacttgatttttaaataaataaaaaaataataaaaaatggaaaaatattttttattttcaaaaagtacaaaaagcaaagcaacaattatcataaagaaaaaaactaacaatggaaccaaattttatctcattaatcctttaatcctcatttaattcttctccaacttttttcttccatttcttctctccctactgattggtcgcgattaataatgctaaaataataagaataatgtaaataaaaataatttaacgattggttaaattccaatcctactgatcacaaaaaagtcagatattttaatttgtttttttttacatttttaaatttatcattgtcccttaaaagtagagatcggactggtcgatttttttcggttttctcggtatttttcgattttcggtttcggtttttgaccgaaaaaaaccgaccgagaaatttttttgagaaaatttttcaattcttaatggtatattttctaaaaattttttagagcatttcttaggggtttattttcccgatttcattgaatttttaatggatggaattttttggaaaaaatgccaaaagggcaccaattcgccaaaactaatctgccgttttttagaatcaaggagcaaacacatgttttttggctgcctttttaaatcattcttacaacctatagtacaccgttcaatagagatttcaatagccctacaattttactcggaggagatttttcgttttttctattaatagaaatagtttattgcttttttgggaaaaaataaacaaattcaaaaaaaccgaaaaatcgaaataaaccgaaaattttcctttggttttttcgatttcggttttttcggttttttaaccgaaactgttcgaccgagaattttttgagtttttcggtttcggtttttttcggtttttaaccgaaaccgttcgaccgaccctcttgtccggtctctacttaaaagcacacccagtgcagaaaaaaatcggtttacaaaaaaatcagctaaaaacatttaaaataatttctgaaaaattttgtatcatttgaaggctcttaacgacctaagtctaaaactaggggatgaagtcaatctgacgccatctgagcactagtacaactgtttcccagtgaaaaatcgagaaaaacctaaaaaaatatgcgcaaaaaat

SEQ ID NO: 1836 - DNA, 996 bp, Heterodera glycines
  unsure (1)..(996): unsure at all n locations
tcattttcatttgccataaatgtttgacnaatttaaatttttgtttcatccgtttntgatttgttgtgccatttgtatattcctaattctttgatccatttgtaaatgtattggcgatttgtgcccaattttttcgctattttcgaattaattttactccatacttttgctgaatattttctctctttttgtttgattttctccttaattttatagaatttgtgaataatttctctctttttctgttcattttctttttcttcccatttttctccaaatatttcgtcaaatgttttttgctcaaactttttcttttccgctccaatttcaatttgaataattaaaaataatacaattaaaaagaataatatccactgattcattgcagaatttttttttagaaattataataatattttttgataagaacgaaataaataagaatataaaaatatttctcaaaatgaattttatatttttctcttataaattctacacattttaaagtgaaatattgacatgattacaacactcattaaattgtaaattgatttttttctctctacttatttgtcacatttaataatattataataataaggtaaataattaaaatttcaatcctactgatcacaaaaagtcagatattttaattaattttttaatattttttaattctatctttgtcaaaagtacccggaaagctgtggttaagattgggcaccaaaagtttcatggtgtcgaggcgcggcatctgttacagagaactggaattgacggtgtaccgactttttcgccgcgacatttgcgcctcgacacttgcgccgcccagtaagaatagacatttgcgccgccctacaaaatccatttgcaccgttctaagtaatccaaaaagtttttttttaaaactaaaatttgtatatataaatgttgcttattatttttgttttccttggcatcaaatttgtctttgctgctgaagtacgcattaacaaa

SEQ ID NO: 1837 - DNA, 5847 bp, Heterodera glycines
tgtaagaatacatatatcctaaacggcagaaaataaaaaatatatataaaagactttttggctttgggtttataataatatcactaatgacatatattgtctcggttatgaaagcgacgcattaaattcttctatttttgggacaaacaatcacgaatcggtcggctgctgggtttcccatagtttgaccattgctttcaccaaatcagcgcccaccagcttcatgtcctccattttgatctgattaattaattgaccttctttgtattcacatcaaatacctgtcgacccatcttggaaccctggtcaaagccgcaataagttgattccattgtgtacgcgtgttcaatgccaaactgacgacacgtggtcactcgggccgaaaattctttggctttggtgatggaaaaagcacagtctttgagagcaaaagaatcggaaatctgaatataaaaaaaaataagaaaatggcgaaggcatacttcgtctaggatttgtgggagaagggcgaaggattgtcgaaaaacagcggaggtgtcgacggccgcgtcacggtccgattgacgccacgactcttccaaattgttgccgtacataaacacatttgacttgcgcgaatgcccatgcaaatcgacgaaggcaaacggtcgtttcttggccaaatcgtcctgaaaggaaaaagggttatttcagaaatgttaggaggaaacacgccatgtattgtaggagtcctttcgcgtggtaaatggtcggatgaagtgccggcgaaggatcattccacactcggttcagatcatgaccggacagagaacagcgctgacttaaaataacgaaattaaatcgaaaagaaagaaaaatgaccatccattgataacgccgtcggggttcaacattgggaccaatttgaagatgaacaactcgcgagcacgaacagccagcggatgggaagagagcaaaaagctaatgacgccttaacttaaaatgcaattgttatgaattagctcaagtttaccgtgcataatccacgaggaattagcttcaccgggatgaactcttgcggtgatcagaacaaattctcggcatttgacttccaatggtgctgctgtgatagtcaacaatgggaccggatttgagcacaatgtgctcgtaagtctttgacggtgcatgtaaatgttgtgagaagacgatgaagaaaagaaacgctccaaagttgcctaaaaatggaaaatgacaaaaaagcggataaaataagaaagcggacttgcaaacgcgaataagtgtaggggaagtggtaggcgatgtagcaaacatcggcctcatgcggaaattggatggtgaagcgcaaagtgaagttcctcctaaatggattgtcgtttaattattgcatgtattcatcctttattttttggtcttttccgtattgacattttcgtttgtattttattcccctcttccgccctcacttcccatcccccttttctgctgcgattttgtgtgccgatgccgtcctcgtctttttcgttttccctttgctttgtttcccatccaataagtgctccgcctcctctttttgttgggtattatttttttctgtttgttgtcgacgcaattgcattttggaggacaaatcattgcccgcgaccgatggtgttgaagtgaatgaagtttcgccactctgattggatgagcgagtacggcttgaaacagaatctacttggaagtctgcagaaatgtcctcgttgttcggggtagcgactgataataaattgaaacgtccaaattgcgattgccaaaggaaggaaagataaaaacttctgtgtactatcgcttacgatcgtgttctaattttgggttaggaaagtagcaaatggacgatccgacgcgtgaccagcatgggtttttgtaacggactgcttctacaaccgaaaaaagcacgggttgcattcctgaaaaaaaccgtttcttttcaaagctgctgataatgtcaatgaatccaattcccccaccttcagaaaacatggaaaaactcttcgcacaattgacaacttcaaatgtgtatggaacgccagaacgcatatcagacacttggaagaagaaccattggaaatgggcaccgcattggttgatgtccggagccaaaaccaattcgtaaccgttgggtgaaaccttcagaaattttaaacaatgttcatttgcaattcaagcaagagatctctttttaatgacacagcaccaacttgaattgccttgcgcagatttccggactcaaaacgactctcaaagagcaaatgggccccaacgggggtgccaatttttagcgcgtcatcattgtctagcagcagtggcggttctgattgtgagtgggccaattggtccaagtcgaaaacgacgcgtttttcgaattcatcgtcgtgtccagtttcagtcatttgcctgcagaataaatgaaaatgacaaaacgaattgttcaacaaaatatattaaatgcacttcattgtatccgcatcatcggctccttcgttcgttatttttgtcgcattattgtcttcgtcggtgtgttcctgggaagaaaaatgcaaaagagttttgccgtcagcgccatccgttggacaatcgaccaattccgggaaggccaacttcacaaaatgtataacgcccttcgctctctgagctaacatccgcgcaattgcttcatattcagtgttaacagggcttgcaattgacagtttttcctgcgcaaaaaccttttctgaagatggtgtggattttgtcaattcggcgaacaatttttgataattgagctgaaaagcaatgggtttaaaaacggacaatccgtccaatttcagtttcaaccgtcaattccgtctccgtctgtctactgtattttgcaatcgctgcgtgcgaccccaacgatggaagctgacgattttcagcatcgttctcttaacaaaatctgtatgtaaatatggttagcaattgtttgcttttacaaaccaataaatgtatgaaatctcatcaaaataataaatgttttagaagaaaagacggactgtttcgatttaatgtgggaaagggaaaagacagctcaaatttcctttccttcggttcacaatcagtcacttttcttcacttccctccttttttccacggaataaaaacaaatgaaagaacggatattttccatttgaaacttacggcacaaaacagcgaatgcaatgagtcggaaaagagcggtcggatgagcagaaaaagaaaaggggaggagagagtgaggcgaacggttgtgagcatgaaagtgttgcgagtggtggaaatggtcgtggcaacaattggcattttcagacggcggaagacgagagacgaacattggtacgaccccactcagacggacctttaggaggaactttcgatctgaagtggaaaaaaacagtcgaggcttttcattgtcgcaacaccgccttcggccactgtaaacggagtcaccttttgcggagaagcacaaaatttgtgtgtgccaaggtgtcttcggcaattcgattcatttcattgttgggtccagagagcaacgaacgtaacgcacgaaggcaacagccgacggcgtccaaacgaatgcattcgcgcaaacgacgccgactctctgacaaatatgaaaaacaattagtttaaagggattaatttaattaaaataatccaccagtctttttgcaatgacgcaaataaccgcaaatgatacgacaaagcaaaatcaaacaactttcatccttcgtcatcttaaaaagggaacaataagagaagcaagtcgcacaaagtcgcgcctcaacagcagagaataaacgcctcagtgcgtcttcgtcgtcgtgatttttggttttctcgttgcaacaattgcaatcgaattgcgtgatgcaattggatgcatcggaagtttgcgatttatactttgaagatggacgaatctaaaaatagaaacactaacttttattagaaatatacgaaattttaaagaattcacgaaatttgttcagtgtcattcgatatggggagagggaatgaattaaaaaaaaagtccaactccgtgtgatgtgctcggcctttgctgttgcggaataagaatgtgactgctctgtgttttcttcggggccaatgccgagaaagagggcggccgcttggaaatatttgccatcgccaatgactttcgacggctccgttgtcgctttgcgggcgcatgcggaagaatgccttcagaagcggacactgactgtgagagtcgtccgttgtgttcgtccgacaatttgtcggtggaaatcgccttttttgactgaaaagcaaaaacattgttttcgactgtgcttaattaatcatttactcatgtccaaatcagttttaattttactcctcgagactcattttgacaaagaatgttcgccttttgctcactttcgatttacgtctgctctccttccgcttcattttggctgtgccatcgccactttttgtccttcttcttccaacttctgacctttgtctacgcttttggttcggttgagtgaccattttcctttttttggtcggagaaataatgcccaaagttgggcttgtggacaaaatgacatgtttatttgagagaaaactaaaacaaaatttgaaaattgtattttctgtacgaattaattcttgatggttaatctataataaatgtgacttttaaaatccgcaaaggaattacattggttcctttttgggaatccataaattttaattttcttgaaacgatggttaacaaaatccctttttgcatacgcgacctgtaaatggcagggtgagactcgatttcggttgtccatttggacaaaatgtaacatgcgattgagcgttgttcgcggacacgtgaatcacgctcaagacaaaggtcgacgagaaaggaaatgagcgatggaatttcggagggacaaatcggagaaggcggcgaactaaaagcaatagaaaatacttttgctacaaattctaacctctcaaaaaaacatttttatttattacccagaatatataagtcggtcagtcgacatcggacagccaaaaatagcgactaaaaggagttacttatttgttcaatggaaatttagtagagtaactaatgagaaacgatataatgcggagaaggaaccaacaaaaaacaaaacgaagaaaataattcattcaatcatttattaaaggcatgaaaagaaacagaaacattcgaacgaaagaatgaattttgaggtggaaaagccaaaggaaaagtacgagcaaataaagctatatgacgagaaaccatttacaatagtcctaatgagtttgtgagattatcacattacggcgatgagttgtctgtttccgacccctcagaattaattcgaaaaaccaccactctgaaaatgaatggaataatattaaatttagaactcagttccagcaaacttgaaaactttacattgatcacttggatttcctcttcgctgatcattttcctacgaaattttgctggcaattcggtgaagtcaatcgccggtttgactgctgcagtcgaagttttggcgttgcctgtattttgttgaaatgaataatcgaaaaggtttttttaccaaatgaagcagaagatgttgcaattgaactcattgctgatggatcaaactttggctgaggatggcgagtcccgagaaatttgatcgatggttctcgactccgagttgagtactgaaaaagcaaaacaaataaaaataaaatttgttttcggcagcatttcaaccttagagagcaaaaaaaacgcattaacacacgctccgcttggccagcgacaaatattttgca

SEQ ID NO: 1838 - DNA, 4455 bp, Heterodera glycines
  unsure (1)..(4455): unsure at all n locations
atgaaacagtcgggttcgaattgcatgcccaattatatntattttctttaattttttgtttagcgtcaaaggtcatcttcgtcagtttgttcttgacatgcattcgggagttagttttattttcttttcttttaagataattggttgtttcagaaactccatcgtgagttccaccagtggcccgaccccacggaacagcccgcaccgaccaccacccaaccgccggcctcggtgttcaacaagcttaaaccgtcagattcgaggttggccaagaggcatgcgccatcaaaaaacatttttactaaagaaaaagtttaaaatttggcgttgagacctttcgcaaaaatgttggttttgacctcccacctttttttaatgtatggtccaacaattggttctttggcatgttcccaatcattgttcgtttttgccttttcagatattctctgttggaaaagaccgaactttgaattgctttgatgagacgcggccattgcttcttattggttttgctttatttttggtctccgttctgttcaatcgattcatggaatgtttaacaccgattcaatttgcttttctttgttttttgggttcaattaaattatttattgagaaatttaactgttatttccaagtgctatccatccgaatgcaattgtggccaattttcctttattccgttctttcttctgttgtccctcgtcccattttcactggtatttttattgccttattaaacgaatatttatatttttgagttttctttcggtagttttttgatattttagtaagtttagtcctttgttgttgtttttcctgaggattaaatagtcttcttatgatccctatgtgcaaatcgtgtagctttatttttccatttaaatttttccgtcaaatgatcccaaattttgattcttttataggtcatccagccaaagattcgtttaaaatattttatgtgatttccattatgaggattttatttcaacttggaaaccgcaaaataaagtcctcattttatttattgtcatccttcctctttgctgtttgtaacctgtcgataaagaatatttgatttgattgaataaattatttcagtttgttttcctatacatcttttatttctgggaatgtcgacctcccccttcggttccgaaattataataattacggagtcattgaaggcccattaaatggcttcataaaatgaacatttccaatggcagcgattggctttctgttcctcttctacctaatcggcctttcttttcctcagatttaaacagaagtggcgaatgttcgtcgtcgtccgctgctgccttttcccccccgccgttcggcgctccgttttgccaatgttggccaatgcgaacggcagccaaagccaccacttccattgtcggccattaactctctttgcattgggcaacaacagcagcagaaaaaggcgacaaaaaggtgggaattgaggaggaggggagggagacaaagcattgcattttgaaatgccaaagaaaccaaaaagtgtccatgtcccgattgaccaacccttttccaaacaaaactgaaaacagcgagagcaaaaagagagatagtagttagtcaccgtaggaaaatgagaccggtcatttgttttcagccgaacattccgccgctggctcccctcagtcgctgacggactgttcttccgcaatgggcgtggaacttccgccgacgataaccgagcgactgagcactttgaaggtgccgaaattggggacgaaatggaaaacagagacaaatcatagagcgattgggtagtaattcgacattgcagaaggatgtgatcgatgctttgctggacaaaaacgcggtgccccccgaactgatcacttcgctgatggccggcgtcggcggctcggctttcagcaaagcgctcgaattggtcccgtcgtacaaccaaaacttgcagaagatggccaagtattacttcacggcaaaaggcggcaaactcatccgaccaacagtttcgctgctgatgagtgccgcgtgcaatcaatgcgcgaaaaggccaacgacgccggcggacaccgccccgggcaggcaagcgaaatcacaaagagtgtgatcggaaagggaaaatagggacaggaaatcccggaaaacccctcaattatttccaataaaaataaataaattaggacaccaaccagcattgtcaatgagtcggaagaacagccaattgagatcagtatgaatcagtacaggatagcgatggtggccgaaatgattcacaacgccactttggtgggtgggggcaatgatgtgttggtaaaagaactattttcggaatattcaggtgcatgacgatgtgattgatgaatcgaacacgcgacggggacagccgacggcgaacgcccggtggggcaacaaacaggtggagaacgaacaaaccacccaatatcaggggacggggaatgggcaaaccacccaatatcagggaacggggaatggacaaaccacccaatatcagggaacggggaatggacaaaccacccaatatcagggaacggggaatggacaaaccacccaatatcagggaacggggaatggacaaaccatccaacatttggtgagaaatggacaaagcacccaaaaaatattaggacgggggaacggacaaagcatctatcgtcaatcaaacgcgcaacttttctttaggctgttttggtcggagattttattttggcacgcgcaacaaaagttttgtgcagcatcggagagccgcccgtcattgagacaatggctgagattgtggaggatttggtgaagggcgaactgctccaactcaacgggccatgtaatttcgcttttttcatggaaaataagtaattcgtgccccttacgaatttctgttcagccacttcgactggcaatgcacggttcaaccattacatggtgaagaccttttacaagacgggcagtctttttgctaacagttgccgttcggtggcaatgctttcaggtcagtacattttgtttcgcgttttcatcctttcgtttttgttgacgtttatcggaatatttttttggaatctgtgcatttaagaaaattgcaatggactccttttggagttgaccaccgaattcggtcgaaatttgggcctcgcttttcaactcgtcgacgacattttggactattgcgccactgaggaagccatgggcaaaccgacggccaccgaccttcgccttgggttagccacctgccccgtgctattcgcagccgaagaattcccggacgcgttgaatccgatgatcgaacggcgcttttccgccgacggggacgtgcagagggcgttggaattggtccaacggtcggacggattgacccaatcgcggcggttagccaaagagcagggcgagaaggccattcaatgtgtgagtgaaggagcaacgtttccatcccttcgctgtgaaaatgaattttaaggaaaaattgctgtctttttaaaaatgtataaaaataaaaattttgtagccaactacgcttataattttgaaaaattaaccttgtgaaaaagtcttcggattttggggtcgaattgtcacttttctaccataactgatcaaatgcaggctgaacagctgttgccggagggtgggctcgtgcgcgactgtttggtggacattgtgcagcgtcagttgtccagagaacggtgaagaagacaactgccgtcgatgtgtctgtctgtcgtcgttcgcctttgtttctcttgcgtctctgctcaacatttctcactctttcgctagtgcctttgccttctctctcatttcctctccatcttttctcatccacatttactgcactcttttcacacaatgtttcctttctctatctctgctcccccattttgttgcattaggctcaaccaaaccaaagataaagcattcgaaagtgcttaaaagcgcaaaggctgatttggcgaatccaatttgagtgattgttaatatttcacatatttgactcatttttgatgttttgcccagtagatgatattgacctctcaaaataaacaaaaattgaatttatattgacaaatatggttggattgtgttcacaacagttggagggaccttcaaattgagaaaggagtggaaagaaatccgtttttgccccaattcttttatgatttttatattgtgagctgtcttacctatcttctcgctgtctgcactctcacataaatataaacgcttttttaagaattaaagcattttaattgttcaatggaagtcaaattgaagccctattccgatccgtcccgttgggtggccatttacccgctgtacatcgatgcctccaagtcgttggcacagggtcgccgaattgcgaaggcgaaagcagtcaacaacccgacatgccaaggtgggggaggggggcgaattggggagggcactccgaaaataaaataa

SEQ ID NO: 1839 - DNA, 2978 bp, Heterodera glycines
ggtaagctggagttttttattcaagggaaattaaccaattaaaataaatcttttttcccgattttgctaaaaccccgctttttggttcaaaactgatcataaatttggaataaaattcttagaaaatattcaacgctgtgtaataaatcatttttcagtcattccatgcttatgcggtgccatgctttgcggtgctcacgttggctgtctttctggcattgcctactcattattcaaaaatatttcaagcaatttcgcatgccgacccaaccctattgagggatgccttttaggtttagtctaataaaacctaacaaaattatttattaatcgtgtgaaaattggttgcttcaatttaaataccgttacaacatgtaccgtaaacctgtaggttgctgctacggtgccatggcgggaatactttctgcatacactgtagttgccgttgtggacacgtcgctgacgtttggccacccgttggcaaagtacagaaacccaacaaaccatcaagtttttcccataaacaattgatacggtaaagatttagagtccaaattactcagcaaattgctttgattttttaatttcgttttttttgcgctttattaacaatcaattgcataatcttcgacaaattatattaataaattttgtttataaaactaattcttaaatttaaagggaaaatgaattcagagcctatgaaatgttcacttttttaaacgagttcaaaaagtcattcttcaattttttgagtcactttacttccattcttttttagccttccaaattcagaaccaaacgacaaatatatcatctaagagttcattattatatttattttgatcagtagggctggcaaaaatatgcacatgcatatttttttcctggactgtgggaggcctgaaacgcacgaaaaccatgtttttagcttgttttgaagcttctaggatgactttccatatgcatattttgcatatttgtgcatatttcgcgatttatgtgcatatttgtgcatatttgtgcatattttggcatttcgtgcatattttatgtgcatattttggcgtttttccaaaaaacctctaatagatcggcccccaacagacaaattggcctttttgacctcaaaaaccggaaaattttccaaaaaaataattttttagcaaaattttcacgaaaaatattgaataaataaattttctcaaaaaatggttaatttatgtcaaaaataagcaaaattttgcttttcaggttgatttttcgctaaaatgagtaaattttaagctgtatcgtgtttttttctcctaaaatgatttttaataccacatttagccatttttgaagattttactttatgtttaacaaatttgaagaaattttgagaaattacaccctcaattggaaaattttatgtgcatatttttcactttttatgtgcatatttttgccaaccctaatgatcagcgaactctaaaaccccggataacaaataatcatgtttttttatcataaaaagggtccccccttttgtttttgataaaattcaaaatcggccactttccgtatagcgccgatatttttttctctgcactctctatttattgacacatctcgttttttgaaacggtgtgtaatgttgtgcaaccctttccacaatgctaatgtataaaataaccgggtacttttctagtttacggggtacttttcacatacattttcagatgcctataaatgtactaattttacatgattttttaagcatggaaattttaagactaatattcgtgacttatttactctactgcaaaaaaaatgctaaatttgaagaatggctgcgagaatgtaaaaaaatgatttaaacacattttgagtcatagatatgaaattcgaaaatttgtatgggtggtataccctcatgggtatctgcccatgagggtacccgtggtacagaaagctgtcaattcgttgtcccctgcacagctcctagggtgtacgacagcgctggtctgagcccgaattcgtgatcggcacctttaaaaaccccttgaaactattttcattaattttgaaaacaaaaaatttcttttattaaaatatatgttaaaagtaccccgtaaactagaaaagtaccaataaccgattaaaaaaacagtaaaacaagataaatctttttaaaaatgttttttatagttggtttgtatcataatccttcggtcgctatgagcaaacaatgacaaaaaatgttgtttattattcctgatactacattattagcttccatattcatcaatttcctcaaaaacaaacatcagttcgccgccccattctcattttccaaatcaaatgaaaagtccaaatggtcatcatcactgaaaaggcgatgctcggtggaaatttgcgagagttgattgttttgatttgccccgctgacggcgagaggattttgttcacggttggtcgacaattcttcaactgattggaacaaatcctgcagccgaagttcactgtcgtcgatgccgttcacccaatgctcgccgatggaatttgacaacgaattgaaacgtgcgctgttttcgtctaaaaaagcaccggaaatgaatcatataacaatttaacgaaacccaaaaatgcgttgagcccggcgatgtcggccatttccgtgtcgtttagtaacatcccatcgcttagtgaaggtgccatcttaaaaatggaagtaaattatacagtcagatgattgattgttatgttaatcacatcttgatggacaaccggaggagttgaaagaatgttctgattctgaaattcgttgctggttgtgggctgctgatccaaaagttcggtcatcgaaggttgagtgtgtggagaattctgatgaggcagctacaagaaataaaacaaaaaaatcatgtttttgggggtacaccccaaaatctctcgccgccgaaatctcgccgggacaaaatcttgccgcagaa

SEQ ID NO: 1840 - DNA, 2382 bp, Heterodera glycines
tttagcttggtttgaagcttctaggaaggatttctatatccatatttttccatatttcgcgatttatgtccatatttccatatttttccatattttggcattttggtccatattttatgtccatattttggcatttttcaaaaaaacctctattagaacggcccccagcagctaaattagcctttttgagcccaaaacccgaaaaatttttcaaaaaatcattttttcgccaaaatttctcgagaatattgaataaatttaaattttcttaaaaattaataaattatgtcaaaaataagcaaaaaagcgaaaatttcgcttttgttgttgattttgcgctaaaaaaattaataaattttagcttttatgttttttttcttttaaaatgattgcacgtaattgccgaaaaaattcgagaccaatttccgaatgttgaccgactaattgcaaaacgaaagccgtctttgtcaaagcgccttaccgagtcaaaaaatttggaaatgtatctcatatgcaatttcaaccaataaatttgaagaaattttgcactcaattttgaaaaatttatgtccatattttgacatttttgccatttatttccatattttgagatttttgccattttatgtccatattttgcgatttttggtccatattttatggccatatttcgcgattttatatccatataattacactccctactcatgacattattgtcattcatttagccaactgtttgtttcctcattttccaatttgatttttaattggttttttcattttttcggttatttccatttgcataaaaaaactgtgctgtctgtgccaatggagtatgcgtattctatgtatgttagcggaccgccattagtggaccgctgttaacggaccaatggcaaaatggcattagcggaccagggacgtatccaggatttgggcttgggggtgggggggggtacgatccgaaaagtcaattcttaggggtgtatttttgaaaattcttcgcccgattcttaggggtgtatttttgaaaaactttcgcccgaacgacctttttttttttttgctcataccagcgaatagcggaccaattatttttcaaaaatattagggctggaaaattctcaaaaaattgataaatttattcaaaaaaacccatttcttccaaacacaactaaaaatttacaaaatcaatcaaaaaccccaaaaaatataacaccatacaaaaaaaaataaaaaaattttgttcatatggtaattttgtgaaatgctaatgctacacattatggctgcttttgcgcccatcaacttctgtttttgcggagaaatgataagaatagcctaaagagtgggtttatcaacaaaaaaaggctttaaaatatcgtagttaccaacttaccaatacattacgcattacattgatcgtaaaacgtgagttatgcaaagttcgaatggttgatcagtcattcggtggcgagtccggggttcggaattggtcaaaatgggtgtcattttcgggatcggcatccctgaaaacaccctagaaatgtgtttttacgacttttataaactataaaaatttatttaaaaagaggtgtggcagcatctaaacgattaccctcccattttcagacagaaaacttcaaagaaaaaattatttgttaagttttttgaaaatttttcaaaaaacagtaatttatcttaaaattccagaaaaaaaaaattgcttaaaaattttcaaaaattttttctttaattttttttatttcaaaattttcagaattttttccttgaaaaaattctgtttgaaaaacatattttcttttttgaaatttctgagacgagattttgggcggcgagattttgtcctgccccctatttttggacatttaatcgcaaacgtcaaaaacttcgcggtgtatttgccgcaaggggtaagacgtacgcacataaccccggggagaattctgtttcgaataaaaaaagttcaattttctatttaccggttgttgttggatttgggatgtcaatgttgcagatggaaaacgcccggttgtgctgtaaatgggcggagcattgcctgtgccagctccgactgtagtgccgccaccgcttccgcccaccaccggtgcagacgcgggagaggggacggacccggcaccgtcgccgacgtactcgctcaaccgttttgccccgaagtcgtccaaaacatacatgagtcgttttttgctcaaccgatgcgactgttttccagccgcagtcgccgggccgacaaatgaaaccaaaaattggattaatttgttgacgatttgctgttgcttcagatgagtgccctaaaaggacaaaaacattccatgggaaatgtattaattgagagtt

SEQ ID NO: 1841 - DNA, 4475 bp, Heterodera glycines
  unsure (1)..(4475): unsure at all n locations
tgcaattgaatanttgggcacaaaatgccacccatactaatgtgtattttctcggatcaagagcagttcgagaaatggggataaaatgttaaagaaaacgggacaaaacgccaacaagtgccaactcagaaaatgggacaagtgccaattctgtggggagatgatgccaaaagggggaaaatgcaaaaaaaaacattgaaaaaagcgacaaaattcaaaaacaataatttgaaagtaaaatgctgacagaatgccaactcagtataaatttgtaggaccaaatgccaaaaggacagaatgtcgacctctgaaaaatgggacaaagtggcaactttctcggattagcatagcaattcaatgaacaaaagtcaattttattttttctaaaaaaagaacaaaaccaaccgaattcaatgaatgtcagtcgttccactaaaaaagggaaatcattcaaggacggcacaatgtcaaatatataaaaaaggaaatggcctcctctatttaatgtgaatgaatccacatccccttctcttcaattggccctaacattcatttttcattcgttttgcggctgctgctgctgctgttgttcgccccgaaggacacgcctttatcccgtgccaaaaaatgcccgtaaaatgccgcggcacccctcttgagtttatgtctagtaatttgccaaaaccttcctccccatccctgccgtgcctccgttcccgctcatctcgttggccaatgccatcttttcgggattcacccgtcgttgaaattggattccccccccccccccccccactcgccccgtcttatctcgtgggatgtgccgtgccgtcttttcagggcgcgtgagggggagaagggggtgggggagcaggaaacgggcgaaatgcaatgggctttcggttctcaatttcatgccgcagaatttaaggaattttcagtgaatttggcatcaagaataccttcacttcaccgtatcacccgtagtcgaatggccaagcggagcgattcgtcgatacgttcaaaaaggcaatgaagaaatgcgccaaagatggaaaattttgggcagaaaagatgtttctcgcctacaggacgacccatattcggcactcacggatttttgcctgatcaattgttcttcggtcgaagacttcgaactcagttgtctctcgtccacccaaaggaagaacacgccgaaatcatcgacccagccaaaattcgcaaatcgcaagctgattttgcccgaaaaatggcacgtcaatttcatcagaaccacagagcaaaatcggttgagtttttgccaaaggatcccgttttgcttctaaacttcaaccgtagaaaacgattttggcttaatgggaccatgatcgaaagattggaaaagtctcccacatatcgtgtccacgttccggctctcggaagagtcgtccatcggcacgcgaaccaactgcaataccgttatcctcttgaaaaggaaggaaacggtacgataaggatcccagctgatggttacgccaatgcctgattgactaatgtccgcagcaaattgattgcgccaaaaaaacaacgcagtgactcaggtcatttggcggcgacttggctgaaaaactggaaataaatttatcgtatgataacatgcacctaacagtcgaattcgccagacaaactcaattctaagaccagaaaacacaagcttgtattaagtgcttgttcagatattttttacgccgataaaattcatttaccaattatccattctcatgattttctctttcaggttcaatagcggtcgaagcgctattttttaacagcgtcgaccatttcggcgcagttggagacctgcaccaagcaacaaaaattgccgagacatatgtaataatttaaaggaatggtcgaatggaaatttcgaaataactatcagtttgtattaataaatttctaaggtgtgccgtttcgagattgaaatggtccccccgctgaaggttgaatgcaaccttggtgaactgtgccataatcaggaccaagaagtacacaaacgaggaggagaactcctgaataaaattcaggacgagttgatcaaattttttgacactgaagaggttaaaaaccttgtcaacaaggtaaacatgaaaattgaataaatttaaagcacaactcatcttaggtttcggatagggtccttgaaaagaagacggtaaaagggcccgaattttatgagtaagtttattagtcccataataaaagaaaaatgaccgattttactcaattgtctgcacaaattgcgcctaatgatattaatgacaaacatgatggcatattcttattcacaaaccagtaccttcaatgcatcggtggaaaagcctttgaacaaacatcaatttttgtgtattgatttacaaatcgatattagcaatcgtttatgtatttattaatccaatatatcagcttcatatcagcgcaaaaaaaaattccgaatgaaaaatagaatgaaggtgatagggttaacgtagcgagagtgagagatcgtcaaaataatggcggaaaaaagtttcactccttcatagtgaccgggacagactaaaatacattgaaaatcgggaaattttcgaaaaaaattcttagcgggttgggaaaatttatctaatgtaaaagaataagccgattgaaaagagcaccaaattctcttccgaatggctaatacccgctcgctgatatagaggaggggccaaaattgtacaactcaaaaatgactgatttctataataatcaagggaaaataatcaaaatagataatttttatggtgattcaatttttttcaaccaacttttaattgaattgcctagacccaacattcaaagggcaactcggaagagaattttgtgctctttccaatggacttactcatttttactaaataatgtttccaacctgctaggaatttttttcgaaaatttctcgattttcagtgtttttagtgtgtcttggtcactatgaacgagtgatctgatcattttggtgtaaaagagtttttcattcatcatcaaaagataagcatgcatgacttatttcagatttttaagagaattttgaaatagttttttaaatttgttctgaatttttgcgccattattttgaccatctcacttcgctgaccctatcatcttcattctatttttgatttgagcttttttggtgccgatatgaagctgatatattgaactcataataaaaaaataattgtccataatgcttcatttaattatcaatttaaataaatcaatatacaaaatgcatgtttgttcaaagacttttttgaccagtgtaatccttgataaaatgcaatcaataaaattggtcatttttttattatacgaaatgatctatactcattacctaataaactaaaattctcttaagaataattcgtcaattccgaggaaaataagaagggaaggaagattcgtgaaacaaacatttggagatatgtagtgaaatattttttcaaattgttattatgaaatataataatgacatgatgccaatgttttttgccatttttacgaaaccaattctcgtcgctaatttctctagccattaactgatggtccctggggcgatatgcgggacgagtacccccccccccccccaaaggctcccggtcaatacggcaatagacaataaaaaattatttaaaactatatgattataattacatcgctaaaaaagtgaattaataatttctcttattttttaaaaaataattaaatggttagaaatgtaaatgattaattaaattgaattattaagtaacgaaaaatgttttaaaaatatatgttatttataaaaccgctctttttttcttttcccatatctttgcaacccaaatcgtgttgggatgacgcgattaaagaagaggcggaacgtgcttttaggtaattttccatgtaacttgaaaaaaccaatttttatttttcccgttaaagcatttgtcggtggattatgatgccacgctgaacatttccgagtctggagtttggcatcagcaaatcctacgggtaccaaccaccatctcaaaatttaattataaggtttttgcgaagaaatcggatttggatgtccatttcccgttcaactcaccacaaaaaaaatggtttaaaaagtattttcaatgaattttgaactttggtgcactcaaatatggaatttcgctaaaattgaattcgaaaaaatggaaggcgttgaaaatggcaaatttaaattaaaaaataaatatataaacctcaaatttgtaaaccattttccttcccccccccgttcagtttacattgcccacatgggctccgctgtcgttggcattgaagtcgccagtgaccatgatcaatccgtgtgcgggccatgcgcatttcccaccaatttgcagccaatcttcagcgccgagacgggccaaattgttgcctacgaggagcggtggacg

SEQ ID NO: 1842 - DNA, 2224 bp, Heterodera glycines
aattctctatattattattttttattttttaaaagaacattcaattaaaaatttaataaaaagtttcgggtaagcggaaacgattcgttgggggaggaaacaagctgctccccgttcatttttttgcatctatttattctttggtctagtagttatttatattttttcaaaaaatttgccaaaaattgatttttaaaaatttgtaaaacaaaaaatgattataagaatatgaattcagtcctgacttttcgctgtctgtactcttacataaatacaaattaataacaaaatcggtcgattaaaaattggctaaatccttcgtcccccctacaattgttcccaattttttcagtcatttacactttgccaatcaaagcattttccaacccgagttttgcagtttacatctccattttggtgacgttgggctggtcactggcggttcgttcatatgtcgattttccaacaaaaaaattttttcccaacttttctcattagacatccaattaaactcgaactcttctatttggcgctgatcaaagaaattctgcgctgttttacaacgggacggaagtgatccgcgagttggagtgaaattagctgtgacgattttaggattaaaaaattctagactagagttttcgaatgactattgaaccgcataaaaaatattttaatcgcgagaatttttgagcccttcgctaacgaatattccctctccttcctctcttttatcggcttcatctggataagccacctgatcagaattacttgatttttaaatatgaaaaaaaattaatatttataaagtaataaaaattaaaatagtgttttgctctcaaaagttgaaacttaaacaatgtgtttttaaaccacttaattaaaaacattttcattttattgccaaaaatgaaaaaatgcattaaaaaattataaagagcaaaagtcattaaaaaccaaaatggtaggaaatagtcaaaaaagccaaagaaaaatgtatgctcaaagcttcaaatgttaaaaaatatttaaagcattttaaggctattcgagtcagcagaaaaaattgacttaaaataaaaatcaattgaccctcaaaaataatgttaaaattgtttaattcaaatcacatttcaatgttatcaaatgataaatgttcaaaattgtgtaaaatttgatgattagatcattcgagtcctggctcatcatttcctctttcctcattgcttcgtagtgaattttgaaagcgattcaaaatacactttattggaatcctcaaacttgggtaattaaaccgaagggggaaatgggggaacggcacaaaatggggggaaaaatgggggacggcacagaaatggggacggcacaatggggggaaaatgggggacgtcacaaaatggggacggcacaaaaatgggggacggcacaaaatggggaacggcacaaaaatgggggaaatgtggagaaaatgaaacggcaggggaaaacggcacaaatcggaggacggcacaatttggggacggaacgggagtggtcggctcggcacacgtcaacggcacgggacgggcggcattgagcgggcggtgtgtcaaggcggtagtcgggcacggcagggcacggattggcatggcacagaacagtcggcgcacgaacggacagggccaagagtcgacggcacgaacggacgggcggcgcagttgtcggcggctgttgtcggcacggggggaaggggagggaggaaaaggaggacgaggcaatgcctctcagaaaccgttggtgtactgattggtggggggtttgtggcctccttttataccggcagtttctgcttgaacaattgtttgccaacttggcatgtccaaatttctgtccctaacatttgccaattttactaaccttttctcattttccagtttgtgccactttagccttttccgattttctaacattttactatttctttaatatcattcaaaatttgtcccattttaacatttgtttaaaatctgttatttcttttaacgttcaaattattcataattaaagtttaacatttgacaatttttctactggaaaaattgtgacaaaaaatgactaatgatttttctttctttcaattcattcatttcgttcacatttaattaattaatgtttagctgtttaatttaaaattaatttaaatgttttttgtttttaatgtttttattttttaaattaaaaatcc

SEQ ID NO: 1843 - DNA, 1576 bp, Heterodera glycines
  unsure (1)..(1576): unsure at all n locations
aacaattgtnnttgccaacttggcatgtccaaatttctcgtccctaacatttgccaattttactaaccttttctcattttccagtttgtgccactttagccttttccgattttctaacattttacaatttctttaatatcattcacattttgtctcattttaacatttgtttaaaatctgttatttcttttaacgttccaattattcataattaaattttaacatttgataatttttcggatagaaaaaattgtgactaatatgactaatgttttttcccttctctcattccttcattttgttcacatttaattaattaatatttatctgtctaatttaaaattaatttaaatgttttttgtttttattttttaaattaaaaatcctatttcgcgtagtcgcgacattcccgcgacggaaaggaaagtatttaaaaagaagtgggtaaatcattggacatatacaaattataaatgttatcatcacaatcaaagtaaaaagtatagttaaaaaattaaaaagatttgttttgattaatgtatatatgaaattaaatatatcggaaaattgttcgagggaagttccaagtacgggtgtttcctttttgttattcgatgggttaattattttgtcttgttggctcacataattcagagtggcttcaattgttatttcactttttccatctggacatataacttcacatttttcttttacactcggttgattaaaggaaagctgaatttgctgttggttcccttttgtgtcacagggtatttgaaaattctgactatggcattttacatttgccaatgcggtaccaaagttagttgtacatgtaaatttaaattttgctccattttaatctgactttataagataaatgggaatttaagcgaaggattcatgcaaaataataatctatagaaattctcaaaaaagtagttcctcgcagattcggggaccgtttctataaagctagagacatatgcgctaaccataaaaaagatgaatcattttttgaaaaatttatatagttcgactaaatttgctaatcgatttatggtgtacaggatgtttgtcgaaacataactcgtcaggcctttaagatagacctgccattgttattcctgcaaatatggagtctagtcagcccaatcgattgctattcgaatggtttggggtcattggcccaaacaaaagttgtgctgcttcttgcaaataagacttagccaactgtaaacagcaagccatccaaatgcttcaatgtaaaaaaatttacatttggatgcaaccttcatttttcctcgcctcttttttcgaaaagaaaagctattagcaagcgtgtttggaccaattctaaaacaaatcggggtaattaatttaatctgactttataagataaatgggaatttaagcgaaggattcatgcaaaataatattctatagaaattctcaaaaaagtagttcctcgcagattcggggaccgtttctataaagctagagacatatgcgctaaccataaaaagatgaatcattttttgaaaatttatatagttcgactaaatttgcaaat

SEQ ID NO: 1844 - DNA, 2622 bp, Heterodera glycines
tttagaaacactgacagaatgcattcattggtttttgaattttgcagggcttcgattcgttgggaaccctttgaattggtttcgcagttcgacctttcgcatcagctgcatttccccttctcagcctcgaattattcttcgcaaacaaaagatggagcaaatgaaaatccgaaattgcattttctaggcatttcttttgtcttacaattagcatttgctttcctttccctcacccatttgtttaagacatggaagtgaaaaatggtcggctcaaccaacttgttgtcctgcagaactccgatccctcaaaatgtgcaactgtttattctgcgagtctttcattgtcggtgagttatacgaacctataaaagcatttggccattcgtcattatttgctttgagggattattctgtctcctctcacaatcagtttcctagcaacgtttccttccttatgtgagggaacaattacaacattcgatttactctttataaggccttttttggaatcttattatttagcaccttgaaaaatgtggcatttcgaccaattcgtgcgctgagttggaatgcatctcatcaaaaataccccaacaattttcaacgattgcacttggcagtgacttattggacaaaaaagaggaagatgacttttctcccgaagctgctctctcatcaactccaggctcacttttggacagtctcgtaattgaccaagacgaacaagacaatgacaagggaatgaccgaaacagagaccaacaaacacgaagttatgtcacgatctttgacggtgactcggattgtccgtgaaacaccctcacttcttgccgtttagaaatcttcggttcagatgccaaatagcagaagaaatgcttctctgtcgcaaagaaatggcgcttcatcttcgtctaatgatggaacgcttgtaagaagcgtttttttacagaaccagactcacaatcagtattcatgtaaatgtaataggtatttcgagatccaacgacgcatttacaaaggccgagtcggctcataatcaatgaacataaaaatgcaagccaactttgttcaaacaacaacgacaggtatttaaaaggttcccgggacatttgtcaatggacaatccagcagaaaattgattttaagaactcaatattttattccaacattaaaaataataaataaaacaaaacaattaatatttaagttattttttaaaagaaaaaaatcttttttaaaataacactatttctatagatgattgattcatttaaataattaaattgtaaaacagctaaaaattaagaaaacaaattttctattcgaacaaataatttagcaaaattatttattatggtaaaaaataaaatttactgacggattctccagaccatttaaaataacccagattaaattctgatcttaatttattattcccaacaccaattagtcaaaagccagcctcccttatccgtcgtgggagttcattacacgacatggcaaattgtgcgtcgacttccgatgctgccatcacgcataatccttcactaaatgctgttggcatatcgaaagctttcgtaaatccttcaactttttcttcgtcttcgtcgacaatgtcgtcttcaagcagcaatgcttcttcctcaaatgtctcttcatctgtagcggcaggcgacccactcaaaagacgctccgaatcggaaattcgatcattggatgaatttattcaggtcttagggttagtgtcacttacattaagttatagccaattaagattagcccgaaactgaaagcgactgctaacaaaatgaaaatcgaagcgggaactctgttgtccggccttggctccatccaactgaacaaaggcacataaatgctttttcgtttcttaaattgatttgtttttttagccgaatacattgtcaatgcagtcgcatactttgaagaacttcatatctttgccaaacttctccacgactttttgcgtcagcctcgtgaccattccctcgctttatgcgctgcctttttgccacgtcttgaactgcttcttaaacataagaacaaagaataccctccgatggcgctggacttccttgagatggtcctcacgtcgtacggcgaagcgattcgccatggtctttcatcgcgtgacttttccattggcgtggatgtggcggctgaacaacgctttgaccgatgcacaaagtgtaaaaacgcactcttgcaggtattaactaaaagccattgatttgccatctttaaattaaaatctgttacagtgaaaaagtattttttgtcaccaaatctactggttcatttttgggggcattggtcctttcattacatgtataaccaacacgcttaatttatcaagattcggatgaattcttcatattgcgtcgaccgattagacgaggaccaacaccagcgcttcgacaatttaatggctctcgtcgataatatcagtaattcattttgaggacgaatataaatacagtggcttgaaaattttccgctaattcacttaaattaggtccatttttatttaaagttcggtgtttgcttgtcttcttttccataacatttattgtttaaaggaattgtatatttgtcaaaaatctat

SEQ ID NO: 1845 - DNA, 3282 bp, Heterodera glycines
ctcagattttgaaaatcattgatttatcaacaatttttcattaactacttgatttttccaaaaacatcactagcaaaaattatttttggcctgaagagcaaaaaaaacaaacaaaaaaacggtgtcctcccaacaattttttctagatacgggcctaactaggctacacagagatttttaaaaccagtgatgcttagtgataaattggtttaaaatctgaaaaaccgttttgggccatttgacccaaaacgggtctaagaattttttttttcttggcgcttttgaatgttggccaaaatctttcaatgtgattttgtagaagacagatggggcttttaaaataacacaaaagcagtcttttccaagaaattttttgagatttttcactttttaccaaaaacggaacataattatgagacgacccaatacattcaatagctcattaattatgccatgtaatttgaattatttccttgcacataaaccaacctccgtgtctccggggacctccatgcccccagcctctcttaccacacgtttaccttaagatgcattacattttgattccgcaatcccatccctcaatattacgtttcccgtaacggttagtaacgggtttatgccatgcaggaagatacacaccgaagttttcgagtttgaatggacacattgaatggtttattgagtcgaaggctctacggcgtgcatgaattgttgggaaaacaaggcgaccggaacaataacccttttgtataaattttattaaaaattgttgcatttggaatatggctagggtacaacactcggctttctctgttttaattcatcaaaatcttaatttttcccagcggcatctatcggtaccgccgtaactcaaattttctttaaattcgacttaccccatccccagatcttttgtctcatcaattagcgttggtacatatttctcgagatatgcacggaaaatgttgtataacgagttaatctcgatatgatagtagtgcgcccctctctccccctttttttgtgacgaaaagtgattttttatgattaccctcccccatcccgtttttaaaaccaaccctcctcaaatttccatgaagtgatgtacttgctgtcaaatttacttcaacgacatcaattccaagcgaagaaaacaattgtttgagtgtatcctgtcacgaaaagggacaaattcgtaaccataaaaacaaaatcgaaagtgatccgaatgtatattttcggataatttaagaaaaaataaacattattttgtttttctaatggaccatctccataaacccgcaagtttttaaataatcttagaaaactttccatctgttgagttcaaaaataatagtggccacgtaaacccaagtgaatatgttttcttttgcaaaacatttaaatccttttttgctcacctcatccaaataataaggaacgttcgctatagccaaactgtttgcgtggtttaaatcgactttaagaagcatttcacagacagcgtcaccaagagaataaggcaagacttaaaatccattaaaaaaacattttttgtccttttcgctcttcgcccacctcttaattcgcaatttgtgtccacgttgaaacggcctagcaactgctttagcctgtttttctttcccatcttttgctatcaaaaaacacttagaataatgagaatataaggcatataatccctttgagaaagaatgttttagcagtaaaaatacggaccattccttttttagattacatttgtagtaagagaattaacatcttttggataaaacaccgagagaatgaaaagacacaattgaaattggcatactcgtcgttatttaatgagtgttgtgccagaagaactaaccataatactatgtcaattatcagaacaggtgtagccaaaaagttattaggtacgtaattaattttaataatttcctctttcgctacaacctgtccccagacgaacaaaaggaataaaacacaaagcgacagtcacacctcgaagtacccataatataataaaaggggggaaatgtacttctttcatacatcacagagcaaatgactcgactaatagagatcgttttcctcccttttgttccactcctccagtgcctttttgatggcgttcaattttgcatgaagatcagtgtgtcgctgtcgcttcaacatgaactgttggtcattctgtaggcttgtaaacttctcgcgaatacgttttacgacctgaaatattactaaatgaaggaatattctcagagactaccatttgacattctatggcatcgtttgctttgtccattgttgacttaagtgcaaggaaatcttgggctacgtgcgttaaatcatcataacagcgtcgatattctgcatattcattctaaattcgcgttttaaacaaaaattccatattcggttactttgaaaatattgtgataacgtttggcctcatcctggtttaggatcattgtaaattcccgagaccagtcccttgttggtttcgttggaatagtcattgacccaaatgagtcttccggtgagcatgaagaactgtgttggagggtgctttccacagaaggaggacggacgatgggtggcgaaattgtcttgggagtagaagtagcagttgaagccggtgagattgatggagcgccctgtaacggctttcttttgggaatgtaaaacaggtcctttttcggtgaggtttcagttttgatggtttcctttgacaatgtctcgactttggcacgttccttaatttgtaataaatgaagcatcaagaaatggaattagtttcagactttaaaaccatgtggttcgatcctttctttcgattgtgaaacaaccatctttttcggtaataattttgttgcatcctccgcctgttttcgctgtttgattggcacagacgacgggtttgttagccgattagttaaattgggcgacggactatgcgttcgtttggtggcatattttgccaagaagctattgtgagttttcacttgtcgttgggagtcgcttgctttctgagatttaggcatgtcttttgctttcttttgttgctcagcttcaacaagtttttgtgtcttttctttcaaatcggtaaatgctttagaagtcgcttgtacctgaattgcttttcattttttttttcaaaaaatgtacttttacctgcaatttagttttgatagaagaaccgacattagtataattattttcttttgggtcataacgtattgagtcagtttcggtttggttttgagacctgca

SEQ ID NO: 1846 - DNA, 1389 bp, Heterodera glycines
aaaaaaaaaaaattttttttatacgttaatcataagtcatggatataaaatgaaatacgagcccatttgatattataattcattaaaagctcatggatttatctaatcaacaagtaaacatactcagtttctcggactaacttaaaagaggacaaataaaaatttgaaaacgttatgccatttcgaatttagatgataaatagggatgcaatttttaggctataaaaaacgccagaatgcttaggtaggttttaggacctaaaaaacccacactaaaaatggaaaataggcactaaaaagcctaaattaggggtgtaaaatgactaaaatttattcaaaaataactaaatttaagccaaatcaatgttgagatatgtacataaataatttttaaaatcaaaattcttgtcattaaaataaataaataaattttggaacttcttgagaaaatttccatttctcagggtatattttcaaaaaatttgggtcgatgcttagggatatatttttcggaaatttttggggtcgatgtgtatttttcatttttattccatttttgttgaaaaattctgggcaaaacgccaaaataagtcaaaataggtttttcaattttttagcaacaaccaccaaaaaactcgttttccatgcatttcagccacttggagctaagaaaaaataggcaaaaacctaaaaaatctatatgttatatatatataagaagttagcaaataactaggtcctcaacttcattgtatttgattgacaacatgtccgatgctaaaatggaaattgaggagagtgcgacgtctacttctgttgcttcattatcagcgattaagaagcgttttgaagtagattgatacaaaattcgatttggttaataaaatatattaaggtcaaaaaatggaacgcagttgcactttgggcatgggacattgttgttgatacatgtgccatctgccgtaaccacataatggtattcaaattttgctaagttatttctgacattttacatttaaggatttgtgcatcgagtgtcaggcaaatcaggttattatatatcaacaataataattataacaattattggtaatcatcggttttactggtcccataaaaaagaggtaaaaaagagattttgaggtgctcttgggggttttcgggggcgctgaacacgaatatgacatccatttcgacctatttcgaaacccggacccgaattccaacaatttttttttgcatttttcactcggaatttgcgtaaaccttctttattgtatgtaaaaacaaactgtctatgcgctaatataatccaaatgtaaacaaaagatgaagaaataaatacgaatgaagatttgttgattgactttcatgtagcggaataaccaa

SEQ ID NO: 1847 - DNA, 4764 bp, Heterodera glycines
agaacagttgcgaacaaacatttaagcaactttggacggacgaagggcaaacgatcgccgggggcaaattgggaaaagcggcaatgatcaaagggggtaattattaacgaattaattaattgactatccatgcaattttttgattgagaatagcttaaaggcatttgtaaagccgggattctgctgggtttgccttcccctcgtcctctgtggtcattcttcgtcccttttggtattcatctgctgacaaatggacatggaggaaaaacactggtccatccacaaatatttgtttacttgagaattgaagggatttttcggatcgatcgccctttttccccttcgttcaacttccccccccccaactgctgaagtgaattccattgatgacaataaacacaaatcatgcatttatttatttgactaaacccaatcaaaatgaaactgatgccattttcgaaacaaacgaatgaatgaataaaccaacaaaaaacaaacagcgaaagttgtaaagccattgccatcaattaacaaattcacttataaataaaaatgggtcaacaaatgccaaagcaaagaatgcctccgaatatcagcgtctgcgagactatttcttctttttctgcactttttcctgctcaattggcgccggctttacaaagggaattcgttgcgaatattgcgatggcataaacggccgcaggggttccggcacgacaatgccatcctccgtctgattgttctccagaatggcacagatcactcgcgtggtggcacacattgttgcgttcagcatgtgcacataattgacctggaattgacattaataaagacctaaaagagaagaaatgcaaataagaaaccgcagaaaagctgaacccaagaacaggacaaatggtcaaggatgaagggcattatccgttttattaattgattgccggctgatcctttcgtttcaaatcactttttacctctccgtccattttcttcgtctgtccgtaccgtattcgtaaccgtctcgactggtaatctgtacagttggagcatgaaaccagctcccgaaatgcaccgctgcccgggaaccacgcctcgaggtccaatttctttgccgccgcgttgttcagttcggccgaaacaatggccacaattcggtagggaaggccgagcactttgcaaaactcttcagcattgccaatcatctgaattttaaaaagaattaaatttaatggactatattttcaaaagtccactaacttcgtccatgtgcttccacgattcgttgtcaaatggtgaacagatgacaaattgttcgatcttctcgaattggtgcacacggaaaatcccgcgggtgtctctcccatggcttccgaccttaaaaaagtgaaaataaaaggtgacgatgccacgggattaaagaaacaaatattggcagaatatacaaacctcctgccgaaaacaggtggacattccggcatatttgattggcaaatccgatgggttaagccattcgtcaccttacaaatggcaaagttgaggggagcagaataaacggataaaaatgtacgatgaaaggcggcgattggctgctcagaagttgcgattagatatttctcgtcgggagagccgtcttcattggctgcgtccgtcttttttgcggtggtcacctaaaagaaacttatacttacccataaaagttacaagcaaagtgaaagaaggtgattttgaaaagccaaaattttcttaaaatagacttaactcataatttctctagtaatggctcgggcttaaaatgggtaagaaacacagccaaaatctaaaattttgtttcaaaaatttcgttatgccctccctggttggtcaatctcaatagtaaagaaggaatccgaacattttgaaccttttgtacaccttgtaaagctcttcgtcgaattggctgagttgtgccacctcctgcattacgtctttgcgcataaaaaagggcgtgtaaagcggcgtgaagccctttttgttgagcatttgcaatgccaatgcgatgagcgcttgttcaaggaacaccaacggtcctttcagaaaatagcctcgtcctcccgccacattggtgcctctctctccgtcaaatccgtcgcacatcaccacgaggtcaacctgtttttcaattggaaaagaggaaaatgactgaaccatgagtcaaatcactgacatgagaataactttttctgcttgcgcagtcgccaaatgtccgttcgactcgattttcgtcttcattgtcactgatgggcaccgaattatgcagcaaattcccaattttggccaaatgctcatttctgtccccctcaagcgtttccattctgagtttggtccgtctgacttcttcgtccaccattcccttgactgttttaatttgcgaaattttcatttcctaaaataccaaataaaatcagtcggtacaaagaaaggttcagtcattttactttgatgtcatccattttcagttctgcaagtgatttgatttgtccttccggaatggcatcggagtcaccagccgactctttcttctaaatccgaattcccattgcaaggaattccacccaaattccaaatgcgacttttggtaatcatcggttttactggtcccataaaaaagaggtaaaaaagagattttgaggtgttcttgggggttttcggggcgctgaacacgaatatgccatccatttcaacctatttcgaaacccggacccgaattcgaacaatttttttttttttttttttgcatttttcactaggaatttgcgtcaaccttctttattatatgtaaaaacaaactttgtctatgcgttaatataatccaaatgtaaacaaaagatgaagaaataaatacgaatgaagatttgttgattgactttcatgtagcggaataaacaaaaacatcgactgtagctgggggggggggttgtcggtcatttgaatgcagcgtcgacgactcaatcacctcacctacactttgaccacccacccgtcctcattttttaactaagtttagctaatttttaagaaggttgacgcaaattccgagtgaaaaatgcaaaaaaaattgttcgaattcgggtccgggtttcgaaataggtcgaaatggatgtcatattcgtgttcagagcccccgaaaacccccaagagcgcctcaaaatcgctcaaaatctcttttttacctctttttatgggaccagtaaaaccgatgattacccaattattaacacaatgtgcgactctgtcttcctccccccacattcgattctattgcactataattccaatcacattttatgaatctaaccaatccacccctgagttttttttaaagcacaatttataacaaactaaaacaaagtcggggtaatactatagatggtgttttttgaagaaaaagtgcaatagattctggggttttcgattcaaaattacttatttggtctagtttttgtaacataaaatatatttaaattatgtacacgttaaggcttcttcaaccaatgaggagtgtactgttgcttggggcgtctgcaaccacgctttccatttccattgcatttcgcgttggcttcgtactcgtcaggttgcttttatctgccttgaatgtaaatggataatactgacgtcccctcggaattgcacaaaaaatactttcaagaatacaatcccgtgacggatgtgagttggttaggtacctttaggactaataactggggttatctatttttctgtgggtagcacttatcgagaggagcgcaaaaaaaacttatttccgcttaattttcaaagcgagttaaatgactgcttcgagaaaaaaattttgaatttttttttcgaacgaggaggggggggggtggcaccatcggcactgtaaccttttagatttttcacgtaaaacatacacgttatggctaaaaataaaggtcagattcttgatcagcatcaaaaattagcctagaaaaaattattagagaaaaaatttcaagggggtgacaaaacccggaagtacccaattttattcactttcccgaatgtatacattgaaatattttgaaatataatttcttcaggtttgtccgttggacaatcgcgactggtaagttcgtattctttgttcctaaaatttttgtaaattattagggagttccaaagatatggacattgagttgccttgcggttattgcacacggctgaatatttgggatcacgatcattatttaaatatgtgttttgttaggtacttgacaaaatcatgactttgttttttctatgaaagtattaaaaaggattcaccatatgaattcgcatttattacacattttttgaaaacaacttcgtttgttttgacaaaatactgaatatcattgataatatattttcaatgtaattaaccgataattttagtgaatagctttgctttatctaattttgcgtaaagatggacaagccaatcaaactcgcgaaagtcacgcgtatccttggttcgttttataacatttagctgatgtactctctttttaggacgtactggtagccaaggccagtgcacgccagttcgtgttgagtttttggatgacacaaatcgttcgatcattagaaatgtgaagggccctgttcgggagggcgacattcttaccttgcttgtgagcaattaaatttgttttcgtctaatgtttaacactgaaatttttaggaagctgagcgtgaagcacgtcgcccccgataaatcaacactac

SEQ ID NO: 1848 - DNA, 8848 bp, Heterodera glycines
agttattgcaccaacgatgtggaaatattgatggcagctctggtcgcctttcgccgggaattcttcgaaatttcacggcgccaagactacgttgatgggattgacgacaaggagaaccacgacgggatcgatgtgttgcgtgagtgcatgaccatcgcaggggcatgcatgcgacacttccgcacaaaccacctgcccgacgagcacttggccattgtccccgagcgcggctatgacaacgcgcagaaccaaagcctaatcgccttacgcttcttccacgggtacgccaaggagcatggagtgcaagtgcagacagcccacgcggctggaggagagaagattgggccctactccttggatgggtggattgaggcggaaaggcgcgcaattgaagtcaatggtaattgagttaattatttttcaccattattataaaatgggcaattttaaggctgtacgtggcacgggtgcaaaaggtgttaccccaacgacaacatgctgctccccaatgggaagactgcgggacaagtgcgcgaacgggattccaagcggatggaatttctgaggggaaaggtcaaccggatggacgtctactgggaatgcgaaatccatcggatgctggagaggagcaaagaaatgcgcaaggcatttgacgactacgtcgatgatggcccgctggtgatccgcgacgcgtttatgggagggcgaactggaccactgaagctgctgcgcaaggctggaccgggagagaaaatctcctattatgacttcacatcgctctacccgtacataaagtgagcacagttaaagttgtaacaaattaacattgtttccttcacagcttcacaacccgttaccctatcggacagccaaacgtgcatgtgttgaaccaggaagtggattggcgcagtgcagcggacaacccctaccctttggcactgctcaaagtgtgggttgtgccaccccgtcgcgtcgacgtgcccgttctgccggttaaagttggagagcggctttgttttccgctctgcatcacttgtgccaaagagcatccgactggtggtgtgaatcccaactaccactgcgagcacaatgacagacagcgggggtgggtgagcacgtgcacctccattgagctcaacgaggcgttggacgagggttacctcgtcacaaaggtcttccgcgtgttggagtatgagcaaagtgacgacaagctcttccgcccgtacatcgctgagtttatggcccagaagatccaggccagtgggtttgacaacagcatcagaggcgatgcggagaaggaacaacagtttgtgcgggagtgcgcagagcagttcgacatcaccatcgacccaaccaaaatggcggtcaacaaagggaagcggtccctggccaagctctgcttgaacaacttatgtgagtactgtcgtccattattattatatatttttaaaaaattagggggtcgattttcgcttcgcaactttgggctcgctcaaacactcatcactgacgacccagcgactttggcggagtacctggacaacaaatccatcgaagtgacatcaatcgacgagttggacgagcagcacatactcatcacctatctgcagaagaaggactgggtggatgagcactcatgctccaacattggtgagacacacacactcacaataaattgttaatttttataaaatttcagtcatttcactatggaccacctcagcagcgcgcctcgttctgctcaaggcaatgcagaaggtggtcagatcaccgggctcggatctgttgtacactggtaagtcaaactacaaaaaaaattttgtgcacaaacatttattttagacactgacagcctcatcctcgtccacccggaggagcggtgcccgctgaaaactggcccccacttgggccagttcaccgacgaataccccgaccacgacattgtggaattttgcagtggcggagcaaaacaagtgcattttcagttcatttttgtttacttcaattttaccaccttttagtacggtctttgtctgcgacgcaagggcgcggaggcgggagcccaattggaacatgtgctcaaagtgcgcgggctgacgctaaattatgatgtgatcaacaaccaggggatgcgctatgagaacttcaaagaggaggtggtccgttacgcgacaagtggtgaatacgagccgataatcatcacataccccaacttccttcgtccaaacatcagggagggaggtcgggtggtttccatgcctatgcaaaaatgctatcgcccatttgtgggaaagggaatcatcggggccgatttcaatgtgctgaattttggacacacattgtaatttgtacattatctatcacacacacacacacacatatgactgtttcttttgtacctcaaattgtgtacattttatgccattttattagtttttaataaaaatttgtgcattattagtgaatggaagatgcaattatgaaataattaagcattagaagatgtcatttttaggtagaaaaagtgcataattaagctaaagaagacacaatttttgaaaaattaaggaatgaaaaatgcaatttcaaattaatagatggaagtggtcattttaaggaagaaaaatgcataattagtgagcaaaaacaaaactaatataacggtacagtactctgtgagcattcattgcgtccgctgtcttcatccatgtctctctcaaatattaggcgcgttgttgtgtcggatgagtttgacgacgattgtttgtcgtcaatttcagtgaaaagacggcccagccaatgctcgttgttgttgatgtccatgtccatgttgtcatcaatcagctcaagaagttccattgggagtgccgatcctcccctccccccgaaaagcgttcaattatgcacggtgcatacgggaagtgaagctttatgcggtgccgtgcataaaaatgtgccgccacattgatgttgaacgggttgcgcaattgcccataagcaggaagaaatgcggcgccttgtgccgaaattccagtgacgaagaaagttttggtcatcccattacggtcgttgtaggtggtgcgcgctttgcgcccaatgatgtgtttcagcacaagcgcccgatcctctgggtggttgagccggtcgcgcaatgacttgacagggcagttgagaagctgagcgcaaaatgtgcttacaagaaccatggcaggagaatgaaagtgggatgaagttgaaaaattttacttttatttgcgcaaaagtgtggccacgcctacactatttgaaaagagtcacggttttagacatgcccgcccactaaaagccaaaacattttgcctgccaaaaacccagaatcattttaccaatttttgtcaaaatgaaaagacgcattgctcctcttactactgctactgctcctgctgagcaacataaaataattggtcccgagtcgcccaagccacatgaagagacggccaaaaatgttgagcctaaggatgagttggcaacgaagaaacgcaaagtggacgaccgagagttgtggaaattggcaaaaggcaaatttttgctgaccacctatttgtgccatggtaataattaataacaatttcatcaaattttaatttgaatccataaattttgagatgattggaatcgtctgtacaacaaccagcagaaagtgaagcgcctggagggggaccgttttgccttcggctttgagatgtgtgaggaatgcgtgtgggccaactgccgcgcaaccgaccttttggcgccaatgaagaaaaagtgaactttgaccaaaagacaataatggattttgatgatgcaatccataatttgaattaatatttaattctgcacaataaacattttttgagacagtccctcaatttccttttttgtgtttgcttcagatgaaatctggggtgatgattaattggcttgccgaatttgaatctggcaaagacactgaggggggggggggggggggagggggggcacatggataaggacaaagcgagtggaaggaccattcatgtcttattacacaaaccctctaaaatataaaatgtccccgcgcaaatcttcaattgcaccatcgctggttggaatagcaagtaatatagttttgtcaaaaaaatttttgaaccaaattgttctgttgaaggatgcggcgagtgccattcggcccggtgcagggtgtgcgaaaaactgagggaacggaattgtgaaaggatgcgcatgggacaaccctacggtcgcatcagccgcgagtttgggccactgaccagagaacagcagctcagtacaacggcagcgcgcaacccaatggaagccgcacttcaagctggtagcgaaacgaaagccgtatttcgttgggggggacccattggcacttgtccagttccccgccactttgttgtacccaaatataggggggatgtgcttgtgtactatagggatggcgcaattctttggggcctgtgggcacgttggactatgccgtcagtgtttgattcttcatttaaaaatttcacccagtcctgataaatgtccctattgtcgagtgtgcaccacattttacatggaacattaaatatttgtcaaatatttttttcaatattatattttgaataaatgtacgaaaaaatttatttttaaatgatgaaaataaatggtgaaattaaatggtgaaataaatggtaaaatttaaatggtgaaatttaaattgtgaaaaggttcaattcggccggccagtgcactcatcactcatcagctcatacatttggccacgaagcgtcccagtttactcttggccttaggaaaggaatttttttttaaaagtgcatttgtgtgccttacatcctcaattatggttttgccctcggggctttccataagcccttttgcgaacaaaatattatactgagttgtcctcaatatgaattcatcttcaatgtcatccaactttgccaacactaacaaaaaattatgcaatttttaattcccctcactctccacaccttgtccaaatttagggttggcctggagctcatcagctatcgaagctgggacgctttcgcccaatagcgcaaacagtacagcatcgactgttgccacggtcccaaatctttcaatgtactctgtacagtcggtgtcctcggacaaacaccatgagttgcggccgcggtagcctaaaattgcgagaaaaaatgagagaagaaaatgggttggtgaatggaaaaggaaaaagaaaatttaaagtgaaatagcacgagaggtagcgaagctaaactgcgttaactcggcatacaccctcaaattattccgttccgaaagtggcgaagctaaaccaggttaactcggcacacgtttggaattttacaataaattttcaatttccttatccatccgtccaccttttcattcacacattttttctttcaatttcatcatcaaactcaccgagccactccaagaaatagcatttcctccccgatgcatgagtgaactgtgccaacacgctcttgacctggtactggcgcgattttgggttcggcagtacaccgggcggcacatttgggcaatcggcattcacatttatctaggaagtgaatgtgtgtgtgtgtgtgttgtgtgtgaattttcaaattttttcttaccggtacacgtccacttttgttgtaatttttcctctgtcttctggaggcatttgacgaagtggaagacagtgcgggcgacgctgtgcgcgagactgtgctgcgcgagccggacgatgtaatgcgttgattggccaccgcccgccgcaacaatttgttccccttcaaattaaaggaataaattttttgaaaaatcttgtgaaaaattaccgcttgcccaattgtgtcgtcattttcatccgcttccgccgcaattggttgtccgccattgttgtttgccgccaactgctgaaaagatttaaatataatgagaatttattaaacaacactggcccaaattttttccaaattaacaagttttttttcaatttagatgtcataaaatattcatataccatccggtgaatttttaaaccaaaagcgcccgcccttagctaacgaaaatacaaaaattgtacttgtccgccggtgccatcaattgctgctgctgccgccaccgcatcagttccgtcgttctccgcttgttggacggtgccattgtttgtcactggtgctgctgacgccaattgttgtccgtcattcgttggcaactgtgaaaataaaaagcatatgaaatttaaatgtgaaaatttgatggtgaacacaattcacctgtgcgctcggtccgttcaccaccgcttcgtcctgcccgaccaattgagccgcctttcttttgcgtcgtggtgccatgaaagtaatactgtactatctaacaaaaaataaataaataataaataaataaaacaattccattataaatttaatggtataattatgctaaaatgagcccaatttatttggagtatcgaatcaatatgtcaatggcattggtcagcgccccccttctccattagcaaaagatgatgctgttttggttctcaacccctcactttgtgcacaaaatttttctctgactgtctgtctctctactctctcacccaatgtttgtttcttctctctctatctctctctctctctcaccgtttcactctctcacttttgcatacactcttttctctttctccacgcgccgccgttcctcgctgcagcgccgctgaccaccagcaccccccccccttccacacaaataattaatcactctcccaccgccgcaacacattccattggcacaacttttttttaccaaaaaagtttgtgccccccccaatacatcaaaagttttttccatcccccccccgtccttgtcaaaaaagtttccactccaccagcacttcaaaagcgacgccgccttccccccgcccgtgtgccacaggcacacgcgcggtaaaaccgcgcgccgcctcactcgcaccccctcccaccccccgaacccgtgccacaggcacgggttcgcgcggtaaacccgcgcgcggcggcccgagcgcggctatgacaacgcgcagaaccaaagcctgctcgccttacgcttcttccactggtacgccaaggagcatggagtgcaagtgcagacagcccacgcggctggaggagagaagcgcattgggccctactccttggatggatggattgaggcggaaaggcgcgcaattgaagtcaatggtagctgaattttatgcacaattattttaaaatgtgctattttaaggctgcacgtggcacgggtgcaaaaggtgttaccccaacgacaacatgctgctccccagtgggaagactgcgggacaagtgcgcgaacgggatgccaagcggatggaatttctgagagagaaggtcaaccggatggacgtctactgggaatgcgaaatccatcggatgctggagaggagcaaggaaatgcgcaaggcatttgaagactatgtcgatgatggcccgctggtgatccgcgacgcgtttatgggagggcgaactggaccgctgaagctgctgcgcaaggctgggccgggagagaaaatctcatattatgacttcacatcgctctacccgtacataaagtgagcacagttaaatttgtaacaacttttaacattgtttccttcacagcttcaccacctgctaccccattggcactcccaaagtgcatgtgttgaaccaggaagtggagtggcgcagtgcagcggacaacccctaccctttggcattgctcaaagtgtgggttgtgccgccacgacgcatcgacgttcccgttctgcctgtgaaagttggagagcggctttgcttccccctgtgcatcacttgcgccaaagagcacccgacaggaggagtggacaacgactaccattgcgagcattccgacagacagcgggggtgggtgagcacgtgcacctccattgagctcaacgaggcgttggacgagggttacctcgtcacaaaggtcttccgtgtcctcgagtatgagcaaagtgacgacaaactcttccgcccgtacatcgctgagtttatggccaaaagatccaggccagtgggtttgacaacagtatcagaggcgatgcggagaaggaacaacagtttgtgcgggagtgcgcagagcagttcgacatcaccatcgacccaaccaaaatggcggtcaacaaagggaagcggtccctggccaagctctgcttgaacaacttatgtgagtactgtcgtccattattattatatttaaaaaaaaatagggggacgattttcgcttcgcaactttggactcgctcaaacactcatcactgacgacccagcaactttggcggagtacctggacaacaaatccatcgaagtgacatcaatcgacgagttggacgagcagcacatactcatcacctatctgcagaagaaggactgggtggatgagcactcatgctcaaacattggtgagacacacacactgagcattcattgcgtccgctgtcttcatccatgtctctctcaaatattaggcgcattgttgtgtcggatgagtttgacgacgattgtttgtcgtcaatttcagtgaaaagacggcccagccaatgctcgttgttgttgatgtccatgtccatgttgtcatcaatcagctcaagaagttccattgggtagtgccgatcctcccctccccgcgaaaagcgttcaattatgcacggtgcatacgggaagtgaagctttatgcggtgccgtgcataaaaatgtgccgccacaaagatgttgaacgggttgcgcaattgcccatatgcaggaag

SEQ ID NO: 1849 - DNA, 1856 bp, Heterodera glycines
aaataatttattattgagagggaaatggaaaaattaaacatttttatagtcacaaaaaatggaatgaaaaataggcaaaaaattacaaaatgaaaacgaagaaaaaaaaattcaaaaaaaaaaatagtataaaagtggttgctccaccgctattttcattattattttttcattcgtttatccatgataatgcgttcaaatgcttttctacatttacccttatctgaattttaattgtaaaaaacccattcgtcttaccattataaatttagctaatatgagttgcttatgcttatcttcaacaaaatctgcgtctgccgctgcttcctcttcttcatccatcgtcattggtgcaacaactttcgtcaccgtcgaaacttctgtgcgcaccgctggaccgtcgtttcagttttattatgaagttttagtggcgtagatcgatggggtaaattatcaaattaaattatgaatccatgggaaattttaatcttggcaactccggccaatggtaaagagattgatatgaacaaatttgtgagcaaaaaagtacacacacatagcacatatagcatatacaataatagtgaaatgacaattttctggatcacaaacattaatatacaaatacaatacaattagtgacaatacaatatgtaaaggtcagtttatttcctcgccagaacatcgcatcgtttaaaggtatttgtcgataagcatgtttgcggagttgctcatcatcgacgatttgacggcctggctcatctgcgttttggctgccgcctggctcatctgggttttggcggtgcccttctgcttttttgccacggcgtccttaaaaaacggaaatcatggtgatcaaatagaaatttggtacaccaaaacatacgcttagaagcagatgccgtgccagttgtttgagatccatgtccacgatgttggtgtttcggatgtgtcgaagtgccagcaatggaagacgacgttccagcagtgcgcacagtgccacggcgtccttaaaaacgaatggtgaatgatcaaatagaaatttggtacatcaaacatacgcttagaagcagatgccgtgccggttgtttgagatccatgtccacgatgttggtgtttcggatgtgtcgaagtgccagcaatggaagacgacgttccagcagtgcgcacagtgccacggcgtccttaaaaacgaatggtgaatgatcaaatagaaatttggtgcatcaaacatacgcttagaagcagatgccgtgccggttgtttgagatccatgtccacgagttggtgtttcggatgtgtcgaagtgccagcaatggaagacgacgttccagcagtgcgcacagtgccacggcgtccttaaaaacgaatggtgaatgatcaaatagaaatttggtacatcaaacatacgcttagaagcagatgccgtgccagttgtttgagatccatgtccacgatgttggtgtttcggatgtgtcgaagtgccagcaatggaagacgacgttccagcagtgcgcacagtgccacggcgtccttaaaaacgaatggtgaatgatcaaatagaaatttggtacaccaaaacatacgcttagaagcagatgccgtgccagttgtttgagatccatgtccacgatgttggtgtttcggatgtgtcgaagtgccagcaatggaagacgaagttccagcagtgcgcacagtgccacggcgtccttaaaaacgaatggtgaatgatcaaatagaaatttggtacaccaaaacatacgcttagaagcagatgccgtgccggttgtttgagatccatgtccacgatgttggtgtttcggatgtgtcgaaggtgccagccaaatggaagacga

SEQ ID NO: 1850 - DNA, 1196 bp, Heterodera glycines
tttgagatccatgtccacgatgttggtgtttcggatgtgtcgaagtgccagcaatcgaagacgacgttccagcagtgtgcaaagtgccacggcgtccttaaaaacgaatggtgaatgatcaaatagaaatttggtacatcaaacatacgcttagaagcagatgccgtgccggttgtttgagatccatgtccacgatgttggtgtttcggatgtgtcgaagtgccagcaatggaagacgacgttccagcagtgcgcacagtgccacggcgtccttaaaaacgaatggtgaatgatcaaatagaaatttggtacatcaaacatacgcttagaagcagatgccgtgccagttgtttgagatccatgtccacgatgttggtgtttcggatgtgtcgaagtgccagcaatggaagacgacgttccagcagtgcgcacagtgccacggcgtccttaaaaacgaatggtgaatgatcaaatagaaatttggtacaccaaaacatacgcttagaagcagatgccgtgccagttgtttgagatccatgtccacgatgttggtgtttcggatgtgtcgaagtgccagcaatggaagacgaagttccagcagtgcgcacagtgccacggcgtccttaaaaacgaatggtgaatgatcaaatagaaatttggtacaccaaaacatacgcttagaagcagatgccgtgccggttgtttgagatccatgtccacgatgttggtgtttcggatgtgtcgaagtgccagcaatggaagacgacgttccagcagtgcgcacagtgccacggcgtctttaaaaacgaatggtgaatgatcaaatagaaatttggtacatcaaacatacgcttagaagcagatgccgtgccggttgtttgagatccatgtccacgatgttggtgtttcggatgtgtcgaagtgccagcaatggaagacgacgttccagcagtgcgcacagtgccacggcgtccttaaaaacgaatggtgaatgatcaaatagaaatttggtacatcaaacatacgcttagaagcagatgccgtgccggttatttgagatccatgtccacgatgttggtgtttcggatgtgtcgaagtgccagcaatcgaagacgacgttccagcagtgtgcacagtgccacggcgtccttaaaaacgaatggtgaatgatcaaatagaaatttggtacatcaaac

SEQ ID NO: 1851 - DNA, 936 bp, Heterodera glycines
  unsure (1)..(936): unsure at all n locations
agacgaagttccagcagtgcgcacagtgccacggcgtccttaaaaacgaatggtgaatgatcaaatagaaatttggtacaccaaaacatacgcttagaagcagatgccgtgccggttgtttgagatccatgtccacgatgttggtgtttcggatgtgtcgaagtgccagcaatggaagacgacgttccagcagtgcgcacagtgccacggcgtctttaaaaacgaatggtgaatgatcaaatagaaatttggtacatcaaacatacgcttagaagcagatgccgtgccggttgtttgagatccatgtccacgatattggtgtttcggatgtgtcgaagtgccagcaatggaagacgacgttccagcagtgcgcacagtgccacggcgtccttaaaaacgaatggtgaatgatcaaatagaaatttggtacatcaaacatacgcttagaagcagatgccgtgccggttgtttgagatccatgtccacgatgttggtgtttcggatgtgtcgaagtgccagcaatggaagacgacgttccagcagtgcgcacagtgccacggcgtccttaaaaacgaatggtgaatgatcacatagaaatttggtgcatcaaacatacgcttagaagcagatgccgtgccggttgtttgagatccatgtccacgagttggtgtttcggatgtgtcgaagtgccagcaatggaagacgacgttccagcagtgcgcacagtgccacggcgtccttaaaaacgaatggtgaatgatcaaatagaaatttggtacatcaaacatacgcttagaagcagatgccgtgccggttgtttgagatccatgtccacgatgttggtgtttcggatgtgtcgaagtgccagcaatggaagacgacgttccagcagtgcgcacantgccacggcgtccttaaaacgaatggttgatgatc

SEQ ID NO: 1852 - DNA, 3055 bp, Heterodera glycines
tttgcggagtttctcatcatcgacgatttggcggcctggctcatctgcgttttggctgccgcctggctcatctgggttttggcggtgcccttctgcttttttgccacggcgtccttaaaaaacggaaatcatggtgatcaaatagaaatttggtacatcaaacatacgcttagaagcagatgccgtgccggttgtttgagatccatgtccacgatgttggtgtttcggatgtgtcgaagtgccagcaatcgaagacgacggtccagcggtgcgcacagtaccacggcgtccttaaaaacgaatggtgaatgatcaaatagaaatttggtacatcaaacatacgcttagaagcagatgccgtgccggttgtttgagatccatgtccacgatgttggtgtttcggatgtgtcgaagtgccagcaatcgaagacgacggtccagcggtgcgcacagtaccacggcgtccttaaaaacgaatggtgaatgatcaaatagaaatttggtacatcaaacatacgcttagaagcagatgccgtgccggttgtttgagatccatgtccacgatgttggtgtttcggatgtgtcgaagtgccagcaatcgaagacgacggtccagcggtgcgcacagaagtttcgacggtgacgaaagttgttgcaccaatgacgatggatgaagaagaggaagcagcggcagacgcagattttgttgaagataagaataagcaactcatattagctaaatttataatggtaagacgaatgggttttttaaaattaaattcagataagggtaaatgtagaaaagcatttgaacgcattatcatggataaacgaatgaaaaaataataatgaaaatagcggtggagcaaccacttttatactatttttttttttgaatttttttttcttcgttttcattttgtaattttttgcctatttttcaattccattttttgtgactataaaaatgtttaatttttccatttccctctcattattaaattatttccaataagatttttattcattcatttcccaaattcattttcattggtactttgtgtctcttctgttggtcggctgtggcaccattctttggttcttttgggacaacgtcaaaaaacgacgacgccccaacaaaaaagaaatgtaaaaaacaaaaattaaattaataaatcttcttttttttcagcttcatctctgccgactgttggctcgaagtgttcgctttacttccgccttctcagcttggcctcggaatcgctctgatcagtcgccgattttaccgccgcgtggacaaacatttcaaagaacgcaaatggatattggacaccgaattgcgaattcaagagaaagagctttggtttggcaggaagcaaatggaaattgtcaatgccaattgaagcgtttgccaatcccacaaaatccgttgcccaacaaagtcatcggatttaaacacattacgttcatgtaaaattgacaagtttcccattggtttgagataactttttcttgttttagttacttcgaccacaatattctcaaatttgtccgccgttttcaccgctttttcactttaattacaacatctttaggcattatgagtgaaaatgttcgcatttttgagttcttcctgtccaccatttggccaatttttggtgactccattcaattaatgtggttgaccacttctggtttccgtcgaatgcgccaattagtcccgtccattctcaacgactgtccatcccttcgtttcgtcaccttcaataatttccgcccgatggcagtgccaatgcgacggatggtcaagtggtggttaaatgtttgttcacgcctcgttcgctaaatttgctgaatttccggaaaaaaccgaaaaaccaaaatacttgatttttaaatttttgataaattttctagatttttttcctaaaattagaagaaaaaaaaatttgcggcgacgtttcggcggcgggcgacgttttggggtgtacccgggacggacggtgccgaaataaaccggcacaacaatggcaaaggcaagtgcgccaacctgatgacggaggatgaaatttggtcaaattttgtgattatctagttgatgagatgggacggattaaggaattggcaaaatgatcgattgacgaacaagacaaatttgttgacattttgactggcacatcaaataaaatggcatttgttgtaatattgtaaagagaccgagaaaggcaaaaatcagtaactaaaagaggaggtggacttcattttttttaaatttaaattaaaccaaagttttttcaacagaaacaaaattatttataaattatataaccagtttatcagttaaaaaattttgaacgctttttaaaactgaagctgagtttttagcaagtatttacccatttttgtcaactatttggggtttttttaaaaagtaaaaactaattattttggcagtttttagcaactataaatacaaatgaataaaaatacattataaaaaatacaaatatttcattggacaaattaaacaaaaagatgaacaaaataataaacaaaaggacatcgccacaggcattaagtaaatttttaattgtttatatgcatttaaattaaaatttgtcaaaattttttttttgtctattaggggagaaatatttttgtacttttagccaatatcttaaaaattaaaaaaaaagatacaaatttgccgattggaaattggccaactgatcagctgcagagacagatcacccactgattgacagatcacccactgatcattaatcactgatctccccttttctctcatggatggccatcaaatggcacgaacacatggattagggatgaagcattgtccaagagcggacttggactcaatttcattggcggctgttctccgactggcaaactcttgaaccgttttggcgacggtggtgttactccagcaactttatagtgcaagcagtgaacttcgtccacccgaatgatttctttggtctccggcttactgtagccccaaaaacttacggtacctccatcggccttctgtaaa

SEQ ID NO: 1853 - DNA, 1969 bp, Heterodera glycines
  unsure (1)..(1969): unsure at all n locations
ttcgggatgccctaggatgcccttcgggatgaaaaacaataagaagaatgccccgggatgcccttttggatgactgtgaaaatgcccattaggatgataaaatagtgaattttgaatgcccttcgggaagacaaaaagtgaaaagatgcccttctggatggctaagaaaaatgaccattaggatgataattagtgaaaataaaattcgaaatgtcatgaaaaaaaattgaattgaaattaggaatactcttcgggatgaaaaatgaaaatgcccttcgggaagacaaagtgataaattgaaatagaaatggaaaatgaccggaaaaaaatttgaaatcagtcaatccaaaaaaaaaaaagtgaaaattcaaatgtgaaattaaaaacttaaaaaaaaaacggaatacaaaatacagtaaaaatacagtaggtccttcgggaagccaaagagatgattgaaaattacatacaaaaaaataaaaataaagaaaattataaaaattataaaaattaatttaaatcatatacagtatacaaaagggactacagtactcaaaaaaaaagggggaattttgccggacatgttgatgagcaaagtacgctcacagcttgcgttatcgttttggcccatctgctgagaacattgctcacttaacgttagcactgcgctctctctctttcttcccccccccccggcgctgctctcttttgtcaatcggaagatctgttgcaattcgtagcgtcttttcacattcatcccttcttcgttgctcttccttcttccccccccccccccggcgatgaagggcggaggatggcgtcgcttggccattcatttatgagacgccaataaatatgcggatttgcagcgcatttttcattcttcactaaacaccatccttcattttgtgtcattcatttacgtcccatttgttaggaatatttactaatattttcaatgtatattaatttgtttttttcattttaggcattcaaattttcaacttctaacaccaattaactcttcacttcaaatcgttgaatattggactcggcatcggcacacttctgacacaactcaacaaggacaattggcaaggacattgcgcttcggcatctctctgtgagtttacagtaataggtactgtactaattaagaggggaggatttctcaagcctttgggacccttattggactaaaaaatggtgagacttcttacaattcgtaagtcttattaatcctggtaaccctaaaatttggccaaacaaaaggtgccttttacttaatagtctctggtgataattcgactctcaaattgtaaattagtggggtccaaaaggggcataataaatcatttatattgtgctttgtgaattataggggttttaactacggtaaaccgtatgtcaagtaaatgacatttattgatatttcgaatactgtttcgggttctaccttttctggactctgctggactgtgaactgtggactgaattagcgtttgcttggacagtttggacggacaattacgcattgcttcggcatttttctgtaagtccaacagtactgagcatattgtaagttatgaattaatttttcaaatgtaagctaattaaatttattgatcgcgttaattaattaattattacagattcctaaaaccacagtaatcaaaattgggttaatcttttcaaatgtacagtaatttccctatgcttttggttttctttggtcaaatttgagtattattggttcaaaaacgatgagttagcaataaaaagagtaactgttgacattttatgattaatgttttacttttaaccacagattcattaattcgaatgtgacattaatttcaattattaatttctgtgaataatttcaggtttctgttcgcatctgactgataaatcggactttgttgtgagccttgacatctacaaattgcctttgaagcccanattaagt

SEQ ID NO: 1854 - DNA, 1066 bp, Heterodera glycines
  unsure (1)..(1066): unsure at all n locations
agcgagagaagagatgatgtgtaggtgtctcatagaaanagttagaccgaaatttcagcgttcattacagcttgtaggaccacttattgggagaaaggactttcagaaactgacagcatacattcaagagttagaagtctcaattgaaagggatgtgagaaatgagagcttcggcattcacgcacttaatacaaatcctagtcaagttccacaaggcaaatttaacacatggggaccttcgaacccctaacaatgttcaacttgggcacagaacatttagaaatgaaaatcgtgatcagtcagacaggagacccaataatttttcacagaacaatagatacaatcagcaaaggagggattggggcccacaaaatgatagaagatggaacaatcgacccgtctgtcattactgtaagaaaaccggacatgtacaatacaattgcagggagagacagaatgatttttctgggcaatttaacaatcggaatcaaacacgatggcaacctccgccacaaaattcaaatagggacaattggtacacaaatgagtcaaaacaattaaaaaatatggtagaagacttagcagttcaggtgcattaaatgaaaatgaataaaaattacgcttcggcgagccaacagaacattaaagcattacaaatgattcatacaaatgaagaaatacagaaaattgaaccaaagaaaaattttgaacccaaaagtatttcaagttgggagaataagcaagggaaatccaaaacattttcaaacattttaatgacaattacgcttttaaatattttaacaactgctataggcaaacaacaaattttaactgtagataagcctatgatttgccaaacacaaaagcaagcaatgctttgggagctaccaattattcaggggtgtccgacaataaggttaagtgtagataattcacctattcctcaaaatcgtcagttgtttatccccaacagcattgaattttcaacaaaagcttgggcttgtaggaaaattaagaaaactgttagaaaatataaaagactaacaggagtaccgatggaagagaa

SEQ ID NO: 1855 - DNA, 2140 bp, Heterodera glycines
cttccattccttctaaatcgcctttatacatcccattatgagcgctaaaattatcagagtgccgaaaatcgcatgtgatctaagcctagaaaaaatggtctaagtaaaaatcgtaattacgctcaaaaagcttcttaaacaattttagcgcttccaattccttctacaatcgcctttatacatcacattatgagcgctaaaattatcagagtgccgaaaatcgcatgtgatctaagcctagaaaaaaatggtctaagtaaaaatcgtaattacgctcaaaaagcttctcaaacaattttagcgcttccaattccttctacaatcgcctttatacatcccattatgagcgctaaaattatcagagtgccgaaaatcgcatgtgatctaagcctagaaaaaatggtctaagtaaaaatcgtaattacgctcaaaaagcttctcaaacaattttagcgcttccaattccttctacaatcgcctttatacatcccattatgagcgctaaaattatcagagtgccgaaaatcgcatgtgatctaagcctagaaaaaatggtctaagtaaaaatcgtaattacgctcaaaaagcttctcaaacaattttagcgcttccaattccttctacaatcgcctttatacatcccattatgagcgctaaaattatcagagtgccgaaaatcgcatgtgatctaagcctagaaaaaatggtctaagtaaaaatcgtaattactgtaagagagagagtcgaagttgtagggttttaactcgtttaactgccgaagctctaggatttcactattttcacatttatttctttttgcatttaatttccccttttactaattgtaccgccctcccagcgataattgatcgatgacatttcatttttcacttgtatttaatgttcgccttttcaagcgaacggggttcagttgtcccgagaataaagccacttattgtgtgaccagcgagtgtgggaaggcaaccccgggcttgatcaccccgtggacccatccttcgggaatatgtggcacctttccctttccctccccattccgaattccaattcccaacgccagcacgtccaccgcgctcggccgcgctactggtagcaccggatggttcacttttgtgaacttttcatcaacctgggcggaagaggaacagcgaaagggaggtgagtttgagtgagggacactgaggaggcgcctggtgtgatgaaaaggagaaaaagaaaaacgcttcggcgatttaaaatgcccccggggatgaaaaatggaaaaaaaggcactaaataagagaaaaatgcctgcaggtgagacaaatatttaaatgcccccggggatgaaaaatgaaaataaaaggcactaaataagagagaaatgtctaattgttgcctgcagatgtactaattgccgatggcagcacaaaataaaacgcaaaaagtgccaataattcctgcgaaaaatgcctgcagatgagacaaataaaaaggcaaaaattatgcttcggcagtttatatccctccggaggtgacaaaatacaaaaaaaaaaggaagaaaagaacaacaacaaaaagaaaagaaattgggcataataaataaagagcaaacaaaattagaggaaaacaattcataaaagcccacagaataaaaattggcttaacaaatcctaagcgccaacagagaaagaaaattgagtttaagaatcataagcgccctgaaatctcattaaaaaggaaaaactaatatttttagcagaggacaatgcctgcagatttagcaaagtcaaaaatagtagaacaaaagcaaaacggaaaaaggagagggatttggcttcggccgtaaatgagttaaaataatttgggactagcaaaataaaaggtcgaattttgtgactcaattatcatataaaatgacttagaaaaattacgaaatatgcttcggcagttttacagtcaagagtgatttgaaatttttggcaatcctaagaaaaagggcttattacagtactccttcgactacggtaaacaatttggttgttcattcaaagtccgccagaggcgttaaaatgggactctgcccccccccccctcttttcccttccatcttttccgtctgctgctcttcacacaattcgct

SEQ ID NO: 1856 - DNA, 7718 bp, Heterodera glycines
tttatttagcaaaaagcaattactttcaacaattttcttcaatcaccacaacggaaaaagaggcatcagcagcaacagacaaaatcggacggaacttgctggtggacattcgacgggcacaccagcaaccagtatgtttaaagggtgaatgaccgctaattgggacggtaactgggactttgcccattttagtggaactttgaaattgagggaaaattagtggcaattaattttcagagtgtttttttttaggcgtcagtccttcggcatttttttggcaacgagcaacggctctgtgcttcggcggactcaaagcgaattctgaaggaagtccgaagggcggaatatctgaatcggtatttcggtgggttttgaatttaatgctgaggaagtggacacttaaaatgaagggtaaaccatcccaaaagcccaaaagttgcttttggaattcaggagaccaaaattttgagttcttccttgtctagctttgcaatttaagcacagtcttggcatttcttttagtctttcatgttagacacttacagtatactgtgagcaacctaaaatttgtcataaaattagtcactttttcagcaagtttggttgattgaaagacacattaatattatttttaaattgttaggcacatcgacggtgcgttcttccccgcttcggcgatttctacggatctgtgctgttcgactacgtgtgatattggactacagtgatcagcgatcagtgacaagacagtacttggcagatcggtgatcagaacgacttgtgagtacggtaggagaaatcaggataagaaatacgaatgagttaagcttatggcctataaattgggatgagtcgatttttttggcacagcaaagcggaaccaaaatcattttaccattctattcataagttttggttttgttttgtaattgggcgacaaaactgagtcgccaatctcttgtcttatccatgttaagccttatgctttaaacagcatcaattagtgaccaaaattcatagcaaatcatttaagttcttataataataattgttcaagttaaggcgcttggcgaatctgagtaagagagctttgagtgtggtgcggaccatcaactgtgttcaacgcttcgacggcccaaaagtgtgacacatttcgcattgtgtgaaaactgtgagtatgagtggaaattgtattacgagggccgaacattcagctttgcttaacaaacaatatgcttttcatttgattaaccaaataaactgcgctatgcttttaattaattgttaaacactaatgcacttttatggtccctaaaattttggaaaataattagtatttaattgatctgatgtgtaaatgccggttaaattatacactcttggtacaattgaaggcgtttaggaacattgttttgttttggatttcaacaaatcattttggagaattacaggtgaagaacgacatcagtggtgatcaaacgcttcggcggattcaaagtgaacggacaaagctgactgatcgaacggacatttgacttctgtgggcggacaaagtgaatttcttttcttctattaatcaattagacaaaaataaacaccaaacaaaaccaagtaaaataaaaagggggaattgaaataaaaaggggatcagaatcaaaaattaggtttgcttcggcagttcaaaagcatggagtacacagaccttgcggtctgtgataaaaggcttatggaaggcaaacatatgactgcgcaggcaaaaatcagtgacctttctcgggtccatgatgatgttattggtttagaagaagggatcaatcgaaacctgagggctataaataggaaagtgactcaagtagtgggccgagttagtgacatcgaagccgatgtgaatacaggttttggtacaacagcggcaagggttgacacacttggggaagtagtcatgggattggaaagcaaatttgacacatggaaaaatgagcttgagttgagagaaaatatggaattcgatgaattaaatcgaagcagtggggttcagaaaatcttaagcttaggcaagcagttgacttcgccaaggcctatctttccgccaaccccacccccaactcaaaatgcaattaatagctttggcatctttcaaagtacctctaatgtacaaaattcgaataataccgcaggcgatcctgcaaatggctccatgactaatcagtcgagactcatttcaataaatgagtcaggggaagaagatgatgtagatggtaacctgaatgccctaactgacatgaatacgtccagtacacagcctggagtgttctgtggtgaactcgcttcggcatttgatgactgggaaattaagtttagggattatgtggatgtttttggttcggcttggagtgaagcagataagttgaaccgacttaaattgcacttaggtgcgcaagcaagaactatttttgagaatttatcgcctaatgagaaaaataatttggcaaatgcactcaaaaacattagatctaagctggatagccctcactttagagaattggcttataagaaattagctgcatgttaccaaagagagggagaatcagttagtgagtttgtgaagcgcttggttcctttagtgcacacgacttcggtccatattccgtctaaggcgagaagaggtcctctgtcggtgtctcatggagaaagtgagacctgagtttcagcgatcgcttcaattagttgggccactcattgggagaaagagttttgacaaactcacagcatacattcaggaattagaggtgtcaattgagaaagacactagggacagcttcggcattcatgccataagtgggaacactgggcaactacctcaagggaaatttgcatcatggagtgcttccaattccaatagcactccgcttggacctcggtcgaacataaatggtaataggggtactccgaatcgattttacggtgagagaacagggcgtggtggttactataacagggatagaagaaattgggcaccacagaatgacagaagatggaatagccgacctattgccacttttgtcgacgtaccggtcatgaacagtacaattgtagggaacgacgaatgaattttaatgggaatcaaaattcaaacaattcccggtggaaccaacaaaatagaaatagggagccaaaccagttggaacataaaacggagagattagaagggatgattgaagacttagctgtacaaattcatgagatgagaatgagtaggaattttgcttcggcagaccaacagaatgttaaatcgctccaccccatggaaatgtcagaaggggagagtcaaccaaaatcagagtccatcaaatctgaacccaaacgaattaaaagttgggagaccaagggtaagggcttgagctcagcaacctcaattctttcaagtctcatggttgtgtcgttattttgttcagttaattgcgtgaacaaggcattagttccttctaagccaatgatttgccaaacacagaaacaggcaatgatttgggagcttccaaaaatgccaagttgtctgcctctcagtctagtagctgagcacactcctgtggctcaggacagagaattgtttatttcaaacagcatcgaattctctactaaagcttggacttgtagaaaaattaagaaaaatgctaggaagtacacaacaatttcgggagtgccagtagaagagaagttagactcagaaaatttggacataagcattgatgagtgtcaacaaattattaaacatagaagttgtagcttaggcgttctcaaaaatcaaactaatttttggcaaactgaaaatagcattgacctaactccaagaatgtggctatttgggtcctttggttggaaaaatgtgtcaaatgaaaattgttttctatttgaaagtcgaattgactcacacttcggtggttcttcaattgttactccgcttgggtcaccaaatgagtgtccttatgagaaggggagttgtattttggatgacaaaacggtacttatttggaaagtggataatgccaagaaatgcaactttatttcaataggaatcaaaacgggaaaaacaatgggtaaaatttggctttctgatgatggacagcttggtcttaccttcgggaactcatcaaagttaatggattgtggacagaatattactatctctgaccaggggtttggatcaactattgtgcaggcacctgagtctcatagtagaattgttcggagtgtgaagaaatccaaaacattaagtgatggaatagtcacctcatctcaattagcctcacaacttacttatttggatgcggcaatcacacaaacaatgacatttgcctttcatcactcatttcaatcattttgtcaatttattgaagacaataaacgctgggctgagtcagcattcttctcaaatccaactgatctcgctcggtctgtcttctctaatccgtatgtggtagctaaaagagcagcgagaactcttttgaaagtttggccatgcgttcctcttgatgagaatgaatacgaatttaggccaacaaaattgaaagatgaatgttttgaatatcttccaattataattaaggctgaaagtcgggaccatttggcttttgttgatcctacgacaatgatcataagtccttattccaaaaagggttcgtgtgaagaattccgaagaattgtgattcaaatcaaaaatcaaattcttgagattgaccaaattgaaggcaaaatcacttcggcgactctaagtaaaataaaagcgaatgcgccaaaattgagcatcactgaatttgttccacaaattgagtcacatgcttttcatcaattggtgcttcttaatctgactgacattaagagtcatgcatttgtcagcaatatggttagaacaagtcagatgacttatcaaataagagaaaaggacacccaaattacggcaactgtgtcgcaagagtgggaagaagttgagaatcaaatgattaaagctgttgttggtgactataggaaaaattggatgatcatcatttctgtgatcgttctgattttggctgctgatttcactattagatttggacttagcctagctgagatttatgctggaaatggtcgcctaggcaatatgttatttggcccagccattcaaaaagcgggaaaaagggtcatagaaatgcaaagcattcgtcgtttaaattctgaaagggatgaattatatgaagagccaaataatgcagcttcatggccgccacgtattaggagaacgggtaatttgttatctcagtccttgaaaaggctaaataagcacaatcccagtagaagggcaactgcaaaaccagaaaatatttttgaatgttcggcaattatgggtcaaattggggcattaatgcagcgtccaacgactgtgaccacacaggtcgcactcaatggaattcgaatgaagtgtctaactgacactgggtcaagcacttcggtggctccaaaagcactagctgaatggttaggcacaaaaacctacaaagcggaagcacgtctcatgagtgcctcgggtcacgcggttcacgttaaagaagcaactagagtaaatctgagaattgggaatgaatcggttaatatagtcattcatcttttcgaaaatgatctatcatggacaatgaaggactatgactttattttgggttgtgatgcattggcactcctgccacccatcacaattgacatcaaaaatgcaagcatgtacattaatgatgtatgcatgcctattggtaagtcagccaacaataccttgtacggactaaaagtttgtgcttcacaaacagttgagcttagtccgaatgaacaacgagtgcttaaagctgaagttagagcaccgcgtacgcttcggcatgatataatttttgagaatttggatcagagattaggtgatcaaggaattggtctaattccttctatttctaagcttaattcgggtcaaatccaaacggttttaaccaatccaacagcaacggtaaaacgaattttcaaaggaacatgcctaggcagagcaaatgagatattagcaactgaacatgattcaatttataaggaagctaatcatgatgaaacttatcaaaaattaaattccctcgggaagtctgaagtggaaattgatccaaaattcaaaataaactttgaaaaatcgtctgtaaaaggagcaaatttagacacgcttaaagcattatgtgaagaatttggggatattttcagtaaaagtcaatatgacttaggaaattgtgtggctggtgaacatgactgtcggaactctgggattccgactgccgatcaattgatcagcagaattgaagaaaggaagtggcgacccttccccctccctttcacatgccccgcgcaccccgttccactcctctgcccccatttccctccaaattgttattgtttttctgcgttccttccatgccccgcgcacaattaatgaccaatttgtcaaaaccgcaacttttctgccgccgtccccaacttggcgaatcgactccaaagaacgatgaacccccaaattcctgttttccgtcaattttgtcccctcgctcattttgtggccccgttttttatcatttccccaatttttggcccgtccccgttctgctcaatttcaccattttttgttcaattttgctcgtatttaatgcgacaaatccccaccaattcccacaatcagaagcaccagcaaaggcaagcaatgcctcttccgtccctctctcagtccccctcatttcattgtccttttcccccggcccaattgtccgttccatttctgtcattcacccggtccccctcattcaatgatcagtgattggcccttcacttctatcccatttcgctgtgatttgccccaattgtgataatttccagacccccggttttggtctttgttctgtggccccggtgcccttcaattctttcccatcccggtccccaaatcatttgtgattaatcccccggtgatggcttttttcctgtgatcaatttgtgataattttgttcaccatttcaaatatttggtttaattacccaagtttgaggctttttcccggaataaattttgcttaatcaattctcggcatttgatttggccggtcctcgtccctgcctgcccctgacccccgcaccgtggaattcatttggcccgaccccagagcaagtcgggacaaattaacaataatggtaagattaactgtgaaggacggattgactcgacgaatcccggtgacacaggggaagggaaaagcaaattagagagcctagacaaggaccctctgaggcttgtctagtgttcatagtttcgtgtagttattgtcctccgaggcataacttcacgagggacatagcagacttagtacttaccctccgaggaagtgcttcgtcttagcaaagggtagaggtgtgaaagtgttagtgcacgtagtacttgcccttcgaggaagtacttcgtacaaaaagggtgttcaagcgcgcacaaggccactgacaaataaggaaaaaggcaaactaacagaactccgaggctttagtttagccataaggcaaaagacaaacaccttgtcctccgaggcaggtgtttagtcacagaaggtccaggaccaagaccagtctgatcccggaaaaatctaaaagacaacaagtgcaccacaacacacacacacgcacaa

SEQ ID NO: 1857 - DNA, 3887 bp, Heterodera glycines
ttctgcaacatcaatcattgggcatgaggaatgccaaaacgtcgacacactcaaccaacggatcagcatcgtcagagaaaagaagctgtgcttcaaatgcatgaagccaaaccaccgcgcatcaaattgcgctcgaacatctaagtgatatcactgcaaacgtcggcatcccacggcactctgccgagatcagtacaaagccgagaatggcatcaacacgcctagcacctcttgcagtgaagagaagccaaatgccaacgatggcaagcgatcaacagtgatcgaacaacaacaaatgtgtaatgccatccaaagcaaggaaaccagagcgttgctaatgacgacaaaagcaacgatcttcaatccgtcacggccatccctcagcatgatgggaaccatcttcattgacccgggaagccaccgatcattcatctcgagcagtgcagctgaacaattggatctgaacgtcctcagcacggaagaatgctacttgtccagcttcggtgaacgagaaccgaagcgatacataagcgaccgcgtcgcaatcggcattttatgccccgaccaggacaggttcattttcaacctgaacgctttgaagttcctgctgaatgatttgccggtactacaactaaacgcattggataatgacgaacttcaacaaaagaagctttccctgccgaatgagtcacggcaaccggacattctcctcggaatggacgtttggcaccagctgaatgttcaaccaattgaacaactgccaagcggatttacgatttgccaatcgaaaatcggcaatatcatcagtggaacagggcgaatcgagctcaagcaaccgtccaacatctctttcgtcctaatggtcaacaacgatgaatcgccacaaagcagtaaagcggctcagaggcagaaaaacattcaacaaaaagaaaaggacgaactgagacggcatcaacgcaacaaactcttgtccagcattgcaacattgcgatcaagacggaagagagaatcggctcccatcagctcaaaatcaatcgtgattgatctttcatcagacagcgacgcatccggcattgagatcatacaaaatccagtcagggatagacaagccaaatcaccaaatgagcattcaacggcaccaattcctatggcagtgcaacggctaacaccaacaaggaagagttcatcagttgccaagcgaccagcattttcttccagcaaacaaccaaaaggaaaagcagcgaatcccgcacaaacaagccaaacaaataaactcaacagaaaaatgaaagccttgtcgccaaccgcaagtggatcaggcgccaaccatcattgcgtcgctacattggccagaagctcggactcaacaacagtaattgataagggcagtcaacagaattgcccaaacatgagctcggcaacaatcagtaagacaccatgccaacagcactcgtccgagaagacgttaaactaagctaatcaccaacaattgtccgcaatgacgttaaactagcctaagccatcaacaactgtccgaaacgctaatcacccggctgccacgagtccggaatgacgttaaactagcaaagcatcggccaacccacacaacaatcgtccgcaataacattaaactaaagaaccaaccaaacaacaaatgtccgcaaagacataaactagaaaagcaaacaaaacatgtccgcaatgacgttaaactagagaaacaaaccacgcaaagtccgcaatgacgttaaactagcaaagcatcaattgtccgcaatgacgttaaactagcaaagcaccggccaccaaacaaccattgtccgaaaagacgctaaactagcaatccatccgacggtcagggccgaaatgacgtcaaacaagcaacgacaattggtccataaggacgttaaactacgtcaccaattcaagcaaaagcactcgagcatgcagctgacagcacgtttccggaagcaaattcacatgtcctcaacgattgaggaggttcagcagcgaatgaaccacaacagaccgcaaccgcggaggtcacaacagaggggactaaggccaactcaagcgcctaaaatatgccaatccgggatggcacagtacaagcagggtcgagggatccgccttcacactgcgtcttctgcaatggcactcactggaccacgacgacgactcagcgaacaacccttgcaacaagagcaaggacacgaatccagtacgtcaccagggcgagaacgcagaccacgaaagagccaactacacgccccagatcgcgtaagcacgatttggaaactcaagagcacggaaaattcacctttttgccgtcccccgccatcactcactgctcaatggctcaacctggcaattgagctcttcgcaaaaaatcatcaagcccgagcagatcacctttgcatggcattgctctgtaaaacgcaccacgaagcgttattacactaatcttttggccgataagttcgtcaccatcgagaaggaatttccaccggtcaacaagcggatctgcaaacaaatggccattcaccaggaatgcccattcgccaagtctgaaatgacgaatcacgaagcacaattgtggtcaacgaatgacgaattggaagtcaacttccctggaccaatcaccggacttttcaaaggcgaacaaatcagcacggcgacaaactgctttgctcaaccagcaacacttttcaactgtcaatatgcaaccgaattctgccaactgcccgacaactcaactctgatttggaaatcaacctgcaatggcaacgaatgccaaacatgcgactacgagaaggcggaagccatcaacggaaaattcactgcggcctacggagaatcaatggccacttggatctccgaagatcacaaaaaggcattaactttcgccaaaaatgcgccagaactcatcgcctgcgatggcacacgcatcgtcatgtccgaacagaacttcggaattgccaggagcaatacgacgacattgtcagcaccacgacaagatggaaataggcatccgaccagaacagctcgcatcacagctctcggcatcccaagtggcaacaagcgttgcgttgaatcagctctacacgcgggagtgtcagcgaaacacgagagcagccaacccaactctccaagccagacgcttactacgacagccaaacgtccaggcgcgctggatcggagaaatgacaatggaagtgtttccatgcgtcaacgtttcgctccaggacatctcctaccgaccaatgaacgattgccgtgtctacatcccagtgacagtgcatttccccgaccgagcgatagcagcatttctggatcccgaattgcgcatcatttctttgacggcgcaattggcaagctgcaacaatcaccgtttccatcatcttcaactgcgaagcaatccgaacatttggctactgatcgactcacgaaccgggattgcgcgtcaaatgccaaaggactacacgcatgagctgtacgaaacgacactcaaccagtccaacagcaacatcgagcttcaccctctgatcttccacgcttggcagctcgacaacgaatcagatgcgacacgctttccacacatcaacgagttcgtcaacttggagcagttcaaagagaagctggaacaacacatcacggcgagaacagaggcattaggtgccctcaagggtggcatcgaaggacttaccatgcgctggctgaaaagcatggtcgacgaagtcatcaaatggtggatcagaatcgcctgtgtctactcaaccttcctgttcctacgcgacatcattctcccatgcgcgctcgcctacttgttcaaccctgttcgagtcacatttctcagcctaatgggagttcgacgtcagccgcttcaa

SEQ ID NO: 1858 - DNA, 5340 bp, Heterodera glycines
  unsure (1)..(5340): unsure at all n locations
tggtactgaaaattagcatacaacagagtacctaagtcccggttttgaccagttttgaccgggacctggactagtctcggttttttccccgttttcccagccaaaaagtcccggtttttcaatccgaaaattcccggtcccggttttggttaaaattcccggtcccgctcaactccagttcaaacacataattttttttttcttatttgccggtgcttttccctgggttctgttgtgccggcattcaaattctatatgtattgatggctctattgcagttcacaaggccataaaaattgaaacgagccgttttggcatatcttttgtctttgttagttcgacgaatggcactaacaaaatactcgcgcactaaatcatgtgccattgagagcacaaatcatttttgaaagggaaacaatttcttggcatttcaatttttaccttttatttttaaatttttcctaaacacttttcaaaaccaaacaatctttggcctctgttctcacggaaagtgtaatatcccccttctgccccttccctcgtcacgtttatcctttttatctctcccccttatgcactcatccgtcgtaacctctgatcacgtgaattcataagtggaggacattgaggcgaacttctggcgccggatatgcccacggcaatatttgtgttcacagcaaaaaggggatgaaaagcgtagtccccccctgaggggggggggggggggggcgctttgatcactttcccagggcaaagcagcggctgtaatcgctcaaatcactcagttcgatctctgtgcccatctccgcccatcactttacatgcataccatttcatattaataattatgcagcaaaacaacaaatacatatggacacaaattaaagagataaatgtggatttattttccattgttttatttaattaataattaaatgcattttttatattttatattattatgctaatttagcttagttaacggggcttttcctttcttttttgctgctgtcggtcatttcgcccaccccgcttttgcataatccaaacagcaaatagcaaatcgacaccaacgcatcagcataaaaaaatgtaaataaaaatgaaaataaaaataaaaagaaataaattaattatttttaattgcagcgaaattaatgaccgttctcctcttcctcatttgtctgctgatcgcaatgtttgccatgcaatccatggccaaaagtgtgccaaaggcgagggacagcgaaattatcgattatgtaagaaataaatgtttttttaaattatacaacattaatataggaggaatggaactgtggtgccaccgattttgagaaaccgttgtcccatcagttggccaaggaggactgcccgaaaaggatgtgtaagtgggggaggggggaagtgccaatggatgatgggatgggaatggcacacgaccaacaatggcacttttagttgaggcggacttgtgctgtcgagtgcacgacatgtgctacatggaggagcagaagagcagggagcaatgcgacgaggcattctgttattgcttgcagaggacggtggcacagaacgccaaccaaacggtgggaggagcgccaatttgaaatttgaaattaaattcaaatgtcaatttcagacgaacggatgtgccggggtgtccaccagtttctgcgaaattgtcaaaattttcgggggcattgcctatttgtcgtcccaagaattgagaacgaagcagcaaaaagcgatggcaaagttcgaagagaaggaaaagcagcggaaaaccatggaaatgagcagcagcacaacgccaaaaccgacgacagaatcaacgaagccaagcagtacagacagagcaagcagcataacccaaacagaacaaaccatttcaagcagcacaatccaaacagcacaagcaacttcaagcagcacagcttcaaagccaacgaatgacacaacgccaatgccaaagtaagcggaaaattttaaaatataaataagtaaatttattttgaagtgcttctccaacaacttcttttcctgctgctgtccattcgactgtttctccggcggaaattggccaatttgtgacgcataaattccccttggaatgcttcgacaacagtgaaattatattaatttaattgtccttaacgagttttaatttcataatttgtgcccatttcagcgctgtccttttgcacccgtcaattgcaccgctgcgtctccgagcagcacagccgacggaagtcggcctcatccgacggcggctcagaggacgcttttttgctcagcgttcaattggccgagtgttcctcccaattctgcgcctgctcgtcggcggagagtgcccgcgctcggttggcaagcgtgccgcggccgctgctgggcggcgagcagtgcgcgcaaagcttggcacaaatttgctcacaatttgaggacgagcagggcagcaaacagtacactggtgggtttgacattccctggcgggggtcgggaggatttgccacaacaatttgccatttctatgccgtttaggccccacaaatgtgaactattggtccgtgtccgtcaattacagcgccttttccgctaatttgggcctcgtcgtcacctccgttttgctcatttcggttttaatttcaaatttttgcttttccatttcaatttttgccaccattccccagttgtttctgctactgctcgtccgactctgctcaaaagcctgttttggctcaatccaaaagcggcttcatcagcagcatcagatgacacaccgaaactacgcttgtcggccgagcatccgtcgtgaaactttgacggcactgcgcagtgtcagcggcggcggagcacagcacaactgcgcaccgcattatgtacgtcttctgagtctcttaatttttcttccgttattcgggctggatctccgccatgaaaaatggacaaattttcggtctccaatttcctctattgctggtaattgcccaccgtaccggcccatttagttgcctctcggcaaagaatccaccgtttcgtgccccgcttcgaccgccgcttcaacgccctcttcggctggggacgaactgtgctcagtgctggaaggaaagcatttgctgtgcccgcacaaacaatcgccaaaaagccaccagcagaagaaactggacagcggcgatggcaccaccacaatcagcaacaaacatcacaagaaggccaactcggagtcgaacaagcagacgccgttggtgctcaactcgtcccaggtacatcacggacggcacgtggccaacttttgaaggacccctaattaatggcacttagtctgtctaaaaagttgtgcttgattagcatcagtgggtcactcccccgcccccgaccaaacaagctaggttatgtcaacatccaaaatgattaccgtaaatgatattctactgtaggcacggaatattatctctatttacagttataattgagcaaattcaaaacttcgagaactttacctaatttaaaatgcactttaatgttaaatgatttgccaacttttgccaggtccatctgatcgccggctccggcaattcgtccagcactttgtccgatgtgtcctcctcctcctccaattcgtagaagaaatatgaaacagcgaaaccaaaagcggcaaaacttacgctacaaaagcaaacaattaagcccagaattaattaattattcattcaccaatttataaatgttctaggggaaaagagaaattaatttttagaattttttcaaatttattttttctcttcccttaattaatttaatttaattcttattcattttcctctttttttgcgattagtacaatttttttattcacaaattgtttattttaattaccattttgtagaaaataaaatttgtagattaaacggagataaaaaatttattttttataatctttaaattaaaatgaattgaaatgcgccaaaatcagcagaaaaacaaagaatttatcatcgaaacgttcattaaattatggccattttttaatttgaacgtgcattatttaaagcataaattaatcgaaaattgaataactaaacccttttaatacgaattgaattgactgaatgcaacatttttgtagagtacggtgaatgtatgagattattgtaaaattttgatatggggaggaatcaattaaattatggtaattacaattggattacaacaataaatgagaaatgattgagcacgagttggactaattatatgttttgaaaatgctaaaattttgctataaagtggagaaacaatcaaagaaaaatatatgtaaatcctaaaatggatgtgaatatgtacccaaatttggaaatttattaaaattaaagtgacaaattatgccattccccacaaattttcaattagatcgtaaaaatatgcttttaagcactctctgtttaagctgttacgaggtagtactgctgctgctgctgctcatttcggacgacaaagtgttggacgaattgccagacgaatgcagacgaatctgtgagcgaaattgcgatcattaaacaacactttgaaggcaaatgaaggcaatttgcaactgattagctgtagcaaaattggttggccaaaataaaatgttttgtgcatacggtatgtttgtttatacaaggggaatcagttggttacggtatctttttcagtgggctaaaaacgcaaagtttcgagtccggaatcgtagtccttcatagagtaccgtagtttgtaaaaaatatttctaactcctactgtagcatttgttgcttttttatgttttttttattccaatggacctgcgatgagttcagcaccagtggcggagtgctaatcccagtccgatcatttgtcagattgctcaaccgattgaaatgccaattttttcgacccgcgggtcgattaattggaaacataaaatgctgttgtaattgttggcgttgtgcatctccgatcggagatgaagcagtggactcttttccgatgggaaacttaaaaaaggggaggggacaaaaatgccaaaaaaataagtatgggcctcacataatttgtgcttccgttagcatcgtaatgtctgcaagtggaaagccggtaaatccgctttcgaatggtcgaaatggcaatttgtggacaaaggcggacgagcagtagcagaaacaactgaagaaataaatggtggcaaaaattgaaatggaaaagcaaaaatttgaaattaaaaccgtaaatgagcaaaacgaaggtgacgacgagncccaaattagcggaaaaggcccccagtaagacggacacggaccaatagttcacatttgtggggcctaa

SEQ ID NO: 1859 - DNA, 1660 bp, Heterodera glycines
aaattttaaggcaataaaaatattttaagcaatttgaacagattaattttggtcgaaaatgttgcgatttaatttttgactccacgtgttcagctgttgatctgcccattttttgatcatttttcttgcgttgtgcctaattttggctttttgacacatgatttttaaaaaaaaattcccctgctggaaatttggtgaaaattttcttcttgagaatggaattcggcgatggtggcgcaaattcacatttgttcattcattgttagtgtaaagaatgcgttccatccattgttgctgagatttgattgacaacagcagaaaaatgcatttgacagtgcaaaacaaaacacagcccaaggccattaataattaatagcccaagaaaacttgttaaatgttgcgcacagaagtggtggaatttaaaatgagaaaaaaggctgcgttctttacaaaatttggaaaaatggagtaaaaaacgcccaatttaaatgaataaaagagattaaatgaatattaatgacacattaattaattaattcttaattatttatacaataaaaacgcattgaccaatctgctgctattgtctgcttaccagaagcagcctgctaaaaacacgaattgtcaataagcgaaactcagccgggaaaaaaagagtccgagacttttgtcgggcccgagactctcgagcgcaaccaatgaatttagagagacagagaggagagagtggggcccgtccatgggcgcggcgccttttaaattgctcttgcattccttctttgctgatcatcggatcagcccatcgcccgcccgttctctgatcactttttgtgttgctgttgatcagccaatttgctccatttatgggctgttctggccttgacttaaacacacaacactaattagtggtgatgatgatgatgtgatgggcgtgactgacaataaaatgatgacgccgaaggggggggggggggagggggggggcacggctgaaattcttggggaggggaccgaaccgaaaataaaatgcgcaaattgaaaattaaattatttttattacagccaaattgataaaaaaaacaaacaacactttgtcacctcaagtttaaagcaaattctgtgtttttacaacagcggatattcaataaacagatgttaaaattgcattttcaataaaaaagtaataattactaatattacattttgtttaattgctgtttaacaattgaatttcaaaacaagagattgttgttcttcactattatagaggaagatgctaattacttcattaacccttttggtaattatatttttcaaaagaagtgaataaaatgaacagatcattttaaaaattataaaaattcctttctaaattattagttattaaaagtccattcaacagattcttcccaaataataatcaaatttttttggtgatttttgataggttaaaattatagcaattttaaagtccgacggagccaatagaagtcgccgggagaaattttgcaaattatgataaggcttttttaaaattcgccccaattacttcagtggatttttgggtcaaattgaaattttcgtggaatttttgagccttgcttgatttgttcacagattttacccataaaaggtcattttgtaggtctggcttaaaatt

SEQ ID NO: 1860 - DNA, 1165 bp, Heterodera glycines
tattttgtaatcattaagcacataattaccgaaagcacctcttgttcggattttgccgtcctccttttttcagcccacttgataagtctggccaatgattttccctcatatcccccaaccaatgagtgttttctgttccatcatcttttggctaattctgcccatggacggcacccgatcaaatgggcggcaattgggccaactttcccaattattttggggtgccaaagtcggcaaacactgactgttttctgcgcatccccggaggggcaaaaatgctactcctttcccgggtcaagtgccatttggcagggcttggggggtttggccacttctcgagtctcgacaaaaataaataaacaataaacaacccacaaccaattaacagtgatcaacaagcggcgcaatgcttgtaccttgtacacaatcagcagaagaagcatcaatgaaaatgaaaaaaaactggatgcgcttggctgccgatttttgagcacccccccccccccggtgggggggggggaaacatgtcgagagtgagttgagtctcgacgccgctgcactttttggtccatccggcgatatataaacagcgcaaaaccaagcggaataaacacactgttcagcagcaacaattaaactgacatttcggagtcacttaattatttcaataattttttatatataatttattattaattaattaattattaaattatttttgcaagcaaaagtcaagtgaaaatgctgtccaccaaattgttcgtcgcttcatgccttctcaccgttttcctcttcaattgtctgctggtgggacaaactcaggcatattggtggccatactacggtatgtctttaatggcgcctaattacgataatacagtatattcgatccgtgttttaaattatgcaggaagtagttatggcagtatgggaggctatggcggcatgggtggttacgggggcatgggcggctatggcggtatgggctacggcggtatgggttacggtagcggacttggatacggcggcatgggttacggtggcatgggcgtgggcaagagggaggccgcgtttgtggcatcgccaccggctccgccgccaaagggacaatgaaaagaggcacgtacatttatggaactgctgattgatgatttaccttttttaa

SEQ ID NO: 1861 - DNA, 2566 bp, Heterodera glycines
tgctaagaattggagattaaacataagcttaaaccttaatctccccggggggcttaagttacgcctaagcctaagccggggcaaaagttaagccaaaaccttagccgaacggctgtgccggggtgtccaccagtttctgcgaaatcgtcaaaatttcggcggcataaagacgaatgtatttagatatttactatagaacgagttagtatattattcgcgtagattaaaaaatcctttaatttaatagcaccataaagtcccgcgccatattgactccgagtcgtcatggttttgttttgctatttttcaaaaatttggagaagacagaggacgccagcggtgccgacaaaaaatgccaattctttatactttatattatataaaacactcattttgcagaggctacgaaatacgaggtagaaaaataattcattaacttgccaagttagcacaaattaagtgtttttaaaatgtcaaaacatgtgatttaaaatattaacataaagataattgttaaaaacacactttttaaaattattgtaaataatttcgtatcaatacagaaaaacaataagctttatatatcaatgttcggatctgatacctaaaaaaggagcaaaaaatcattggcactgaatttcaaacggcacaaattgtgcacggcaaaaggcaacccgaaagaatgagttttgtacgcttatcgatgtaattgtccttcaaatgtgtagatttgctgtcaatttatcacgaaaacagtttttgatctgttgttaaaagaagaaaattaattaatttaaaatatattaaaaaatatataaaaatattcatttttttaaaattttaatgttattgtttatagaatggggatttatattcatggaaaaactccaaatattaaaataaatatttagaacatattgaaaagggccaaatatcaatgaaaatattaacaaaaaagaaaaaaaatagtgcaaaaaatttaccgaccgcttataagcaaattcaaaaattaaaatgtgggcatgaaaaaataaaatttaatggataaatttttggaatattttcccattttaaaaaaatatataaatccacacgataatttttaatgaacaatacctcgttaagcactgcccagcctaaaattttatttttatttttttacttttcctacacaagctttaatagaagactcacatggtaaatagctggcatccgcctgtactcgtggtgcgtcagggctcagattacaaaatgccaaaccttcaaaatttagcgcttttcaatttatttttattttatttttgtacatttatttccagcggaagttcgctgcacctttttccccttgcagcaatccttcaaaaaagaacattaaaaaatagtaccccaagataagggggcttgagacaacgcttttacccgacaatcggaatttccccgggacgcgaaaatcccgcaaaatttcatgaaatttggcacactttcaattccggtcgctgtttaacgacaaaaaaacactagacggactttccctaattccgaatttcacttatcccccgaaaatgccgtgccctctccccgtccaatccgccgcccaatgcgttaccgtatggtccgagtcttgtgctgcacatgtgaaaagctccaaccctgagaaaaaaacttttaacttttacagattggctttttcattaaaatgccaaaatttgagtgccaaatttaaattttaaatgattgcccacttcaccgtaccgttctcggacggacatttgtccgtgttcagaaacaaagctgtaagtatttttttgctcaacacatcaaaattctgcaacagtaaaacaaccaattaattgctaattgccaaaaattaatgtgtttacgcatcgactctcgcacgattttggcactctcttggcacggcaacagctcaaaaagctttcgttcggattcttaacggagacgaacatttatgaattgataaatggacacaattaattatttattctgttggttgggccgctacgttttgatgtttagtcattttcacattgttttattttatttcgggtaaaaatgtcctgaattatgcacaagaataattaaaacctgaggagtacaaaaataaattaaggatatacaatgtaaacgggcattaatccaaaaatatattttttggtctaagtaaaaagaatttaagcgattaaaagtgctctcatatccttccttttgaaatggcatcattttgccatacctttggcgttggctttgctgccgcattcgcagctgttgccgccgtaagtcgcgcgagtgttgaagttacagttgttgttattgtgggtcgtactgtagtttccgttgttgttacggtcactgttattggtggtggtgttgtttcgcttatactgctactaatagtcgaagaaatcgtcgagaatttggtgaattcgtcaaattgaaagttttcgctctattaattacaaaaataaaatatatttttttaaatttatttcttctcacatcgacgtcatgccgttgatgtgccgttactttttgccgcaaaagatca

SEQ ID NO: 1862 - DNA, 1129 bp, Heterodera glycines
aattgccgattcgattggttgttttgcaggtactgcttgcgaatggggaccaatttggggcggcgcaaacgccggagggccaactgctggtctttttgtggcgacgagcttagtctgagcaaatgagtttttttttgtgtgcaaaatttatgggaaaagaatagccaaatttttcaaaaatttgttggaatgaaaaaaatgcaataaattttgctaattatttctacaggaaaacttaatatttttagcaaagatttttgaataaaatttgtttgagattttttcgtgcttcaggggttacctgctgatgacaaaaacgtgtttgagccaatttttaagaaattttattcccttccctgggacctcctgtctaaaaataatgcttttcgagacagaaatttctcgagacccaacactgctcctaaaacagcgctctatttttctcgagtttacgctctatgggctagactctcgaacgccccaaaatccatccatgtccaactttgccaatggccgatcccgctgttgttgttgttgttgccggtgtcgtcgacgttgttgttgttggccccgtcaacagcaacaacttccttaactgctgctggtgttggattccgtttccatttgtgcccaatttgttgttgttgccattgttgttcagcaccaatgcaggatttgttgctgctgttgcgcctcctccccctgccggaaggcgtacagccgcagtagtgatgcgtcgtcgtggcccagtgccgccgatgccaacattattattattattattgttgcggttgttgcctggcatttgttggtggcgctgtgttgcttgaactgctccaccaccaccattagcagttgttgttggtcgagagttgctaaccgccaccctgtgctgaatgtatttcagaataaatcgtattttgtggtgataggccgccaaaaaacctccccatggattcaatcattcttaatttagacaggaacaaacatttttaccgtatttatgcaattataattccccctgaattagagccctccaccttaaataagggccttctttcgaggaggctttgaaatagagcccctggggggctctatttcaataaaaacggtattccgaactcatggg

SEQ ID NO: 1863 - DNA, 2139 bp, Heterodera glycines
  unsure (1)..(2139): unsure at all n locations
tataaattaatttataatttacacttaattaacgaaaaccctctaaggagnaannaaatnntaannnnngnagagaaaccttaaagggaggnaatgggatgggctttctgatggaaccatgtgtgaacacggagctggtcatcaacagcaacaaatttcatggcatccaaaatgtagctttgctggtccgaaatgcacggtacaaacattttttatttaatgcgtcatactgtaatttttctaattttttttccaatttgaatacggtagataaccctaggcatcgatatttctcaaaatttctttgtttcatatagggcctctattgttgaaatgactaagaaatattgattaaaattatcaaaaagtatggtatatgggacgaaggttacagtatcacaatttttttacctttcaaaattattaattttgtctaattaatttattaacaagcagatggcctcatttgtccgcgctgccggctcgtgtacaaatagcaaaaaatgacatcaaaatgaacactgcgcaattcattgtttccattggtcttaatgaggatgcgccggaacaatcattagtgttcaatcaacaaaatgaagcaattaaattttaaccttgttatttaaattattatataaaaaagttaaaattattgaaaatttaaatctttattttttccctttttcactaattgcttaaatgaattatttattaaaaattattatttttttaaaattttttctaaataatctatgtatgtttaatgaattatttttattattctaaatttcctttcattaattaattttatttaaaatttaaatcttattaattttctttcactattttttcctttatctaaatgaattatttaatttaaaaaaagtaaattattaagaatgtttaatttttcttttttttcggtgcgcggcaacacggtgctgaacccgttcccattcttgaagccacgttcaacaccatatgcagcgttggtggtctcgtccagcaatgtgctaatccggcacaactgttttcgcaatcaaaatgccgattttgaaattggtgagaaaaaaaagtcttatatcaatttttattttttttttattttattattgctcaacctgatcggggtcaaaaaaaatggatttcctgcatccaggtcccccccccccattcatggtactaaaaaaggaaaatttttggaaaaaattatcattgatttgctcaatgtgatcaaattttacatttcattgttaatatcctttttttaattgtctaaaaaatttcaaaaattactttaaattacaaaccagagcagatagattttcgaacattaaattttattggatatttttctaatttttgctgctaatatatgaaactatttaggtgtattgaatgatgcctaagaattaaaaatttcgttgattttgagtaaagtattttctattagactttttctacaaaagtggatattttttgtacccccccccccctccggaaaaattgctaaaataagattttttttaattcataagtttcaaatttctctaatataaaatacaatttcgtaatatttaattaggaacagaactgatggaacacgcgaaacgaattgatgcgcgagaaaacaattggggcgatccgcaggcccacaattttatgcaccgaatttttgaccaattcaaccgttactcattggccaccattgaggcaacaaatttccaattaaaattaaataatttacattataattaattaggatatatttttttaacttattaaattcttattataaacaacaactatgaatacatcattaatctatgaaaattgaattaaatttgtttaatttaaatggaaaaataatttattatgaaaatcaaaatgaagtattgttttttaattgaacttatataattatttttatgttaaaaattagaaaatatatttaaattaaattttattaattttaaaaaaattgtttttacatttcttaaacaaattatattattatgaaaaaaatagaaatttatcttattttcatttattcaaaacaaatgtttaattttcttatncgaaattaatatacattttaaatttatttaaattaaaaaatattttataaatagagaaaaa

SEQ ID NO: 1864 - DNA, 6520 bp, Heterodera glycines
  unsure (1)..(6520): unsure at all n locations
ttattcaaaacaaatgtttaanntttttttatcggaaattaaatatacattttaaatttatttaatttaaaaaattattttataaatagaggaaaaatattatttttattaagattaatccttatgctgctgtttgtaatcaacgtgctccagcgcttacttttctgcaacaattctttcgacaatttcggcatcaaaattccccatttttggtcggtggcactgtatttgaaaacaatgacttgccggctggaaaatatatcgtacaggtccttccttgtttgatgtactgtattattaaaagtaattatttttatcccttaaatacatgtcataattattgaaaaatactatcatttcggcatttcatagatttattattttttataactatagtatattcatacagtacagtaatgcctgtagccattcccccgaaatgaaatttaagaaaaaaaaatgggcattttttgaaattgcaaaaaatttttcccggcggcgcctaacggcaccgccagccagacccatcatgttttttgaaatttgaccccaaaaattgcaaaaattggtcatttttggcgaaaagcggctataccttttatatggcgtgttgaaattgtgaaaatttgcaaaaaaaaaaattcaggacgatttgcacattacacctggcgcaaagctgaccctagcgccgggcacaaccttggaattcatgagtggcatcggaatgcttgtccaggtagaattttttttttgaaattttcatttaaaattttaaaaattttccagggtgaattgttgcgcaatgatatttcaagtgccggtccattcttgccaattgtgttcacaggcaaagcattgggccgaaatctgccgaagcttgaacatgttcgacttgtggacgaatttggcgacgaaaatgtgttggcagggcgtctagaagtgcggcaaataatttccattttgaatttgtgccaatttaatggaatttctatttttttttaattgaaagcgaaatgaaattttggacacttttttaataaaagaatcaactaagccaatttttaagcataaaaaaatttctgaaaaaatatgaaaaattttgaaattgttgttttcgatttctttttataaattaattaacatgtaaatttttgtttttatataaaaattattttaaaattttattgttttgttagagaaaataaaattttggcactttttttacgattaagcgaaattttaattaaaaaaaattcttaaaaacatatgataaacttataaatttttcttttccattcttttataaatttgttggcgttgtaaatttttttttctatttttataaattattattttgaaatttttatcgttttgttcaaaaaatccctaagtaaattttgattttgattttttaaattttggacggattggataattaattatatttaattttaaaaaattgctaacaatttccacaaggttcgtcttgagcccgatggacagtggggtacggtatgtaaccgttcctggacggcacaccatgcgcagctcgtgtgcaatcagcttggccttaccatggacccgcaacactttgaaaattggcgcattttcccgtcgcatggccaattcccaattgtgatggacaacattcgttgtgaagagcgtgaatgggacatcaccaagtgtgtaaagaataataatgatgggataattaaaataataataaaatatattttaaaaatttagtaattatttaaaaaggtttaattaggtctaattaggtcttttaagatttttcaaattttggctttcgtttttatttgcgcaaaaatagtctatttggaaaatttcttttatttcttcgatttttatgaaaatttattgcccgatcagtgtgttgatgctcccctacatttttttaaatacccatccatcccggacaaattttttgtacgggaatttccaccctacgaaccccgacttttctctacccctagggttggggataggcgtcgcccaggaaataaaaatttttgtgaaaattgtcaacaattttattgtttaaagcgaattaaaaaaaaacaagtaattttattggcaggcatttcaaaatattttttgaaaaactaaaaaattcagaatttttcttaagaattttcataataattatgcatttatgaaatggaaaaaatcaaatttaagttttgtgaatacagcaaaaacttatccaaaaataaaaaaaaattaattaataaaaattttcaaaaaaataattggaattttttttatttttcattaaaagaatttgatggagagttcaggtgccgtcatgacggagcgttgcacaatgtgcgttcgtcatgccgcccaacagaagtggtcgggttacggtgtgccccaccgtattgggccggtgtacggtactcattgttggccaacccacccacaatgaccggtcaaccgacaatgagcaactgggtactggaaaaggctggcctgtttgacttcaggacatcaacattcagtccagcattgcaggtgttcattttttttaattacaaaaccaaaaatggcataatgccaaaaataaaatttaaaaaattgagagtacttacttttttgtatacccagggatggatgggaaccaggggtgtgcgaaaactaaaaaaataatttccgaaaagaaaacgaaacgaaaacatttatttttaacacgaaacacattttcataaccgaaaaatgaacaatttttgtaattttgagccaatatttttgaaaaaaataaggacaattggaattcttgatcatttttgacatattttcactgaaaattgcaattttaagttcaaaattttgaaattttagaagagttttgggggccgggccggcggtgccgacatgcgccgccagggagaagtaattttggaatttcaatgtcaaaattccaaaaaagccattcttaagggtgtaaaattgtttcgtcttttttcctccaaattccgtctgacgaaatcgaaaacgaaacgaaaattttaaaaataataatgaatttatatttaggcgtttcaaaagtaaaataccccttttgaaaaaaatttttcactatttttgtcctgtttttttttttaccaaattttttgacaacttttttggcatttttagcataattaagtcgaagccatttaatgactattaaaatgacaaaattttaattcaaatgaatacaataataatattatgggatgaaacatttttatcatatgtaaatatcaaacataaaataatttatgggttgaaaatttgtacaaaataatataaaatacaaacaacattaaattctaaatagacttttttttttactaaattaatttttttattattattattttcttaggcacaaaatacattcatcattatgagaaatttatgtaagcaaatggatttgcgttaaattagagaaaataaaagcatataattaagtggatttctgactattttcattttatgaaaaatgaaaattaaaatatttttattcattttatttcttaaaaatttaaataaaatttatgctggtggaataaaggaagaaaaaagctttgacgaaatatttggccaaagatgggaagaaaacgaggaggaaaatttagagaatgaaactgatcaaaatggaagaattgaacaaatggatggccaaaatgaggcaaaaaatgatcaaatttttgatgaacattttgaagtgaaagaaaaggatagtgaagaaatgtccacaaatggtgaagaattggaacaaatgtcaagaaatattgaagaaatttgtgatcaaaatcgaattttcaatgaaaaacagaagagagaaattgttgaaaaatttcataaaattaaagagaaaattatgcaaatggaaaagaaatattcaagaaaagaatggaaaaaaatagaaagaaaaattgcaaaaaaattgggtgaaaatcggaagaaaatttacaaatggaaaagagaatttggaatgatgaagaacaaaaattattcagttgaagaaaaaagaataatgttaaagcaatttgatcaaatatatggcaaattaaaaacgaaattaaatggaaaattggaaggaaaaaggacaaaatgccaaaaaataatagcaaaacatttgggcacaaatatcaaaacaattttttattggaagaaacaattaaaagatggaaaattgattaaaaatcaaaataaagatgagcaaaaaagagaaattgttgaaaaatattttaaaataaaaattaaatttatgcaaaatggaaaacattcacgaaaagaatgggaagaatttagagcagaaattaaacaaaattttcgtgtggcttatacggcaattgaaaaatgggccgagaaattaaagataaatcaaaacatttcaaaaagtgaattttaaataatgttttaaaaaatttttgttttttttcaatttacagagcgaaacatgttatcaattgctgaaaaaatggaaaagattaaaaaatattatcaaatcaaaaaacagaatccaaatctatccgatattaaaattgctgatattttaaacattccaacaagttcattacgcaaatacaaagctgaatttggcattaaaccaaaaaacaaattgctataattaggacgatcaatattatccgaagaatatttggaaaatttcagacataaaaaatattcaattttttacaaatgtttttataaataattttttttcggtttataaaattattaatcctttttcatcgcttataaaaaatatttgataaaaatcgttgattatgctaataacatttttaattggtttagttgaaaaaccaaattaatttttcatatttatttttattttgaaaaatgagtaaatatggcaaaaaaaagtaaatttttagagaaaaattaattaattaaattcaataaaggcaatttttaaccaaatatttttatcaataaaaaataattaaattttgggaccaattttttagaaaatcttttcattcttaagggagtttttttcaattttcaagtagaatttgctgattgtgagtgaagttatgcagtaaatccgaataaattgaagaataaaaccaattataaaaagatttatattcattttaatgattttttattcagaaatctgaaaattaaaataatatttttaatattaattttcataaatgcaattggtaacatttatgctagaaagataaacgatgaaaaaaactttgatgaaatatttggccaaaaatgggacgaaaaattggaggaaaacggagagaatgaaactgatcaaaatgtaataattggacaaacggatggccaaaatgaggcaaattatggtgaaaatatttctcgatttaatcaaatttttgatggaaatttggaaatgaaggaagaaattgcaacaatttatgattcattggaacaaatgcatttttcaaatgcaattgacaaaacgaaacgagaaattatcgaaaaatttaataaaattaaagagaaaattatgcaaatggaaaagaaatattcaagaaaagaatggacaaaaattgaatgaaaaattgcaaaaaaattgggtacaaatcaaacgaaaatttacaaatgtaaatcaaaaacagatatcggatgatgaaaagcgtaaaatattaaagcaatttgatcaaatatatggcagattaaaaatgaaattcaatgaaaaattggagggaaaaagagaaaaatggaaaaagcaaaaaactgatgagcaaaaaagagaaactgttggaaaatatttaaaaacaaaaaatgaatttatgcaaaatgggaaaaagcttttcgagaacttttcaatcgtgtcgccaaatccaaaatcagtgactacagatggcaaacagatcggctgtactccaagaagcttcgagaaggcggcgttctcaccaaggaattatgtcttgaacgtgttgaggttggacgacggccggtgcagcaccagcaaccgcagctgagttattgaagtgacataaacataatgacacataattcaaaacgcatctcccgataagggtagaagaggaatattatagatatatgattgcactttaataaatttcttaaaaatttttcaaaaattagtccgctggttttcatagtgcaatctgttaaaaatcaatccaaaaattccaatttttcttgcggtggatcctaccagcactgcaagacccaaaaagctccttttttgaatagaatttcattaaagtaaatattattaataatgaggaaagaattgcgcacaaaatacatttatgaaatgaattttcattaaatcaataagtaatttataaatgtttttataaaaaatgaatattaaaaatatttttattcatattacaactacaaaatttaaaaaatatgcacaaaatacataaatcatcatatttatttgagtttggaaaagaattgttataaacganatanaagcaataattcaaatggatttctatcattcattntatgaaaaatgaaa

SEQ ID NO: 1865 - DNA, 4218 bp, Heterodera glycines
atggtgaagaaactgcgtggaacgatgatgccaaccatgaacaaacacaaagctgttgtagtagatgtagaaaaaaaaactgtggtatcatcacgctattattgttgtgtaaaaaacgatccgtttttacctcttttcgggaaaaaactggaaaaaattcacaaaaaaaatctcacattgtgcacccttttctatcatttgtggagtaaagaattttcgggaaagaaaacaatttgcgtcaaatttttttgctgaatttatgcagaaaacagcagcagcagcaaatccccatcgatatctcagagcaagatcatttaggacaacagtcaaattcgtgatcagcgagctcaaaaagcttataaactcatttttcgactttttaaatctcaaaaaaatttttggaaaaggggctacaccggtggtactcttacccagaaataatttttggaaaattttagaccaattaatgctttcataaagatgattttattgaaattagccaattaaaaaaaaacagtgacgaaatgattggtaacatttttttaaatttccattttaaagggattatttttttgagtttaaattgttttttgatagtctataaagttaaaatttttaaacttttgaatttttgactttatttataattgctacgatttaaaaagtttcgaatccagaaaaaaagtatttattttgttatattggtattttgaaataaagaatatgctctaaattctttccattcttttcgtgaatgtttcccattttgcataaattcatttttttaagatatttttcaacaattttagttttttatcattaatttttcgatgtttcacagaattcccattttttaattgtttcttccatttataaataaatacttgttaaattaatgcccaaatgttttgctaatattttttgacatttttctacttttcattccaatttttcatttaatttaatttttattttgtcatataattgatctaattgttttaatatttgaagtttttcctcttccgaatatttattattcattacaaattcactgttccattcaaaaatttttagccgcgaatttttgtgcaatttttatttcaattttagtccattctttttttgaaaatgtcatttccatttgcttaattctttccttaattttgttaaattttttccacaatttcttttcttttgatcaattgcttttaaaaatgatcagaattaagtccaattatttgttggcaattgttcaatttgatcactatttgttgaagtttctctttctatttccaaatttaatggttttattcagaaatatgaaaattaatataaaatgaatataatttataattacaaaaaaccttaaaaaataaattgatttccttggattttcatcaaagtatgattacaagaaagccctaagtagaattttgaaacatcattataaaaaaataagtagaatttgcttaaataattagcaaaaatttgagaataaaaccaactagaaaaagaatttttttattaattttattcagaaatatgaaaattaaaatattattttcaatattaattttcataaatgcaatttttaatatttatacgagaaagataaacgaagaaaaaagctttgatgaaatatttggcctgggacgaaaaatcggaggaaaatggagggaatgaaactgatcaaaatggaacaattggacaaaaggatggccaaaatgtgacaaaaaatgatcaaatttttgatgaaaatttggaaatgaaggaagaaagtgcaagaaattgtgatcaattggaaaaatgcatttttcaaatgcaattgacaaaaagaaaagagaaattgtgaaaaaatttcatagaattaaagagaaaattaagcaaatgggaaagaaatattcaaagaaagaattgcaaaaaattgaaagaaaaattgcaaaaaaattgggagtaaatcaaaggaaaatttacaaatggaaaagagaatttggaatgatgaagaaaaaaaatcattcagttgaaaaaaaaataataatgttaaagcaatttgatcaaatatatgcaaaattaaaaacgaaatttaatgaaaaattggaagaaaaaagagaaaaatgcaaaaaaataatagcaacacatttgggcataaatatcaaaactatttataaatggaagaaagaattaaaaaatgggaaatcgttgaaaaatcaaaaaactgatgatgaaaaaagagaaattattgaaaaatattttaaaataaaaaatgaatttttgcaaattgggaaacattcacgaaaggaatgggaagaatttcatgaaaaaattaaacaaatgtttggaatttattttagaacaattgaaagatgggcaaaaaaaataaaaaatcaatcaaaatgtttcaaaaggtgaatttaaagatttattaacgtattttttttaatttacagagagaaaaatgttatcaattgatgaaaaaatggaagtgattaaacaatattatcaaatcaaagaacaaaatccaaaattcaaagaatacgaaattgccgcaaaattgggaattccaatgagctcattagacaaatacaaaaccaaatatggcaatgaatccaaaaacaaattgctataatgaggacaattattattattatcccaagaagattaaatgaaaaattacaatgaaaaaaatttgaaactttcaatttttttcttgagaatttgtttaaatttgagtttgtgataaaagtttaatctctttttttcatctgtttacaaaaatattttaatcattaaaagcgtcgaatggtctaatgttttaggtgattaagtttaaaattatattaaatgttcatattattttaatcttgaaaaattgacaaaatatgtaaataaaaaattgataattcaatcaattaaaaagtaaaaaaaaaatttataccaaattaaactcactcaattaaattaatagttttaattaaacttaaattaatgaattaatgcacccatctaataatataaattattgcttttaattgaaattgaacttaatgcacccatccaataatataaaattaattaatttaaattaaattctaacccattttttctattttacctttccaatggcgagcccatccagtgaaagttggccttccccaacaataaatgccaatgtcgtcctcaccttggcacaaattttcggacaacggaatctgttctttgtcctcaaagcctggacagttccacagagagtcttaaatttcaaaaaataaataaaattaaatttggcattaaaattttttaattttcccactttggcgttgtgtacatttgggcgccggcatttcaaatgggtaagtgtcgttgttgcgccgaaaaaagcgccaaaatgcgccgtcatcatagcccatggtacggcacgcggtgcccgtgtcaatgctggtccaatttgtcatttgggtacagacggaacgccaacggtcccgaaagcgaatctaatcaaaaaaaaaattttcaaaaaatgtattacgcatttttaaaattaagtttaaatgataaaaaggcgttacgaaattaaaaatttaattttttttttgttacttaattacaatttttaattttttggaacaaaaagatgaaaaaatcatttaagaatcattttagtggtaaacgaaaatttttttattagtttttttagactgtaacattcatagttaatttcaaaaaattccaacattgatcaaatcttgatgacaatgaaaaaattctgaaaaatacgctttttttatttttgatcaaaagtctttttttttgtaaaatttcagctcaattagacaattattttaaatggctttaaaatgtaaacctcgtattttttatttttaactcaatgtttttttttataaaaaaaacatttttaattgaaaacgaacttttattaaatttcataaattattttttgaaaaaaaatattaaagaaatttgcctgcagacggccttgcctgacccgtgggaccgtcaattagccgtaattctggcaatttgctatcgtacaccagctgctcttggagcgatatggtcgatttattgttgctgagataaaatcattatgtatttccgatttattacgcttatcaaaaacataattatgggcaaaataaaatctttaataagttacagcataaattacacaaaattttcgggtggcttatacgacaattg

SEQ ID NO: 1866 - DNA, 1933 bp, Heterodera glycines
  unsure (1)..(1933): unsure at all n locations
ttagttagttaaatcanaatcaagtgatcatatttttatttntatttgacnaatgagtaaaaatggtaaaaataattaatntataaattcagagaaaaagaaattaaaattcaaattaaattcaaataaaaaataaaaatttttgtgttattatttggggtgctctaattattgcatctttttttttgttagtttcaataattttcgatatgtggttaaaaaatcggaatttgtaacacgtagaaccttatgaaattttaacaaaactatttgggtgaattttgatatccatttatcataacggtaaaaatattttatttaaggaaatcattgccgagattgggaaaataacatttttaactattggcaaacattttacaaaagatcgccatttttttgttggtttgtgaaaaattcggaatgcgcattttcgaaagtatttacaattgtaacctaatttccttaaaatgcgcattttcgattgtatttacaattgtaacttaatttccggaaaatgctggtttgtaaatttattaccggaaaatgcgcattgttacgatagtatttacaattgtttaacatttaattttaccctgaaaatgcgtattttccgataatatttacattgtaacttaatttccggaaatgtgcattttcctatagtatttacaattgtaacctaatttccttaaaatgcgcattttcgattgtatttacaattgtatcaggaaaatgcggatttggaaatttattaccggaaaatgcgcatatcagatagtatttacaattgtaattttaccctgaaaatgcgtattttccataatatttaccttgtaaccggaaatgtgcattttccgatagtttttacaaatgtgacttaatttccggaaaatacgtacgaaggtatttacaattgtaacttaatttccggaaaatgcggatttgtaaattaattaccggaaaattcgcatatcagatagtatttacatttgcgacttaatttccggaaaatggggtttttaaatttatttccggaaaaggtgcatttccgatagtatttacaattgtaatttttaccctgacttgcgcattttccgataatatttacattgtaacttacggaaaatgcgaatttgtaattttttaccggaaaataagcattatcacgatagtatttacaattgtaattttactcagaaaatgagtattttccgatactttttgcaattgtaacttaatttccggaaaatgcagctttgtaaatttattaccggaaaatgcgcatatcagatagtatttacaattgcgacttgatttccggaaatgtgcattttcctatagtatttacaatttggacttaatttccggaaaatgcggatttgtaaatttattactggaaaatgcgcatatcaaatagttagtatttacaattgtaattttaccctgaaaatgcggatttcgaaagtatttacaattataacctactttctttaaaatgcgctttttccgatcgtatttacaaatgggacttaatttccggaaaatacgtacgaaggtatttacaattgtaacttaatttccggaaaatgcggatttgtaaattaattaccggaaaattcgcatatcagatagtatttacaattgcgacttgatttccggaaaatggggtttttaaatttatttccggaaaaggtgcatttccgatagtatttacaattgtaatttttaccctgacttgcgcattttccgataatatttacattgtaacttacggaaaatgcgaatttgtaattttttaccggaaaataagcattatcacgatagtatttacaattgtaattttactcagaaaatgagtattttccgatactttttgcaattgtaacttaatttccggaaaatgcagctttgtaaatttattaccggaaaatgc

SEQ ID NO: 1867 - DNA, 1936 bp, Heterodera glycines
tggcgttggaacacacgccgagcagcgaaaagccaaaatgggatttaatcggacttcgaattgggatggaggggcacgaagacggacacggacagcagcagaagggtgggatcagcaacagcaattggggaaacggattttagaaatataaaaatgaggtgtgggggatactgtacaatataggagatgatcaaaacggaggattgggagaaaaatgaaaaaggggagaattattgttgggggggggggggtttcccatcaaattgggacaaagctgacatcctctttcttcagcttctcctcagtttgtccactcgcgcgttttggccattcgcatcgacccaatggcacttcacttgcgaaatcatagcgaaattgcaattccccagggcaaaacatacgttctgttgagcaggtgccgaattaagtctaatccggaccgggtcagtttagtacggccggtttagtacggccgttttagtacggccggtttagtacggccggtttagtacgaggggtcggtttagtacgagggtcagtttagtacggcaagctgtttttgtccaaaatagattctactgattttttccgaaaaaatgtttaaaattaataacataacataccgtatttgctctttttatatgccatggtatattatttttcaacctcctcagaaaggggtagataattggagaccggcagattaatggagactggcacataaaaagagcaaatacggtatttatcaatgtgttaacaacaaaaaaaataacaagcattgaaaaattacgggcgcatttcataattgcgagaaataccaacgagcaaattgatgatattatcgggattacgttgaagttttaaaaaaaacatttgtaacagttatggacaaaaacagcttgccgtactaaaccgaccctcgtactaaaacggccgtactaaaccggccgtactaaaccggccgtactaaaccgaccccgaccgcatattttggcatttttcaaaaaaacctctattagaacggcccccagcagctaaattagcctttttgagcccaaaacccgaaaaatttttcaaaaaatcattttttcgccaaaatttctcgagaatattgaataaatttaaattttcttaaaaattaataaattatgtcaaaaataagcaaaaaagcgaaaatttcgcttttgttgttgattttgcgctaaaaaaattaataaattttagcttttatgttttttttcttttaaaatgattgcacgtaattgccgaaaaaattcgagaccaatttccgaatgttgaccgactaattgcaaaacgaaagccgtctttgtcaaagcgccttaccgagtcaaaaaatttggaaatgtatctcatatgcaatttcaaccaataaatttgaagaaattttacattcagttttgaaaaatttatgtccatattttgacatttttgccatttatgtccatatttcgcgatttttgccattttatgtccatattttgcgatttttggtccatattttatggccatatttcgcgattttatatccatataattacacgccctaattattcgtaacgagaaatggtacttgttaagggacccacgcgtttacggcgctggcgtttcagcgccagctcgtttttccacttaagcttttttctttggcatccaaatccaacaatcttggtatcattcgaaagctcttatcatgctctattaaccttacaaaaagcggatagattttcaagcctgtaaaaaattttattaagaaaaaacttcaaaaatttcgaattttcatgtaatcgcgaagcaatcgcttagaaaaagcttctaaacatgttaagctttcgaatgatatcaacaatgttggatttggattacatagaaaaaagttatagccaaaaacatgctggcgccgaaacgcagtggaccc

SEQ ID NO: 1868 - DNA, 4906 bp, Heterodera glycines
  unsure (1)..(4906): unsure at all n locations
tggagcgagtgctgttggagtaccagcaattagcgttgggtgtgttgttcccgccttccggcgcgtatgtccttccgtacgttccggcaacggagcaccaaatcaaaaatgtgctgggactgctcaaaaaatgtcctccggccccaccaattagtccgctaattgaccttggcagcggagacggacgcgtcgtaagtgattttctttttattcagataattaaaatgtatttcaattagtaacaattacataattgctcatcattttgtacatttaatgcgcgtgcaatatattacacacctcctaaattgttattgttgttgctgttgttgttacaaaaccacaaattgtaaacggaaatgaaatttggggaacaattagctagtcacttgacgccagagtggcgcaagcagtacatccgttatgaggagctcaaatccatgctttacgatttgatgttggaggcgccaacggaagcggacgcgcgtgatcagtaaaaatggcctaaaacatttaattgggaattaatgttcaccatttntaggtacgttacccaaatggacgagacattttttgcggaatgcgagaaggaattgacgaagatcagcctgttctttagccaaaaaatagcggaggcccagggaaagtaccacgagctgagcgcggagctgaaccttttcaaggagtcggtcgaccaccggcaaacgcccctcactcagcgcaaaagtgtgcgggtgcgcttcaattcggccacgaaattggccccgtccagcaaattgcaaaaggaacaggcgaagacggcgcagcaattgaaactcgcgttcagtgaattttacctcaatttggtgctgctgcagaactaccaggtcataatttttggaaaaatcaaacaattatatgacagaactcaacagttaaaccgttaaagtattttttaaagaattttcctggatataatggtccaagactaacctatttgcggtgtcaaaccttcacccgaaattaaaaaaaaagttgctgttgacaaaattcttttttttaaaatttcgttttgatgttaaattgttttggttttagcaattgaatgccaccggattccgcaaaattttgaagaaacacgacaaattaatgctgaatgaccgtgggatggcttggcgaataaatcgggtggaaaagtcgacgttctttctgaacgctgacatcgagtcacttatcaacaatgtggagacgactgtgatcaacgaattggaggggggcaacagacaagcggggatgaagcggttgaaagtcccgcctctgagcgaaaaggtcggcccggaaagagttttataattgggcatcttttagcaaagtgccggaacaaccttttcgcttggcatgttcatgggcattttcatcgttttggcgattgccatcgttttgtccctggtcggactgcagccaaaggacaataaccagccaaaatgggtcgctgttcgactcttccgtggcttcttcctcttcttcctttcgatatttctttgtggtttaaacatgtgtgtattttataattgggtttcccttcatttttacctttaaaggtacgggtgggctgctgcaggggttaatcatgtgctcattttcgaggtacatttaaatcggtcatcaaaatataaaccaaataaattttttgaaaactctttcacttttacaatatggaattcgttaaattgaatacttccaatttgaaatgctttgcaaatttaatttttttaaaggttttcaactcccctccttcaaattgcaggtcgacccccgcaatcacctcacctatcagaccatcatgcaaatctcctcctttctgatgatgctttgggctttggccgttctcggctttctgtacgcccattggcttcttctgccgcccttccttttccccctgctgttgatgttcgtctgtgtgctgtttctgctcgcccccttcaaccgtcccactcagttattccaccgcaattcgcgcttttggtttctcaagcattgtttcaactgtttcaccgccccttttcattttgtcactttctccgacttttggctgggcgatcaaatgaattcgctgacgttcgtttttctatttttcatcaaaattgcatgcctttttctaccatttagtacttgttttctcgacttacagtatttcatttgcttttacgccaccgaagttgactattccggcgcccaacttcacgtccgcacgctgaatgttaccgaggggtcaatcccttggggttttgtcgacgtgaacaccggccaggacatgtgcatgtcttccgttggcattcgatccgtcgtctctgtgctgcctgcgctcgtccgttttttgcagtgccttcgtcgctaccgggacagtcgggcgtggcacccacatttggtgaacgcgggcaagtacgcgaccacctttttggttggtttccacttttaatgtcgactttaaattgtttcaaattcataatgtctttgttttcggtcgtcgccacgaattcgctcagcaaatggtgggcagtggaaaagccgtctgacaccacctcacttttcttctatctgtggattgcctcgtacataatcagcttcacatacacatttttggtacagaatcgagggcaaaatcagcttcaatctcaatttcccagtgggacattttcatggattggggcttaatcgacccgacggcaccgaaggaggcgccttttttacgcgaggaaatgatttatggaagcaaatggtattattacttcgcaatcctggaagactttgtgctccgactctcctgggttatgaatgtttcgctggctgaagcatggtcggcatattttgtatcatcttttttttatcttttcggtttttcaggactttgcaaggcgactttctggtgtgcattatggctccgttggaagtgatcagaaggtattttcggtgcattttgatcattaatctttcgataccctccgatgccattcaatctggatttactttatgaaataaactgcaccgataagtatcacgtcattttttaatcttcaggtttatctggaactattttcggctcgagaatgaacacgtgaataattgtaatgctttgtccatgctgccaaaaacatttcaatttgatcatttacaatcccctaaaggtggccaattccgtgccgttcgcgacattagcgtaaagccaatccgaaagggcgacttggagtcccttttggccaagatggaccagcaggacggggtcacccatcggggccaggacttgcgcgacagagtgaagaagcagaagaaggcggcccgggacaaaaagcaaattctgaaaaagaaccgaatcacgcggatcagtctgcctgcaattcatccccaaccgagcaacacactgctggagacgatgcattgaggaagggggggggggattagacagtcaattattcaggttttctcgataatctaaactcttaggtattcttttttttgtcttggtttcagtttttcgtttatcattcagcaattgtatcattatcattcattgaatgactgatacgaatctttccgagaaagctccgccaatcaaaataatttgtccaacattatctgtcccagtgaattttgttctagccaatcgcttttcagtgtgtgacattcccttagtttttgactactcattatacttttaactcatggtttattgtctgttttggtgtacattttgttgttgtgcccttttattgataaatttcttagcaggaatttttctgcatttttctaaaattaaaataatattttttgttgattaatatcccaaattcaggtgattgaatgtgctcgagtcggtcacaagagctgtgtgggtgttgagctgaactaccctttggtgatcgcatcgaggttttccgcatggcgcaaaggcttttcgaattcggcaaattttgtccgtggtgacattttcaaaacggatctcagcaaatacaacacagtcatcctctttgggactgaatcactggtgctgtcattctgtgcatttccgatgatttaataaccaaattttaaaagctacctaaattgcattttatttgattttttaattttaggtggagcattttgccctaaaactcaatgagatgcgcaccgattcaaatttggtactttgccggttcccattgcactccgacgaatcgggttgggaattgcgacactcggaaggaatcggctgtgaccaagcgtggctttatcgccgaacagggaaacagtgaccaaacgaaataacattatcggttgggtaatattatacaattgctgtcccaattggaactgtttgtttttctttcatgggatcttaggcagaaaagtgtggaaggagtggagcaaaatcactcattaagccctgattataatcgctcttgggacttgcattttatcccagtccgtgaaaaaaatatgattttccatcgggacagcaatcccaaatatcaattacatcggatgctttacatataatttgtagcgcaaatgttgattttaataaatttatatggccaattgggatcaggttaaaatttatctactgtatctggcgggatcatggacatttacatatggttaattgagcacacatttcagccagagtaaaaagcgtacagctcaccttaatttgctagcaatgcttcttcccatcttttcttttcccgtgcaaaatatccacacatttttctgttttccgccgatggatttccttccatccctcgccttcctttcctcttctcattttgttttcattaggccgtctcatccctcccttcctcttcctcccattctcatctttcgttctctttcccttctccaattccctgttgtccgtttttctctttcccctcacaaatcgattact

SEQ ID NO: 1869 - DNA, 4074 bp, Heterodera glycines
  unsure (1)..(4074): unsure at all n locations
cgaaataccattatggatgggtaatattatacaattgctgtcccaatggaactgtttgttttctttcatgggatcttaggcagaaaagtgtggaaggagtggagcaaaatcactcattaagccctgattataatcgctcttgggacttgcattttatcccagtccgtgaaaaaaatatgattttccatcgggacagcaatcccaaatatcaattacatcggatgttttacatataatttatagcgcaaatgttgattttaataaatttatatggccaattgggatcaggttaaaatttatctatctggcgggatcatggacatttacatatggttaattgagcacacatttcagccagagtaaaaagcgtacagctcaccttaatttgctagcaatgcttcttcccatcttttcttttcccgtgcaaaatatccacacatttttctgttttccgccgatggatttccttccatccctcgccttcctttcctcttctcattttgttttcattaggccgtctcatccctcccttcctcttcctcccattctcatcttcgttctctttcccttctccaattccctgttgtccgtttttctctttcccctcacaaatcgattactcacacttcgccttcccatttcatcagcagcctttgctcactccaccaccaaacattggttgtgtgcacacactcactcgccctcccctcttcctctgctgcccttcgtcatacgactcccttccttccatccattcccctccccttcgccttcgcagtgtgacatttctttccttgctctcccttccctcccacaaaccaatttcgtctcttccctttccctcgtccctccaactgtggcgtgctcccttccctcccttttttctcctctcccttccttcgtcactttgtccgccgccaaacaaagctccccaagcagtcaaccctcgctcacactctttcccctcctccctcccgtgcttactctcctctcctctcaattttcttcctcacagctctttcatccatccatcctctcctcccaacccttttctttccaacaaatgcatataaacgctatttcatcccgctcacttctttcataaatcgccctttctcccctttccctttcttctgtcgctgctgcctcgcccctctgctccatcctttactttaattctcaacaacataatttcctttagtgagattgctgctctgtttcatcaactcccttcttctgtcttctcctcctcctcacaacctcttcccttcatccatccgttcaccctccgtaagtcccttttatttcctctacttttgcttctccgtccgcgctgatccacccgttctcatacattccttccttcccctccttctccatcttccgtgtctgttttgtgtgttctgctgcagttccattgtaagtgtctaatattagcgggttgggtacgtataagctgtgaatagtgtgggcagagagccattcccaactgtctctgttgtctgttctgtggtttgctacttctacacacatacatatgtagcaagtgcgaagggagagattttgcactgtgaaatattcgaaatggtcaaatacgctttgttattaaaatataacacatgcatagcgtggcttatagaaggaagtctggaaatacaaagccgattcttaaaaaaaattgtgtgtcatttaaaagaaatacataattaatcaaagaagtttttaagtcaataatttagttaaaaagttaaattgaaggggggtgacttaattttcttggccgggtcacaaaaaaccaatcgctttttttgtgtccaaatttattcattataagaagtttaaatgtttacaacgaataaagaagaggcagttaacgaattaactaattatgatggcacgggaaatttaaaaaagaaggaactgctgcaatcaacaaaatctctggcgaaaaaacaaaacaccaatctcactattctaaatttatttaaaattaaaaaaccaattaatttattaccaaggctgagtttttaaaggctgcctattttatgtgttccggaaaaccttaacgttaatccgcctgataccggtcctaaaaattttatatatacctattctttccctaaaaatagagtttttaaattcatccccttcatttatatgattttttatttgcaaaaacccacaaattcatttttttagttcaaatctgttaaaatatggccataattctcaaaatttcccccgggcgcctgtcggaaccgccgggcctttccttagtcggtccgatcaattcttggtgcaatttaaataaaaatgaatttttctttttcttttttccttttattaaaaaaacatttttgaaatattgcatgctaattagggttatcgaatgatgtcacatatcaacgaacaggtttttattagttgactctgagaaaatatggcattagctatgtatgttagctgttctttcgtgatcattgcttacaagaatttctgctttgatactacctgaagatgcgtgcgttttttctcaaacatctcctaattcgtcgcttcttcttttctgattccacacgttcctctatttatgaaattctgccttgtctttttttctaatataatttttgttgtatttatacgttgtatatatatatatatatatgaatacgtcatatcttttttaaaaatttctctccaggcaatggaacaacaaaatatcacttattatccgactgaaattgtccacggacaaacgaacggcgattcgcaagaacagtttcacagagaacatgtgtttcattcggatgcaaatgttaattttcacgcgacaaacgatacaaattttggtggtggtggccgccgagcagcttttgtaagaaaacaatttggaaaaagaatacctatttgtctaatcaatcatttcattaaaatttgactcaatgtgacagaccatttaaacatgtattcccattaagaggccaagtcagttgcagcaacgtcaacaacacatcgtggttcaacaggggccgacttcaattccgcaacgggtcagcaccaccaacattccggcgagtactgcaggacaacagacggtgcatgtgcagttggtgccgcacaatcaacagggaaatagcccaatccccggccagcaacaacaacaacgccaacaaattgttgttcaacatgcacctacctcaatgccacaacggatcagcaccaccagcattccgacgagcactgcttctggtcaacaaacggtgcatttgcaattggtgcctcagcaagggaacagtccgattcctggccaacagcaacaacaacagcagcaacaacacattataatttcggcgcaacccgtccagaccaccaatacgaccacagaatccgcagatgggaatccgattgctgcgtttatggagtactttgtggaacaacagcaacagccgacgtgttccacgaatactttgcccaacgttcagaccattcagcagtacgggtcgccagtgttggactcgaagtgggctctatttgcatcattaatatacaagggggtctcaggccatgggccatatgatggacgattgattaagggggggggggggtgtctcgggatcaaatttcgatacggaggtgcgaattttacatcggtgtgaccattacgcacatcaaatcagaaataaaaaaagttacttcagtttttaacctataatttcttaaccgcaaattttggggaattttcggggaaaaaaaatcataaaaatttttttgttctatattttcaggtttaatttccgtggatctatttaatatattgtgtttaaggttcactttgaaaaataagctgttgagcggaatggacaaaagttcggagaaggctgaacgggaagcagtgaaacgggcacggcaagcagaggcagcacgacaacggtgggtttcaaagaattaacactcagattggcacccagaatttttaattaattcaaatttattaaggttcagttaccataanctgactccggagcagaacaaaaaggagagcttaaaaagaaccgaggcccagaagcggaagaa

SEQ ID NO: 1870 - DNA, 2921 bp, Heterodera glycines
  unsure (1)..(2921): unsure at all n locations
aaggtcccataatttacgtcgtcgaatgaaacaggcaaaacctgaagaaagcaccaaagaaatcgtcgttggcacggacgacgagacacagcgccggatgaaggaacaaaacgcgaagaaggccgagtcggcacgtcaacgttaccaccgaatggttttagtcgctgtataattgatgctttcctaactaatttaacaaccgtttgcagagcaccgaggagaaaaagctgtacaaccagcggagaacggaggcattccgacgtcgccgaatggaggaggaggcactgttggcaatgccaattgggtgagcgacgaaggagaagaagcgcattactcctaattaaacaaattcagaagaattaatggcgaagcgcttgaccgagcccaacaaattgtcatccgaaacgccaaacgggcggaggctgcgcggttgcgctatcagagaatggtgagaaagactaattgtaagtaatgagtttttcctttcattatcagacgccggaacagcgtcgagcatacaatcagaagaggtatatgccgaagcggaagagagacatggacatgatgatgagcatggattcgccgcttgggattgacaagaccgacaaaatggaacgtgaggaggacgaatttggtaggttatgcgattcaattgtccattgtttttggaaccaaaatgtaattctgtgtgcaatttaagacgctctctcgtcattggaacgcgacgtgcagagacgaacacaacaggcgcaacagacactgcgtcaacgccagtgggtggtgcaacagcagacgccgagcgcaacgacgggacaccattgaaatacctaataaagcaatgttgctgcatacaaagcattcgtcattataattcactgtttattttctgagaaattcatctttaaaaagtaatttgcgttttaattacacttaaatcgcattcgaattccgtattatgtggctcttcaatatttgtatttttgtttgttgatttaatgttattttttgtccactaattattgctttagtcgacctatgagttcaagcaaccgtcagcaaatttactaccaaagccgtcaccatccgcagccccaccgtgtccccggcttgtcattgccaattgcttcgtcctctcaccacgacattggctccatcagtcctcgacatgaccatcggcagatggtcatcgtgtccgggagtgactcgtgcacggattgcgtggccgattaccattcgtcgtgcgactgtcccgcttgcgaatcgaaaaatgtattttgtaatgttacaatgtttattcaagtcatccttttaatttttgcagcttgcttcggtcggacatgacgctgggctggacgaccaccagctgtactcgtactcactggaaccgacacagttggaggacgacgacgaggggtaagcaaacaacgaacgaatgtgatacttagtttattgaaatggaaatgccattcaaaacaggattgtgcacgaattcacaacggactctggcgaacgccatgtggtgatcatgacgaagaatgatgagcatttccaggagggcatcaccattcaagaaaggcaagttttgaagttgttttgatctgcttacatcgaattgattgcttgttataaaccgcatcaccaaactagtggaacattgcctctcgccctcccaactaacaatttttgtcccaccattttatagagttcgtcgtcagaaattgtctgaagccgcccgtagccgatacgctcagctcagcgatgaggagaaacgagcggtcaccgaacggagaatcatcatgcgacaacgacggaagcagaaggaacgcgagatggaggagttggaggcgatactccgcgcaagcaatggtgtgacaaaaagcaacgatttacatattaaatatcatttattaaagtaacacagtgtttaaataaatttgtcattgctcatattgtttgaatatttagacatcaccgacgatttgattcccctggatgaggtggttgcccaacggaagcgtgccaaaacgagtcgttaccagagcatgagcttggaagagcgtcgtgagtacaaccagaagaggcgtctgcgacagttgggagtgtcgtccgagaattttaaccaaattgagcccatcaaattggataatatccggagacaaattgcggatgtaaacgcacgcaaggcggaagctgcacggcaacgctaccatcgaatggcaagatttaattttcgaaattggcactttttttgacgccatatgattttagagtcacgaggagcgaaagatgtacaaccgacgaagaacagaatcgtgattactttctcgacaattcccattaatgcatccttttaaacaggttccggaagaggcgcatcgaagaagaaaaattgttgtctacgccggcaggccaaattacgccggaggcactcgagaaagcgcagaacatcatgatcaggaatgccaaacgggctgaacaagcgcgtcttcgttaccaaaagaaacagcaggaaaagggcatcatgccccgacgacagcgaaagcccaaaattgaataccgagcaagttccggagagccgagtnttgggtggctgtgcacttgggtagctaatgatgccatttgcttattattgcagaccgaatattggacacaattgaacgtgacgtaatgcgaaagaccaccgaagcacgccaagctttggtacgtaagcaacaagttgagcctaagaaggaggaacttggcgagcatgagcaagtgctgttcacttccgtggacgaacggcggcggtggcagcgccagcactttgcccgcccaactgatccaaacgacaacatcgggctgtcnggtctgaacgtaccgcacagtgggcaaaacgtggtccaatatgttcaggtgctcctcccattgngagtgaaaatcaa

SEQ ID NO: 1871 - DNA, 2744 bp, Heterodera glycines
agcggaattggtgaattgaatgtggctcgtacgtttgtcgtaccgcttctcaacagctcaaatccacaactgtcgtcaagcgtggaagtcaatggaatgacaaaaaagatccacccttttttgaactgggccattgaaatgtcaaatgaacgttccgagttagccattccgagtgcctcatacatgtcaacaaaggcgctgacaaagtgatcatttgaaaaatttagtttataaggaacagctgggtaaactacgccaccagcatgtaccgaaatctcacgcaaatcaaacggctcaaacatgaagggactcagtttgtaatcaccatgaaatgctgaatttcctaccaacgctattgtcacacgtcgaggaatggttgcactgaatacattgtactcaaattcgtatcgaccaacactgatgaatgacgacttgatttcggtcttgcgtactgcgtacgtggcgggttgtttttcaaggtttttgtaaaggttcatgtttagtgagggttggacctcaaccattttggcataaatcttgacatcgtaaactgtcaaacgatatttggttgaatcatttgcttttaaagtttgcaaaagaaagacatctttagccttgtaaattgtgaacagcaaatccaaattgtttaaaagataaagctcctggtttcccagatcaaagtcgagacgagagaggaattgtgcattttttccacccttgaaaattttacaacgctctttgaacccctcgtctgttgagtcatcttggtttatggtgtgataataccctgttgaaccaagaaaatttttcttggcatttattggaaagcttaactcattggtgatataggccttgaatgggtataggtttccgctatcgtatacttccgtattgccaaccgtaacttttagttgctggacaaatgtttgaccaatcccttgaatggcagagacactagtatccgcatcatctatcgcaacccatttatcgtttgctcccggtttttcaatggacagttcgagataaagatatatccgagataaatcagtccacaaattgtcactgtacagtcgaaacaggtacggtgattcttgcgtgattgttgctagcggaagcacctgacgaaagaatgaacgtacaacagaaacattggtcggtggaactaagaaaatgttcagaccagtgttaattgctagtggactgctgtcgctgattttttgtgggcaagtcatttttttaataggttcctaatgagtcaacacgaagacgtttatttttggtcttatcaaccattggtggcccgattgacgattgaagtttatttatattttttcgccttattttttcaattttgggagccgagtcttttttgtatcgcttaaaatcaaaaccttgacccttctgagtgtttatgttgttggctgctttttcgagaagattctttagtcctgccttactctcactaacgagagactctttgaggttttttccctccagcacattggtgagtactcgatttcctgtttccattccctgacgtccaattgcggagccaatttgctttccaatcggcagcaaatatctcataagacttctgaacactgcgccaactcccgctccacgctgatagggcaacccccgataaatgttgtatccaccaaattgcacatactcggacgagaatgtggaccaatccacttgtagaggatcaaaatcaacatgcatttttttttaaatttgacgtttttacattatttatattctttgaaaattttgctttttacaaaattgtttacgagcgtatccggttgcatctttccaaagtgcaaaaagctgacaattttttcaaaggtcattccaacacatcgacaatacaaaaagaaaatgacatgtcgaccacacgcacttgagttggcagactgaaggggaagagaattatattgaatttgtttatagcgtgacaaatgattcacaatgtaaacactgggcggtggccacaaccccaatgagtcataatactccaaatgcaaaggagaagcgcaatatatgcccacccaatgagaaccatgtgatgtgctggggtcaagattaaccaccatacagtggggaaatttgacaattacaccggtgggtatttgatctgctgcaaaacaaccaagatagtagtggcgagtcacgttgtttcttgtcaatgttttgttaatttccaacgtgttcatcatttaaaaataggacatttttctaaagtgtaatgttaatgtacatgttccgtattggaatggcattaagatgccgctattggtacgtatctcaatcagaatttcagaaaactcctttaataaaagtttatgatactgtatggcaaaaaattgttcttcaactacttcgtcggggtttccgcgtatggtcactatgcgcaacactggggccgtcacatctccaatcatcattggttcaataagatccggcgtgtaaacgtggaatgatgacacaccaccgctcatgtccggcatgaattttgcctcgttttcagattgaataaactccgtgttgttgaaaccgagaatgtaggcgagttgaaacgagacttcaacctttttaacgtaccgtgggtcagtgtttaaaacaaagcgatttttattgacgtcgtagttaaattggcagacaagacgtatttcacgatacgcctgaatccatgcttccgttcccatttcctttgtggcttaaggatcgcacgttcctct

SEQ ID NO: 1872 - DNA, 7760 bp, Heterodera glycines
gtcgtagtgaaatggcaaaacaagacgtatctcacggtacgcctgaatccatgcttccgttcccatttcctttgtggcttcaaggatcacgcgttcctcttcggtcaaatttttgatttcggcgttcaattttgtcatgcccaattcatcaagaatgttcaaatttttgtcacttaatttcgaaaagtactcatccaatttttcttggtacgaactggtatcatcagctggcattctcaacggtacattactcgttgcagcactcttttcgcgtgtcagaaagccttgggccacgctgttgaggtcaaccaatgttccagtatctgccaacatggcctgtaggagcagctcttcgtcacggacgccccgtttttctttagtctttcgcttaatgtactcttctctggcccagcggcgagccttgtttatcgtaagcatgaaagaattctgtgttgatcgtaccttttttgccaacggatcacttccctcacccaggagcctatataaatttttgctaagctcatgggggtttgtgacatttgatggcggaacttcgatacgtaccatattccctgtctgccactcaatctgtacaaattgttgctccacggtgcctatcgagggccaagagtggggatatacaataacggcaagacccacctcccattccgaattgaattgcaatttgcgcggtaaacgcactcggaaagaatttgtcctatttccttcaatattggtgtttgacggaagaacagcataaaaagaatttgaaggcattttttttaaataaattttattaatttatttctttttatatatttttctcgctaattgaatttacgggaatccaactactaaagcgagtgccataccctttccatttcacaaatgcataatccacaccgttctgcctctttttcttcaaaatcttttcaatttcatacttttttgctgtttgtcttctagcgttttgcataaatcatttgcgtaaaaccaaccactaataatttcattattgtcatcacgtaaccgataaacaactggcgaacgctcagagtgtacctctgccaccgtgaaaagttcattggtgaagcgtgggaggtaacccttttggaacacgtgcttgtacttttcaatgcgcacgcgatctcccacgcggtactttggctgatgtcgtacaaaattttcagctgctgcaccatgtaatttttgtcgcaatgcttctgcgtttttaaagttcacgtctgctgggcacattcgaatgctcgaatttggcgagtggttaattgcgtaaacaatgtcttgcacaacatcaatcgacttgtacgtgttacgctccgtaaagtagcggtaaaggcgctctttgatgctacgattcgcacgttctgccattccggcatgaaattggggagaagtgagcatacaaaagtgttcaacgtcttttgtgcggaagaactgctgtactgcgcgggcagtgaattcctttccctgatctgttaacaccttccacgggatatattttgatcttttgaatatacgaccaaatgctattatcatgttagcgctcgtcttggtctttacgggctcgacaaacacctgtcgactaagggtatcaatacagactaacaagtacttgtagccacggttttgtttagcaagtcggtcaaaaatagccaaatcggcctgccattcagtgtgtaagcctggtgccaatgttggcaatcgacggtagcgccgcttggcctgacgatgcagtgtgtatgtacgttgggtggctaaataattttggacatcggttcgattaatttttggttgagttttctgcgcctctctcagcagcggttcaacgctcgtgaatgcgacaggcgaacttagttccttgtacaaaaactcaagcaaacgaagctttttcaaatccataaagatggattaaatttcagtgtggtgtttttataaatgcctttgccggattggccttcgggaaataagtgcctactcaagagcgggatctgtcttgccctttcaacaaattctttgaatgcagttggctctttgttttggccacgcttgtccttgttcatcaggtgactaacaatgtcataaacactgctggttataaaaggccgcccacccgctctcaagacctgtccttcctcagacactccaagagattgggcgtttttataaattaattttaagatttccctttgtgtgggttgtcgtttatttgaactcgatggctttggagtttcatcatcatcatcatcatcatcatcaacatcttctagttgttcaacatttgcttttcgcgcacgcccaacctttaaatggcgacgcgtagcgacaacaattggtcttttgacgttgactggttttggcatagcgtcaaccacatcactcaaattttctaatttaacacccacgggacgttcatcctcgtcccgagtcagcttgttgagacgcttaagttcctgctcatatttgattgcccgttctgcctcatttatgccgtcatcgtttttgatttgtttaattctgttacgtaccagcccaattggtgttccgtcatacggtggcggtgatgccaaactctgataaatttcttcggggacaagcaaatagcgctttgtatgctgcattttactttttttttttactttgttgcaccttatttataattttcaatgacatccataataagcggaagagcaattgacgcaatgagccccacaatagagggaaggccctctccgtgctgtagcaaaacctttttggttgagcgagagcagcgtgtgcgagcgagacgacgaagcaccagtgcatgagctttcagcttaattattttttcaactctagtaataataacacctccatctatctttttagaatgaagactagtaaactttaaagagatttcacttattcaactttttcaatctaactgattttttaataatttattattaacacctttacactttacaatgtctttagacggatctatgctgttttttaatcaataagcttttgcctctctaccataaaaataattaaaacaaccctcattttttcattttccatactctttaggatctattcaatcttcccataaatgtttagattcatttaagactacaacactatctgtgtcacaatataatacagaatcttttaatatgtttaaatgttttattaaatatattcttgcttcagctgtgatagaagcagctaatggtaaatatgtgctattatatttttttaattttaaggatgacgtattatcactagataatatttcatcatccttaagtaataaacaatatttttctttattttttttataagttagatgattttttctttttttacaacaacatttttgaagaacgtatttctgtaaatttattctttgaccaaatttaccgtataaagagttttgaagaagtttagctttagttctaattataatattttgagatgattctttaagaatctttaatggtgataagtaatttaaaaatatatcttttttagatttataataatatgcttttttaatataccaattacctgaataggttaacttaaatagatttaattctggttgtgataaataataaattccttgttttaattcgttattatattcagctatttttgaatcattatcaacattattagaagaaataaaaggtttattttcacctattattttagcgttagtaatatatacttcaaaaaaaccatagttgtatgaatttgttggtacttctgatcaatcattaccataaggtaatctcatattcaacataatatacggataaagtgaatttatatctaaataagagacatctttacataactcattatttcaaactttaacaaacccacccctataccactttcttagatattcatggttacctataaaatctcatttacaatacccatcagattttttaaactgactatatgaataactagatattgttgttggagatgttttaaaagattgaagatgttcaaaaacagttaaacaatcatcttcacataattgtttatcgatattagtagctctataatttaaaggtttaacagcatcataatcatattcttgttttctttttaatctatcaggagtgattgtaagtttttttacagacaaagggagaactttaagagagtctttaaaaataacaaataatttattttttttataaataatatcagaatataatttaattcaaaagaaccctgattgaggtgtttttaaaaattttatattatctaactcaaagttttttattaaatgtcaaaaaataaactcaccatcaaagtttaaattatgaaaatatattgttattgattcttttttttttaccaataaaataagggtgtttaaaaaggattgaatattgtatccaattaatttatacttattattatcttgttcatatacaaaacatcatagatatactttagtttttctaacacctacacatgtttcaaagtctgcaacacctcacataattttattcatttattattttatatttacgtaatatatctaatccatctatagatatttttaatgaatcgctggtagaaggaattattgtattatttatttcttgtcatgcatcatttaaggttttttcgtagttatatgggtctaatttatatatatatttattaattaattttccagtatttttattaacaatattgacaacaatatttttttttaataaaagattattgaacgcatttttaataattcttgagtttaaatataaccaatatcctctccaactttttattaatgatgttaatctatcaccatcttcatcttttttacctcaacgtctctttatagggtttaacaccaacccctcttgaatatattttttatataatctcaaacaacgtattttaattctattgtaaatttgtttttttctatctttttcgataatcattgcaccataatttcattaatctttaagaataaaaccaaatttataaacaccacttttacttattgggtgtctttttaaaaatcctaagtatttacaaaatactgtggttcctacacgtatttctatatcatgaggaaaatataaaacttcaacattttttacatataacctatttattagtggatgtgatttatcacatccaccacaaacaatttctcttttatctcttaaaaaagttatctttttaattattgtttcaatatttttattcctcttattttcgatatttttatttttatcaatattattcatattttttactatttataatatttattatatataaatattattataaaactataataataaaaatattgataaaaatagcatttatatataagaatcagatacattgaaaacaaattagatacaaggttttgggaatataatgacatatttaaaatatggtatgttataatattatgtcattaacattaacaaatcaatgtgtgagatgtgcgtatttccgcagtatgaaatgtaaaattatgagtatttggtgtatatttgagtatatatttggtgtatatttgagtataggatggatatatgtgtgttatctgcaacgcccccgcagggtttcgcattaacactaaatagtgagaatttgtgcgcgcgacacgaagctctttgttgaacaggtgctgagttaccaaaatgacactgacgccccaattgtgtgagccacgggtgaagagtgcgtccaaatattgctgactcatacccaccaccaaatcatccagcaccagcaaggttttttcttttttggcgcactcccgcacttgttccgctcgtgggacgccgctatggatagtgactggcacattgccaactttgccggcgcgctgcagattcatcacatttgtgttcacctccccatagctataaataacgcgttcaacaggggtagagatcattttgtccacatttcgcaacatacgcattatccactctgacttcccacttcctgtgctcccagacacaatcattgtaaatggatgacgaaattgtccatctttccttttaaattgttggaaggcgtccattttattttttatggaattttctttttatttatagtttttcatttttatagattttaatggatttaattcttgccaccgattggataaacaacgcttatcccgaaatggatttacaggacaccaacaaagagaacaaagagccaacgaaaaaccaataggaggaggcggacgatcccagttggatcagcctgattgacgaggagatgaagcgcgagccgctcgctccaattggtgaggaggcgccagcaacaagttgcttttgttttcatttgtcatttaaattttaaattaggcactccgaaaaagtgtggttgcgccgaacgccgtcgccctgttccgctcgtggactacctctgcaagcggttcaaatgcagtgcccatgagctgcttgtgcttttcaaaagcctagagaaacgccgggacattgtggagcatttgcgctccgtccaactgcgcactgcccacctgcgcccgtccgcgcgcaattttccagtgcgttgtaatgacctgtccatcctagacactcactccgccccagcttaccgaggctatcttggcataacggtatttttatttgctttatttgtctgtaccataaaattttcatggtccgcatgcactactacataaaacacggtatccgcttgcgccaccctaatttgccgtgtgtagttgaatttggaggcgtagatcacaaaacttttttccctcttgaaattttgtccattgttttgtagatgtattcaatttccaattgtactgttgtttttaaaataaatgttcaacaattaactcgagagcaatttttggcaattgcgcaacgtggtgcaaacacggagtataaccccaggcgcttccacgctatcatcatgcgcatccgtacaacaacgggcaaaactgtggctgcattggtcttccaatctgcgcgtgtggtcttcaacggagtgtcccacccaagcagtgcaaataaaatggcggcacgtgttttgcgtcgcatccaacacacacagagcatcacactgggcatccaccagctgcgtgtggtcaacattgtcggtgttcaaacctttccccagcgaatcagtgtggagcgacttcaaaacacgctgggtggcatctatgacccaacaattttcccagcccttcgtagtaaattgttgaatggagtcacgtgcctagtttatatttcggggaagatcattgtcacgggggcccagtctcttgatattttgcaccagtcatttaccaatttgtctaatattataccaaactattttcgtgcgtaatttattggtcacattattttgtacaaatttaaacataatgaataaatatttaattaaaggaaatattacaaaaataaataaaataaataaaatcacaataaatcataacatcagaacctttccggtgcattccacgggaggggtgtcgttggtggacggagcagcacctcgcgcgtcaggacccgtgggttgcccacagggaagcgattggctttctgcttttcatcatgaatatgcgcatgttttaaaagaaaaaaccgaccatcacgtatgggtagaggctgacaatgtcaatgcacaatatctcctcgtcgtcactgcacacgtggagcagcttgaacggatcagtgcgccctcacctcagtgcgtcgatgcgcgggtccagc

SEQ ID NO: 1873 - DNA, 2081 bp, Heterodera glycines
  unsure (1)..(2081): unsure at all n locations
ccgaatacaaccccaggcgcttccacgctatcctctcttcctgggcaanagnggtgtaaantgaggntgngntgccctttaaataggggagtgtggtnataanaggagtgtanaananaaanagtggaaataaaatggtggaatgagttttttggtgaatttaanatataaagagtattatgttggaaatngataagttgtgtgtggtnaaaattgtaggtgtttaaatatttgttgagtgaattagggtggagggaataagaaatattatgggtggtatttatgattgtactatttatagagtacccctttgtaaattgttgaatggagtcacgtgcctagaaatcacaacatcagaaccacccagagtggccgggctgtgtgggatcttgctctactaaatttctctttcttcgatgcgtccgttgtcctttgttcggctgtccatcatcctccacatagccaaaagggcgcgtctgcatcccaggccgaactcgccccttggcgtagaagggcctgtagtctttgtgggcttcctgcgtgtagaggtcggcgtacacattgcggtcaatttgcgggaagttgacgcggatggcacgatgttcgccgcccccgtacacgtaaaggtcgtcattgtccaaggcatcatcgctaaatttttttaaatttatttacaaaattaatgcttaattgcaaaactcacattggtccgtcaatgttgtacgtggccagcgtcaggttcttcattgcctcaaaggtgagcagctgctgcgcagtataggacaggcggaagctgcggattttgaggttggcgcgctcgtcggtgccgtcccgcgcagtgtggcggatgccgtagttcttggggccacccgcaacgaactcgacgatccgtcggtcggtgtgttcgcgcttcatctgccccagagcctcgccctctgctacacacggaccacccatcttgctgacgtagtagatggagtcggtgtcttaaacatttgctttttttcacaaaaaaaaaacaattcgtgacaaataaacataccgcagtagagcagctccgcaccgacgatggccgacacctgctccatgtagtcgtaaagatgaagccggccgtatgaggtgacaaacgcagcgaccggaaggcagttggtcggtggcgctctggcgaactcgggtcgcttccgcacaacacagcggtccatgtgttcggacacgtggacaaagtccaacttgtccagcgttgggtcgtcgagaagcgcgtggaattcagccggggttcgtgtgtagcgaatctccgtctggcccacgcgctgcgctagcttccccctgtgggtgtcattttttaaaaattataaccccaaaatatttaccacaaggagttagccaatgttttggcaatgaggcgcagtccggggttgaattccattttggtggagtccaatcggatgccttccgtccgctcaaaatcgtctacaaatgccttttgcagctcatccgtcacacatccttctggccagcccgtcgcctgcactttgagcccgacgaaggtgttgacgtagctgctgaacagcgtaccgtcccactcttcgtagtcccagacctaatttgtgttttcgtacacaaaattttttaatgagtgactttacctcaaacagatcggtgaccacatagccaagctggagcgctttgttgagctcgacgtgcgtgtaggcggtcacctacgagcgcttgtcgtcgtcatgtcggcacggccgctgctgccgacggtcggcacaccacgcgcacaaagggaaggtgaatcgcccgtcctttgtgcggtagccaagcaacggcacccggatgttgcgtggagcgagcacccgggcgagcagcagcccccggaagatgttgttttccggtgcattccacgggagcggtaccgttggcggacgcagcagcacctcgcgcgtcaggacccgtgggttgcccacagggaagcgattggctttctggtattcatcatgaatatgcgaatgtttaaaagaaaaacctaccatgacgtatggcggagaggctgacaatggccaagcaccattatctcc

SEQ ID NO: 1874 - DNA, 1208 bp, Heterodera glycines
  unsure (1)..(1208): unsure at all n locations
tgcaggtcatanttagaaaaaaaatgaaagaaaagttcctttttatgacttctggataaaataattttatttttctcatttcgtcttaattatattttacacttctttttattatgttaatggcgtaataaaaaagtgcgattctgataaaattatattttttgatggaatattaaatgaagcaattaatgatgcagcagtttagcttgtcaattaatgttaacacttgttcgtttttgagtgatctttaactttttgtaaatgaataattcatgaaattaattctgatttttctctacagtagattaattttgtccaaaatgtgcgccaaatttcaatttcgctaatttgaaaccgccacaatttggcacctatgaaaaagcggttcaactgcagcagaagtgttttttcgttgcgtaaacgcctttttgtacgcagtccgataatccttgctaaattataatcaaattaatttatataaaattcatattattaaattccaattacacactttgcggtccttcctgaaatgaaaaatattaaaaaaacctaattaaaaattttattacattgttgtaattgttagcaaaatgatggaaagattgaaaatgatcgaaagtggtgtgaaaatgtttggcaacacaatccatgcggtcactggaggaatgattggatttttctcatagaaaatgagcacattgtcccgataaaaatccgactgaaacttataattaattaattaaccatttaattaaaaatgtctttttttaccgcaacttgcggcactttaaactgataagcgcattttgccaccataaattggtgcgtcattgagcttttaaaaaaaaatcccttgaagcttgcccttttattcgcactttgtctcagcacgattataattcataaatcagtaactgatgaatgaaattaatttaaatatttttttcttttttttttgatgaaatattcgaccaaattttctaaaatttattttgaatttaagaaaaaagctaaatgtttttattattggttgacaagcttttattcgtgaaaaaaataattaaaaaataaatatttttttaggtttttcaatacattgttggacccaatagccgttgaaaaattaggatccggacccggactcggtttcccggcaatacacgacacggtttttgccaaatattttatattcaatttttacatacttg

SEQ ID NO: 1875 - DNA, 1076 bp, Heterodera glycines
taatgtaggaccaaagaaatgagaggaacaaagaaatagtgtgccaaaaatttcactctcttgcccctctttgatcccatcattatattgtaataaaaaaaagcacattaaaacagcaaaatgagcagcgttcggttaatgctgaggcgcatgcttgcccgcttttaatggcgaaaaaagcgtaaagtgggcaaaaaaatttttggaacggcgctgcctttttggcggtgctctaattgttatttaaagttaaagtttctttgtggtataaccattgttaatcaaaaagactgccaaattaataaataatgattgtatttttttataatgttattcttaatcttcatatctattcatttatataaaaatttatttttcttatttgcttggtgttgttactacactgtttcaaaattccacccactcatttttagaaattgacctgaaaatcgcagtgttatgtatgggggttcagagtacaaaattatgaatggaaattggggaaaaggtaataatttattgtttaaattagagttgtacgggaccgggaattttgagaaaaattttaaattcttttattacaattttaataacaaaaaaagagagtttgccgtttttatgagttatttggttaaattcacaatttatagaacagacagaaatttcattttgtttgattggaataaaataattaatttcattaattaattggcagatgaattggtggaattattggaattgttttcattgccatcatttggctttaaattcaataaatttaatcatttgagcatcaccacaaccgccaattatgattcaaataatttaactgcaaaatttgcacatttggaagcgtcgaaaaatgtgaccactttttcgaatggtttttcagctcaatgatgcaccaatttgtgatggaaaaatgtgcatatcagttcaaagtggcgcatgttgcggcggtaaaaaaatacatttttaattaaacgggtaatttaaataattataaaatttgagtcggatttttatttggtcacaattacaacaatgtaattaaagtttaattttttaatattttt

SEQ ID NO: 1876 - DNA, 3306 bp, Heterodera glycines
caaatattttggttaatccatatctttaaagtattatttagacctaaccataaagccagtggatggatcaaacttagtgccaatttttcaggcttcaatttttcctaataatttgactgtcatttaatttcaaatttctacataatttacaaatacatgattttattatccgctaattggtgtaattcccatattatttattctgttatatgtggccctgctgtgcaatgaattggcgtgccaattagtactaatttgttgaattgtttgcgtgttttgaaacaattgaccactagcgctgatgttattgttgccaggaggtaagttatcggatcgtcgtaaatgagaagaaaatttttcaattctacagcaaatgcatcgcgatattgcaaaataaaaagtcaaaacattgtcccaattgtcctggtcggggcaaaagtcagccggtggcacttcaaacatcttttactgtatttacatataattgcgagcccttgtttttagcttcattcaaagtagctcacaattttttagctaattaaattctcggatttattcgttttattaaactcctttttgacttttcaccatcatttttttattgttcttcatataatgtttttcaaatttttggcatttttttacattatttcatggcattgtttaaatgataaattattacttctgaatgaacatattggcttcgacaacggaaaaaaaaattttggcacggcattttcaaaagaattccgcctctcttaaattcattttccaaattacaaacaaactcatttcaaaaaagagaaaatctcgataaaatacaactaaggcagaaaagaaattatttttgttaggcaatttaaatttatttttaaagttattctttgtgaacttttttgattgctttatcccaactaagaacggatacagaataccaataaaaacttgtggccaaaaatgaaaaatcaaaaacttagagattattttattttcaaattttttgacaaattatttgatttttcaaatttttacgaatctaagtgtgtggattgataaatgcttcgagtcttctagttgatacaatagaagcattaaagcgggcagcatggatgaggtcaggtcgaggatcgggctcgttgggcaaaaaattgtctgctgggatcgggcaccacgatcgacgaataatgaaaaatttatttcaataaggaattaatttttaactaatactagtgaatgggtatgggctgaacttagaacattttaaggtgctggatcgttttgtaaaagccgctattttagctaatttttcgacaaaacatggtataaaactttgcttaaaagtaacaaaattttatattcttggtatcattcgatagccaaccttttctttattagcttgcaaaatttcaaataaaattaccaaatttaaccaagttatggatggaatagaaaatttttttaaattttgcaggctaatagagaaaaagctgcactattgaatggtaacaagaatgtaaaatttaattgcatcttaagttatgccatattttgtcgaaaaaatcgctcaaatggcggaatgtacgcaacgacctagcagcgatttgaagaagggctcctgctggcgtctcagatagtcttccattggaaagtttgaaaaatttggaccggttttagcgagaatggaatttttgttggcaaattatttttaaaagcatattcaaaaaattctaaaaataaagtcagttttaaataatttaggccctgttttttcggtcggggtcgttttcgcgtgggaacgttttcgcgtaagtagctgtttaggactgaaattggtcggatttgtgcaaaacatccatgtttcgaatccgaacccgcatttggacaaatttcttaactttttaatttttttatttctttcggctaatatcttctacaataatttgtcagtttggtcggatgtgcgtcaaacggaaaaaataattaaaattttataaaaatataacaaaaaataacaaatttcagaacaaactaaggtcgcatttcatagtttcgggaaacaccagtgagaaaattgataatgttttcgggattcacattggcattggcataattgtgatcattttttctcttttatatgcaaccacgcgaaaacggccacgcgaaaatggccacgcgaaaacgtccaggcccgctgtttttttataaaggaacgaaaattttaaattttaatattaatatagttttcaaaatgctttcgaataggataagacgattcatttggcccaaaggaaaaaatgatgaatttttattttaaaagatcaatttgtatttgcatgtctgatggattatttttttctttaaaatttagttttatttttttcatatttattgcaaactaaaattatttcatggcaccgttgcataaattttgacacttttttgctgtccgagcagtaattgtactttaaaaaaaattaaagtaacacatttaaatgtgattggaatggctgagaattgattgtttttaaggggaaaacaaaacattttaatttatcatttatgggcatcaaaaatagttaaaccggaaataagaactaagttaatcaaacaaaaaaaaaactaacaagaaaaccatgagagcctcgaaaatctgaatcaagggagagtaccggtgaacacgtgtgtccaagtgtgttaaaaacagttttttgggttcagggttcaaatcttccctgtccagaaaatagttggtaaaatgaattttttaaaaaccaaaaatttcaaaaaatttggcaataattaaatttgtaatgcttttttgtcaaaccctttttaattactctgtttcacaaatctgcgctttacactgtgtaaaataaaaaatagagaaatttcaacatactttttaatcaatttttttttttctaaaacacctcaatttttttttgaaaatgagaatttttcaagttttcctggcaaaaaaaccaattaatttttttttgctaataaattctcgattttatttgaaaaaaattaaaaaattcaacggcccccaaaaacgaaaaattggcattttttgtgataaaattttcttctactcattgcccaatcgggttttctgctccatcccagtcaatcccccgacctggcttcccccgtgctccacgagaatttcttccccgatgggtccggcttaaccatggttgaaagatcaaaaaaattctcaaggaaatttttaaaattttgttatacttctttggcaaaaaatccataatataaaataaataaattttacataatgtaaaa

SEQ ID NO: 1877 - DNA, 5660 bp, Heterodera glycines
  unsure (1)..(5660): unsure at all n locations
aaaaatttgaaaaaatgaattgttgatttttttttcataaacaatttttatttattttttgctttttttttgaaaatatatatttttttagtctattttaaattgtttattaaaggctatatttcataattaaaaatttatcatattcaagtaagaaagaaaaaagattaaataaattcaaaaataagtgttttttggttgcatttggcattttgatctttttaccaaacaaatgctgttgaaatgctcatccccatcatgccaaatcacaattggatcatcaaccaattcccaaatttgtttatatttatcactggtgatattgttataatcctgaaaaatttttttaaatgtttaaaataaaaattaaatttaaaaaaattgccgtttgagtaaaattagaatgaagaacaatggcagtgtgttgtatgctgttaacgagcgcaacattacgctaaaaaaagtagaagcaactttttttgtaactatttttcatttcctttgttaaccaaaatattacaaaataaaactaatataaccaattaatttatttttagcaccaattaagaagtattttatgcaattaaactaaaaacctggtgctaattaattgtttactttcatgattttaaaaattttgtggattaaatttcattccgaaggcagattcggagccaaatctgatatatcgataaaatttttagaatttttcgaaaaattcgtgattaaaaatgtaactgatctattgcttgagaattagaaaaattatgtcaagaaaaatttaagaattcaaaacttatgcaaagtaggagaatatttatttacggccaaataattaaccctaattacttcgagcctatatggaactttgactaaattctgttaattttcttttttttcattgcatacatttaaatggattgccaatgcatagcattccgcaacgccagcataatttctgttctttaacacgtaataagtggcatattccgcaatgctattatggtaattagacattgaatcgccttcagataaattagctcggattattgctttcattttgtttttgtcctcggaactgcgtgacgagtcctgctcaaattggattaatgactcagcagcagctttgcgcaactttttatgcgctttgccatcatcatcgtcatacagtgaaacggcaaatgaccttgaatacaataaaatcgcattttaatgaccggaagcgtagattataatattaattagaaaattatccgctgaatctattaaaacatcaatttcttttcattttgagcattctatctaagactgaagatatgaaggacctaattcatcagaaaccaaaaaattttgggacataaaaaatatatcaaaaactttgattatataccgactaatatagaaagatgtcgatctataatatttattattgatttaaaaattataatatcaattcatgaaaatttctaaacctgaacagacaattcccatctccatacacgtttatcttcttagcctcgatattgttatttaaaataaatttttgctaaaaaaatttttactcaattaattccaatggtttatttatattatttggtcctacagatacatttattgactcatttgagttttgcgttgttctaaattcggccattgacttggaatgttttaatagacgctcaggcacttttttagatttctaaaataattattttttaattaattaaaaatttctgacttgatttttcgatgttgatgcaacagttgattgctgactgttcgcatggttatcagagaaaaaatgggattcagtttcgaactgtcctggttttaatggcaaaatgtctaaaaagtttatcaatcagttataattttaaaaataatttttcccgtgaaacatgtaaatataaatattatttttcggtaattactttgccccaatataagaggttttaccctcatttgtggcttaaataaaaatttataaaaaactttcaaagattgccatttaagcggcaaaatccatcttagatctggttatatgataattttttctgaaaaatggcttttttgcctgagatacgcggcttttctgattttcatctttgtgctaatatacctgcttttgactgaatgggccccaattgtgtgacaccaacttttttattttttaacatttcatcaatgattttctcattccttttgtcccattgtccagaaatagtgtttttgttgatcaattgtccattagtgtattcattgatttccaattcaaactcaattggcactccattgggtgatgatggtcggctaacaacaagtttttctttcttttgccccccatcatttttcgatgctttctttttggcatttttctgttttggcacatcattcggtttggcaattattgtttttggcatattgaatggtttttcaattttggattttggcacatccttcggtttaccaattgtttcttttggcaaatcatttggcggatcaggaagcgcaagcttaaatagtaaaacattataaattctctctatatatgtacaataaaatagaagtaaattatattaaacacatgtcggtttttcgtattttatatttttaactccaaaatcatcaaaatgggcgttactcaaaaaagcacccaaataaatttattttggggccaattaaaaaaccaaccgcaagagaattgaaattaattgaattgaaatcccaaagtttgtctccattccatgccataaaatcaaggatgtccgcataattgacaaattcactgatgatgcgttttgcgttgtgcatattctccaacaaaatggttattttttcatgcgattcaatatttttgtgcaccttatttatccgtttgttttcaacaaaatcctttcgaaagttccaattaattgagccatttttatccgttttataaataaactgtttcgggccatcttaaaatttgcaaaatttatttcgtattaaatcgtaaatatccccatcaatataaatgttaaggggctgggtctggattgaggaaatttttttggtacagatccaccgaaaatgctgcctgcatcaagttcctgatcccggattgtaaccggaatattttttctttaacctaaataaatttctaaaatttctcttgcatttgacctagatcaattcgctagaatttgtcactcaaaaaatcctcctgttattctctaattggtgaatacaataaatttataccgtacgggccaattgctacgatcagtctgtattgtatgtttggtacaaaattgtatgtatcattggcattgctctccgggctttttttattaaatttactgaacagatgtccaaaaatcacagctggtataaatgccgtaaatgttgcagtaaaaccaaatgaaaaataaaatttaatgcacatattcgaaattatgaattgaatctcggatgttgtaaaaagctgaaataagaaaaaaaagtttgtgaaaataataattgtaatagcattaaataatcaaaaataattttatttcttaacaaagaaatcattaaagcgaatcaattattttgattattaagaaattctcataatattgcatttttaatttaaatgcatggtttttatacatttattttaacgtttacgaatagagccccgcctcctttaattattgtagttaattagggctaaggttaggaaaaaatatgctgacaaatgagctgaacctaaaaatgtatcaggacgaacctaataaagtatcaatggacgaactttaaaaaagctcaattgagctaataaactaaatttgacctttaaacataaaaataaatattatcaaaactaaaataataagcgaatactaatataaattataaacgcaaatttttttcaaaaagttttcaaataattttttaaatattaattattctccgattttgcaaagcactctattcctaaatatttataatttgatgaaaaacataacaacgcaaataatggtacccggatcatatatcatcattttgacaaaaattgcctaacattataaaaaaaaatatggtgcaaaattttgaaaaaatcttagtttcgggattttcgatcatcaacagcactagaaccaaagcaaacataaggcaaaaaactttgggcacttaacaaaattcaagaaatttcgtttatcttgctcattccggatttctttccttcaagccgaacattcgaatcataaaaattttcaacagcatcagcaaaaaattattcattttatggcttctttcagaaaatctaaaaaaaaacaaaagcaaaaatctttgtcagaagcccctttattcaaagcatatgcgttgaaaacatgcaaaaagttattttttacaaagaggcgtatgatttcacttttctaaattaattgaaattttccttttcctttttctttttttattgttatttaatatttattaaaataataaggaaatttttcaaatttcagaaagcagctcactaagacgttttttatacagctaattagtccatatagttcaaaatatttttttaaaggcttttttagagaattttcaattttttgttgctccaatttctatgtttttgaaaatttctcggtcttcagcagaggttaaaaaggccgcttaatattttaaaaaattttaatttacctattttgaaaataatttttttttcatctaattatttccttttaaatttttataaattaaatattataatatcaagaatgaaaagagataatttagttcctaataaggataagtgcgtgatgcaaatgacaagtcaatttataattaatggagttcttttctgaacaacacaaaaatgaaaccatttataaaagcctcattaaaagcatttaatgatgtattaaaaatgttgcttaaagttattcacttgacttaactctattttatttctgtgaatattaaaattattcatttatttcaatttaaagaacaaaatttcatcacaaaaatttcccaatgagtgccatatttggatttataatcaacctattctgttggttcacgtgcggttttttcttccccgatgggtcgggcttaaccatggttgaaagatcaaaaaattctcaaggaatttttaaaatttgttatactctttgcaataaatacataatataaataaataaatttacatatgtaaaataaatgtgagaaatcatttgtcaaattgtttcatttaaaattccaaaacgagctcttcatcttcttcttctgaaatatgcgttttaaaaatgttaaaacaaaaataaatacatatttataatgatcagaaagccaaaaatttgaaaaatgaattgttgatttttttttcataaacaattttaatttatttttgcttttttttgaaaatatatattttttagtctattttaattgtttatttaaggctatatttcataattaaaaatttatcatattcaagtaagaaagaaaaagattaaataaattcaaaaataagtgttttttggttgcatttggcattttgatctttttaccaaacaaatgctgtgaaatgctcatccccatcatnngcaatcacaattggatcatcaaccaattcccaaattntgttatatttatcactgntgatattgttataatcctgaaaa

SEQ ID NO: 1878 - DNA, 8159 bp, Heterodera glycines
  unsure (1)..(8159): unsure at all n locations
atttgtcgactcgcgcatttccagtctcctccttgcttttgaacatgggcacaagagatttgtgatccgtgaggactctcgtcggcagcattgttataaactgagcaaatttctttgctccgaatctcactgctaacgcttctaattgggacagccgtaaccaacaaaagcagggggcaaaggcccatttttaaattgggacaatttcttaaaattttgccaaaattttcccggctgcgcctatttgtcacccatggaccggtgatttcctttgataatttttaattgaccaaatattctctgaaatttttatcatttttgtgcaaaaaaaaaaaacaattttcttcaacgccaactaaattttggggaaatatttcactaatttgtttctggttacgggcatggattgtgtgtttgtataaagtgaatttttgattttcggcaccgattggaccgccttttcccatcaaaggcccgactccctttgcccaccgtctgtccctttcgcttgggcttttgctgcccctttctcttcgtccccctcaatgtcgctctcctcgctgaccagctcgtcgtcgtcctccaccagctcgaagctgcgcaacggcttgaaaccctgcaaatgagtttggttttcaatttttggcacatcaaaaaaaaggggaggagtttcccttgggttttttaattttttaaagcccccaagtccctcaaccattttacacacagtttggtaatcacaaaaagacacatggaccaataacaatgctataaggtgggaggtggaaaaagaaaacaaatgacgacggtttttttcgataaatcccatttttacgacacaaaatttggatccagaaaaattggggcgtgcagaagcagcacctttctgtccattgcgtcctgctcagcgcggtcgaagcagaagcgccacagcaacagaaaaagggcacagcaaccgcaacacaacaccaaaaggagcaccagggcggacgagccgtacacaaaattgctgtacccttcaaagcgacgggcatcgtctgcgaattcgaaagcggaaaatgggggaagcgattataatgtaatgtgtaaatttaaataaatacaaatgaaaaattcggaatttattttaattgacttatgtctcggtttatttacgatttttaaaatttaataagaaaaaattattaaatgtatgtcatttgaaaatacaaatgatccgcctgaaattatgcgataaaattttgatattgtcatggggtttatattttttaaaaagttttatgcattaaagtgggtcaaaaaaaagtattgccctcccaaattttccgtgcctttgccatgcccgtctctctctccttttttaccatgatttggtgagctcaaatgcatgggattcgccaacatttcgcgtccccgagcagcaaaagactctttggccgcttccggttggatttccaatgaccacaacactccttccccgttggcaatctctccgacataaacctgtgtcaattagtaaaaattttgtttgtttgttttggcattttttgggtttttgccgaattccccccttttttctgattgccaatttccgtcacctgattggcccaacagcgcaaaacgtggggcagtcgaaagggcgcgaattggccacggaaagcgtattgaattttgggctgcgtggcattgtccgagtcggcctgcggcaccacaaaaatcgcaatttcctgtgcctggccgtattgagtgtacaacggagtgccgggcactaaataaatttcggatgaatttttggtaaaattttccatagtggtgtatttttctgagatttttcagatcgattcttagggttgtagttttcattttaattgcatttttgttaataattttttaaatgctgaaatttattagaaaattcctcaaaaccagcaccaaaatgccaaatcagcacaaaaagtaaaaatcgagaaatagcaaaaaattggcatgaaaaaagtcgacttagaagcctaaacccgccccaagtttgcaaaaaattccatattatttaaagattattatttatattcttttattataacaattttattattattcttcacgaaaaacattggccatttacgttcatttgtccatttgtggccctaaagagggccgtttgggttaagatgttgttgcctctcctcctcactccgaatcagtagcgcccgcatccacagcaaagccgagccgtcttttaattgtatctaaagatgctctcaactggccaatattccttgccagctgccgcaaattctgctcatcttccaaagtgatgacatcagccccaaaaacgcgctcggcaagaacaactgctctgcgctcaaaatgctccttcaagccaatgaggtatctgaactcgcggagcaacgctgacaatggcaaagtgtcgagttggtcggcgctgaatcgtaggtaggacatctgaaaaattatgcttccattaataaaagcttaagccacgcacactgcgctaaataacctttttcgaattggaggacaaagtgcaaaaaatgaaaatattggaggaaattaatgaattgagagtgaataatgtgcggtgattggcgtcctaatgggcaattaatgaccaattagtgaccaatgatcaaagagcacaacaaacgacgccattttcaaaggaacggcatggaatagatgaccaatgagcaattgagataaacgactggggggggggagggggggttgagaatgttggcctctgaaaatgcagtggatgcgacgcgaccgatagacgccaaaaatcagcgcaatggcattcaaagacaatttaagagtttcgacgactgattcaatcctgctaggctgaaatatttaagggatttcgagtgtgactaattatttggtaaaatgattgcttagttaataattataaatgcggattcaaaagtcttaaaattttcgataattgtaaaaaatttttgaattcaacaaaatgttgggagtcagatttggctcaaatagacacctctgcgaaaagggattttttttaaataattcaaaatattcttggctaaaacttggatttatcattgctgaagagcctctactaaattcgagactgatgacattaacaagaagcgaaatctttccaagattcgtgaaaatcagggcgacaaataatctctctggatggcaaaaaacgaaacaattggcacgccccggagggtttcacggagcgtcatcggacagcggcaccgtcagtgtcgatgtcccccactccgccgacttcgggcggacgcggaatttgactttgtgggtgtggcagtgattaaggaaggacccaaatgttcagaaccggcgcaagatggtccttacccattcacaacccgagtacaacagtatccaattgaccggcaccaggccgaataccatatgtatgtgggaagagtaccgtcccaatccgtcaataggatggttctgaaaatcccgaaatttcttcagagagtttgttttgcatttttacaatttaatttcaaaaagccaaaaaatccggaaccaattttaaaaacgaaaatagtgcacaaaaggggagccgctcacggtgggcattaaatgcagtgttaagcaaaatttaaatcgaaagtaacttttgtatatttttttatattttaatttcataaaaacagacaaaaaaaatttgataccattttggaacgaaatagtgcataaagaagggaggggtagacgaaaagaaaaattttagatgtccaattaaatttaatttcaaaaagtgcaattcattccaattttgcttcgaattcccattttgtccaatgtccatcgtcatgttttgaacaattcgtccactctgtggtcaaattgggcgctgatcagagcaatgccaaagccaagctgaaaggacggcagcaaatcgaacacattgagccaacagtgtgtagagatgaagcagaaaaaagaattaattgccaagtaaaaaccaaatcaaacaaaattgaaaaagaaatgaactgaactgaaaaaggattatccaaatttaagttgacgatagtctccgaaaatttacattccccgaatacaaaatctaacactcatctcatcaatgaccaatattttctattggttcaaaagctgcgaatttatctttcctccgccgaccaccgcctcatttcatctgctgcaattggtcaaaatcaacagcaaagccgggttcggttgtgacgtcatcttttggaagaaagtactgaatcgcaaatcatcgccacataatttacggcgcctcggacatcgaattttcggacgaggccatgcgcaaggctgaacaattcaagtgccagggcttcgccggactgcctggctcgagatgagcaaacaatttgaatggattattcttccgattttatggtggcaagaattgcattgggtgaacaacggcatttgccattgttaaaatgttcatcaaattaaattatgcttaatttaggccattgtgtccaccaacaaacgaagaagcgggacaaagcggaggaaaggtcgcctaattatttgnggatcaattaattaattgcattagacaattgccgatcatttcgaataatgttgatttgtatttgaaatttgccattttatttttaataattcattttgttcaaattttattgctgcgacggcacttttcaggtgagtttttccgcttctcggcttcgctacttctccctggtgatcgatcggatgctcagcgtggaaatgagggagaagcagcagcgatcggtcactttgaacgaattgggcattgacatggaccaattttttgattttcttctgcacattcgtaaatgcactgcaagaaataattcttctaaacactaaaaagttttcaaaattcattcgaaaattttaaacaaaatttttttgccagtgcaggtcaaccaaccccaatttctattgtatttccataagcgacagaggtcgagagttccttctccgaatccgatagtcattcttgacgaagtttactgtctaaggttcatgacatcatactgtctgattgggttcgcttttgaatcaaaagggcaccattcagagacgtgcgaaaaccaaaaaaataacttccgaaaaagaaacgaaaaaatatttatttttcacgaaaacgaaatgaaaatttaaaattttagaatccgaaaacgaaagttttttgttggcgaaaacgaaacacgaaaaatttttgttaatttcagccataatcaagaaacataaaactttaaattgtattaccaaatttaagaaattgaaatccaagatattttggaaaagagtaaaaatgaataaatcaagaattcttagctagatcataatccgaaaaaaccggtcaaaaattcgccggatcggaccggattggcattttcaaaaatgaccggtttccgaacccggaactctaatcgcctccctaatcatcagttgatcaactctgactgactctcgaggaaatgtttccgtttaaacagagggacccgtgggaaaagaaagggaagagaaagctgacaatgaaaaaagagaaaatgttttaaagcgaatgtggataaatggcgctttacaagaacaataccgcactttcactgatcaaagaatcaaaatcggaaaggatctttttcctaaaatgctcgtcaattcgtcctcctcagtccaacaatttctttgccgtttcgtcaatttgtgccaaaattttcgcttccatttctgcgcacaatcgcaccgccgcttttcgcattgcgtcctttccgttgggttcggccaaactcaaaaaggtttgcgactttaagagtttcttttccacagatgcccaacaatttttgttctttcgaaacttttggaacactttcagtgccaaaatcatttcctctgtcgccgccgttactttgggccgggtatctttctgtaaatccggcacattttgaggaggcaacggtttgttggcagtccacagcttcacatagcctttctacaaaatgtttaaacaactatattcattaatgacgcttaaacgatttccaacttcacctgaatcattttgttggcgtccatttggtcctggaagaatttttttccataatcgcccccaatgccggctttttgtccttgcgccgaaacactttccaacacttgattttcccgtacaaaatcatcgattgagattttgtgatgaaatttgtaattgaccacgtccttggccaacatcagccgttagttagccacgccgacgatgaagtgtcgcggtttcttggtggcctatgattttatgagaattttatttgctttttcttgtacaatgtgatcactgatcagacattcattcattcatttcccattccatcctttttttgttgtttcataaattctgaatcactacttttaatcgctttttgttatatcattgctttctaattttccctaattaggctgttcagaaatgagcgatcatttcgaagcattgacttctcgagattgagaactttctgaggcttaaggccgagaatgtcctcaagactgacaatgggccctgatgagtcccgggctacgcacggttcacagtccggaccaacaaaaatattttagagttcgattcacacggagttcagttaaatcgaacatttttttcgggattcatcatgcacatcagccaaaagttaaatcacttttgaaattgcatatcaattagagattaccactccatccatatcaatcggcaattcatttttctaattaatttttgtatatatgaattgtttaattacccatttgctgtaaataaaatgagtagtgaaagtgtccgtttgctttttttttttttgcacaaatgcgactattttgggtgatcaccactgatcagaacaaagaaaagaataaagaacagtgacaaaagaataagcgactgatcggacgacggtcccttccccccccccccccctccgttttttacggaaacaaatcgcccaccggtccaaaagcattcattcattcattgctcgtctttatttgcgcatttcgttcgcctttctttagtcgctggtcattcatttcctcacactttaccatcactcattttttggtgcttttccttctcccctttgaattttcattttttaaattttctatcacttttcattaaaattttcgattttaacggagcatggacaattaaacgcatttttcagttgtttaaagggcatccattacagtcgcgccctgtcgccgctttttcaacgattttggcaattttacatcaaaaataaatattctgtcttaatgttgcggcatttggccatcctccgccctttgttcgttctctcttttttctccgtttctcgtgcccatcgtcgcttccgccatcgttgccactgtcaccgcgttactttacatccgccgacagagacaacgaaaacccgtggataggtcagtttaagtaaaatccgaatttaaaatgtcaacaaaaatgctaatacattagtggatatataagcaacagaattggaatgtcagattaaaagttcatttgaaatggcattttgaaggtcattcgagggaaagaaggccatcctttccttccgaagattgctcgctttgagacatttgcttatttatatttcaatttttggtgcgtttcccccatcctctctttaattccataatttaatccatcctcatttagcaaatgcatcacatcaaagaccaattcatttgggtcgggctcagttcgtcgccactaattttaactctcttaaaaacgaaaagggggacccatattctgacgtcacttttgaccattcccgaatcctgaattaaaccgcatttttcatctttttatgggaccaataagtggtgtttttggctctagtgcactttatgagtccaattaattgacaatcccgggtttttatacaataactttgttcatattcgaacaaaccctatctttttggtaacattcgaaagcacaaagtccaacgaagctaaaatatataaaatctcaacgtttaggcaattacgaaaaaagaactgaccaattaagcaatattgattattttcgtttgtaacttttttgaaaagttagaattttcttgttttcccgntattattacatt

SEQ ID NO: 1879 - DNA, 873 bp, Heterodera glycines
ttaagaaaaaaaattgcaatgaaaaaacctgaaattcataatttttcgtgtatattcaacaacaattttttgtttattgcctttgtccgagaatttttttatacaaaaacaactgtgtactttaagctctcctcgatcaaatcaaaacacacactgggcacaaaagtcgacaaaaaattataataaataaaatgtaaattcacaaatggatgataaaaatttataaaagagaaaagccggatgtttttttaattaattatttttttattaaaattttatcccatttattccgacctttgcgtagcaattcggctgacacgaatggttgatgaaccgcgcgaaattgccctttttggtggcgtcaattacctgcgaaaaaaatgtgaaaatagattagaattaaaacactcttaagcttcaaactgcaaatgaattgaaagatcgtaatattaaagcgaaagcgtaagaaattaattttcatgaaaaattccaaaatatttgatttggaattaaatttttaaaatttgacaaaaatttgtaagttccgattcaacacaaaagtagacgtacattgtggtcgtcaatgcggaacaggtaggaggagccgatgccctgccgctcgtaggccaactcacgcacgttgttatttaattttggagaattgataaatccataaaaaattgccgataaaacaaaatttctgatttttgaaggggtgcaaaataattaaaaattttttattcctcataaacttatcggttgtttttgtattgataatcaaaaaatttcttaaggttttcggcagtgaagctcactgttgacccactcacgcatccattcagatttggatttaattttaggcataatcaaaat

SEQ ID NO: 1880 - DNA, 3023 bp, Heterodera glycines
gtgctgtacgtacgtacgtacgtttttaaatttgactttttattgacacgatctctttattttttataaatatatgaaattttttgctgacaagtattttatttagggttcgaattttttaacaattttttacaaatttttatgaaataaagtaaatttgcttatgttttttaaaatatttatggtttagtggttagttcttcaacattaaccatactttttgttatgagttcgacaccgcgtttacgttttcttttgattttttttccaaataatgcagggtttttctatgttgttatttctaagaaatgttctggttttggggttgtaccttattctcatctaaaaaaaggaaatttctaaaaaaaaattgactaatttctaacaaaattcatataaagtcttaaaaattttccgcttgcggcgccaatcggcgctaccggcctctcccctcgcacattcaccaagttttttgaaatgtgccgcaaaaaatgttaaaaatctgatttagtgatcccgaatgcactgaaatttatgaaaaatataataatagaatacatttttgatcgaataaaatgtaaaaatatttgaagcaattttgcaaaatgttcttatttttgaccctaaaatcttattttttggcctttattcttattttgaaaattttgaaatagaaaccctggatttagacaaaaacacccataaaaattgactattctggcataattttaatccttaaatttggtcatttttagacaatatctgtgcaattataccaaaaaagaattgaatcgaggcgatatatcgaataaaggaatgtggagccaaacacatctttcaaaaaaaattttttgtgagattttttggagctaattaaaaacaaacccccgcccccgtccccgggggcgagaaatttctcacccccgcccccgcgactctgacccccgcaatcccccgcccccgcgaaaagctgcccccgcccacggggtccgaaccctatttttcccaaattagacgggtctcttgatattttgggcccaactaacaataagccgggtattcaggtctaagtccaaacagaaactagtacacgtttaactctacgtttaaacatatacgaattaacgaaataagattgccaggtttccatacttaaattttttaattttcaagaaaatacaagtttttaagcacaaggtttgttaaaggttactaaattttaatgatttattaacattttacatatttttttgttttatttttttgaaatccctccttctggtgcccaaacttcccggtgcccaaatttctggtgcccaaacttcatgtcgcctttgaccggcggcccggggcggtatttttaggcaaaaaataaaagtgaaaaatattaagtatttcaccttaaaattgggcaaaaaaaattttttttttcgtattttggtactgaaaaaatcaaatggtacatcgaaattgttcatccgatgactcatcaatggaaaaagggacaaactttagcaaatttattctctttctatctgatcactttggtacatttaattgacttttttattcagtttcaaaacagatcaaaggatgcgccttataattaattaacagcaaattgaccaattctctttttttacaccaattttttgtgtgcttcttaattacatatttatagtgatggtatgctcgcctaataactggagaggcgggaataactgtgagaaaatctattgtttaaataataattttttctttatcaaccaaatcaaaaagcctccgcagttggtcggtcgttcagtttttttacatagcttaaggataaattaaaacaagaaaaacattcgaatgacttcaaatttattggatttaattgatgagaagaaaaaagttatgatgacaaattgggtcagtcggcgtcgtacgtcccccccccccccgcccaattagtgatgctctgatgctaatggtccaaaaaaacaagagtcagaccgggggccaaagtcgtggtgaaggaaatgctaaacggaaattcatgatcaatttttgcctagggaacagggatgggccaaatcggaaaataaaatgcgaaacgcgaaatttgcgaaagtaaaaaatgcgaaatgaaaataaatgcgaaacgcgaaattccaaaaaacgcgaaattgcgaaacgcgaaatttttctacaacttttttaatagtcaaaatcataaagcattttgtaaaattctatttcaaaataaaaagcttttttgcggcgcgttttttcaaaaaaaattttgggaagtgggggcaggcggcgccggtagacgccgccgggaaaattttttaatacaatttgttaatagattttcactaaaaatgttcaaattttcaatttttggacaatttttctgtgaaaaatacgagtttttggggtcccgcggtgcctataggcgccgctgggaacagattttgaaaatttgagtgtattttgttaacagattttctccaaaaaattaccaaattttgcgattttgggccatttttctttgaataaatagaagttctcggggcatgacggtgccgataggcgccgccggggaaaaatcggaaattttgaccatttttaaacaggttttcactgaaaattagccaatttataggtccaattttgaaaatttttgaggaatttcatccctcattcttaggggtgtaatattcgcgtttcgcgccaaaatgcgaaacgcgaaagcgaaagtgccaagaaaagcgaaatatgcgaaagcgaaacgcgaaagcccatccctgctagggaactcggtattcccgagccttcacttccatctctgaagaaatttgcgacttttttcgaggcgggtgaactcaatgattaactgtcaaaaaacaaatcggtagcagaatttcgatgctaatgcagggctcgggtctgtcctgatttgtccggtttgtcctggtttggaggtaacgatcaaaatttgtcctgatttcttaaaattcttcagaaaatttgtcatt

SEQ ID NO: 1881 - DNA, 1974 bp, Heterodera glycines
  unsure (1)..(1974): unsure at all n locations
caaaaatattattttatttacaccaaatccggtagccggactggttggaaaaattggtacccggacccggcttttctggacccggcaaacccggaccgggttttgcataaacacnccgaccgatcctgccccattttaagtgcatggtttttttaaatttagtttatatttttcaatattttaaaatataaagaatgacggggggtcaatagtcatgtctagggccgcgaatctcgaaatagttaactaaaatagtgcgggaaaatgccaaaatagtgacaaaaaatccgaaatattgacgaatagagacataacattcagccaaaaattgaacaaaaatattacagttgtaaatgaagtactttccaaattttgaggcaaaaaaacgcatcagattaccgaataaaaaagttttgtaaatggagaaagtcctttgaaatcgcaagaagtgagaggcgcgaatttgtaaaatggaattatggtgttatggtgaggggaacatcacaatacggatacgatttttaggttctaaaaaaaccacaaaatatgtgctaaaaatggaaaaataggtgccaaaaagtttcaaatttaggggagtaaaatcgtaaaatttcatccaaaaagcaacaaaattaacaaggacgggcttttctggcatataaaatcacaaataggcacataaatagtcaaaaaacccagaataagcacaaataattttgctattttctggcccgcttttgccaaaatgatttataaaaagcgtatttttctattaaaatctaagacagaattaatcacaaaattataaatcaaaatttttggtaaagaaaaaatggaaaaataaatttttatatgatattctgaagaaccgttctatctttgggtgtaatttttggaagttttttttttgctcttttgtgattaataaatttttcaaccttcacttaagaatattattttggttttaatctgtatgaaaaaatcccgtcgctgctaataataaggtttaagattttccttccttcctccaaaagtttaaataattagtcaaatgaaacatatctcgtggcaaaataaatttgttgcagaatttgccgcttcccttcactttgttgattaaattattgtgatttggaaaagagggaggaattatctcttcggcagtttttttgagtgctttggcattttgtatttgcaaatccttttaatatcgtgagtgcaaattgggtggagatgggcattttctattgaaccaccaaagcattttatgcggctgtcacattttgtaagggatgccaccgcgcggacatgtgccaagaaagcaatattcttgttggcataaaattgttggcataccacggattaattgggtaaaaatgaaaaattggaacgatgtgcttgttttggtgaaatatttgctgctggaacatcgacagagatcagctgacaaaatgagaatgccaatatgtgcacaaaataatatgccaaagaagaaaaatggcattaatttgagcagaaacaattttggaaaaatgccataaattgcgtgaaacgtgccgaaataagaaaaatgacatttcatatattgaaacacacgaacgcaaaaaatgccaaagaaagcaatggaaatatgccaaaaatacaccaaaaaataccttcaaaagaaaaattgcatttttcgtaatacaataacttaaatataatattcaataagaattatttttaatttgaagtcatcaatttacataaaataccgtacccttgtatttcgtcacattccaaaactggttgctgtcggtggcgtggtcccactaaattcgtacaaaaatgttattggaatttcgtaaatgggaactccataaccaaaatgacaataaataatttttgtttggttttttaatttccattcacgcccattaatgaattcaattaggtaggtttttgcgggtgtttctcccatttgcgcggtcgaat

SEQ ID NO: 1882 - DNA, 2516 bp, Heterodera glycines
ttccccccattaatttttatggtgtggctgccggggacacattcttatggctgagttcgatgctggtttcatttgaaaaaattaatattaaaagacgtttcaggggatgaaagggcgcgcgaaataataggggggggagaagagattatatgtcttcaatttatccttaatttttctgttcttttaaggcttgttgaaaaaatattggactttcaaattaattaattaattattctattttcaaattgattaaatcgattaaaatctgtgcaattaaattttattttcaaaaattttatttcattcgttttgtatatgggcattagcaacaacaaatttgctattaaaaaagtaaaagccgaaactaaaactacaaaaataatcaaataaaaaagaaaaaataaattaaaaaaagctaaaaggcgttatttatgctgtgctctcctgtcaatggtacatcagcgaactcagtgcgcttcctccccaaaattcgactcttctcgaaacctaaaaaggcaaacaaaattaaaaaatttttttttgattaaaaaatattttgcctaaataaaagttatgctccattttggcacctttaaatgtcaaagctattaattacccttttttaaattatttgttttttaatttgtcaaattgcccaccggctgtcccgtgtgccgtcgttttcgtcccgttgccccgcaacagtacatgcgctgttcctgctccgccacgtacttctccagctcggccagcccgctgaacagctggcgcttcctgcggcctcctcctccacctccgcagcagcagcaactctgctgaggcgggggcggcggcggcgccgcctgttgctggcagcagcagcagccgccaccgctgggcagccccgtggcatcgatggccggcggacggagcacagcgagcagttggagcagtacaaacagcgacagaacgcacagcagcaacggttgacgattgaaatgatttgccatttttgtgtggatttctgatagattttattcggttgctcaaaaagatgaggagagtgtattgacagtttataagccaaatgaacaagtgattcttatatcataagagcaatttttatattccctctatttgagccaccctccaataaatttgcttttccagggggggggttgaaaaatagaacccatgtggctctaatagaggaaattcagcacaacagggcagtggcatgtcatgcactaatattttctaaggcggttgacttgaaagctttgtgacggaaaatattaattgctatttctagtatttaatctgcgttgctaaatttttctcgcgtgttttgtgcggttcaattggatggaattaaataagagttaaagccgtgattagcgatgaagcggttgatggtcaatgcccttttatacagtgtttgattcttattcgtgcatccgcccgcttataaaaatccgatcagatccgccaccaggcgcctcaggcgccagtctgatcagcataaagaattgatgcacataaatcccgttcgtaccacataacaaatcccatgccacacaaaagttcgttattagaaaagtgcaagagaagcattgcattgctttaatggttgggcggggagggggtaattggattatgcttatccgaaagtggaaaaaccaaatctaattaatcccaaccaagtcacaagttggatcattaaaaacgcatccatggtaatttgacagcaaaacctttattgtcatctaaaagaaacgattggacaagttgttgatcaaacttgttcggactgcttcaacatctagtgttcttaaacgaaagaatattaagcattttagaaaaattaactattgacctttttcgggaaattagctattttattttccaaattaatttaaattgtttaaaaaatcctgatttttcctattggccttgaatttaagatacacaatctgaaaattaaacatatctacaggattatgtatttgaatttagtacatgttggaataattttcgaaaagtatgaatttaaaataaatttcaaaaataccgagtttccctatcggcgcctgcacttggcccttgcttgccccttattcagtcagaacttttattttttttttggaaaatagcgtaccgtaatataaaaatgctacgaaaaggaaaaataaaatattttttaaaataaaaaaacatttaaaaaattgaatttggagtcaaaatctgaattttatttgtcatgaattaaaaaataatctattgcatgtcatcgtaaagcagtaatcggtcggttaacgacaaaaagaaataccggtggtaaccaagtgtggcaaaacgggttgcatccaataagcgtggcacaattttaaaccggtccagtcttaccctagtttttaccttcatacttatggccaattcattctgaatcgggtcgattactaactcaacaattcattattttgttgttttgtaaatatgttttattcattcaataattattgtaaaaaggaactaaa

SEQ ID NO: 1883 - DNA, 3428 bp, Heterodera glycines
  unsure (1)..(3428): unsure at all n locations
caggcgacgcgtcgctcccactccattagttcgctgagcacgccctggcgcttgcggcgcccacanccagctggacgggggcggcgccgcctgctgctgacaacaacagcacatgcttttcatcggcagtccggtggcgtcgatcagcgcgacagcaaacgcaagcagaaaaacggcgaaaaaggcaacagcggagggggaggaaaagcgcatctgagagcaaagacacttttattgaattttatttaaaatgaaatgtcaaaatgcaaaatggatttaaatgagggccaaatccaaaattcgtgccggtgtgtgaaagcctataattctataaaatcggaaaatttaaaaatgtccattcttttgagtaatccaaaagcataataggagcttagctggtcaattttcttcaataaaatttggcataataacacttgtctaatcgctatttggattcatgaaagagttgaaaactgatttggaaagatcaacgatgtgataagtggcactccgtggcgaaggatcgctcatttaaaagcattttgccgtcaaacggtctcgttttttgtttcgcagctttctcgactgactgactgctgactgttggttgatcggaaatgcatggttttgggatgtttcgccaccaattgatccaccaaagtgaccatcacattattaaccagttttggtgaggcgcgaaaatgcaattgctaacggcgaaagcattttgacgctaatattttcccaaccaattagcaaaaagcgaaaattaattagcataaagcgaatgctctgactgataattgtggtgaagctgcgggaacagcgataaacgataattgccgaaggcaaattatgttttaaacttccttaataaaactgcaaaggaaaaggctaaatggcaaaattggtcaaatctcatattaggggtgtaaaaaaaaaattttggagatgatttttgaaaaattttttatttcttagtgtattgaaaattttgggctaattcttaagttattttcctttttattgcatttttgttaataaatttgttagctattttaaagattttcagaaaattccttaacaaaaattcaataaaataaaaaagtacaccctaagaattggactttgttaagcattgcgaccaaaagccacaatagttaaattttattttcaaatttttggtaaaaaagctttaaaataactgctcaagaacggagtagcacagaaacagcagccataaaaaatatcaattaaaaaatccgtttttatttataagagaaaatatttttggaattcgctatgtttcgaatccaaagtataaaaataccaatttttttttcaaattttttcgcgttgggaaggcaaataatcatacataaaatgggtaaattaataaatttaaaaaaataaaattaaaaataaattattaaataaatataatatttaaactataggctcctcggcatttgccggttccgccgctttgtacaacgcgtcgcaactgcgcgttttctcctcgccctccccgttacagcagctctcgtcgcaccatttgtactcctgcgattcgcacgttcttctcgccctccactcttcgtcctcgtcgtcccctttggcggtgtacagtaacgtctcattactgtacttggtcctttcactgtagcatttcatcgtgaagcatcccttgccctcgccacacactcgcgcgggcaatcccaccgcactgtcacccgcgttcaccttcccgctcagacaggcaatcgcttcaaaataacgtaatttatatttagatacaaatttttagagtcggggtcgttttggcgcccacgttttggcgccgacgttttggcgcccacgttttggcgccagggtcgttttggcgccgacgttttggcgcccacgttttggcgcccacgttttggcgccaaaatgtagagaaagggcgaaattgtatatttttttgttttttcttggagtggggcaaagtctataaaaggagcaccttcctatgtagtagatttagtattttttttattttcattcttcaaataacgcatttttgttttttcttgtttaggaaatgatgaatcgtcaaattgatacaaaaaagcaaaagcctaaaattacctatgaaggccagctttacaccttcgataaatcaagtgcggacggaacgagaaaattttggagatgcgaatacaagaacaactattttttcaaggattctgctgtttgggcgtgaatcttttgggcgttgggctcagctgtcatcgcattagacacggagtttgggaacgtcgcggcactccgaccgctcattgactggttggtctcatcattatcagaagtgtacttcaatttttgtgcaatttttaggttgctcaacaattacattggacaaccgcgaccaaatgggacttggtctcaaccactcttcccaccagaacaatggaacgtctacactcgcacactgaacggggaagaaaggacgaacaaccacgcagaggcagaacatcaccgtcttcaaggcgccttcaactgccgtcatccatcgatctggcacttcattgacgttctccgccgtgagcagaagggcaccgatgggaagtatgcgtcatttcttgctggacttgagccaccgcagaaagctaagaaatacctaccaagcggctgatgagcgcctcttcaatttggtgcagaattacatcccggtgaacccgaacaatgaaaatgatcacaattaccacataaatccaaattttcatattattttggaatttcttcgtggcatttcgcgcaattatcatatgaacccgtgaattgttgttattttttcattttgttaaattttacttatatttgaaaaaaaaatctttttcctttttgtgcaacatttttgaaatttacgtctttccctttttaatttttggctccgcgccaaaacgtgggcgccaaaacgtgggcgccaaatcgtcggcgccaaaacgtgggcgccaaaacgacccagtccaaatggtagagccgctttaattgtttttgagaatttttattttaaatgactttttaaactcataaaaatttaatttaataacagcaaattaaaatttctttggaatttgaaaattttgagaaattaaacggatttgaaattttcaatgcgatcagaaatttttctgacaattgatatgagaggaccgacgagagaatttttaacccttttgctgataagcaataggtaagtagataaaattatttcgctcatagagaataaaaatgaaaaaaaattttattaatgttaaaaagcttaaaactattttggatatgaaaaaacaaaaataattatttgcagggttggggaattgaacttcaaaaggaaaaaaaagaacggaaggcatagaccactgggccagagacactcacactgg

SEQ ID NO: 1884 - DNA, 2269 bp, Heterodera glycines
cgaaataatgcttgtggggaaagaacgctgaaaatgtggaagggaacgcttaaaaatgggaagggttaatgttcactcccaggtcaaatcgataatccattcctgtgctgggcaggaatggatgcgcacagagaaaagatgagaaaatatccctctctaccctccccacccgctccccacaaaatttgaatttcccctcatctgtcactttggtgaccaatcaaaaaatttttctgtcaaaaattttcccctcccctcgtctgtcacttttgaaatcaatcaaaaaattttcacccccctccccatcggctgtcagtttttaaatcaatcaaatttttccgctcatcaaaaaagaacatgacatttgacacacgccccctcataggtttaggtttccctaattaattaattaattgctcacaccccatcacatatccgagtcggggtcgttttggcgcccacgttttggcgccagggtcgttttggcgccgacgttttggcgccagggtcgttttggcgccgacgttttggcgcccacgttttggcgccaaaatgtagataaagggcgaaattgtatatttttttgttttttcttggagtggggcaaagtctataaaaggagcaccttcctagtagatttagtattttttttattttcattcttcaaataacgcatttttgttttttcttgtttaggaaatgatgaatcgtcaaattgatacaaaaaagcaaaagcctaaaattacctatgaaggccagctttacaccttcgataaatcaagtgcggacggaacgagaaaattttggagatgcgaatacaagaactcctgcaaagggagaatttggacggatttggacgatcaattcattcgtttggcaactcctcatacctgtccagtgaacgcagcaaatgttgaggcgcagaaagtgaagacggcaataaaacgacgagcactcaccacgttagaaccgccagcagtgatccgatccgaagcacttcagaatgtgccatctccagctggacttttggttacgcaggatgcttcaaaactggtactgtttagtcgatgatatgaaaagcaatcacgaaagaaatcttaaggtaattaaaagggcacggcacgaagtcaatgcaccacctgcggttccacaaagcgttgaccagctgattgttcctcccgcttaccagacgtacgagtcaactgacggcgaagtggagcagtttctgttggctgactctggtgtgtattacgaggccggaaacgaaaatgccacgtttcctgcatgcgaaatccaattttgcttcttccatttcgtgcggaatttgcaaaaaaaaaatcaaggaacaaaatctctggcaggtcagtaagcatattcagtttgtttttgtaattttcgtgtctattcagagatactgtactgacacagtgttggctgagaatctgaggatgctcacttctgtcgcgtttctaccgctgagtgacatcaggacagctgtcatcgcattagacacggagtttgggaacgtcgcggcactccgaccgctcattgactggttggtctcatcattatcagaagtgtacttcaatttttgtgcaatttttaggttgctcaacaattacattggacaaccgcggccaaatgggacttggtctcaaccactcttcccaccagaacaatggaacgtctacactcgaactctgaatggagaagcaaggacgaacaactacgcagaggcagaacaccaccgtcttcaaggcgccttcaattgccgtcatccatcgatctggcacttcattgacgttctccgccgtgagcagaagggcaccaatgggaagtatgcgtcatttattgctggacttgagccaccgaagaaagctaagaaataccaagcggctgacgagcgcatctttaatttggtgcagaattataatccggtgaatccaaactatgacaatgatcacaattaccacataaatcacaatcatcatatcattttggaatttcttcgtggcatttcgcgcaattatcatatgaacccgtgaattgttgttattttttcattttgttaaattttacttatatttgaaaaaaaatctttttcctttttttgcaacatttttgaaatttacgtctttccctttttaatttttggcttcgcgccaaaacgtgggcgccaaaacgaccctggcgccaaaacgtgggcgccaaaacgtgggcgccaaatcgtcagcgccaaaacgtgggcgccaaaacgacccagtccctc

SEQ ID NO: 1885 - DNA, 1914 bp, Heterodera glycines
gtattaccgactgtaaacagaaattaatgtcactttgccatgcataggaacaagagacgtacaagccacactcaccatgggtggaccagagcagcaaataccgtaacgaggtaaaggcggaggccgagtcccttttggcctttttatctaccgtatacctgcctccattacagtacactgttggtgagccgcccgttgcccctgccgcttacactgccttttttgatgtattgcttttctccgtcccccccccccattaattggtgcccttcaaatttcaggatatggttgccaccggccccttcgccagctcgctctactcgacttcgcgtctgctggagcggtcccgttctcgcacccgagtgagtcgaccgagagccaatttgaatttgccgccatttggccaccgatttattccccctattaaaacaaacgttccattttaggaacgccgccaagcactccgttctcaaagccaagcgcgcaactatttccggtccgtcgagtttctctaccggtctctcactatttcttatccgcttcttctgctgatttgtgtgcttttcccaccgaaaattaattctaaaaaaaacttttccttaattcttggttagggcatcctttccccatgctttcaaatgcttttcctccccaaaggctttttcccccaaagcttttcctccccaaaggcttttcccagtgcttttcctccccaaaggcttttcctccctgttgtgtccccgggtttaaggctttcagccatttcaaattaccgttttaggagagaggaatttattataaggaaaagcattgacaaataattatgaattgaaaaccgggaatatgtttggctcaacaacaacctcagagcattttgggtgggtcagtgcaattggttatttgggaaaggattgccaaaggcaagaaatggcacagactgacccaccgcagacatctcgcagccccccgagggggaaattggatggacttatatactggcacaatggggatggactttggataggatgaggggtaatgacggaaaaacacaaaagggaataagagaaatggatggcatatgcaacagaggtgaataggaagaaatggcacgataacattggaaatgagagggataggattggcttgggatgggatgaacagatggataagtttacgacgggattgggtcgggagaaagtagggcaatgtacattatgcacaaaatatgaaattttaaatgctgcggatacagcactccccaatgcttttcctccccaaaggcttttcccaatgcttttccctatgctttctcctctcctgccgttcccttgactctctcccctccccgtgctccctcagatttgcctcccaataccccgccccgttgcgcacccgcgattactccaccccgccctcctcttacatcacgcgaacaccgaccgctgccagttcatttgtttcgttcattgacaactacggagccaagcagtacgacttggctcgcagtcagtcgctgcaccgaagctccgtgtacaacagcaacttggcactgagccgatcggcgtaagtcccggggcctccttttggcattaatactacaaaagtttggtttgagtccagcttcaagaccaatccggaactgataaagccgagactaaccagttgataatgagtaactctctgcctaattttgcccagttctcgtggtggtatcgactattatttgggctccggccgaatgtcccgcgtggattcctacgcggacgcactgcacagccgttacgagtggaacgtgccgagcagtcacgagctgtactacgcgtccagcccggggccagtgggctacccaccgctcgcccactaccacgctagaattttacactataagccgcaatctgatcatttttgaaaaat

SEQ ID NO: 1886 - DNA, 4464 bp, Heterodera glycines
gggcggcctccagcggagtctgtcccgagaacgatacgagcgcgatcgggttggtttttgcttgcaacatttgtcccctctcgcgattttctgctcattttccgattatcctttgcctgatcactcacttcttcttttgatcattccgtctcccctctttttgatcactctccctgatcactcactttaattttctctgatcactccctgattgctcactttctcctctctttctgtcactctcttccctttccctgatcacttcttccccctctgatcagttgcgcaacaaatacgcgacagtcagctaccagcttgaccaggcggtcaagcagatggacttgctgcgtagccataattactcctctgctcgctccggttccgcgccccgtacgtccgtctatgcccatttctacccctattactgaggatggccagctgcggcggcggcggcggcgaccgatgtgctaaaggatgcgatgataatgaccctaattatggtgataatatagggatggttcgaataatggaagcgcattcattcttcctattgtgccgtcgtccttcctttctttatgatgtgctctgtagaaacagatttacagattactgtagcttaccatttcatttcccttttgccttccctttccctttgctcaaatttctctcatccgttcacaatgcttaaaattcaaatttggcgtttcgtccacacaaataaagcgataatttacacacaaatttttgggtccaaatgcgtcaaattagcgttgaataatcaatcaataaataattagcatataattaaatgggcaattaaattatgggcgtcgtctttgtccgtcctcccctcaatgtctgctccttccgctgctattggtgctgttactgctcccacatctgctctcacactgttgcctcgtgccgaatcggttggcatttccgccacagccgtggtggaagaacactttgcacttcctctcctggggggggggggggcattattcagttcgatgccaaaaccactgggcaaaacaaaccttggcatcgaagaaatattggagatgggaggacggggacggttctcctgcggcacattgccgaccttttttgggggatggcatttaaaattgaaagcgactgagagagaaagggaaacagagaaagagagggagagaaagggaaatagagagggaaagagagagaggagagagagagaagtaagaaatggaattctttctctaccttctgtcgggcgaagtcgggacaaaattcggacggaagagtcccttttggatggtctgttcacctgcaaagtgccaacgatggtcacttcggtttgcctttacttcctttcacctcaaatgggtcctgtactccgatgtcgccctcccgcggctccgccgccgcattggtcacgccttaaaaacaattttaaaagctaaatgatttttagtgcctttttttctgattaaaaaatggtttttaaaattatttaaataatttttttatttaatgggaagaaatattttgcattataatataaaattaaatattaataatctttttgtacaattttattgttaaaaaaattatttaaaaaatattaaaaataaaatgcattaatataaactcacttaataaaaaaaatcaaaaattaaatttagaaaagaatatgaggtaaattacctaacctaaattaactaagcaatttaagtcaactgtaccgtttttacatattattttttgtctttttaaaaatttgctagcataaattaatttgagatactaaaaatttaaacgaaagaaagttgaaaataatgaattatgcaagaaaattctttcccaaaagttaaattcataaagaattaatgtttacattagtgaaattgataaattaaaattgcggtaaaaaaaactcaattttaaaaacaaaataatttaaaaaatcaataaaaccaatttaaaaaatttaatcttttaaggaatggcaccggagagaattaatacttagaatttttaagtgaataaacgcaccttttataaacaaaataatggattttcaataaaacttataaattttttcaaaataaacatcaaaaagcgatgaccagttatatactttattcaaaaaaaaaacacatgtaatgttatgttaaatttcctttacgcatttccgtacaattaccaagagaaataaattaattacaaagataaagatatattaataaaaaaaactttcgaacaatttttaacaaataaaaatttataaattttaataaaaatgtaatatatttggaaataatctaaaataaataaaataattaatgaaaacaaatttaatacaaatgattttaaaatttttcaaataaaagaataattaaaacttacaaactacttaatattaaataaaatcatttacttaatttaatccttttgtaattgaagtttaaaaatttaaaaaaattcaaattaatctgttttttttaatttaaagaatgtaattaacattattatattaactcacagctaatatatttttaattaaccattttaatttactaatgatattaattttgatcaagaatttggattgagatgattaataaatttttacttttttatgcgattgtcaggctcatttttttatgtaaatacatatttttttcctggattctccatagcctaattattaggaaaaacacattcttttttgtgtttgcgaacaaaagttgggactttaatttacatattttcggatttttctacatattacatatgtacatatttttatacatactttggactttttcgtacttattttaaatttttttacatattttaggatttctgagaatttatagaaatttttttgtgaaaaattgaaatttttgaaaatgtatccctaaaaaatctatttttttcaaaaaatgtgataccaaaaattaatttaaaatactaaaaagtatcctattttatggcataaaaatgatacctggtgattattagcaaagtaatatataaatatatttagcattatttaaattaatttaaaataattaacttttataataagccgcaatttttataaaaattaaaagaagttaattcatcaaggatatttagattatccagcaataaaacttaaaatatattttgaaactattattttattttatttttttcatcataaaattataacagttcaaacaaaaaattcaaaagatccccttataataataaatgagaatatttttaattatcaaatttttttaatcgtattaaatgtataaaaataaatcaatgtttattcacttttaaatattcgtaaataaacatggcaaactatgaacaataaatataaataattgatttaaaataaaatagttattaaaataattcacttctactaagttaaaatggaggactaataatgatatttacttaaattcaaaagtaatgaaatacctttaattaaatcaatttaaatataaaaagattacaaaaatatttgtttaaattgtcattaaatttaaattttataatttaacaatcacaaatgattgtacagaaaataaaaataataattttaaatacatgtgcataaactgcaaaattaatttaaaaatagtcaaaaatgaatcataaaaccaaatttttaaggttaagataaaaaaatataaacctttaaaataaaattagattaaacactaatattagatctgaaccaaattaaatcctccattcaaacaaattacacaataaaaattatattaaaaaataaaacaaacacaataaagaaataagacagtccaattaagtttttcaaaaaacctaacgattgcatgagagtaaagaatttaatattaataaattaaaaaatgctggttatgataaatatgattttaaaacaaaaaattttttccaagcataattctaattttaataaatgtaaacatgattttcttataatgatatttgataaaagcgaattaaacctatttaataccaaaaaataacgaaacagattccatgtcagaaaaatattagtattgtaatattgaagtaaacttctataaaaacatcgttttgaattccagatcagttgaatttcataaaatgaaattgaaattcataaagtataaatttgtgaatataataaagaagagaaattcctttatacagagaaaatattatttaattatttctgatttattctccattttacataaactaaaaatatggcgtgaatattaatttaaaaacatttttacgaaattaacaaattttcagttgaaaaaagtcgaatagagtgcaggtcaaaaactgtgagacgaaaataatctggaaggcaagaaaagaaaaaaaaatttataaaagtaaaaggatacgcaatagttttataatataataaaaatatttatatagcattttttgatatttaaagaaaaattcaaaataggc

SEQ ID NO: 1887 - DNA, 1180 bp, Heterodera glycines
  unsure (1)..(1180): unsure at all n locations
taagtaaatgatanaataaatnnatcggaataagataaagaaataattaaaaattntaatgtatatttttattaaaatattaaatgtttatatatttactaaacaatctaatatcggtttgtgcaagaaaaataatggccaaaaccaaaatcctcattcttaaagtatctcggacaaatgtatcttgaaaaataatatattaaaataatttaaattaatatctttatcgtttaattaaattttcatacaaatttcccagtttacgagatggaagaaattttattcaaattaattaaatcattaacaaaaattaaccaaaaataattgaataacagaatctatatgtataattgaacttatataaaccaaaataaataatagaaaaaataatctatattctaaatgaaatttttatattcacaaaataaatttgctttttaattcaaagataaattttttgtatttatttaacgtcacattcattaaaaaaagaatattcaataaaaatttaatttttattttagtgtttgaaatttgggttttatttatcaaagatgataaattaaaatgtaatttaaaaaacttaattaaaaatgggtgccggagggggggtaagaccgtatcgatcgtgaactaccagacgggtcaattagactctcaattttaaacaagaataaacgaatattaaattattcgagaatttttttttgtatattttacaaagataatcaaaatacgataattaattattgatcaatataaatgaaaaagcaaattaaacagaaatagtacatatattaaaaagatctaagaaattcctgtacataaaagtaaatcgacaaattcattgtagtggtagcaaatttcattatacgagatataaaaaacaaaaattaataaaatataaaaataaaaattcacctacaaaaaatgacttcctaccctaaaacatacaaaatttcagcataattctattaatgttggcaaaattttaaacaaatcaaaaattgttagaaattttatgaaaactttgtaaatttctcaaaaaaaaacaaataaataaataaattttcaacgattctttacttgaaaatcagaagtccggtctctactaggaataattaatattaatatttccttaaatagcttattgtgaaaaataaaatctttaataaaatca

SEQ ID NO: 1888 - DNA, 2125 bp, Heterodera glycines
  unsure (1)..(2125): unsure at all n locations
tgtcgcgattgcccttcgcgaaaatcaaataatttgattttgcaattgtgcacaaattgtgcaaaattgaattggccccaaataccaaaaaccaaatttaaactattttcaaatttggggccaatgttcgattgagtgatgtcggaattttttattcctatcgccgatcaatgatcggcggaattaagagggaggaggcccttcaccaatcccccgcccgccgcgcgacatgttttcgccgttccatccctctgtccccctttccttcaaattgtcaattgtttttgtgtgttcctcccccgccccgcgcacaaattaatgaccaatttgtcaaaccgcaacttttcgccgccgtccccaattcggcgaatgagactccaaagaacgatgaacccccaatttcccgttttcctcccaatttgttcattcgttcatttttgtgccctctttttcaattcatgcccaattttcggcccattttcgttctgctcaatttcgccactttttgttcaattttgctcgtatttaatgcgacaaatccccaccaattcctacaatcagaagcaccagcaaaggcaagcaatgcctcttccgtccctctctcagtccccctcatttcattgtccttttcccccggcccaattgtccgttccatttctgtcattcacccggtccctatcattgaattttgtgatttttccatttgccccatttctgaaatttctgtcccatcccggtgcccaattccatttgtgataattccccggtgatggcttttttcctgtgatcaatttgtgataattttgttcaccatttcaaatatttggtttaattacccaagtttgaggtcatttcccggaataaattttttattaattctgtgtctcgtccctgcctgcccctgaaccccgcaccgtggaattcatttggcccgaccccagagcaagtcgggacaaattggcgctcctggggtggatttgctgtgaaccacggactgaaatcgacggatcccggtgacaaagggggaagggaaaaagcaaattagagagcctagacaagaccctccgaggcttgtctagtgttcatagtttcgtgtagttactgtcctccgaggcataacttcacgagggacatagcagacttagtgtttaccctctgaggaagcacttcgtccgaacagagggttgaaaggtgttgtgtagtggacgaagtacttgccctccgaggaagtacttcgtgcaaaagggtgttcaagcgcgcacaaggccactgacaaataaggaaaaaggcaaactaacagtcctccgaggctttagtttagccataaggcaaaaggcaaacaccttgtcctccgaggcaggtgtttagtcacagaggtccatcaaaggccccagggccgagaccagactgatcccggcaaaagacacaaaacaacacacacacatacgcacaatcaaacagcacaatgtctgggccaatacaaaaagggatcatcaatgcactcaaagctctcgacaatgccaaaagcgccacttcactccttctacaccccgatccggacctgtcaaactgggaaaatgccgtcaacttggaggctcaatttgatcgcgtcgtcaaggaaatccgtacaatggaaatgcagatggacagtctacgagactcatccaacgcttggattgaacttctcgcccgcctgaccggagacgacaaagacaacggcgaaaaagaatacatcaaattcgacaaaaatgagaaaattgccgagcgatacgacgcagcaacaaccaaacttcgggatttgcgagatctcgaagcaacactcagtgccaccgctaaactgcacagaggcagagccgacagagaagcaaaggcggatcaattggccaatccgcaacaacaaccgcccatgccaccagcaatggcagcaccaatgacagtgccaacattcacagcaccgctctaccaattccagccaattcaactggataaatttttcggccaaaagcgaaaatggcccgaattctacgaatcccttcaatcggcaatcggcagtcaatcaatcagcaaagcgcagaagctgaacttactcccgcatctgctgnngcggagaagcgcgagaactcat

SEQ ID NO: 1889 - DNA, 3879 bp, Heterodera glycines
acctgtcaaactgggaaaatgccgtcaacttggaggctcaatttgatcgcgtcgtcaaggaaattcgctcgatggaaatgcagatggacagtctacgagattcatccaatgcttggatcgaacttctcggtcgtctgatcggagacgacaaagacaacggcgaaaaagaatacgttaaattcgacaagaatgaaaaaatcgccgaccgatacgacgcagcaacaaccaaacttcgggatttgcgagatctcgaagcaacgctcagtgccgcagccaaactgcacagaggcagagccgacagagaagcaaaggcggatcaattggccaatccgcagcaacaagcgcccatgctaccagcgatggcagcaccaatgacagtgccaacattcacagcaccgctctaccaattccagccaattcaactggataaatttttcggccaaaagcgaaaatggcccgaattctacgaatccttcaaatcggcaatcggcagtcaatcaatcagtaaagcgcagaagctgaacttactccgcaatctactgggcggagaagcgcgagaactcatagcgggcttccggctggaagacgcaaactacgagacggtccttcagctgttaaaggacacgtacggagctccggaggaacacatcagaagtcttcacttcgaactggccaatctcaagccgtgccgaagcctacgtgagaccaaagactttctgcttcaacttgagcggcttacaagggagctgaacaatgccggagaggacatcgagggaccgcaggtgttcctcatgctggagaagaagctgactccaccattcctacgaagcatcctcacaaagaaaggagaggatccggcaaactggacgacaaccaaattccgggatgtgctaaccgaagcagtccggaaagaagtccaaatccaagaagtgatgggagaatatggccatcactacgtccaaccaaaagcagaagtcgtctcagcagcacctgtacaagcaccgagaacaccaaaccaaaggtcacgaaggcctaaccaaccaatggcactgcgtgatatgacatttatcgcctcatcactggacgagggtcacagacatcaagggtatgtaagccaacagcacacgcaacaagcaaagaaacactgccaacaaatgcgaaaccaagtacagagcgtcaaaaagggtccgccatacccctgtattttctgcaacagcaatcattggcatgacgaatgccaaaacgtcgacaccctcaaccaacggatcagcatcgtcagagaaaagaagctgtgcttcaaatgtatgaagccaaaccaccgcgcatcaaattgcgctcgaccatctaagtgctatcactgcaaatgtcggcatcccacggcactctgccgagatcagtacaaagccgagaatggcatcaacacgcctagcacctcttgcagtgaagagaagccaaatgccaacgatggcaagcgatcaacagtgatcgaacaacaacaaatgtgtaatgccatccaaagcaaggaaaccagagcgttgctaatgacgacaaaggcaacgatcttcaatccgtcacggccatccctcagcatgatgggaaccatcttcattgacccgggaagccaccgatcattcatctcgagcagtgcagctgaacaattggatctgaacatcctcagcacggaagaatgctacttgtccagcttcggtgaacgagaaccgaagcgatacataagcgaccgcgttgcaatcggcattttatgccccgaccaggacaggttcattttcaacctgaacgctttgaagttcctgctgaatgatttaccggtactacaactaaacgcattggataatgacgaacttcaacaaaagaagctttccctgccgaatgagtcacggcaaccggacattctcctcggaatggacgtttggcaccagctgaatgttcaaccaattgaacaactgccaagcggatttacgatttgccaatcgaaaatcggcaatatcatcagtggaacagggcgaatcgagcttaagcaaccgtccaacatctctttcgtgctaatggtcaacaacgatgaatcgccacaaagcagtaaagcggctcagaggcagaaaaacattcaacaaaaagaaaaggccgaactgagacggcatcaacgcaacaaactcttgtccagcattgcaacattgcgatcaagacggaagagagaatcggctcccatcagctcaaaatcaatcgtgattgatctttcatcagacagcgacgcatccggcattgagatcatacaaaatccagtcagggatagacaagccaaatcaccaaatgagcattcaacggcaccaattcctatggcagtgcaacggctaacgccaacaaggaagagttcatcagttgccaagcgaccagcattttcttccagcaaacaaccaaaaggaaaagcagcgaatcccacacaaacaagccaaacaaatgaactcaacagaaaaatgaaagccttgtcgccaaccgcaagtggatcaggcgccaaccatcattgcgtcgctacattggccagaagctcggactcaacaacagtaattgataagggcagtcaacagaattgcctaaacatgagctcggcaacaatcagtaagacaccatgccaacagcactcgtccgagaagacgttaaactaagctaatcaccatcaatcgtccgcaatgacgttaaactagcctaagccatcaacaactgtccgaaacgctaatcacccggctgccacaagtccgcaatgacgttaaactagcaaagcatcaattgtccgcaatgacgttaaactagcaaagcaccggccaccaaacaaccattgtccgaaaagacgctaaactagcaatccatccgacggtcagggtccgaaatgacgtcaaacaagcaacgacaattggtccataaggacgttaaactacgtcaccaattcaagcaaaagcactcgagcatgcagctgacagcacgtttccggaagcaaattcacatgtcctcaacgattgaggaggttcagcagcgaatgaaccacaacagaccgcaaccgcggaggtcacaacagaggggactaaggccaactcaagcgcctaaaatatgccaatccgggatggcacagtatacaagcagggtcgagggatccgcctttcaccctgcgtcttctgcaatggcactcactggaccacgacgacgactcagcgaacactcaacctggcaattgagctcttcgcaaaaaatcatcaagcccgagcagagaatgcccattcgccaagtctgaaatgacgaatgacgaagcacaattgtggtcaacgaatgacgaattggaagtcaacttccctggaccaatcgccggacttttcaaaggcgaacaaatcagcacggcgacaaactgctttgctcaaccagcaacacttttctccaccaagttcagaactgtcaatacgcaaccgaattctgccaactgcccgacaactcaaccctgatttggaaatcaacctgcaatggcaacgaatgccaaacatgcgactacgagaaggcggaagtcatcaacggaaaattcactgcggcctacggagaatcaatggccacttggatctccgaagatcaccaaaagacattaactttcgccaaaaatgcgccagaactcatcgcctgcgatggcacacgcatcgtcatgtccgaacagaacttcggaattgccaaggagcaatacgacgacattgtcaccaccacgacaagatggaaaagaggcatccgaccagaacagctcgcaagtggcaaatagaaggattcaccatgcgttggctaaaaagcctgatcgacgaagcaatcacgtggtggattcgagtcgcctgcgtt

SEQ ID NO: 1890 - DNA, 2762 bp, Heterodera glycines
aaaaatgatttaaacacttggaaacattctgaaaaccacgaatattgcaaaataaaagatcattaaacccttttcattcgaaaaaagcgaaatttgaagtttcgactttttgttcggggttcgaagtcggggaaattgatgccagaatcttgatcaacgacaccctgaaaacccctagaaactttttcgaacgactttttaaattttgaaagtttccgccaaaaaataggggctaccatcttaactattccaattttttgttaatttttcggaatttgtgtactattacgaagaattcattttgctcttttcccaccgtgattctgtcgtgggaatgggccatcaagcctaaaaaattcgatttctgaggccccataaatttttttcgctaacagcccacaaactcacaatagaagtcactcgtgttttatacaattattccactttcatatatgttttccgattaacagctcacctggttcccttgttagccaaacgtatttgagctctaaaacattaatgccttttataaaattatttaagatagtttctccttttttaggtacgtgcgtcatcgctctggaacagcaaataaaaacaaaaaaaccactcctgtttatgccgtttacatatttaatgtaccagcggaagctactgatgacttggttatgtatcaaatgatttcgatcaattcaatccgagtgggtttaaaataattattccatatccgttttttacgttttctttaagggcaaaattacacacatcaatcggaatacgaattgcattgaagttgcttttgaggacagaaaacgcactttggaattcgatcaaaatgtaacaatcttttcgtcttatacaaccaattgaatattataattttgtttcaccaggcttgctattgtctcgaaattgaattcaacgcgcgccaatacgaggctttcatgtactcaatttattttgttgaacaacataaagtcgattttgtcgtttttcctgatgcttccgaattggtaaatgagggaaggtgcaaattgtcattccaaattgaaaaacagatgagcaaggaggagtttgccactcgattggtcgaattcaaacgcaagtgcaaaactgaccctaaactcacgcgctttgaccaacagcaacagttggcgatattttccattgtcaacggaatccatggaaccgtcccatttgtattgtggggaccgccaggttttttttaaatttttgttaggaattttgaaataaaaatccgaaaaaggcaccggaaaaaccgtcactttggtggaatgcgttcgacaattgatgcagcaggacgaaaaaaaccgaattctaatctgcactccgtcgaacactgctgctgatttggtcgctcgtcgtattttagaaaccaacatactcagtcccatccaaatgcgtcgttactacagtttgggcaaaagcgtagacgaaagagacagaggattggacacaattatcaagatggaaaagtgggtttcaaatgttgttgtttttttgcagtctctccgtctttttcggaatgtttaatttttggcttgtttttagttgctccatttatggcctttacgacgagcgtttcaaaattgacaactacgcaatgttgacgaagcagaatgtccgacttgtctttgctacgctcgcctgttccgcatacctcgaagaggaaattcgcgtttccgattttttctcgtcagtaattacactcttttgtctctgcaaaatctccgttattacaggcacattttcatcgatgaagcgggtcagtcaattgagcccgaaactctgattccgatcacacgcttcgcaacaagaaacactcgcgtggttttgtgcggagaccaccagcaattgggtgcgttttactcattatacataccgaaatgttagaaaatgggtctcctctcccccaattttaggccccgttgtaaaggcgcattttctcaaggcttacaaatcgtgccatttgtcattgatggaacgattaatgaccacaatgagagcagaagaaaattcttttagaattaatggacaaaaaagcgtttacacggacgggtattaaattgtttaattttggagtaggtatttaaactctttcagacggactttttgccagctgacggacagttaccggtgccatccgaaaatcattcatttttcttccgtcaatttttacgacggcactcttcgcgcagttaacgaagagaacagaaagtctttttgcgattggaagcatttgccctccaaagttttttttgcccatttgctgtttttttagtctcaatattttgcagaattttccgcttttatttcacgcactgacaaaaggggccgaagtgaaacaattggagggccgatcttatcacaacgaagaggaagttgaagtggtggagaaatacatccaattggtgagggaaacggacattgaggacacggaaattggggcgatcagcccgttcaaacaacaggtgacaaatggggggggggggtaatgaacctcattaatccaatccactgggaaccaccatcatttatgagcgtttagacgctgaaaatccgcgatcgtctcgctggctcaagaataaccgtcgactccgtggagtgctaccagggatcagaaagacgcgtgattatctttgctttgtctcgctccaaacagatcggctttctctctgaatttaaggtaaagcaattaggaggaatagcagaattattcttatctggtcaattcattcaca

SEQ ID NO: 1891 - DNA, 4862 bp, Heterodera glycines
  unsure (1)..(4862): unsure at all n locations
tatgacaattctctttctttgctttntcattctcattttgtaatttgttttgtccagcgtctcaatacatctttgacccgagccaaggaattggtaattgtcgttgcgtcgttggattttgtacggaatttgaattccaanncatcnccaattaatattggatcaggtaattcaatacaaatgattcctttttatccaatgccttttcagttttattgagttttgcatagacaacaaagcctgttttggtggatgggtttgtcgatgagttgggtttcaaccagcaaactctgactaaaaatgggaattttctgcggaagtgccttaaagagagttttcattctgagtttacacgcatcgagagaaagaaaaagcccgaatttgctgtattttctgcaccaattcgaaaatgtatgtttctcttttataatgcaatttaaaatctgtttaagattctgattcggattcctcaacctccgaatcctgcgatgaggacgaaggcacagtcagtgatttgtcaccactttcttcaagcgacgaagaagggaaacaattttgggccaaacaaattccatggagaaagagaccgagtgaaaggaacactttgagagggcccaaaatagaggaaatggcaaatgcgatgagcaaactgaagaccaacgaatatacagaagacatacagtacgaggatttgacgacggatccgttggaaaattggcctgaggacgggggccaagacgacggttatgccaattggaactgtccatcaaaagcgacgacccttttgagcgatgaaagcaaacaaaacgacagtggaaatggctacggaagcggtaattttttaacaattctgaatgtgacaaaataatacttacttttgtccatcagcgcctttgtacaatacgaaaacggaaaatgttactgcaaaacaaaacgacagtaattacgctaattgccagcaaaaggttagcagaattcccgaggaaagtgtccgcgatcagccgacacatcggccgacgaatgcacagaagaaagactttttttcggagatcgcaacttccattgaggaagggagcatcggtgccgccagggggaagaatcccctggggagtgtccagcagaactgcaaactcatgtgattaacacccaacccatgccatggcatttctatccgggtttactcatatgttgatcgaagatacaatattcttgtttaattctttattatatgaattttatttctacattaccgaaaagatgctaaaacccgatttgttttttttatttttctgtttttttagccagatcccagtttctatcattgtttcaaataataaaataactaattgtaaacaaccgatggaccttgattaccaatttgaagaattagaggcaagggttgacaaattgctaaatgccaatgcaggaattggtggtccgatcacagacttcgcttttaatatggccaaagaggagggttactcagtccaattcgtcaaatacgttttggattcggttgacattcattacagagacgagaaactgctcagacacatggtaaattaaagcaacaaatccaagagtggaacgtcggcaccttaattaaggtacgatttacagcttcccaagtgaagaacacaaagatacccttttcggagtgtctctccgccaaagaaatccattcgatttctaatttttgctctgaattgaaaaacgacattgccttttcgattcgccctgtttctcaggggcacagccaatcggccggcgcggagtttcctttgctcacgcgcattgccattgtggccacttattgcgcgagttacaacccccaaacgagcgacaaagtgtttttcttcaaagtcggcacttttggaaagcactaacaaagtttttgatcttttcaaggggaaagacgttttgaggcgcaaattgcgaggggcggcgcgggaggaaaattggcacgaaagtgggccacgccctttcgaccaccagcgggcgctgttcattttccttttcttctgccgccaatttgacgaggcacttcacgacagtccctcggcttcttctgctggctttcacttcgattctgtttgatttttcatttttacgcgtattttggctttttttcatttccggttgtaagctcgggaagttcctacgatttcacttcccaaattgcacatttggtcgacgcgggattgcttcaggtcggaagtttataattccattcccaattataacgtttctcaaatgttccttccttttcaggtgattagtgcgccggaaaatttgaatttgccaaaatatcgttctctttgctcgttgaattttgtggaacaaattgcacggtccgtcttttctattgaactcaattaaagcccgtttttcagttcgatttcttccgatttcaatttgaagagttttctggtggacttcgcttctgaaaaatgatctcattgtctttatttttttcttttcaataaaaaataataaacattttattagtattttaattttgttttttttgagttaatttcctcattttccctattttttgtcatttgtttttcttttatttttaattattttccgttttttgttccgatggctgtcggttccttccgtacgtccgtttgggacccgtcgatgatcctttgccaaatcgtttgtctccaaagtgcgttttactctctcgagggttcactgatgttctcgtggagtttgttcacttccttccgtcctttgcttatgcattttttcttttctagggtgagtgcttttttaaattaaatttttggtatttgtacgaagaaattacatcattttaacaataagcatgaacggaagtagcatttgttgttttattttgggttggtttaggcccagcatccgatggtcattatccaattgatggcctcggcactctgtgcccttctcttcccccacgtcgtcgttcgttctcgtctctgtttggacttcgccgtcactctccattttgtgcactttctgatcgtctgtctttccaatcggtcatttccctcgcagttttcttggttcgtccgtcatttattccccccccccccacttaatttatccaattttacaatttcctcactttcaggtggcttttgcaggtgttaagtgcgtccttttgcacaattcttgctgaatggttttgttcgcgcagagaatacgccgaaattccgttggcacaaaaccaagcgaatatttcacgggcaattgacacataaaaagcgattgaagaattaaaaggtgtggccttcgaacggagaacattttgttggaaagggcaaatcttttgcttctctttctgttgccgaaaggcgtcactgatccgaatttgtatttgcccttaaacgggtgattttcccaaattgggcgagtgaatgtgcgcataattatgtctgtcatttcttcgttattcttttttcctcaattataaattttggtgctcgtttcccatttccttttgcctattattaacagtttgatccgttttgcatttgtattttcttctttctcttttttccgtttccccttttacttttaattgctttgccaattagcgcggttaatgaactcaattggttgcccttcctcctccaatggtccttcctccgctatgccttcttcttccgctgattgttctgctgatcgctctcttccgtcttcctcttccgttatcttccaacaattcacgatcgatcagcgacactttgtggacgaggattacttcagtctcgagagtattttcgccaccaatacgaatatttgctgcactttcgagtctaaaacgccccccggtgagtttggttttttttcggtcattcaaatgtttcagcgctttttcctctgctcggccggaaagcgcctgaggtcatttctgagaagggataccgtgccaatgtccccgcttggctcgtccccgccgtcgaccacatttgctcggtagtgccatactgggactcaaatcccgattttatagggcccctaatcccgagtgttattttaggaccggaattcgggatttttccaaaaaactaagaactaaatttcctaaaggatttaagggggggggggcttagcggccaaaaaagcgaaggttgtctatccatgtaaatcgacgagcttttttctttgttttaaagccatttttgcggcgcgttttttacacaaacccataaattctccccaaaacccaaattcataaggtaaagtttcgccatttttaattaaaattgttcaatcgaaacatcgggacctggatcatttataggctcttgggattggaaatcgggccgagataggattaccgaaattgaaaccccgattttgtctggatcccgattacgtccgagctctagtgccaactcagagacacgcatttaacagtcggattttgccatagtttcccatttctttcagtttgccgtgcccaccgtttacaattccgtcaatcgcgacgtaatccacgcgggtgcccaatcggtcaacttggaacagttgcaacgccactactacacattgggcacgttcatttgcaggcaatccctctcaataacattcacggtgcgaaaaatggggtttgaaaagtttattggggaaaaaaagactttacaaaataatacccctgggagaagggagtgggaaacatgatttcaaaattttcaattttttctagtctaatctactcaaaacggttcagaattcgataaaaataacattcacggtgcgaaaaatggggtttgataagtttattgcggaaaaaaagactttacaaaataaatacccctggggagaagggagtggggaacatgatttcaaaatttttggttgaa

SEQ ID NO: 1892 - DNA, 5159 bp, Heterodera glycines
  unsure (1)..(5159): unsure at all n locations
atgggcaccgaagggaggacgaaggacggcaccgaagggccgccaaaaggaaacattgcggcggcatttcgacacttctctctgtgaaaaactgctgatcatntggcacatttctggcgattcgtctntcatttcctctttttgttcaattctatttaatttcgttcgcaataattctttttttttttaatatttgtttttatttacgcatcattatgttaattcgtttttttatattaattcattttcactttttattctttttattgcttcagttttctcttttcaaaatgtcaaatgattgcgaattggacggaaaattcgcggaattgcgtaagaaactacgcgacttcacccgtcagttggaaaatggcacttcgcaagtgaatgaaaattaattgttcgttttggttcattttctgttgctttttccagtcgtctgttgcccaaagcgcaaattccggcgacgggcaacaaccaatggccacaattcgcccgaaaatagcgcaaatgagtgccgaagttgtggactcaaacccatacagccgtttaatgtgcgggcattccgaataaatttaactttaaacaaaaaacagggccttaaaacgcatgggaattgtgcagaattatgagcaaatccgagagaaaactgtcgttgtggtgggcgttggaggggtcggttctgtggttgccgaaatgttgacgcgatgtggcattggcaagctcattctggtgagcagagaacggaaggcattttaacactgaaaacatttgggaaatcggggaccacgcgaggggttgggcagacggctcaccaacaaagggaaggacaattagggaaattttatgtttatttccactagtttaattttcacagttcgattacgacaaagtcgagttggccaatatgaaccgactgttttatcagccgcaccaaagcggacagagcaaagtggccccccccccctccctcctcttccccccccccttctttttgccgaatcaactcataaattcgccatcttccagcattttccatgcgtccgcttctcttccgtcccttcaatttatttcttctcttccttttcatatttttcctcactaaaatccgtcgtattattcatattcaatcctttcttgccgaacaaagtgtgcctttgcgggaacaaaaaatggccgattttgtgaagccattcagaaaagcaatgggaaatttgtaaacagacaaaattagtcattttaggccattgagagggttggcactgatcctccggccattgtcctccttaacaaagtttgtcatcctcttccaatccctccccttccttttcgattcgttcgttcagttcgccctcaacatcactctcaacttcgtctgcaatttgcgtcttttccccggcgcttctgatcgcctcatcgtcgttgtgttcgaccacatctccgaaaagactctgctcaattcgtttccccatttgaatgtcatccattggccccttttggctttggtcggtcaatcgaccgcctcaaaattaattcaaaaaatttccgaaaaaaaattttaggcggacaaattcggccccggggatggtcgctaccaaatgtttcagtatttccgtgccaaattggctgtttttctcacggagttggtgccttctttttggatggtgaggcgagtaaaaagaaggaaaatggcaaattaatgggcaattaggaagagaatttgaggtgcaagcggacacaatttggcgggaaaatcttttcgaattgatcggttggaagcgaaaattgtgagagaggaaacggagaaattcagatgtggacaatggcacgaatgaatacggacgagcggatttgatctttgacagtgaggggagcgacgggtaaatggccaaagaatttcaaaggaaattagataattactttaatttagattgctcagctcaatggttcgtccccgtggaattttgaaatttctcaatttttccgatcgccggcggttatttctttgtccgctcatccgtcagaagtcgcagttttttcgactctgtctcccgctttttgctgaatcacttcgctactgataataatgtgatggctcgccaatgccttcttggaatgcacggcgcaaaatgtgcgcaaatcccttacaggtcgctaattggcgcagaatttcgtgtcgaatcggacaattgacaaaaaatgcctttttgttagagttctttcaaattggcgccaagcgattgaaattaatgaaaatggagaggacgacggcgcggctttgttccaattcgatggcggggaaaatacgggggacaaattcgagaaaatgagagcggaaggccatctttttgtggatttgaattcaattggggaatggaatgatgaagaaaaaggaaaatgggagaacggagagagaaaagcgaaatgtaacggcagagggggagagcagaaagacgcgagaggaacagagagtgaggggcaaagttggagggcaacagagaagagaggagaagagagtgccaatcggacggaaaagaatcgcaatcgaacaatggtcgccgccattcacgcgttgttcgaatggatccacgggcttttccccggcatcaagcagtttttgattgtccgattgtttccccattacgcagcacatattctcttataaattaaattagccattgtgccaagaaattcttattgttaataaataaataaataataaaacaaataaattttaattaattattagccataatgtcccttttgttgtaaatgaccattcgaatgatcaggcgaaagaacaacaacagatgaatgcgtgcatgaatgagtgatcaaggtcagcgagagaatgtgcgccgatggcccttctccgtcgtccgatcgtttttcgttcggtgattgatcgttgcgcatgccatccgtccatccgttctctgtctgtcgttcgtcattcttttttttcaatactaatcacgagattctcgtcaccatttattcaatcatttatttctaattaaaccattaaataataatggcaaatgccccgacaaaattaatccgtttgttaatgtgtcgtccgactcattttaatgtgaaatacgaaataaacccatggatgaggccaggcgacccggtgaatgtgcaaaaggcaacagatcaatgggaaagactgaaacgcactatcgaggttataaaactgcacaaaaagacaaaatatttatgatttataatcatatccaaagtctctgttggggagtagaaaaaggccgggattcggctgaattctgattcgggactttaaggaatccggcgcccaagtcgaagtgatggaacccgtggtgagttctttgtggcttttgttccatcatttttcacattgcctcgttttttgctttgcccagggggctgacaattaccccgatttggtgttcacggccaatgccgccgtcgtccgcggcaaaaatgcccttttgagcaatttcttttaccccgaaaggaaaggtaattaatggccaaggcaaagcaaacgaagccaaatttgaaggggaacaacacttttacgaccgatggtttaagcagaacgggtacgaaaccttcaaagaccttcacgtgcctttcgaaggttcaaaaagctttcttcacttcgatctttgaaaatggcaatttgaaggtgccggcgatgctttgtggataggaaagtcaaagttattttgcggcattggccccaggacggacgtgcgggcgctgactctcatttcggaaaagctgcgcgactacggagcgcccttcaaagtttatggctttcgactcattgacccgcggtgtctttatttaatcagagttataatattttgtaaaagatcataggaaaaagggctaattagccccgaatggggtgggttcaaagccacgaacttcgaagccgtagtaaaagaaagtggtcatttgacaatggtcaaataaaaccacaaattattggcaaaaatataaccaaaaaatgatgatgtattaatacatataaaaatagtactgtttaagaaagtcagaggtatttagaaggcaattcaatgaagaaattatactgatttttaagattttaattcatcatgtaagaacagaaaagcactctaaatataaaaattaggaataaatttatttttaaatatttaaatttaaaattaattgaaaaatctttttgcaatttagtggaaatttagttatcatttactacgggtaaaccagcgtagttgtggttatctacccaaccttaacttttactatggtacccggtgttttttgttttgttttgttttttagatttttttaaacctaaaccagtgcttctccgactagtgccataaactttggaataatccttaattcccattacaaattgatgggattttttgaatgggaaaaagacgagttcttcagtttttaccacatcgacacctgcttctgtcccctgaatgatcagatcgccatttactatccctacgcttttgatccgggtcggtcggtccgtcagtcagtcaattcgattttccattttttcagtggccaggcataacatgtccaatgaggtcgaacttgtgcccgtccacgaggaggacgccatgagattcgcctgcaattccatcgtaattggaaaaacagtaatcatcaataggtacggtagacggtgacaatagaaatgttaatcaaaaatggcatgccatccaagcggaactgaacacacggcgagtatggtgcagaagttgggctttaccgtcaaatttgtggatatgtccgaatttatgaaaagtggcggagcagccaaatgttgcacattgcaattgtgaagtgaaggaggaggacgaattagcaacaattggccaattaataatcaatcaaatgaccaaccaatcaaaatggccatcatttgatcactttttgctgtcaatttcttccaatcgttgcctttgcttttcttcatttttgctgcttctctttattagtgtcagcatttaattttgtcatttgttgtgaaaagaaaaaagaccttctgctgaaaataattaattaatattttaataattattaattagtaattctttattaatcaataattaataataatttttaattcatgcatttgtattacctaggatttcctt

SEQ ID NO: 1893 - DNA, 3722 bp, Heterodera glycines
  unsure (1)..(3722): unsure at all n locations
gaatttgccatatgcgtggccaacgnctgtgccaaaattcccagctgtacctttggccaacaatctgtgcggtcggtcgaaatgcttggcccatcacttcgtcactggccaagtcgggctattcaagtgcggtgtggctgaagccccgcgttggaaaggtggcgaagccgacttggcggttctgtcgcaagtttttggtgcgcaatttttttaatgaatttaaaagaaaaataactaaattaccccaggcgagaccaggctataaccgactgattttgccactgctaaagaagggagcgaaaaaaatggcagatttgcctgaatgggccgagtcgaacagtgaaccgagcgaagcggaagacaatgacaccgcacgagccgaggaggcgggcacaagcgcggcagagcacggcgagacatcgtcgagagtttggtcatggacaacgcgaatgccgaaggcgggagaaaatgaagacaaaggcaaaagccaaaatacggaaaatcgagcaaagtctgagaagccacggaaaaaggagaagcagaaaaataaggacatttttgatcagttgcttcaggacgaaacggacgacgaagaagacaaatgggcgtgatcagaagagaatgaggggggggggggcaaaaagcaaaagcaacaacaaaggcattcttttgaagagtaccgcccccctcattaattcattaaacgaccttttgtggcgagaatttttatcagaaagtgaacgatgtttcaactgagaaattgcagcatttttctgtgtttgtttttattataaaaatggttttttaattaatgcgcaaagatttaacctcaaatacaaatcatatttcttaacaaattgtgatttttaatgtttattttccaattctgctgcttctttaaagtaacattttttatgaataagcgccgaaatttccattcacaaaattcgcactgcgaaatgcaattttggttggcactctgttaacaaatatgagaggtgctatgtcattatttaaaaaccatcattatgtgcgttatttaaaaaaccatcaaaataaaaattgtgcttttaactttgcattaaacaacaaaatttttaatccttgctattattcgatagaactaagtgtttttatgagcctgtaaaatttcaaaaaaatttattaactttaaaaaagttatggccaaaaatgttcgaaaaccaaggttttttgcgttcctcaagctataacttttttgaaacttaataaaattttttgaaattttgcagactgatagagaacacttagtactatcaaatgaattaaaaatttggttgcttttgagcaaaattataaataatttttcgacaaaaattttcataatgatggttttttaaataacgactccgccccatatgagagtagggtgggaatcggggaatcccgcggggaaatgcgcgaaaatcccgttcccgaactttttttctcaaaatattaaaaattagaaaatgagaaaccgaaagaaacgatttataaaaaatattcaaacttttttaagatttattaatttcttctaaataaaaatgatgatgatcatataaaaaaaacaattcatttgaattaaaatattattattcaaatatgcgtctctatgttttaaagaactcatatcctttcgtattttcccaatgttttctttttccgctcccttttaattatggtttcaggaataaggattttgatgatgatgaagctttgatgattaaacttaaatacccatcatccattaaacgttcttttgctttcctaaaacggcaaaatgatgccaatgcattttttgatcaaaaaaagttggccgaaagagggaaaacgggggaatgcttctgcttcgtcatttggaaaggcaccaatgcataataacatcttcaaaaaaaatactaaaaagccaaccaaatcaactaaaatcagggtagccagatgaaaattttcaaaagcctcatttggcaggcaaaaaagcctcattttgggtcaaaaagcctcattttcacaaatttattcaaaacacgtttaaaatgttcaaatgttatatttttgattgtccatgattaatttgagcattttttttgttagaaataagcattttttgggattctgaacatgaaaaacgaagttgatttttttgcggcgcttttcccaaaaaacttttggggcgcacgggggggccggcggtgccgataggcgccgccgggaaaaatttcaatgatgttaacagattttgtccgaaaaatgaccaaattttgcgattttgagcaaatttttgcttgtaaattaaggatttttacggtccggcggtgccgataggcgccgccgggggaaaaattaagaattttgaccatatttttagcatattttcatttaaaaaattctttaaattaccaaacattatgccaatttatcaaaatttaaaagattctgaggattttccccaaaagcctcaaaatttctcaaaaaactacaaaaagcctcaaagcctcattttgaaaatttagcctcattgacctatcaaaaaaccacaaaatgaggctaaagcctcagatctgcgaaccctgttaaaaacggtagaatcgatgtaaaaaggttcgatatgggttggaaaaattgaattagggacgcgcttgacctttttcaggctgaaaaagtgccagaattggagttccaaactcagctggaaactcaagtggccgcactataaaaagcactcaaatgacattttaaatttctaaggtaatttgtggcgctgatcacgaatatgacctttattttgcaaaattccgaaccccgaacccaaattcgaacaaaagcttaattttaattttgtagaaaattaaatttaggtttttgttcgagtcgtggaaacatcgactttatagaacaaaaaaattttacaagggaggcaatgatttttaatttgattaatattggtaaatttattggaaacggcatcgaaacaccggtggcttatttatatacacaccgtttcaattttggcctcccagttccaaaaagatttgcatgtgtggcgaagtggtttttgtaagattgtaaagggacaaggggtggaggttcgagtccgttgtgctacatgaatatttttatttatttttgtccaaaaaattaagaaacgttgacatcacagaaaagagttgtaagactttgaaattttcataatggtctcatgcaaaaacgggatgtacaacctaaaaaaacatttgataagttcgatgtgaaatttttttctctatcgatatgcaaaatttggtatgcatttaacaagtaggaaaaaagttaagcaggatgaagtgaatgttgtttttcccgggccaggacgttttcgtaccgccgttttcgtacgagtggatatgcaaaaaaaattgcattcaaataatttgttatctttttttaattacttttaatgttttgacagttaagcttttattaactacaaaatgaaccagcagcaagtaattaaaacaaaactaaataatgataaattggtgcatgatggtgcacagaaaaagaagtatcgcgatgccgacgcacggatttgtacaaataaaaaaaataaaaaccaaattttaattataaaatagcagtcgaaaaaaatgaatgaaatttctgcagttcacttttaattgggtactaaaacatttatataaaacagaggtccccaagtttttttt

SEQ ID NO: 1894 - DNA, 4278 bp, Heterodera glycines
ttaattctactgagtctgctaaacttcttgacacctatgatattgatgttttactcttgaaaccgccccatctcattcagtgaccaattttatttatttattttgttttgatgtcggtgtcacgcttttgcgtataaattgattgattgacttcaatcccgctcttggcactaccagctccggtactgatcagcagacagatcaatcaaccccggagaaaagacccacccattcttttatttttgcctatcattgctaatgatcagggaacggattttaggcgctaaaaaacgccaaatatgtacatatatatgtgccaaaaaacccccaaaatatgtgctaaaaaagtgctaaaaaataaatgaattcctcaaaaaagtcattttttgatcaatttcgctagcaaaatgcaaataaaaccgtttcaatacttttggtgtaaccttttttctctcgctctctaagattgacttatttttctaaattttcttagcgaaaattcaaattttgccttaaaagcagagttcccaagtttttttttttcaaaataagacaaaatggcctaaaaactaagattctgaccccaaaaataagatttttcgaaaactaatatttgcgtgaaggaaacgcaataaaaacatgaaaaattgacttaaaacaatattttattagcgtaaaaacgaaggcctgtcaactgaaaattttgtaaatcagcattttgaaaaattttattcaaaatttaaaaattaataatgtttttgcggcgtgctttttccaaaaaacttttgggaattggggggccggcggtgccgataggcgccgccgggaaaatttttgaaattttgtatgtgatttgttaacagattttgtataaaaaaagaccaaatttagagattttaaactaatttttttaagaaaaattgggattttggtgtccggtgccaccgggaaaattttttcaaattaaaatgaaatttgttaacagaatttcaccaaaaaaatgaccaattttgagattttgagcccatttttatgaaaaaatatgcagacgacacaaagggcaaattcttcgccttttcgacttttctttatatgccggaattcttttgcgtagctttccaaataaacatgtttacgttttggtggcattttgtgaatttcactcaaaaaatgaaataaaatgtaatttttttttaaaatcaaattaattcaaatattcgcttcagaaaaaaaatgaaaaatcaaaatagtcattcaaatttttcattttttattttcaaatccaaaaataagcacaaaataagcacgtaacgctgaaataagcacaaatcttagaaataagcacatttttactttctaagatccgacccctcaaaataagcacaaatcttagaaataagcacacttgggaactctgatataaaaagatcggaatagtagagttcaattctggtacgattcacactttaataaaacagccctttttaattcatttacaaattttagctataaaaaaccaaatttataataaattagtacagggttatattgaacaaatctctatttttctcattttattttgctaacaaaatgattatgtaaatgggtcggcattcgatggcctgccccatttgtcacaattttcactcgtcaccatcattttttgatgatgatgttcttatccaccagtgatccatccctcatgaatttaccacccccaaatttgtcagtcatttagtcgcgcgtgttgttgcaaaagccgtccgcattttcgtccgccctccctccatgccaaaacagggactaaacaaaacaaaaaaccgaaaattctaattttcaaaagccaaaatccgatacatataaaatttaaaaccgatgtaatttttgtcagactaaaatttaacacaaaactagacccaaaaagtgccgcgaaaaaggggaccattacggcacgaaaaacgtgtgcatttcgcacgtcggtgcaacaacgacattgaatttcggttagcaaatttccaatgttttatttttgtttgattttaaatttataaaaatttctttttttttaataaaattcttccatttaatcaaatagattaatgtttttcaattgattcagattaatccaatgttgcagcacatgtaagaagggatttcttctcttttgcaaaaatttttttcgtctagtaattaattaaaataatttatctaatacttgaaataaattaatttttattgattttgtctatgactttttatcaagtacttgattttatccaaaaattttaagaaaattaatgggtagtaaaaactcataaacagatgttgtagagcttaaaaagagctttcgaatgagctattgaatttatagagaagtcaagtatttaattttctatgattttttaaaatttagttattaatctctaggggtcatatgagatggggtgtgggttcgagcccgcttggctgcagtttatttttttatgcttattggtgaaaaatcatagacaaaaaatgaaggttcttgtaaaatcagagctcagatttgtgatctacatatttttttaccccaaattcattggaaagagaatttttacagaagattaaaaatttaaaaaaaacaagtacttgataaaaagccatagacaaaatcaatgatttttcaaaatctgagttcagattcgtaatcagcatatttttctacctcagaaaaaatgctttttaaaattttactatttttcccatcgggaccacaattctacacctttggccaaagttggtaataagtaaaatattcgtttaaaaggatcggcattgtcctgttcgactctggcacgattcacactttaataaacctgatgatttttttaatttctgggcagtttttaattttagcttgaaaatttgccattagatgttcagaataaatacatattgatgaaatgattcggttaaatttattacattattaaatttattacatttgaaagatttacgcaattaaacaacaaaaaaaaaaatttattttatacattgattttaatagcaattattaattgcgctctcgctctttcacctcaaagtgtttgcgcaacttgtttcttttcggatggctaaaagtagcggaaatccatgaatttgtaccgagaatgtgtcacacattcattagcaaaattgttttggctgtgtgtgtactccttgcttttgatgggtctaccgaatatgtccaaattcgtcggaccacacccatctgtggaaacgacgggcgggacgagggctgcagggggcgggttgaatcgcccgcagaccaccgtgtccggacgaccccgaaaagacaatctgtccggacaacccccgaaaatgatgtgggagaacaaatttattttggacaccgccggtgacccgccccaatttgtcaccattttcagtcgccaccttcatttttgatgatgatctcccttaatgatccatcacttcctcaaattggccaccccaaatttgtcgatcatttggttgcgcgcttttgcaaccgccctccctcctggccaagacagggacgaaaacaaaacaaaataattcgggattgaaaataaaccgaagattataatttccaaaagcaaattccgaaataaatttaaaaatttaaaacaaaattaattttgctagactaaaatttaacactaaactaactaaactcaaaaagtgccgagaaaaaggggaccaggaaaagaaaattaccattcgagatccgagaacccgagagttcttaggacttttttcaattttgagactcttgaactagccgttgttagataaattcagaaaattggaataaaaatgtgcccatcagcgccagcaacagcagttaaatcggtgacgatgactatcttcacaaacgcacttttcattgtttcatttttgatcacattcagcttaatctttggtgaataaattataaattattattttttaattgaaaattataaattgttaattatttaagcacttgaaaagacgtcgaaaccaccgtggtaaaaatgttttatatgatttaatttttctttttataaaaaatctaaaaaatagagcttggaattttgaaaatgcccgtaactgtacataaaaaaatataagaattatttatcttaatttaagctgcatggacacgttgagttcgtcggtgtgccaacggttacggcacgaaaagcgcgtgcatttcgcacgtcggtgcaacaccgacattgaatttcggttaacaaatttccgatgttttctttt

SEQ ID NO: 1895 - DNA, 783 bp, Heterodera glycines
gagaaagaaaagcagcagcgaatgccacagcgaaacgcccacccaaaagaagaagcgctgaaatgggcaaaaggcacaaattaatggacaaatgccgggataatttaaacccgttttttcttaaataaaattcggatgctttgacactgactccattggagaatgccctttgctggaagctttggtacagttgcgggtggcgcagaatcatccgctgggaaagcggacggtcgaagaggccgagaatgatggggggccaagcggtgaagaaaacgttgaacatggcgatgatccaccgctcgaaaatggtcacgccagagaaggcggagaagaaggcgaaccatagcgcgatgatgtacaggcagatattcttgtagaaactgtcgaggggggggggggggaatggagagaataaatcgggagaacactgacatgagaaaattttttaaatttttctattgacttatttcatcgttttcgggtctttgatcgaatttatgatcacttttggcgacatactcaaaaaagccgaaatttacaatagcaaatcgactatggtctataaaagggcatttaaaaatgatttgaaagcttacagttaggaatattcctttgtagtttttttttgaaaaattgttccaaaatgaaaccgctcacctatacagaatgacttttacgctccgttcaaaattccacgtgccttaagaggagttttgtcaattaatttaatttcggtgtttgttgtcttaccgtgcactaaaagaagacgctgaagaaatggaa

SEQ ID NO: 1896 - DNA, 5273 bp, Heterodera glycines
  unsure (1)..(5273): unsure at all n locations
acagacttatcaggtgcgaatgttcttgtaaattatcataaccactctttttcattccattctaagttgggtcttccatttgctgaaccctctccaaagattgcactctgtcgatgagtttcgaagtgccgttctttcgtccgattttttggttgtcggccatttttcattggatgtgtgtcatttttacccaactcactcagttttaattcgaactttttgcttttgagggccttcctttgcctcgttcttaccacgtttttctcaacacggcttttaaattggcaaactttcgctcgtccgtggcttttgccgtcgttctcaaccgcgcattggcacttggccaaatgggcttcgaaagtgacaaccaagttcacatgtacaccttttacgaggatagtccgtccatgggattaattgcgtcgacggaaattcagccgaacaatgcgaaatcgcaagaattggccgattgggtgaaggggcaaattgaggggaaatttgctgctaaaatagtgcacgaattggaattggaaggtgagtaaattgtgggggaatttactgctacttttttattataatttgatgttttttatattctgatttttttttttgtatcccccagaaactctctcaatttttcatttttttcccctcgtattttccctatgatttgccctccctttttctgttttgtcccatttcccctcctccttttggcaacagatttggaaaatgccggcaaatccgacgctctcttccgccgtttgtcctcttcctccgccactttggtccttttctcccattcgcttggccttcgttcgcttagtcaaagtcaaattgcgctgcgaaatgtatgaaatgctgggaaatccctccgtaaatccgcttccattttaagtttgtcaagatttttcatcattgtccaccgtttttggaaaatttagagcggcggtcgatggcggagggtttttttggcgcgccgtcacttggccaaatgttaggcaaaacccgaaaaacatgcgcattgagcgctgaacaggtcaaaagaccaatcgaataagagttccatttgaattggtcttccttcccctttaagttggctttgtgttgcgaccgattttcaaaaaatggtggaaaatgtagcaaattgacccaaaaatactcaaaagttgagcagcaaaatgaggaggacaataccgaaggggacattaacaaatctggcgcagagtgctcatcactttcggagggtaacactccgaaattggcatttccccttttcctttttttcattcaattcccccccccccccttagacaattcattccgtcgtttttgctattcccgcgcaaaaggcaatgcgtccgcccattccgtcgctgaacgaccctttgccttcctctcctggcaccagcgtttgatgtgcaaattcgaccgaatgctccgtcttcgtcagtccgaaacccatcgccaactgcacacagaggaaacacttgtccaattggactttggccaactgagtccctcccggcaatggctcatcggtgccggctgtcgagtgaacaaatcgatgggctttttgacattggacaaacgttttggacgccatttcatgcgcaagtggggcatttcgaccgaaggagacgaaacggcggacaaagttgccattgtggcgcgagacgacgagcgaatatttgcgatggaaagcgcggaaggcgtgacaatgtccggtgctcgtcgctttgcttggattctaattaagcaattaaattaattaattttgttcagttcgaagttggccgattttgtggacgggttttacaacaaaacgctgaaatggacgcccaaaaatgagcaaattgtcgaaccaaccgaagaagaggacgaggaacacttcttcgatttgagcattttgcagcgaatcaatcggcaaatgtttttggaccgaattctcaacacggtgaaaatgccaaacaattggcaaaatgtgccattttcacatttcccttcccttttcagaatcgtcccttcgatgccgttctctttttctccggcggcccttcccacggcccttcccaaactttgctccattttttccaccaaacgcaaaagtttttcgaaggctttgagcaattcatccaattttttatgttcgatcttccttttttattagaatattttcattggcatttctaccttttcagaatcgattcttccaaaaattccttcgattggcattttgactttgaccatttgccaaccgtcgcctttttcccagccaacaggtaaaaaaaaattaataaataaaatgcgaaaatgcagtaataagaatgctttttcaagccaggaaagtttcgtattccgtgccgaattcgccctttccgtgccgaatttgctcggtttcattttcccgcgttgccaaccaaaactccgctggctgttggccttttctctctgtcggggacaatgtttggagcgcaatttgcaaaggatcggacgaatgatcggaaaagcgcgggaagacgtacaaattttgcgcggaatgattcgcaaaatgcgtttaaaaaatggcgtcggacttcgccaatcggtgacctccgtccgccacttccaaattttaatgaaaaagtgcgtttaacttattatttttattttttaaattatttttttccatgtaaaggcgacgattacaaagggcgacgcttctgagactgtccgaaattgttgaagaattgagaacaaggcaatgggacgaaagtggggaggacgacggaagagcgagggaaggaatggcaaaaagtgccattttggccaattggcttctgacaataaacggcaaaatcgccaccggactttccccgtgataaaatttcccgtccacgcgaaatgttttctcaaaaatgctcattcatttctcacattgttaattaattatgcattgttattcacactgttgaattattgtcttttcatttaaaaaatatttcgttaagaatattttatttgataaatattaaaatgttcaacctcatctaaataataatagggccgtggaaggggaggaattatgcaaatgtgggtacttccgtgttttgccccccccccctcgaaaaattttaaaattcttattttggggttttcgaggtcactgatcacgaaaatggtgtttggtttgacatctgctgatgatatctggtcatagattaacaaaatatctatgattttttgaatttttaaaatttttcaggggggcgggggggggggggggtagcaaaacaagcaatttacaaaaagtgcaaatttgggcgcttcaaaaaagtgcaaaaataaaaaatcagattttttcaagatgtgtaaaaaatgataaaatgttaaaatttagaaaccccggtaacggcaattgtctcactgccagacactcaaattggtctctgcttttcaaaattttccaaaaagtgcgaaatcggccatatgtgagcctaaatttactaaaaaatgctatttccacaataagattttgaaatgcacaatttttattttgtcctccgtttttgcttattttacagtgacatcaatggccaatgtcattgtgttattaatgacacggtcacttacaaaggcttagttctgagttcgcgcaaatgccgtttaaatattttatagcaccataactttataggctcttctgtagtccttaagtccttaagatcgcaaaaaagaattatttcttgctaattattcgtcatgaagcgaaccaacgcatcaaacatcactccgcctcgcgcaaaacgttcaatgacacctgcactggacctggacccaaacactgttgcactcgcagagcaagaacgacaacgcactttggtgttcattggcctcccggaaagcaatgccattcgcccatcggaacgtgttcaggaagacagggaagccgccacaaaaatcctggaccatcttgaagttgaggcccaaccaaccgccgtctttcgactcggacgttacgacccgcagcgaacaacaccacgcccgctcaaggtggtcatgccaacaaccacacaccaacacatggcactcggaggatggaagcgcgagcgtgctcgactccgttctctacaaaacctgaaccgcctgttcgtccgcccagcgctgaccaaagaacaactcaaggaagaatatgaagcgcgcttccgaaaacgtcaacaaaaccctgctcccgtggcaccagcaatgcaacctcgccagacaaatgttccgactcccgtcaaagaaaatggaccaaaccagaaggaggccagcgacgacatttccaaaccgccggaaatttttgaccaaacaatcctcgtatgttatgaagcattaaaatcattaccaccaaacgacaaaattgttcaccaaattcaatcactcgaaaaacaataccctcgtcttttcaataaatagttctgtcagacctccaaacatttcctcaaattaaaaaaaatacatttattccattacttaaaatttctcaccaaaatttttcctcacaaaaaaaattttttttttctcttctacaaccctaaaaaaacaaacaaccacttttctctttgttggaggtctgacttttctaatttctgcttctccattcaaaatttcaattcttttatcattactttccatttcacctcatttccgccaaaagtgtaagtggcacatgcccttcttttggttatttttatttttgaataaataaatttactatatataagcttcaacatcttttcccatatcattccaaaaacattgtcccatcactagggttgtaaattatatggactaaaaaacgcgaaatatggacattaaatatggactaaaaaagcccgaaatatggactaaaaaggccaaaaatggccaaatatggaccaaaatatggataaaaaatgccaaaatatatgttgtaaacccccaaaaatcccaaaaaaggtgtgcatatttaatatttgcttaaataaacctaaaaagtacaataaacaaccaaaaaatggggtttaaaacttaaaaatgcatattttttattgttgttcgttgtatcaaaaacacctccaagtttgccaaatttcgaaaaaattctcattaaaaaaagaaatgttcgcaaaaaatgacgaaaatatttattgaaaatgccaaaatgacgacgaaactcaaatttttcgtgttttgtggggtgtaatttttaaaaatttccaaaaangtgatcatttangggtgtattttttcgnttttttttttcatttttc

SEQ ID NO: 1897 - DNA, 673 bp, Heterodera glycines
tttggattccaaagaaaaaagttatagcaaaaaacataaaaaattttgaaaatctgcccacagataacacacaagtaccaaaaaaaaaataccatacaaaaaagagaattaatttgacacgggttgtagtcaggtgcaaattaacaaagaagaaattgactaaagaactcgcagaaaagactaataatgaaaagaacggacacagggaaaaaacaatggacggaaaatcgaaagggttaactactgtataaagtcaacagcatacggtaaaacaaaagcaataccatttgtgtaataaacggaaaaataagtgttaaaggggatgatgggtaattagtcttttgccataaatgcgacgcaacgaatttcccaatttaaatagaaaaaagaaaaactatattcgaggttgactattatattaaaaaattataagaatttactggaccggtctaaactttaaaaaagcaaatgctaaaaatgtgagattggcgaaaagggaggagcaattcggaaacagggaaaagtcgggaaacctaaacaaaaaaataataatgagcgaaatgtcagtggaggaagagcaatggcattaataagtgaaacagtaaaataacactagaaattgatcaaattgggaagggatgcacaaactgcaaaattcggggggggggggggg

SEQ ID NO: 1898 - DNA, 3057 bp, Heterodera glycines
  unsure (1)..(3057): unsure at all n locations
atgtgcaggattccccgtttcggtacccgaatcgggaagttaccggattttgaggtttcagtcacagttagtttgtggggttggctattttttaagggatatttgccgtatagtcgcgattgccggtaaaatatgtcactaagaattatagatagaatcgagaagaaaaccgttgtggcgctttaaacttaacgtacgaaactgacaccgactccggtcacaaattacgggaccaaaagccaagaatttaaagtcgatcattttccaaatcactctcattagacaaactttggaatgctctatattattttcccatttactccgtgcgtttctcccgttcgttcgtcaataatgatcatttccgatcattttattgctcaattggtgtttcttttataatccttaattaaaaatgttgctctgattatttcttttctaatcaattaaattggtaagagcgttttatttattaatatttcagggtcattaaaaatgttattgctttatttaagtggatttaaatttattttttttcaatccgtttcttgaagaaaatattctatatttgaaaaattttatgaaactaaaaatttttaaaacattcgatgaaactttttaaaatttaagcctaaacggataggcatattttaaaagcaattataaattttaaaaatttttattattcaccctttttcgtattataagcatcagagagccttatcaacatgtaaataaattttggtgcatttcagagcactttctgaaaaaatattaatttttcataaataaataaataatgaaaaatcagaatttctaaaaaaattttaaaaccaataagcattttcattttttcaggttagccctgtaccggggagtatgcctagagctaggttctaaaaaataatttgtcactaactgatattaagtctgccaattttcattgaaaaaaatcccaaaaaatcaaatcaattcaaaatgtcaaggtaatacagttatccagaatagaggcttgacccccaaatcagtgacaaatatctcctctaaaaatggacattgaagagcattttgatcccaacgtttgctcacttgtatttctaaaaatagttttaaaattgatcggccccttctaaatctcccggatgatttcattctttcatcccaaaatccaccactgactgcctcccgaaatggatgacatatccgcgcccaatcccccccccccataacgaaagtgggatgaattgggtgtaccacaaggtgaataaggtcgcgccggtgcggaggggggggggggaggcgtggcgcgaccttgatctgtctcgcgcgagttcctccgcgcgatggtcgttgtcgccttgcgggcgcccccgcgggggcgtccgtcattttgacaagctctgtccactacaaccggcatagcgccgcggaggaggacagcaacaaaatcaacaagaacaacaacacaacaaccaggtaccagaactggaacaactccaatgaatgccgccgacgaggcggtggcgctcctaattgtggtggcggctttcgcgccggaggacggacgttagccgattttcacaggacaatcattggaaatggcgatgggcgtaggcgggacggggaaagccggatttcgcccaggggtacgcccttctccaatgactgaccgaccgtcggcggtcagcaaagtcacaatttttgttgattcctccacaattatttgggattatctttgccttcaggagaaatggggcacattaatcaactttatacaattttttaaaaagaacgtgctcgtttaagcaataattaaccttaatcatatacccattaactcgctaattttttgtcgttcattggtgacctgattttgtgggtccttcttttttaattcaattagagtagaaatttggtgatccactggcacaaaaaataaacttttaaaatgggagaagccttcaaattttattactgattttcttcttggatttaagttttgttgtccaatggaaataaaaaccaccagtaatatatataataagtgattgattaattcgccacatgactgaaatattttaattccgatttaatttttttattttcccccttattccatcagtctattgggtgaaatatataaggggactggatatatccggcgacggatcatcttcaccacaattatcgtgtacattgcgcggctgacaccagcgaaataaatccacaaaaattatggcggaatgacccaaattttgtggcgacaaaacatcgaaaagtcaagccaaagatggagaatagcatatttaaatttttttaattgtttattttttattatttatcccaaagcggaatttgaaattcacttattaaacaattatttatttttttgattattaaaatgaaatataaccaacttcattcatattacatagcataaaataaataatacgtaaattaaactataaaaaatttaggcatttccattaaatcttaaaattaatttaaatttttttttcaaaatttgaaaataaaaaacaattttagacaaaaaaaattgtacttcaaacccattttatgggaaaggtcacatgtacaaacaatgcaatacaacacaattctctttattggagtacaatgtgtcgtttttctcttcacttcactcatcacaaatccgcgttcattttcgtcaccaaattcttttcctttattcgtccaatttggttgagaatctcgaaaaaactgatcaatcgaatcattactctaaaccattttaattactattattttattatatgaatccaaatttttaaaacggattttggaattttatcgtttctaagaattttgagtttttgagtaaagccaatgccaaaaaaatcaaaaattagctaattaataaatttactatattcaaaatttataaataattaatgcgcgaaaattcctctctctgttttaccgagaaatgatcccacggatttgtacacttatttggtgtattanatgatcaaatttaattgcgcagattatttcctgaaaaaatacatttttttatga

SEQ ID NO: 1899 - DNA, 6741 bp, Heterodera glycines
cagcctttggttctgcatacatttattcatattcggaatttaattgtaaaaatgtcagcgaccgttgttttgccatcaatgccagcaaaatgcccattgccggtgcaaagcattcctcgcggcacttcggcatccattgaggatcaaaatggtacaaattatagaaaaataaaataatggaaatggtaatttatttgcttacaattaatttgaacaactattaattcaatctttcgatcgctgactgacttatgctttcaacaggaaaagcgtcacttaaatatttgcaaagttaaaatcgtttttacggtgaaaatcacagaattaaaacaaaatttccactaaagcattttctcggctttttgataataaaaaataaattatattggtagtcgattttctaaattggccataattactatttaataaaatttaaaattaattccaattattaattaatggttacataaataatgaaaattgattcaaacttttaaattacatttttccaggcaaattggtggcccattgtgtgttggtccaatgcaccaagggacaagcgtatctgattgtccaacaaatggacgctattgtggcaccaaaagcggtcacattatgtgtgccggacatggacaaaccgtttgacctaaaaatcagcactatttcggtgagtggaaaacaattaacgctaattggagtcaaaaagagacgtacggtaattacaaaatgtgctaatttacttggtaatattggcatgccacaaatttcattggttgatgtcggctagagcgaaatattataaaaatattgttctttattttaacaactaaaaatatttacaggatgtccatccaaaccgtatgcatctgccaatgtatatccaggtaactgtattttaataatttaggtaaaaataactacaatttttaaattattttttatgaaaattaattgagtaggtccattataatccggaacatcgctacccattggaacatttggtggatttgttggccgaaactgtgcttggccgttacaattttgaattgcgcaaaaacttgacaatcgatttgttcgattcggtatgttaaaatcaaaatttttactttataaaataaaatcattgaaatttaaaaaaaaaaagtgttatttgtagggatgtaaaatttttgtacgaaaaatcgcgaaatatacaaaattccggaatatctatgaaatatatacaaagtcctccctaaatattaaaatatgtaaatagcaatgccacaaaaagaactaaacttatatagatgattttttttgactttttaaaaagggataacaatttttaaattaaagattttagtggtgcaatgttatttatttttttaaattttcataagaattttctttaattctaaaaacctcaaatacgtattaaaaatatgtacaaaaattttcacacgcataagtaatatgaaaaatatcagttaatgtgtttatatgaaaatttatatccctattggcattttaattatccattttttgaaaggctgcgaatgcggcaatccgtgacggtgccggattcattgtgtcggatcggcatcgctttcagcagatcagcgttggcgcaaaacaggcacgagcagtgctggcaccgacaaacggtgaaaatgaattgaaattaaatgatagtattaaaacaattgcaaatataaattaatttaaattttagaaatataattgaaaaataatttacctatttttgaagataaaccattaggagaagttatcatcttatgaaatgattttttaattttgattattttttccattttcaagtcaaaatcaaaatcgatgacttaaagttcaaatttttcactaagtcattaattaattgttcaaaattgcattttatttatcgcaaaagtcgtaagtcaaaaacaacgaaaacacattatttattctttttgtaaatactcgatttgaagagacaaaggttgaattggtgatttgatcatgcgtcttttgctaaagtgaatgctgatatttttaattttatttcgttggggttttaaaaaaaaatttgtttcagaggttttgatttcgcttgtttctgatgatcattcggaactgctcaaatacgatgcatcactgagcaaccatcaacgagcggactttttgaattttttaattaaaggtaattagttatatctaataattaaaagtaatgaataataacattaatattagctcatttcattaaaatgaataaatcttttaatttacttaaattaattaaaaattggatttacaattgaaaaaaattgtcagtgaaaaaaagaagataactaatgaaaatatttaaaaaatattttaataatgaaattcttttattaaattaaccaaaattaagaatgtaaaaatgtgctggtggcccattggagtcctgcgaaattggcggctgacgctaaagaaaaaggcacgaacaaaaaaaaattattggtcttttaaaaataaaataataaatttaaaatgtattcatttattttcagacaaagaaaatgaaaaagaatcagagggaaaagctgaacaaaaaggcgaaaaggaagaagccgttaacactgtggcaggatatttggtattttgaaaaatatataaaatattatttaatagaaattcataaatttttagattggaatatttattaattttatgccttatctaaaacttttttacagattgcttcctctgagcgcgttctgtgcctttatgcggaaaacagtaaaattgccgattctttgttggctgctcacattgacaggagcaatcagaagggaacggtaaaaatttaaatataatttccaatcatttaattaatttcgcttaaaatcagaatgtattttttctgaatttgatcacaaattgcataattttgttcataaatttttcaattaaatacataattattttttgttttaaataagcttttattcatttattatttaaattatattttaaaacatttattaaatatttttactaaatatttctcattatttttgatcaacttttgctgcattgcctccaaatgggaccatttgcgtgcgctcgccaccctccgcacgcggcccatttaccgtcggcacacgcgcgtggtgccgtccaacatcaaatatgagaagctgttcgccatgaatgttggcatcaacattttctgaacattgcgcaaaaaaagagggtcatcggaacagcagagatttgattgaacaatgaaaaaatggatttattacattatcaaatgaacaaagtaaagtgatcagaaaagtttttattttaaattataaatgggtggaacgcttcaaataattttttgaaatgcaacataaaataaagagagaaagagagataaatgccaagataaactgtttttatgaaattttaagtgctattaaaaaaattgaaaacataaaattaaaatcgtaattcgaaattaattattacatttcttaatcttttaaaatttaaaatagtggaagttatgtaatttgtaattttttcaactggctcggaccagacgctgattcggtatcgaaattgcctggaattcctggattttcaggattaatcaactgaaaatattaggaaagaaattttccttggatatttcaacctgataattctcataaaattattaatatttaacctttaatatagaacatgtaaaaaaagggaaaaaattaaatcaaatatttttattcaaaacacgtataattttattagaattatgaaattagctgatttatttgcttatattttattcaaaaacacaatcaattattaccatttgaaatacaaataattttaaattatcattcattcattcttccacctcgcttttgcttttggcaatgtttgtcaaaataaggggcggcagggtaaggtagtcggggattggcacagaaatgttaatccatgtgaaaggaacacccaaagggcatatatcgaagcagaaactcaaaatgcacacttacttgcacccattggtcttgacagatgggcaggcttaaaaaatatgaatgttttacatttaaatgccttttatcggaaataaccacaataccgtcgcgtggggcttagaaacagtggtggaggcacagatgagcaccaaagcgaggctggcgaagaaaaaagaacgcattttgggagtttcaacgcttaaaaatttgaaaatttgaatgctttagttttaacgctgaaaaatttaaaaatttgaatgcttttagagttttcaatgattaaaattgaatttctatttaatttaatttatcaaattcaaaataaaaggttgcgcctatcggccccggtaataagctgagaatttcgtttcgaagctggcgcctgagaaattttatgaaaaaacatatttcagggctggttgactgaatgttttcgcttgtaagtactagggctgggaaatttaggaacgaaaaatcgcgaaataggtatttaaaaaggtagaaaaaagctcaaaataggtattaaataggtacaaaaatcccgaaataggtagaaaaataggtaaataaaatttttattaacgattttttagtggaaaaaagcaaacaaagggggaaaattttggttctatttctttgtaaacgaataattaaaatatttttaatatgtttttagaaaataatgacattttaaattaaaaattttgttaataaaaataaataaataaatttttgggggaagaatttttgggaaaattttccaattcttaggggtgtattttttgattttattgcatttttgttaaagaattttctgaaaatccttaaataggtataatgggtagaaaaactccaaaataggtaagaataggtattataaaagtcatcgtagacaccccaaactaagtggaaaatgcttattttgtgcttagcaaaattggtcagatataatgagcagaaatgagtccatttcatcacatatgtcgtttttttcaacttttatatatacgcaattacaccataaagaaatgtataacaaattttaaatttaattgtttgaaatgtgaaatttgctgattcattttgcttattaattttattagttattacgaattaacaaatattttaaatttttatgctccttccaattctcttcacccttccatttattcttcctgctcctcgccttgggtaatgtttgtcatgttaaaggaaggcagggaaatggcgtcggggattggcacggaaatgttaagccatttcacagcagcaccattttcatcgttcttggcaattaaattgaattatttttttagcacataaattctgaacccaaagttttataaacaaaaaaatgccaaccttggccttagggcaaatgttgatgcacacaacgacaaagcacacttgatagcaacctttttcattggtcttggcagatggggcaggcttaaaagaaaaaaaattacagttaaatgcattttcaaaaatgaccacaataccgtcgggtggggctttgaaacagtggtggaggcacaaatgagcaccaaagcgaggctggcgaagaaaaaagaacgcatttttgggagttttcaacgcttaaaaatttgaaaatttgaatgcttttagagttttcaatgattaaaattgaaaaaatttgaaaatttgaagtttcaatgcttaaaatttgaaaattttagtgtttttagagttttcaatgattaaaattgaaaaaatttgaaaatttgaagtttcaatgcttaaaatttgaaaatttgaagtttcaatgcttaaaatttgaaaattttagtgtttttagagttttcaatgattaaaattgaaaaaatttgaaaatttgaatgcttttagagttttcaatgattaaattgaaaaaaataaaaatgtaaattctttcagagatttcaatgctaaaaattgaaaaagttgaaaatttgaatgctcaatagaggtttttatttaaatatatggtacaatcgggggaacaatggcatagcttcaaggaaaaaataatgcttttggagatttcaatgattaaaaatttgaaaaatttgaatgctttccgagttatgaatgattaaaattgaaaaaatttgaaaatttgaagtttcaatgcctaaaatttgaaaatattagtgttcttaaaatttcaatgattaaaaattgaaaattttaatgcttttggctgtcttattttacatttttatagtctctcatctgcttccaaatacattctttgaatatacattcggcatttatttttcggcaaaaatcatttgaaaatgtcagaaattaattcctctaataaccattgggaaatgatgaaataacccttttaactattctcagcaattcgaaaaagaaatcggggtgaaataatattttcacttaatattgaacctgggacaaaaaggcaaaatatgagaaaaaataaattctaaatattttttatttttaatttcatctaattgcccacaataattaagctcttcagagtgtccctaggtctcaatagcagggtctttctaagcaacgctctaccatgaacagcgtgatattgtttgtcttcgacagaaagcaatggacgtcacaacaaatcctcccccccctctctctcctccccagtgtctctccccactctctctctctctcttcgcctcgggcaccaaaatcggggacgacgagagaaagcggaaaacttgagcctatgcaaataattaaatta

SEQ ID NO: 1900 - DNA, 6777 bp, Heterodera glycines
ccaatttgcaatttattatcaattatttttgtcgctaattttcggatttctttcttggattttgaaatatttctttatctttcttaatttgtcttcaacgaattaaacggatgaatatataaaataaagaatctttgttttgaggtaatttaattcggtgctaggtcgtttcttaaaaaccgccacattgggcgtttcttaaaaccgccagggcgtttcttaaaaccgccagggcgtttcttaaaaccgccaggtgggcgtttcttaaaaccgccactttgggcgtttcttaaaaccgccagggcgtttcttaaaaccgccaactcatatgattatgtatgtatatccgttaaattaaatattcaataatatctattaatttttatttgttgtgcaagtaagtgtcagccggaaatattattagtctagcagtgacagactaaaaatctttattaaattaatttacaattatttacttaatttttatttggttgtaccaattacgaattagcaattttatattcgaaaattttgcagttgataattgttgctataaccacgatgtgtgctacataaataaatatcagaaacgttacgattgtgatattaaattttgcaattgccttaatgaatatcctaattgctttctaacaaaagtctgttctccaactcatatcttaaatattttattttttagaatatattatgctggtcagttcatatttttggagaacgttttaaagaaggataaaaataattattttattttaccgtcaatagatatgcatatgtattttaaattttttattgttatgtaaacttctaatatatatatatttatatacataatcatatgagttggcggttttaagaaacgccctggcggttttaagaaacgcccaatgtggcggtttttaagaaacgtcccagcaccgatttttaatatgaaacttaaatttgaattttaaaaattgtcaagtaattattaatttacgtcgatagggggggtttaggtgctgaaaagcgtttgttgaagcttaaatgaaagccttccattccattattggttcttccaatgttttgcgaagacggaataccaacaaccttttgaaggaaaattactttaatttattgttattaatgaaattagcaccgaatctttcgtacaatagacagttaaacatttgtcgccactgatttcgaagttttcgtgacaagcggtggcatcccaataattttttgggaattccttaaaataaataattgcttttaaaattattttagtccaagtcttgaaggactgattattttatatgaggtttagctaattaaaaatgtttacttgtcaaaaaatgaattttatttaattttttctctttcgcttattcaccattctcttctgcttctcttctttatccatttcgctgatttttcgcatcgtttcttctgattatttttaattgtgagatttgttcctcagcagcttaaaattaattaattattgcaagcaaacggtgttatgacgttactcaaaaacaatcaaaataaaaaattgacagaaaatcattcataacttcgccgaaaagaatcagattttataatcttgataatattcgatagccctaagtgttttctgtttttatgcaaaattaaaaaaaaattgtttaagttccaaaaaaagttatgaccaaaaaggtttgaaaaaatttggttttctgagttcctctaagaatagatcaatccacgccataaaaaaacatagaaaaatttcaaaaatttcaagaaaaatactaaaaaaatttaaagctttttttaaacttacatagatattactaaaaataaaattgtgaatttccagaaaaaacaaaaaacttaaattttcttaataattgctaagtaactaaatttttagaaatttttgaaattgttgagaatttatatgtattttttggggcgatatttcggccgtgcatatgaaagcgatggatggatttggattagacaactaattccgaggtcatgaagaacttacgaatcaattactctgtaataattcgattcagggaagttgctcgtctcggatctcgtatttaggcactagacacgagactttcgaagtaatgtgtcaagcaattcacttttttaaagtttcttgtaaatgtttatagaaaatttcaaatttcgcaaaaattggaagagtcaaaattttttggtttgcatttaactcaatagtttttttcgagtttataaatatcattatgaattttagcagataattggaaaaaaccctattttttgcaaattttcatcttttagtcttaaatacccgggaaacgacaaaattttccgattattacagaaaaccaaattttaattgaagaataaaaacataaaaatgaataaaaagagcaaattgatcgaaaacattagtgaataattaattcttccttcagagagtcgccaaatcgaatttgaaattgggcccaaaattcgcctcaatttggtcaccagagccaaacaaagaaacgaatggataaagagaaccatcagcaaaagatggagcaaccaaaaaatcagaggtatctgtgaaaaagttaagggatttttgattattttaaacataaaataaattagataaaatagacaattaaccaaattgtaatttaaaatcgtaaaattatattatttattatttgctaacccaaacgaagtccatttttggtgaaaatgatctgtcgagtggccaaatgaacgccaattcctacggtatcgccaacaccgtaggaatattgggcatttgattcatttccttttccgttaatccgaatattgccataattgtcaaatgcataagtgcccttttcccatcgaattgattcatccaattttgtctgctgtttaacagcgaatccgaaggtgatgatgccccgactgaataaagaaaaaataaatattaaaatatttcactttttatacaaaattcgcttactaatttcgcctttcgttgtttttcataactgaaatttcgtagtaaaaaaagtcggacaaatgcttattcagcacaatcggatatttagcgaagacggagcgccaacctttttaagggaaattgaatttttatgtaaattttaaaaataccattaccatttcccttatgatggacaatgagacttttgtcaccaatgatttcgagattatcatgacaaaaattggcatcccaacaattttgttggaatttaaaaaacccctgaaagtaaataattcgatatttttaaataaatatttgtataatttatttaatttaaaatatttttaccgttaaatttatttatttttattttctcttccaattcattcacctttttctgtgtctgcttctccaattcactgactttttccaaaatgttcttctgatcattttccatctttgaaaattgctccaaaattcctaaaattaattttcaaaaattaaaattttataatttatttaaatgaaattcttaattcataagaaacttattcaaaaaaaaagaatttttaataagtgataaattattcttcgctaaaattccctcgcctttgtccgtgttttcgttctgtttttccatttcaccaattttttccaaaatctttgacaattgccccgcagtagcttaaaaatcggattaatttttaaatttaaaatggaaacatttaattcgattaaatattttttcattttaatttctcctcgccttttgtctgcagctgtttctgttctttctccatttcactgaagattctttccaaaattttcttctgatcattttgcgattgtaagaaccgttcctcagcagcttaaaatagaaaacaattaattatttatttatttaaatgaaaataaggaaaatattgatcataggccacaaactcaaaaatgcttaaaaacggtcagaatcgatgtaaaaagggtggaaatggataggaataatagaaataagggcgcgctagccctttttcaggatgaaaaagagccgtaattgaagagccgaactcgtctgggactcgagcgaccgtgctatactaacttctctcaatagattgtggataagttgtctaggataattcgtggagctgatcacgagtatgagtttattttgcaagattccaaaccccgaatgcagattcaagcaatgacaaaattgataaataaaaggaagacatatttttagggatttcgagtttgctgaacacggatataggcctaagctaaagcctagggctgaagcctacgcctaagctgaaagataagcctaatctgaagcctaagcctaagcctaagctgaagcctaaggtaagcctaagctgaagcctaagctgaatgctaagcctaagctgaagtctaggcctaagctgaagcctaagcctaggcctaagctgaagcctaagcctaagctgaagcctaagcctaggcctaagctgaagcctaagcctaagctgaagcctaagcctaggcctaagctgaagcctaagcctaagctaaagcctaagctgaagcctaagcctaagctgaagcctaagcctaggcctaagctgaagcctaagcctaaatttttgagtgaatatgcggtttctgaaagctcaatgtgttgaatttatgtcctgagtaataaaaataatttaatgagcgctttaaataacacggccacttgagtcccagctgagtttggcactccattttcggcacttttcatcctgaaaaagggcaagcgcgcccctaattctatttttctaacccatttcaaacctttttacatcgattctgaccgtttttaagcatttttgagtttggggcctatgatcaatatttaccgaaaataaaataaatttaataattattcctatgcttttagcattttttcgcagaatcggtcgagttttaagattctctctgattgtattaattctgctgctgccagtcaaaatgttctcaataattaaaggattcgaaaaatgttcaattgcgcagttacgaaagaaaagcccgaaaatttcattttcgttaaattgccctcgccttttgtctgctgttgttgctgcttctccatttcaccaattctctccaaaattgctttcaaatgatcttccgaaactgaaatttgaagcaattttttaaataaaattaaaatgttgttaagttagcaaattattctgaaaatgccttctaatatttgtatattaccatcttttgtcggagttttcctgtcttcttgctgttcttttccttcttcttcctccagactgaactgatcatcattcattcctcaaaataaaatttatgaaataaaatttaaaataataattttggctctattttaaataaaaaagttattttctaaatatttttggccattactttttttgaaacaaaacaaattttatgaaattttacagaataaaatttcaaaaccatttcttttattgtataattttcatactgtatccactcaattatacaaaattccctaccgtatccgtcttgtccaaacacttcagaactggcaacagatggctccattgtttgcgctcgattcagctcagcaattcgggcaatcagaacactcatttcctccgatgtgctcagatttggaaaaattgctaaaaatgaaaaattattaaaaaattacttttaacaaatttgaaaattaaaaaatgtttattattgcgttttaattatttacgttggagaggagaaaattcatccgctgatgaaaaagtgtttaatgatgacattttaattttaactaaaaatttattttaatttgtttaatgcacttagaataaataataaaagatggtttaattagggagaaggcttatatttttggaaatgaatcataattttaattcccttttcctttttttttggaagaaatgccgaccaaaagtgcttgtcctcccttttcagggcactttccggacccggaccaaaacaaccctggtgtcattagaaagccaagagtttgtagatgtgcccaaacatatttgttttttgaaaattgttgccttttttgaccagtttttcgaatacagttcgaagtggtctgaaaatcagggctcggatcgaaaatttttcaaaataagaacatcaaggccaaaaaataagatttttgggtcaaaataaggaaattgcttcaaatcagcagggcggaggacaattggaggaaaaagtgggaaattaacaggaagacagaatgaatgttggaaatgagcgggggtcacaaagtcggggaggaaagatgtgtttgaccttacaaaggcagcacagacacaataaaatgagagaaatagtgcgggagacagagagagggaaataacgtaaataaaataatataaatgtctctctctctcggggtcatcagtcgaacacagttatttttacaatttattcgatcaaaaatgtgtcatatagtatatttttgtaacgattttagtaattttggggaggaaattagcaaatcataaaattttagtgcattcgggataaaaaaaatcagatttttaacaattttttgcggcgcatttttcaaaaaacttttgggaagtgcgaggggagggggtccggcggtgccgaaaggcgccgccggaaaaatttttgtaatttaattctgatttgttaacagattttcaccaaaaaaggccaattttttgcgattttgagccaactttttataaaaataaggttttgggtgccggcggtgccgataggcgccgccggggaaaatttttgaaatttta

SEQ ID NO: 1901 - DNA, 1473 bp, Heterodera glycines
atttttgtccgctttgcaattgccgtgccaacaacaaccgtttaaaggagtgtatctgttcaacaacgtcaggaacacccataacaatgacattggcagccaacaagagcagcagggacaccaacaacaacagcaccaacatggtgaacaacgacgacgaccaccaaatggtggtggtggtggcatggcggaggagagcgacgacgaaatgatgatggtggtggtcagcaacaacaacaacaacggtaatgaccatgaccagcaacagagacgaatgacgacgatgatgatggtcaacggaagtggtgggcgtaatgatgatgaggatgatgacggtggtggtggtgatgaggatgaagatgaagacgacggcttttacgccattgatttgggccaaccaattgaccaacaacagcaacaataacaacaacatgaccagtgatgagactgacacatgaggagtagggggaggaggagcactaaaatctcaaacaattgtttttgttttttttgaatttttttgcacggggccggacataattttggattattttattggtttgaagcccaaaaatcacgctttgaacgccttcttctccacgctgtccaatgaggagatttggtttatattgtccattgggaactggcccaaattttgccaattttaccgcaaaatgccgaccgctaaaagcgcaaataaatcttttgttgttcttcggttcttcccttccccttccacctcccgccgcatttattacttattattattcattttgcatattgcttattagtatttgttgtacttcttcctacattattctatacttgaaatggtacttaaaattgaaatcccattttttccgttacttttttcacaaatattcattaaaaaatgggattttttgctctatttgaaagtgtttacttacttatccaccaccatacttattatattattaagcaaattcactctgcatttttcttttattttttcacaaattaattttattatttttttttgtccctcggtgcatttccattcattttatgtccttacacacaatttattctgcactttattacatattattgctaccgtatattcacaaaaaagaattactgtattttcatggcttatttctctctctccctctccccgtattcatacaagctataatacaaaaaagtatgttccgaaacattcagaatacaatatatattatacaaatttgttttattatttttattctacatatatctcaactattcgatattcaaacttagaaattcatgaaaattgctattttatttgttttacaatggctattgtgtaatatataaaaaaaaagcacccatagttattttacgtatattgaagagcaatctcataagcatattaaagtatgaaaaacaaaattttggtcttcattattttatgagtccaattaactaatcattattcttaattaattt

SEQ ID NO: 1902 - DNA, 2195 bp, Heterodera glycines
tcaaaagcatcataaattggggtcaatctcatgtccaagagaattgggctctaatgcacattatgagtccaatcaattacaatccccgggtttttaaaatcgcagcgttcaggcaattaccaaaaaagatttgattaattaattaattgctgattattttcgtttgtaactttattgaaatgttagaattctcttgttttctcgtattattacattattcagactttgtgctttctaatgataccaaaaagatagggtttgttcgaacatgaacaaagttattgtataaaaacccgggattgtcaattgattggattcataaaatacctttggactcataaagtgcattagagccgagaattgtgtctcaaaaatgtgtcagcatttatctggatctggatgatgagcttgggccgggcacaaccgccgccgttgttgtcgctgctgtttcgtcagtgttgtcgcccggtttttgcgccggcagaccctgatttaattacaatgattaattaaattaattatttatttgcaaattgtttttcccaggggcaggataaaacaatgccgtcgaaacctcgccacaaaatttgtaaaaattcaagaaaaaataatcaaaaattcttggctacctagcccaatacgaaaaaaaaattgtattaagaaaattcatggaaacaaataaaaatacaagtttttttccctggaaaatcggcaaatatttttttcagtaaaccaaggctctggaaaaaaaataaatttaaagaaaatttaaaattgcggcgaaattgtgtgccgacaacatttttgcggtgtacccgttttcccctgttttaccagtgtggtgcgcacgagtttgtgcgcaattcgctcaaattgggcacggttgtcacgccacattttggccgcgttcacattggccgcactttcgtcgtttggctctgcaaaggatggatgggcaaaatgccacgaaaaaagccaatgtcaacgccaaatcaaattggcaagggacggacccgccagcatggacaccaccgagatgagaatcttttccaccgactgcacgggggaccatcgttcggcactcgtctcgtaaccggtcgggtcgtcgcccggggtgtgcaaaatgctaaaaaaagcgcagaaattccaaaaattgaaaccaaattttatgaggttgaatcctcccatagaaatattacacaggcaactaactcatatgcaaaaaaattgaaattgttttttttataatacaactaaatttttttgtggatttccgttttaaaaaaaatataaaatttaaataattttttgagttttaaaaaaatcttgcttttttgttcaatgattaaattttaaaataattaataaattttgttgtgttgtgtatatttcttaaattttgttgaataaatgaaatgccaaatttcaaccagaatcaaacattgttgtgtacatgtacaaaatggaggccctttcccctcacctgatacacactttgccgtccgcgtaaatgttcgggtggaaaatgtcgcagagaaattgcattttgggcggactgagagggtaatcctgtagtaaaaataaacaaattttattatccatcggtcggcaaaaatgacacctcggagaatgtgagcttggctgggaaaatgccgtactcaaagcaggtgccctcggggccagaaatcagacagtgccattcgaaaaagttttcctcatccgccgggccggccacaatgccctccggggggttgtggcaaagctctgaaaagcgggcgaaaatcgtgaaaattttcagtgcaacaacaaccccttcagttatttggtagaaatttttcattgaataataaaatatttttgggcattttccaattaacgggtgcaaacacatcaaaaaatgtaagggttttttgtattcctcaaaaattacccgaattttctgccatttttaaataacttgacaaattaatacagcagcacccatttgtgattgattcagctgatcattttaccaaccaattaatttgtttgtttttattgttattaattgtgtgtaaataaatatatgcacaataaactcacgtcggtactctgtcaacaaacggcgcaatgcgacaccggccattattttactttccaattttaaataaaataattaaataaatttttaaaaattttaaaaataatttaaatca

SEQ ID NO: 1903 - DNA, 1764 bp, Heterodera glycines
aaatgaagaagccgagcaggtagacgagcagcaacatgttcaacagtccctcccgtgagtacgccgtcagaaaggggagcagcggcgagtgcatcagttcctttgtttttggcaaaaattcaatacaaaaactctggcattgtgtcaccaaaaatggagcccccccccctcaattttgcttcgaccgacttccggctgttgaatgtgtggcgtttgcgcacaaatgagtttggccagcacaatgtaaaggaagggagaggcggagaacagcaaacggatgctcacctaaaggaggaggggataatcagcatccaatttcagggggaaaatgaatcgatcagaaaaacttttaggtgcgatttcgttgccccctcccctccccgaaaactttttaaaaattagaattttttatttttcaaattttctttggaggtttttccagaaaaaatattgaaatgtatctaccccaaaaggggaggggggagatgtaaaatcatttagggaatgaggcaaatctgaaatttttgagaatttatatatttgccaagctacacttgcgcacacgcacctccacgttgtaaaagaaaaggccggacagtgccaggaacagtgtgtgcaacgcgaacggcaccagcgaacgccggtcactcagaatgtcgggcacagggcgcaggtcggtgaccaacagaccaacagtgtgcctgaacaaaatgggggggggggtcaattgaacttagttgaaaaaagccaatggcaacaatattgaatgggaattagtccaaattaatgggctaaaaaaataaagtttcattggatggggttgcgttttagggaataggcaggcccctacttttacataaaacattcaaaagagaattcagatttttttataatttatttccaaaaattgggattaattaaggaaaatttgattgatcaaacttgtcagtactgtacagtacagtacctgtaaacaccgtacatggcaatgcacagtgtggggccggcaatgacaaacagagggaatttgcgaaattgccaataggcgaacagaccgacctgagaatgggaattggtaaattaaaaatttgtgtattatcattattaacgaggggtaattaggcgtaattaattaggggtaattagcgagaataattagggaatgatggggaaaaacagggaaaaacaaatgtatttaaattgatacacaaattcacgtcagtcacctcccagtatttctgttgcacatgagcgtagaaggcgggcaacagcagagaggtggaaaatggagaaatgctgcaaaggaaaatgggggaaattaaaaaaaattgaaatttaattttatatgaaaacccaaaggaagccgagcaatttcgactcacaaaataccaaaatcttttttttgttttgtatatgaaaaacatacattaacaaggggtgcgccagtcagaccccgatacgccggacgtttggcgcagggggggtgcgccaggaccaatttttcttacgtcggcccctatttttccccggccactttttttttttttgctattcaaaccaacttttttttgcggcgcgttttttccagaaaacttcgtgggaaggggtgaggtgatccggcggtgccgataggcgccgccgggaaaattctttgaattttatatgggtattgttcaaattttaacttttttcccccttcgttacgaccccctcccctcctttacagccaccccccttacgacgcacgtgggggggggggggggg

SEQ ID NO: 1904 - DNA, 1986 bp, Heterodera glycines
aagtgagtataattcaaaaagctggccggacatctttaaaatggtaaaaaaaaaaaaattttcgcgctacaatttttccagtctcctttctctggtggttgtcctaccagcagtgcatgtacaccgtgacaatggcctctttcagatttccaccgttcagcaacaaggcaagtctgagcagcacaagcccattaaagacaaaaagtgcctaaaaatttcattttttaaaatttaaaacgtcgtaaatttaacacattgttcaacgccgtgccggtaatcaacatggcggagaacaaactcagtgccgagccggtcagttgctggaagagttggccagtcatgcgtaacagggcgggaaacagtgggaaaaatgccaaattggactcccattggtagccgaattcggcaatgtgcaaaaagtgccggccatcccaacaactgaggccggtcaatgtgccttggacgagccggtcgagcagtgtggcatctgtgttcaatgaattctcgatattttcacagtctgcaatcatttcgtaagatatctctactcgtaaaaattgttcaaataagctttttctatgtcggtgataatgaatctgagaccaatttgaaccaattcgtgatccgcacctaaattcaaaaaaaaaaactcgaactaaattttcgactttttgttgagttcgggttagtaattggtctaaagttatcgaattcctgatcaatgaccgcgccgaaaacatatgcgaacaagttttcacaagttattacgacaaaactaattttgaaaaccaaaggccctccattggtttttgacaaaattcaaaagcggcatttttaaagtagcgccaaaacactttttttgttgttttcttggccaaaaatcgtgaaacgcaaaataaatgtctttgatcagaccaaatgaacttaattccaagactaattaaaatctttttcgaaaaactttttgttggcggaatgcctttgaacgcgtcggtcggagcgtccaccataatccaattgatgcagcattggaaaatgagcaaaaaaatgcgactggcaatgagttgtaagagcaaaaagttgacaattttcggtgccatacaaatgtagtgggaaacagtcgaattgccatcctaaaaggcaaaaaaaaatcgttggcttttgaaattaaagccaaaatagagtcaaaatagataatttttccaacgaaaaaccgcttaaataccatttttttaaataaaaaatcgagccgttttaccgtagtggcaaaaaattccacaccattttcatcttcttggaattgctgttgaattgagtgacggaaatgggaagtgttggcgtcatctttgtccaaaatgtggccatggttttgctgctgcttttcggacggacgatgatggccccgttggcgatagcgtgccataatgtgtgtaatccaaaaataagagaaaatggggactgtaaaaaagaaaagaaacgggatttactgctccgtttagtgtttaggattctcgacggaaagaatttaaatttaggcccggaattttgaaatgaacgagcccgaaaccaggagtttagaaatggaccgggacgggggtttatcgggacaaaaaaaacccatttgttagcggcccagtccaggatggtttgcaaaaatatggggccgaaaggaccagttgcgtgccgggcccccggacccatccaggctgaggttggttgtaattctaactttttagaatgaaaagaatagacagtacattgaacaagagaaaaccaaagaaagcgagaagaatagaacgccaaaatgttttttaatttaaatataatttttgttgaattttttcattcgcaattttttgttttgtgaagacacaaaaagtttttagttctttttcatgtgtacacacacatgagaatcaaaagctttaatatttgaaatgtacaagtgttggataggatcaaagaatcacttacacctcatcactg

SEQ ID NO: 1905 - DNA, 3206 bp, Heterodera glycines
acttttccattggtttaggacaatacactgacaatttgaacattgcggcgcctggcgttgttactcagcatgtgtgcaaggcgtccaacctcaaccagttccagctgagtcagatcaattcgctgcacccggacactggcgttgtcggcgtttatctgtcgaccgaagggaccaaagttctcccatttgtcaaagccgctgcccagggcttacgcgaaatggcatccaaaccgatcagtgacgagcttctccaggtgagacaagcattgtttttggagtggtttaactaattacgaaacgaatttaacatcaaaaataccaattaattccatttaattaaaggttttaagcctatgtagttccgatttcacaaaaaaatgattgagtcctgtctttatccagacccttggtttttaaagattctttccttttattgcacaccattatttttatgaatttttttcatatgccaggcttgcaaattgttggccaagggaaccgcactgacacccgacgaattcattgcccttctgaagacagtgactgcggacgatgtgaaaaaggtgaatccaattttccaattggatttcatgagtacattttttgaactccgttaccaagcccgctaaaaattgagtttaattttttatttgtttttcaaatttcatcttttcaggctgcttccccaactttgcgccaaagcccatacttggccggcgaggttcaccaggccgggcccaccgacttggcccacgtggcacttgttggtcatggagcgaaattgacggacgagaaggcggttgcaatccaagcagtgctctgtgctgccattggtcaaactagttcgtctattttcttatccaaaaaatcagtttttgaagaaaaaacccactaaacattgaaattaaacgaaacatcttcaaattatcgactttccgaattttttttttaaaaatatcgcaaaattactaaacttttccattggtttaggacaatacactgacaacttgaacatggcggcgccgggtgttgtttcccaacatgtgttcaacacattgaaccaccagttcgcgttattaacaaaattaattgtcgttaaaataatcgtttaagatccgttcgccttttttccactacccatacggttgatcttatggttattttatgtgaagtacaaccatttcgaccacattccctgtttaggattttcccgtcctcgaagaacgcgttgaacgtgtccgcaacgaattgaaagtagaagcggccgagaaggtcgctgaaattgttaaagtcaatgcgggtgtggtgaaggaggccgccacatttgcgaacagtacacaacgctcggtgtataccggtgtgaccgctgtcgttggcatttcgcttaccctctttggtgttctgttgtcgctcctgtgggggttgttcggcagagtcggttccgtcgaggctaatttgagcgctctcaaagttgacgttgacgcccgttttgagaagctcactgactccgtggaccgccgttttgaccgaatggagcggggcatcaatcggcttctgacaaaaaatggatccggtggtattgatgactaatttgttcgcatatttttattgacttgcatataatttgttcgcatatttttattgacctgcgtaaaagcgtaaatttttttccccttaatctgtttcttataaaaattcaattgtttcaaatcttaaatattttattaattgctcaattctcactaatggcacccgaaaaatttccagccataatcaacaatgtattcacttttgcacgagaccgatggtgccacatcagtgaatttcagtgcctggggtaattttttgccgggtcctggcaagcagctggtcactgtttgtgcaaaatgcatcaaattctaccgactgaacccattttttgtgccaacggatggtttcgctggtcaaccaccaacagtccgtttggaatgccttctttccttcactctgatggcacctgtgcgcagtttggctgttgtgcgattaaaatgtgtgtgctctaataacttgagagaattggtcgagaaattgtgttaaatggcggccaaattcatagaattcgttttggatattgaaaaagttggaattttttacaggtcttcagaaagtttcattcattttttcctgtttttagtcagtgccgattgttacgactcgttggcgatgacttttgatgatgccaaactgtcaattgttggcgtgaacccggccacaatggcactgacaaccatttcgctgcattccattgaggacgaatttttgcgcgacggttacaccgatgagaacattcatcagcccgaacttcgtgccgaccctgaacatcggtgttgtgcatttacaggtgcttaaattattgtgtttttcaaaactgaaatgtctagaggcttttaggggacgacgatttaataaatgtgtcaaaattcgaacaaattcgaattcttatgaaatactaatcttttcatcgtttttttaatccgtattgactgacaaattatacaattctggcttttcacattatttgaatacatgggttctttacgaatataaaattttcaatccaagattcgtccgaactttgatttccaagggtttattttgctaaaatttcaaatatcaacattttccaaattttttggggtgttcgtttttggtgttttgtcaacccccagtctcatctctataaatttcatggactaattggacatgattggatacgtttttttttcgtatactcctaacttacatctccctgttcagtgtatggacgtcatttggctgttgtgccgtttaacatcgtcgaattggtgcgccaacaatcgtctgcagtcagcagcagggaggaggccaagctgtacaaccagcagcaacaacagcaacaaatgttgttgcaaagttacaccatcaaaatgcgtttgttggacgaacggttggacaatgtgctggacatgtgctttttgcatggttattatgaaccaacattgttgttcctctacgagcccatccaaacaaccgcgggacggtaagcgacaaaggacaaattgttgttttaataattgactccgctttgctaaatgatactctgttggctgggtgttccactaatacctggaatacaccccaaaaggaagaagccgcgtcataacgtcgccgtaaaaaaaatttaacaa

SEQ ID NO: 1906 - DNA, 1089 bp, Heterodera glycines
aaagtggaaaacaatcgcgcgtttcttaatttggtatgaattctaaacttggttttaagtgcctgtgttcgctacgacactgtggccatcctggccgtgtccatgaacatcaaggaccgtgtgcatgccgttgtgtggcactttgacggactgccaatgacggtggcgcgttgtatgccaattcgagtgccaattggcggtgtttgtctgtttggtgccaacgaaattgtctacctcaaccaatcggtgccaccgcgtggggtcagcctcaattcctgcgccaatgagttcagccgtttcccgctcaacgaccagcaacagttgcgactgtgtttaggttttttttgttgttggttggacggaaattatatatgaccagggattttaatatgtcggcaaacaaaaaaaattttttttttttttttggcgtattcaaagtcaaaagaaagaataaggcagctttaccaaatttgaattttaattacatttactattgaatctctgttaaaactgttgggtttcctttatttcgggagcaataccacccattttttggtttttaaattatcatgtttaaaaaaaaaattagacggaagtgccatccaaccagttgattctccacccaatgaccttgtggtggtgctgcgaaacggtgacctgtacatactgacactggagactgatcagaccagcatggtgcaaggaatacgcctcacaaaagcatttggtgtttttttgtaaatttctagaattttactaatttatttccccccccccccttcggttagaaacatcaattccctgttgtttgaccgtttgttcacacaattttttgttcgtcggctctcgtcttggcgactccaaattgctccgtttttctgctgtcgaaaaacgccgcaattcaatgtcttctgacatcggcacaaagcaattgactaatgatgccattactactaacaattacatcaccaacaacgtcacaggaagatcacttgccgacgaaaatggcaacggtttggccgctgtactgtttgacgaggacgacattcatttgtacggcaaagaattctgcaacagtttccacattga

SEQ ID NO: 1907 - DNA, 1843 bp, Heterodera glycines
  unsure (1)..(1843): unsure at all n locations
cacttgcagcgcttcgtttgtcagcgacgcctttctgcacagaccgcgcgacattttcttcgacttggtccgcaaattgtccattttttccgaattttattgcctttcattntggtagatgaccgtctccggacatggcaaagattctgcactttgctttttccattcttcaatccgtccgcagatcattgccagcacaatgtgaccaacttttgaaaaaaatttcgaatttttgcaaatttttttagtttggacgaggctctccaaatttggacagttggacgccaccaacagcatcagtcaaataacattgatgccgattcgacggggaatggtgcgcatcgctttttgatgattgcacgtgagcggtccagcgcggtgttggagctggtcaacgacaacatggtggagctggacactccgctgttgttctgccaaacggagaccaccgtggcggctggcgaattggcggatggttcggtcgttgttcaggtttctttttgaaacctggtcatgtccaataaaaatgccaataaaattttttgaaaaatttgacgccaatttctcattaaaaatgggctacagtggctgggggtgtttaatgcgttattgcatagaaaagtggttggtcgcattcaaaaatcctcctgatttgataaccatttggatttggcacaataaacacatcctcaaacgaatagcacttctttaatgtgtaaaaaagcataataaaaggtgctgttcacttgtcggatgtgaaagtatttgtgaaaaacgcatgcttttatgtaaacacattgtccccatttgattggcatggctttgtgatcacaaaaaatgtacaaaaagcaaagttttaaattcattttttaaaaaacataaaatgccaattgccaatttttcttgaaataggtaaccccaacaacggtgctgctggtgtccgcaattggcgatgcgcctcaacaattggaagtgttgacggtcgactcgaacttcccggtggtcagtgcgtccattgttgacccgtttgttgtgctgctgacgctgaacggacgttttgtgctttatcggctgctcacggcaccgcatgtacaccttgaacaggtttcatgcaaattgtttgtttctttcacagggttaaaatgttggctgatttttgggaccatatcattgtttttaggtcccatggttccgtttttttaaatgattataaattttggttttttaggttcctatcctggaaaggctcaagcatgagaggtcgcctatcaccgcaatttgtctgtaccgggataagagcggtctgatggacctatgcatggaggaggaagaggccatggaccagcagcaccagatggtcaacaacaatgtcgtcacggctcccatgtcactgttgggcaaaaagccgtacgacggcggcattgttttaaatactgccggaattacaagctcagagtccgttgtttacgatgaaaatgtggacgcttttttgtatggttacgacgaggtttcggaaaagcagcggaactcaggttcggtcgaaaaaaataagccaaatttcttagagaattctgtccctaggccaataatacccatgaattttctatttatttttggttcccctcatccttaagtttgacatccctaaaattttcgataaaattaaagaaaataaaacatactctcaatatatttctttctcaattgctttataatatttattttaagttctgtctccgtttcttgtgtgcaacaataacaatatgccaccgtcatctctgtcgaccagtacaccattgaacatgcacaatgagacagcatctgctcacaatctacacgacgc

SEQ ID NO: 1908 - DNA, 6306 bp, Heterodera glycines
aaaaactaaaacattcaaatttcaagagcgaatctacaaatgaaactaatatataatatatatatatatatatatatatatatgttgtaatttcgaggatcattattcataaatattcattatttttgggtgtcattaattgatgttttgttttatacatttttaattgcttcagagtcccgaagtttaagaaaaacatgttttttgacacagtccttccacgtgcattaataaatgtcggcgcattcttttcttccattgcatacttttaaagtgattcatcattcaatcattcattttgtgctgctttttgacatgctgctttcagcaaacattttcggaatttttttttctcgatttggcaaacgaaataatttattggtgcacagttgaccaaataaaaagcatttaatagcatttcaactcattttatcaaatggaattaatatttattggaattaaaatgattgaattataaatacattttctttaattaggtcgtcggcagaaattgatgggtctattggaaggagaaacgtccaacgggaaaggaggtggtagaatgatgaacggcagaatgtactcgccggtgtcggcgaaagctgcttcttccgagaaggcaaacacacggaaattagcggatgacaaccgatcagcggaaccaatccaagcgaaagtgaggcggaaaaaattccaatgagaaatcttgaaaatttctcaaaaaatatctcacttattttcaatagagcttgcaaatataaaaaacctattttgagttagtgcaaaaaatctcgactcacaatcagtaccgaaatcccccggtttcgggttctaccattttgtggctcaatccaaacataattacgaataaattttgcttaagacaacaatgagtgccgcaatgcaaaaaactgtgcagaatgcgtccctggtctttttgacattgcagcaaacagtttgttcgtgattctttttttgtatttatattttgaactgacttttcaatctattggttccatcggagaaagcgatttccctcacattttccctgtttttaagacccaattatggttcgacaagcacacaaaatatcccgagacaaaggccaaccgtccttcctaagttcaactgttgttctgaacacagaatgtaagttttttttttttgaaaattacaaccccctaaacaaattgtgttatttcagtggcaaaacttgccttgagctgtctgtatttaacgttttcatatggatcattcacaaagtaagtgttacagtaaaggcctactttttttcattatttcctagtttttcttcatttttttcagattttgtgtcgaaatttccgcagccttcttcaaaaacaaacgggaaacgttgaaagtgtgtgtgcctgcgctgatttatgttgtgcaaaacaatttgtatttctttgcattgaaacgggttgaagcaacacttttcagtgtaattttacatttctttttttttgtttatcacaaattcctccatttttgatatgtttatttttttttgtcaagatcacttatcaattgcgaattttgaccactgctctcctctcaattgtgctcctccgtcgcgttttttcccgcactcaatggggcgcactttgcatttcccttttcggtgtttgcctcgttcagtttgcctcttccaccacttcaggcaaagggtgagtgaaacggggaaaaaagaagcgaatagttaggattaaaaacagaaaaaattgtaatcataagagtggcggttatttgagccacaaattatgtcatgtgaaagtggtgctattacgttgctaaaatacgattgggcgatcctcaaaaaaaaaccaccaaaaaaatattttttttttttttataaattcactttggtaaattaacgcaataaaatatttttaaagaaatgctggaggagcattgtctgctggacaaaaggttcacgatgaacaattacttggccttttgaccatcatcattatgtgttggacttcggcatttgcaggtctatttcatttcataattattaaaataattttctacaaaatttattttgaaggcgtttatttggagggcgttctcaagcaaagttcatgtgatatttggacacagaacattcgtctgtcagtgattacgcttccattcgcttttatgacagtggtcaacgattcgaaaagcattcagaaaagttttcttttttttttgttgttgtttttcgccttttttaataaattgcctcacaacctaaatcatttttgtgtttacgggtttaagatggattctttgccggatggaattggctcctttggatagttttgttcagtgccgccgcttctggcattttagttgcggttgtgatgaagtgagtttttaatttttccagttttccatgcgctcttttattgttgattcggaaaattagtcataaaccggaaaagtatcttccacttcaacatttcaacttagaaattttagaaaatcataccataagaaaaaaattttgagaaaaacagtaattcatcataaaatttataaaaatcgctgaatttctaaaaatttttatattttcttatggaaaaatttaccaagaacttttcttacaaaatttctaaatggaatttaaaaaaaaaattctcttgggaaaagtcctgctccgtataatttgtcccttcacgactttccttatgttcaacatttgtaggtacgctgataacatcaaaaagagctattgccaaagtgttgcccttggcggcaccgccctactgtccattgtcatcggtgactcccaattttctgtgctgctactggtcggtgtttcgcttgtgattgcctccgtgttcctgtacacgttgaacccgccgccaagagtgaaaccgtccacacccgaagtgccagcgcatcacccacaagacgacgacattgatggcttggaggaacaacaattttccacggatgacgacgacgacgaaactaataatggaagcaacagaattgttgaactgaagttggacgacatcaaacgaattggacgagaagctccggctgacaatacttttctaagtgagtcaggggattaagtcatttagcaggcaaatgcgtgcctccgtttaacgtaatattgtctcagaatctgtggaccccgaaacgtcgcccggaaaaaaattaatcggtaaaatgcattacaattttgtatgcctctaattgtatgaaaaatggcaatttctttttctgaagaaacttttaaggattaggcaagtcttttattttttcccgcgacgttttgtcctgctccatgtcgaattacacatagttcttggccattatttaacaataatatgtgtgttaattttaatgaaaaaaaatttaacacgtaagcaaaaaatgtaaaaatgtgttatcaaataacataaaaatggggttcccatgggattctgaattctttccaattgtggcagatttgtttcttaatttaaagaaggcattaatccgagtccactcacattcaacagctaaaccatcggctgcatcaatagcgcgggaagtcggcgtccacctccaacgcccatccatccattccgcccacaatgtcacgaacgatgaaccggtcgccaatgccggcctctgacaactgtttgtgcagatgacacgcagccaattgcgagtcgttgccatgatggcacacaacaaagactgaacaggggcaaatattataaaattagttaaaacagattttttaaaacattccaacattccactttctactatatttttaatttttctagtcgttttaattttatttttggtttaccttttgttttcccattgtttcctgcaccgttaattgtcggacttttgcgttccatgctgttgtttatcttgtcaattatcatttccatttttgctcttctcaattcctcccagggaaaatctgttaattgtaagcaaataaatttatttatttttcatttggaataataaactttctgcttccggcaaatggcatatttcaaattcagtgggaggtcgaacgtctaacaaaatgaaggaaccgcctatttttttgttcctcaaatttaaatattccgttggcgacactcgttgttcagccgaaagtaaacataatgagcgaacctttaagcgcataaatagattaaaacaatgtgcagacatttgcgccatgtaagaatcgagtaccctaacatttgcgcctttctaagatcgggttcaaacttaagacggtttactacagttaaaataagtgactgcgtctgaatttgatcgtcagaattttagaaaaacatcaactattcaaacagcagaattaatgctcccaataaactatttccgttatttgaaaatttgtttatttttattttttgaaaattttaatgaatgattatcatattatcagacacacttaattattttatatcgcttattttatgttgtttaggccataggggattggaaacccaaattgaaccagatttttacctaggcccaaatgtccgaggcacaatgtcatgcaaccatttaaacaataattgaaattcaccttatctgatggatccgacctgcagaacttttgatagtcttgtaattctgtaatccttggattttcactgcaaatcgcacaattcgacattttctctctctataaatgtgaaaaaattaaaaaaacaacaacttaatattataaaaaaaataccaaagaaattctttttgatatgccttcaaacccgtcaaacatccacaaatttccggcaaatgatgctaaaatggaaacaaaagttgtcgtcaaaaatcatcaaattttgaaaacattttccgctgacagcaattttgatgatttctaaggcctgcaaacttccaataacgccaacaacggggccaagcacacccgcctctgagcaactcatcacatgttcaggacttgggggatcaggaaaaatgcagcggaagcaaggacaattcttaaaaagaaagcaatttaaaaaaacagacaaagggcttcgccttatttgtcttaattaatggctcataaaacctttaagaaaacccagttaattttttttagttatatatttttctttgatttagaaaaattttaaagaaaatctttttaaaaaaagtgccagaaactatattttaaatccgccttccaccccgccctcaacattttggtgcttcctcgcttcaaaccgttccattgttgtagacagtaaattggccctcccaaccaagcgcacttccatataccaacggttttccactcaacacacaagcatcattgatcaaatatctataattgaaaaccaatattataaaaaaaactcgtcatttttataggggggggggtaaggaaatttatggttggggaaacaatttttttttaaaaacttaactaaataaaaatgtaaaatgcaatttaataaacttttctgtaaatcaaaagagtaacctttcggttttcataattccatttaaaaataattattaacgtgacccgctctctcaactaaaaatttctaaatgcattcatttaaatttctgaacttttttctaattaccgagtggcaacattgtctgaacagtcggcaacaatatcataatcacgaaacaattgaagaacatttttgctggtgagcaacacgttataagccacaacattcgcttcattgttaattctaaaaaaaattcgatttacttaaagttttgatgaatgaattagtcgcgcagataaaattgatttccaatttggaaaaaatagtataattttgctggaaattcaagcctttgtcccacaaaatccattccaaattcataaaacaattaagaatcaattttggaaatgaatgacaatgttagggtgttttgtttgaccacctggacaatgattctttcaatgaatcggctttggactggcccacccgtttttggtcgtgcattgtctgccggtgcaaattgtcaatggaaacgacctgaacatacataaataagtcaggatttatttctaaatctaagtaagtacatcatggtcaacaattccaaggcgtccaatgcctaaatcagaaaaaaaacataaaacggcattttaatgccacctgccgcaactaaatacattgaaacgggacagcctaatcctccggcgccaataattagcactaaaaaaatttaattcaaaaaattcccacttattaaccaccaaccctttgtttctcgaatgcgttcttgtctttaaattttggttttaaataaaaataaaaatcaagaatatgtaacacacctgaa

SEQ ID NO: 1909 - DNA, 4000 bp, Heterodera glycines
gccgagaaggcatttttaagcagtttgtttaatttttacaaactttatgaaaaaaagctcttccaaatggcgtccttcaacccttttgcttgggaaagttttttctttggaaaattggatagaagcgaggccgaaagaatgttggcaccttgtgaaccgggcacttttctgatccgagagtccagcacagcgcaagactgttattcaatttgtgtgaaaggttgtggtgtggaattttcatttctttttaatgataggtaaattgtttttcttttttgaggtgtcggtgatcattccaatcattttttgattgaaaaattggttaccaatgaatctggtggtgctccattgtacagagtaatccaaaaaatatatgagagttacataattgatttaaaattgaattcccagatttcaaccctccaatttgccgatatgcattctctgctaaaccatttcaaagttttcgcattggagccagtcccgatcaagttgataaagccattggaaaagccatttttggagaaagtgatggccaaatacaaatttgaatcagaacggatcagcgatttgtcctttgagcgcggtgaacagcttgaaatactgggaaagccggaacagggctggtggttggcaaggtcagcagggagggaagggcatattaaaagtgaatctaaaatcattttttttgccaggaattgtttgggtgagactggcatgattccggctaaccgcgtgaagccggtaatcattcttttcttgtaatttttttttatgtgtgttgaatagagtgcagcgggaccgtgaaatttgagcaagaccgggaccgggactttttggccgggaaaaagccgggaatttcccggtcaaaaccgggaccttggtactcagttgtccgtgttcaggtcccggtcccgctgcactctagtgttgaattatcatttagttttttcgggccatatgtttaggggacactattttccttccactgaaacttttaaaactgaattttagttttctaaatttcttatagggtttttttctagtaaaaaaaaaaaaaattttttttttgattttttattgtacttcaatacccaatttttctttataaaatttattcgaaaatttgtgagtaagaccatgagtgatgattattttcgaacacagtgtgatgattgtgacgatgcactgagcgtgctgaacccgagcagtacaaacagcagcagcaatggttgcggttctgcgggcaatcggtcgagcgcacattctgtgggcgaccaacaattacatggagaggtacatttaattggaaaaacaaaattatagaaaaaaattataataatttgcgtatttttgtatttgtgaaaatttccaaaattaaaaaaagaggatgattaaaaaagagaggcgtaaaggcagcatttgctctatttaaatgttttctaaaaaaattaaaaaaaaaattctcacgaaatcaaaacgaaaaatttaaatcgagaaaacgataataaaatttttctgaccaataaaaaacgaacctaaaacccaaaaagtgccgaaaaagacgaaaaccaaatttcgaaaaacaatccaacttccccattcataaactttttgatataggcataaaacaccttttgtcaccaacaaaatttgattttctattaataaaaataattttcttcaattttgaacagcaaaaaccgacagacggagacagtacaacaaaattggtgcaacgacagcaacaacaattgcgcgagaactcgtgggtggtcgtcaaatttggacgtcagccaagcatttatgacaacgattcattgaccataaaagtgggaaacttgcgttctaaaacatttaaggaattaaaatcaagaattctttaaattaaaaaaatgagtttttcgagaattcaataatatttttttactttctactaaaaaaaacttaattttcgatttttttaattatatccaagggggctcctcttttatctatgttttgctaatttacaaattaataatgaaaatttagtaaaaacgggacacaatttgtaattaaacaaaagctccccttttagcgaggccaatttttgtatctccaagaaattttgtcaaatggaatgtgccgaggcacgaatgaaagcggaaaggtcggactctttccaatcacttatgtggaggcggccaacattgagccgagcgaaagcccgtggaatatttcagcgaatgcaaatccaaattgttagaatttattttaaaagttttgtcgcaaaacttttaatttcaattttcacaacttaagaatatggaaagataattaatattttttatgttttttgtactgcgacaacacttgataattattattggggctgaaatttttggattttaaccaatttttttatttctggatattattttgcgagagaaagcacagaaaatttggatgacgacgtgaaaaaagactgtcacccgggcttgggtaaaattattggtgctttttgagcgttttttgcttaccaaattcggcacctattgatgggtttttatgcggattttagcactttagtgcgcttattttagcgatttaaacacaactattaaattccagccttggtaattattttgtacatattattacatcctcctatttttatgtctttatttttattggcattgttttccatctatttgcctttgaatatatatttgcttaaatattcattatttttaaatttgtttaaatacctaaatgtcttaaaatgttttcaccccggctctcaatgttttctcttaaatcggaatttccacctgttgccttccttcctttctttgatctctcgccatgttttcaaatttgttcgacgtcctttaacaacaatttcattgtgacacccagtaaacacattgtgttgtgtgttgttttgtattcatttccaattttcacaatttgccttttctctacgccatatcatcatcattttgtatatatgtacacacaacaataaaaaatgtattaaacgaatatatttttaataataattgaatttgatctattttaaaatttattaaatgaaattttcattactactcggagaataaaaccatcaaattctacgaatttaattatgtagcagatgttacctttgcttttcatttcggttcaataaccattaatattaattgtgtattttgacaaattattgaaaaaatcaatccgctctatttggggccaggccgttttcgtacgaacacatgtttttggactataacttttttctttgccaaccaaatccaacattgttggtatcattcgatagccctatgtatcctctattagcctgcaaaattttgaaaaatttcgttaaggttcaatgctccaatggcttttttcttcttttcttgcttttttgaacaatttttgcaattttttgtcaaatttcttgcgaagagtttcatccaaattgccaaaatttgctttataatttcgcattttgtcctcatttagcaagataatcacaagttataaaacccaaattttcatcctcaaaatttaattatatgaaatttttcagatataaaaaatggaatattatggaaaatgattattaaataataatgcattccctactttttgcatatactttgaacaaatattcatacaaaatgtccaaataatttcgatatttttcacattctattaccaatatactttctaaattttcttcgaatttggcacaatcaaaattctgtctcatcaaatacagaaggccaagatacggctcatgcatttgcgcataattttcttgatttcgtcgaaacttaatttacgccaattgttcctttgcattacatcatcgtttttcaattcattccaaaattcttcaaaatttgactgacccataacaaattcggcaattgcgcgttcttcaatctgacaaattaaaatgacagtaaaaagtaattaacagggctgcaaaaaatatgaaaatgcattt

SEQ ID NO: 1910 - DNA, 1440 bp, Heterodera glycines
atgccaatggattttgaatatattgttgccaacgtggccgggccgggcacagattctgcatttcttgacgaagattttgagggctgcaattgtacggacggccaatgctgcacgtcggcagcaggcggttgcagctgtttgcccggcaaaagggacaattacaatccgatcaccggcaaatggattgatcaggggggcactgatcagcggcagggtgtgccacatttggagtgtcaccaggtgtgacggacggctgacaattctgttaatatgcataatttttcacgggtcaatcaatgacaactggtaaaaaggcaatttcaaaaaatagtggactttttataaaataaatttaaaaaaaagattttatttaaattcgtttttttaattacaaaagtgtattgtacgaagcattttgtattgccttttgtacaaattctcatgtcattacaccaatttttcagaattgtgtgtgcgcatgggagccggacaaatgcgcaaatcgtcaagttcaattcggtgtccgacaaccgatcagggtgtctgtcgataatttacaaaattgaacaattatctcttatttgccattttccgatcaatcattcaagcatccttttcgtcatcaacaggttgccccgtgtacaaatggcaaaggcttcggcgtttttgcttccgcgttgatcgaaattggcacttttgtgatcgaatatgttggcgaagtgcttggggaagaggaggcgcggcgccgaattaacattgttggacggcacgagcacaattatctgttcacaattcgcgaattcttcggaggtggagtcatttagaacagaatttttcttttttacactgatcaattgtgaaagcctcattattgataactagggctgggatttttatgtgctaaaaatcctgaaatatgtaataaaatatgtgctaaaaaacccaaaatatgtgctaaaaaccaaaaaaaggcctaaatatgtgttaaaaatgcaaaaatatgtgctaaaaattggaaaaaccaatggtatttttgcatataaattccaaaaaactcattctttatcatttttgcccgcacaattgcaaataaaaaacatttggaggtgtttgggggtaaaattagtccttttttgataaattgtttttaaagataatttttccatcagttgagtaagtgccagcaagaaacttcgatatccagtaacgaattaatgaagaattcgattttcggtacacgaaataaatgattgaaagagcctataaaaatggcaagaaagttgatttttaggggtgcatttttgaattttttgtgtttttcttagatatttttttcaaaaatgccaaaatatgtgcaaaatatgtgccaaaccccgaaatatgtgcgatatgtttttatgtgcgaaaacgccaaaagcaaattttttttttaattttata

SEQ ID NO: 1911 - DNA, 9547 bp, Heterodera glycines
tcgactctaatgcacttaatgagtcccaatcaattgaaaataccggctgcttatacaataactttgttcatattcgaacaacccctatctttttggtagcattcgaaagcacaaagtctaacgaagctaaaatatataaaatctcatcgtttaggcaattacgaaaaaagagctgattaattaagtaattgctgattattttcgtttgtaactttcttgaaatgttaaaattctattgttttctcatattattacattattcagactttgtgcttttgagtgctaccaaaatttaggtgttattcgaatatgaaaaaagttattacctttggactcataaaagtcaattagactcacaaagtgcattagagccgaaaaatcatgggagcgtgttctgtgcttgaaccaaaacataaaacacgttggcatccacctttcaggtacgttgaccacactgtgctagcatttctccgttccaatcagcaaatttgggacaaaggcaccaaattggacttgcgcatgtgcccggacgggccttgggatgtttttgtccgccaaatttggcccctttttgaagcaaacattcgcaaattgcacttttggagtggttctcatttggacaatttgcgtcgtctcatttcgcccacaattctctccgacctcaatcccatgtcaatttattccggtggactgttgaccgacgtgatcgctgctgatgacgggccaaatgcaactggtggccaagcgttggccaaatggttgcacattcggagaaaagatggacatcctaagcgattagcttgcagatgtgatgatgtgtctgcagcaaaagaatgggtcagcaatttcaagcaggtcgtcgcttcgggtgttatgtggtttcgtaaaaaataaatcattaaattgcttaaagcaactaaattgaatatccttggggtatccgggcccggcgatttttgggaaaatcggagttgaccgggttttgagaggctaggcccggaaaccggcattgaccggtttttaccgggttatgattagagctcgcaacaaggcacaaaaatcgcgaaaaagatttaattttttttattaaggctttttagggagcaaaacacgtaaaacttaaccaaaaaaattattttggtaatttatattatgaaatattttatagaatgtttttagaataaggaaaatgtttaaacctaaaatttttatcaagaaaaaataaaaatttttaaaattttatattcttaggggtgtatttttttcaaacgaaagttaacaaagcattaaatatcagttttaatggaaacgcaaacatttatgataagacaaatttttaaagccgtttatatttgtaatataggcaacaaaatccttgcttggcatggttttagaacatttgcggtcacagccaaaaacgacatttgcggctcaactttttcggccccaacaaaataaaaacttcagaaaattattttccatccaatttaaccggttttatgctctctaataagccgccgattcaagtcttctcgaaagaaaattcttaaccccacccaactagaagcaacgaagaggaggaaaagaatatcagcgaaacaagtcccaaaatgatgaagaaagaagtataaacattgctaggaaatctcaaatctctacagtttcaatggtcggtgcaagagttggtagactgactagcaactttcaatctctggtggggtttggacaaccccaatttttgaaaagaattactagattagttaaagttcggcgtaaattttaagaggaaaatgaattttcgataaattaacctattttgattggggtcgaaaaatttgggaagcaaatatcgtttttggaattaaaaaagtaattatttggcgttccgttgaccgcaaatgtccgatttccagcaggccgcaaatgtctggaccgcaaatgtcttatcacgcttggcattattcgttactccttaggtttctcttcatccataaaatttcaaaaaactacccaattcgaaaaaagttatggtcatacctaaaactcagatctaatttttgcaaatagtcatgattttatatagaataattctgcatggatatgagttgggcatagatttgtttgtgtttaggcatttctctgtgccacaaattgtgctcgctacacaattacattggacacgtcggcgccaattgagccatttgaattggtgaacgaacaaaccaaggagaagctgacactaaatcaagtgtgcgagaacgtatttttttttcgatggagaataaagcgacgctcaattattgggcggacggcggcagtccaacggaaagccaaaaattcgacaaacgatttgaacactgtcatcattgctttgcacggcacttatggcactaattgcattgggtaagaagcaagcggcatttgctattttttcaagtgttagtcgaattaaaatgcataaatttagtagagcacgaacaggtattcgagctggagttcggacagaaaaatcccgcgggtcgcgcattgtgtagaccgggatttaacccgggaaatcttatccgggccgggctatcccgcaaatccggggtttcaagcatccaaactcagtaatttaggtcattgtcgccaccgacagaaacgtgtcaaaacaatgaaaatggcatttgataacaatcacgtgcgccgattggttagcggagaaagaaacatgggaaatgattaatgatgatacggtcattttggattaaacatgggaattatctgggaatgattaatgatggatgatacgattattttggattactgtggatatgaaccgaagtgcttaaccaaagtctggcataagctttgtgtgttttatgcagtgttgccagatgtgatgatttatcatgattttgatgatttcaagggatcaatgatgattttatttttgagatgatgatttgctgatttgtgaatgtgatgattttcgagaaatttgatgatttatgctgcttttctctacatttatgagttcaaagcgcaaaattttcaaaatttgctaaaaatcatcaaaaatgctattttagccaatcgtcaccgccggcacccaaaattcatctaatttttgaaaattttacctataaattgccaattttcagtgaaaatctgtttaaaaatggtcaaaatttccaattttcccccggcggcgcctaaacttcgtagaaattaacaaaatttagcggccataagccaaattaggtatgctctatcaaaatataacagcacaaaattactgtttaatcagaacaaataaaaaaaattgtttttttgtgatttatgttgaatttcgaacgaaaatctgtcaaatcataaaaaatgacaaacaaaaaaataaattaaatcaaacccatcagtggttcaaaatgatcagtcatttctcaaatagctaattcacttcttttccggagacaaatgggtccatcattcattcagacgatcttttcaatgaagggaattttggaaaattcaaaaaaaaagcatagaaatcttgaatttaatatttttattttagctcagtagtttgaaaaaagcaaaagcctgggttccatgttggacctagatttcctggacaaaaatccagtccagaaaaaatccaggcttctcaagacctggatccaggccctggaccttttaaaagcaaacaaatgtttgaaaaaatagtgaaacgtggggggcccttcccaggatcgctgtagtccaaatattatccagaaatactttattgttccatctcaaacttgggtaattaaacctttgcttgtgaaatgtgaaatgaatggaaaatacaaatgacggatcgaaatggggaaggatggaactgatcgaaatgggaaaggatggagaaatgatgaaatgaaatgataaaatgctcgggaaatctcggaaaaggatttagcggagaagagaccagagaccaaacggggaagtgatcggaaatccactttacacctccatcccttgaggcgatcgtccccgatcgtttccaaaatttaggtaatttccaaaatataattcgtaaaattctcgcgagatttcatgaagaaagaaatagagaaatgagagggcgaattaattggtaaataaaattgtaagaaaacgaaaaatgaaatcaggtgcgacatcgttttgaaaagtgtccgatttttccgcatctatagcacttcacatcgattcttcggttgctgttcgagtttgacggggcttgttgggcggcttcggcgtatgacggcaaatattgtggcggatacggcgccattcgcgtacttggaccagggcaatttgaaggcattggcattgtgtgaccagcgatcatgttgattggaggagggcgcacagaggtgtcaatgatcatcattccgtgtgagaaagccggcggttgagcatgacccgaactgatcggtggaaacacatttgcctgagctgcgaatggcctgaaaccgcctgtgaaaaatggggaaggggaaaaattatttacgaaattatttattggtggctgatacgccaaactatcgtgtcttaaagtactgtccctttcggcataaaattcaaatgccatcggaactgtgccatccctttttgcaataaattttcccacccgggacggaaacggattggaaataaggtttaaatactccggggttaccgcaaccgtcatttttaatgtttcgtcaatgaaacgtctccacacggtccctttgtgccaaatcaacgacaaatctccgatgatgaccaatccaaatttgggacgggagagagccacggttgttctcgcgcaatccgcccagaattccttgccagtgtcagcttccgatgatcgtccagccgcggagcgagtcgtgatgacaaggacaagctcggcttcctgactttgaatcgaatcgactgtactcaccttgacatttggccaccttctccgttcgatttcacttaccatgtgtttcctctctgcttggtaaaaacacacaacttgaattaagcctggaaaggttccctggattattcccaaaaatccaagagctgtttcccgttgctctggattgtgagaggaaaatgagatactttccatttgagtcgatgatttttgatggattaaaatgatcggacaattttcggctacaatgcgtgggcccatataatttaaaaacgatgacatttcaacatccggtcttcctggtaccaaccgatcacctgctggagagtaaactcccgcgtccaaacaccgtacaatggcactgtgcgatcggtaacactttgagagaacggtgcgatcgatgccttttgctgtttccagcacttccaaaattgactcaaacccaaacttaccacgaataactgtcatttgactcggtaagtgtacccgtaactgctgtttagttacgttgcccaaatccaatgccaactcctcagcaagagccaatgtcatgaagtacactcggtatttggtctgtttcagaagcgcggcagtcgtcgttcgttcgcgtgcccgtcttggtgctgtgttaaagtcatcgacgtattgcttaaatgttttattatcactccattttttcggctcggttccttcagcggagggaacatttccatccctttgcacagcttcaactaaaagattgtcccccaggggcctgatcctgtccatgtaacgcccttttccttgcccagagaaaagtgccaacattgccaccttttctgacaaactttccatggtgtccttcaccaactcacacactgcgacattcaaaggagaaactgccaaaattgcagcgtcacggtcctttttgagcacgcttgcgatgcaggccgctactgacacactttttcccgttcctgccggagcctgcatgaaaattacacgggactcgtcgtccaaaaacaatccgtgagtgattcgctggtcctcgttcaacttaccgaccgcaatttcgttacttgacaacctaacggttggtcgttgttccgctccgtctttgcccattcccatcaatatttttaaaatttttgagacgggatattgcccttctgcaatatccgacgggactgaaagttcaaatgcctgttctctgaaagggagacctccgtaattaggaattggaatcacattagattccctttcatcgagaatggattcccaatcttcccatcccctgtcgtagccctttttagccctgtaactcaaaaacattttcacgttcatcagaaagttacccggagcggtttcatttactgacagttcaattactcggccaactgcacagcattgggcttttgagtcacgcgcaacttttgcttcgaccggcgtgtcctcctcccatgcctcaaggaaatcggcaaccgccgatttgttgttgatcaaccattcgaaagagacgcgttgtgcctttttcaaattcgtttgcgcttcatccggtcgtacttctggtctctgccagacgagttggacattgacagtttgcttcgccaatttctccatttcgaatgaacgttggacagcggccgcagctcccatcaatcgcactgaaaactggttaaagggaaaacagaaagagtccagactttctttggcaccaattaccaccgtttttccatgtgaacgaatttcatttccttttagaaaaggagttaccaggggtaaaatgtaattttcacccatccaccattcttgtggacttgtgattttggccaaattaaggtaaaggagttggttaagcataattcgacctggactgatttcggttaattgccgggcatagatggtttgagggcgaagcatttgcgcagaaatgacggtggctgatctgaaatccccacctctgtatcgttttaagttggttacaaaaccgggttgaaatgaaccaatgaccaattttatcacctccacctctatggcaacagcttgaacgttgatcctgccttgtactaaccacgagcgcaacgaatcgaccgggtttaagtcataggacaatctttcaaatccctccttccactcaaacttactgaccacaactgtgtctcccatttgaaggcgtctctcggcacttaccaaagtatcaggaattcccatgaaaaatggaccttgtccactcaatttcccaccaacgacacttttcacgtcggtttgacacaccaaatatttcagaacaccgccttccgtgccatgttcttcatttggagacattggcacaggcgaagcgatggcacatggctctgaccacgagacattggagaattgagtcgcagtgaagtcttgaatagtttccatttcaatattttctgtgtttctttccacgtactgaccttctcccaattccatgcctcgttcaaattcttcttcaagacctgcggaaataccacgagtcttatcggtttcaattactttctcgacggcaaacgccgtttccattatcaatcctttctgtgtagctgacgctacttcaaatgactccaaattttgcggaatagtctccgtctcaatcaattcaatttgctctgtggctgacgccacttccaaagactcaataatcggtgtggctgacgccacttccttaccaccaacagctgcgttcgaggcggccatgttttcgttccgacgatgggctgaacgttttttgaccattagaattagaattgcttggattagcacgaatgttgcttaaatttttttaggaaattattgaataaaaaaaaaaaattaaatcgaaacaagcaaactactggtcaatagatgaaggagaaaaatcaataaataaagaaaataaagtgcaagtgaaaaattagaagagagaaaaaaaaattattctaaaaatcgtgctggtcggtttaatttttcgcgctgtcttagaccatattttggcggtgttagtgatgtttcaacctcattattatcaatattgggctcattagcgggtatttcatcatcagattcacgatcaagagaagaagaatgttttggtatatcagtaggatgtgagtgacccggcaaattgtgaatttcatccgcttctaactctgcgagagcatttctctcttctgcactaagcctaggtgaagtgcaggcgggccctaaattttcataacacttcttaagctgatttatatggacacgccgtggatttgcttgaggcgaattacagctagtgattgtggcatatattccctcaatttctataattctaaaggcacccttccatggaaaatgaaattttttggatgtattacgtttaccatcataatttcttaataaaaccctgtctccaatctttaaattaggagttctcatagtcttatcgtattgaattttcattttctcctgtgcctcagcatgtaattctgcggttatcttccatgctctccgaagagaggttactaatttctgtttaaattctgtctcatcagtaaatgcaattggttctctaatcctaggatctattatttgatcaatacagaaaatcggatcacgcccaaacattaaaaaatatggggtttcgtgagtcgtggaatgaacagatgtattataacaaaaattggcatagtctaaaaattcatcaaaatctggttgctctttagtgacatattttgacaaaatattgttaaatgttctaaaagttcgctctgtggccgcatttccttgcgaccaatgtggaactgcatatttcttattaatatataataacgagcaaaattcacgaaagaactcagaagtaaatgctgtcgcatcgtcactcactaattcggtgcaaccaccaaacttaagataacaattactaagaaaagctttggcaattgtatgcgatttggcatcgggtaagggaacggatattacatatttacagaaccaacaaatgatgtttaaaatgtatttattgccacgttcagtaataggaaaaggaccggctagatctaaaccaactctggcaaataaagtattggcggggaccatttgcatttctgccctgaatgcaggcgtcggtgaatgtcttagctgacaagtaatacattgtttgtaccatgttaaaatatcagaatataggaaaggccaataatattttcgacatttcttcaatgtcttttttaaatccatgtgccctccaccaagaggagaagagtgaaatgagtcaaaaataagagatcttaatgagattggtatataaattcgtggtgactgatcctggtacctaaaatacaaaattcctgagtcaataacgaggtttttggcttgatcagtaagagattccatggtctgttggtctatttcattcgaaaatttgccagtttgtaaaaaattaataaattgagagatttgagggtcggccctttgctctttctttaaatcaatattgtacgaattaccatctttgcctctaagaattaatgtattaacgaatggatcaaaaactaaccgctggtcaattgataggcttaaacaaattggaaactcagcaatgtcctcaagttcatctaagtccagtacttctttgaccgtaatattttcctgtgctctgacaga

SEQ ID NO: 1912 - DNA, 2409 bp, Heterodera glycines
  unsure (1)..(2409): unsure at all n locations
ggagggggacgagctgttgttgctggaacgtgacgtaggcgacgggtggacacgggtgcggcacatgcagtccaacgcggagggctttgtgccgaccagctatttggtcagtcatcggcgaaattccttacactcctacgaccgattttaaacatntaaaaattaattttacaattagttttgaaaaattggacggtgtttttctttacattttgctcgttttatcaaattttgattagaaaaaacagctttctgttcttcaaaacaaatattgatataataagcaatattaatgagagtttatggcaaattttttctacaaaaaaatgacggaaattttgggaaaaaataataatttcatggaggggactcgaacctccctccacccccctatttttcgtgttttgctaatgtttccatttatccattgtttaaatttaaatttttaaatttgtatataaattttcctaaattaccccctcaattttgcaggaatgcaaatggtattcgacggaggacaacaattgcccgaatgagtgaataaatgggcgatgaaaattgggaggaaaaaaagtgcggcgccaaaacaaaactttgcatacaaacagaagaaacaacacaatacaatacatacatatattatttgcttttccttccttttttgatttttaatttcttaagatgcaatttgataaaaaaaaaaaaattaccgtaccgaattaccgtaccacgaaaagtcatccatcctttcatttttgttactgtattatcattgccgtcccctttttgaaaatggcgctttgttgtttattgtactattttgcatttttgtctgtctgcaccggttgggtgtttgttcggcacttttgtggctctaaaaagcgcaaaaaatggcaccgcccttttttggcgtaaccgaaatttttaaatgcgatttttattgaaattttggcaagcccaaccatgcattgatgtgcttttttttgttttcttctttctgccagccgcttttcctcccccttccgcgctaaccctttttgctcaattgacccctcagaaaattgaaaaatatttctcttttttgagacattttttttgagaattcgtgtgccctcctcccccgccgtctcttcgtcaaattttgtcattttttcggaaaactatgttttttctgtgctttgtaaaatttcgactgattattttctggcaaaatgtcttctttctctctctctctctctccttaatttaagctacgaaagtttattttatttttttcgcttccaccacattactactgtactttgttcttttgtattgtgctcgagctttctttctcttctctcctccgccaccacaaaatttgtcgaaaaaatgttttattttattgctatactataaattttgtttttgtatgtgtttttgtattcattcttacgagaaaaggaaaaaaaacgaaaaacaaaagtgaaaatgttcaaaaaaatggggttaaaatatttgatgtttcgggttggtaatgcaaaaaaatgaatgcccttgagcatatctaattataatggaatttttaaagttttgatgaaattgaaccccaaaggttctaaatccgaagtctttcttttaaattaaagaaaaattcatttcaaaaatataaaatatagtaaaagttaatctgaccgccagcgatagatcagagattttcaattctgaacagcgagaattttaaaagtattaaaaatgataaaaaaaacgaagcgatgttaaagctcaatccgactccaaccaaatacaaccgggtaaagcgagtgaacgacaaccctcagctagggcggatcggctgagttcccccttaatgaggacaaagaaatggggtgcatcatgggacagatcagagagaatatgcatttttttacacactatttccttggtactctagtttctttccggtgcactctctcgccccttttatgcaacttttttttcttatgcccgacgcccaaaattatgattatttaacacacaattttccaggtatctgttgacccctattccccaactgtttcctcttttcaatggtgaaatcaaaaggcaaattttaaatttccgaaaattggtgccgaagttgcggcaaaaatacacccctaaaatcgggttctaaacgacggcgtggtgccaattgttcactttttcccccaaaaatttctataaattatccaaaattattgaactttgatgaccgcttttctgatttacaattgaatcggataatgaatggactccgttttccattcattttgccaacagtcaattaatgttttttggcgtccatcggcgaattcgcggcatttttcaccgcggcattttgcaatggccatatattgaatgacattgtgcttgtttggtgtccatcgg

SEQ ID NO: 1913 - DNA, 1609 bp, Heterodera glycines
tatcttttgactaatctaaagatataaaaaagcataacaattaaattaagtttttcaatatttacacatcaaaattttagatacaaaaaattggcgtcctattctcgtttaaaacaaaaaagttttttaaatttttttatagatggcccaaaaacctaatttaaatttatttttctccgagcaccagccgcccgctatttgtgaagccgcacaaacactgcgggatgccttcatcaagtggctgttgtgccagcggcttaaaatgtgcgcagtgaaaatgtttatgcgattagaagacgacgagattgatgccaggccgctgcaaccgcctcaaaatggtgcccaggggcagctgctattgtcttcaacagctggggatttaactcaatacaagaccttgttaaggttggtttatttatttatttatcgagcaaaccaaaggcacattagtgcttttacatggtgccaaaagtaagacaaagaaataaaattgatcaaattaaaaatacaaaatgatgtaataaatgtgaaataaaagtaaatcaaatgctaaattctcaggtgattatttataatgtaaaatgtggcacagaaatttcctactcagaactcattgcttttagtaaacccctgaattcctttgccttattaatttgcaccgctaaaactggaaggctattccagtttcttactatcctatggaaaaaattattttgagttttggccgtgtggcgctttactcgcaaaagtaacggcctcctgggcctttccgagaaaaagaaacttttttcagcatcaaggctggtgaacccttttataattttaaaagctcaatttgtactgaaatttaatcatttcagttagcgattgacagaatgaaactgttcgatgaaaaggagatgcgctcattaagttcgactcaacactacatgaaggtcctgcgaagcttcatttcctttctggagacaacgttcggaagaaaccaaactgatctcaaccacgttgggccgctgctcagcggaatgaccataattaagtatcgaattcgtggcattaaaagccgtgcaatagcagaaagggagcaggcaaggcgtacatcgacaaaacaacagacaaaccctcagcacataccatcatacgggactgttatggcgctgatcaaccacccccagattaatgcggcacacaccaacttcagaaacaaatacattcatggggcctctgctgctgaaactgatgatgaatggccgacttacgaagaatttaaattcataaggtgggttcaccatattaaggaactatttgtacatttacaagggtaggtaccaccgaaggtgggttcaacatattaagaaactttactgccggcggagaccattgcttttgtgcaattgagtttcccgacaacaaaactgggcagctgcaattcttaattttggacgctcgtttagaggtcaaaatcgccatttctttgaaaaattgaaagttaatttttaggatcttcttttatgaatacgctcgctgtgccagtttgttcttggaagctgccgggctgctgcgcaaaccgaaaggctatttcttcttcaaccttcatgcaaaaattacccag

SEQ ID NO: 1914 - DNA, 6380 bp, Heterodera glycines
acatgtgggccgctgcattcttaagacgttttttgatttgtgatcatgccctaactcatattttagtgatcagatttgatacattgtttgcatagttaccttttaactactttgttatcaatattatctttttacatattacaactacttatcaaaatatccacatccttgtagagacacatgatactttataatgttgcctgcctccttttctcttcaaaagtgtttaatttagtaaaaaatgaacgctgaagacaacaataacccaagcccaacggacccagaacacgacattagcaacaatgatgatggcacagcttcggtcgtggacaaacacgacttgatttggcggaccaaagagctgttcgaatacatcagcaagcgggccgctgctggccgcctgacgaccgccagtcgtcaaggaaaagtcacattgggacgggaattcttcgaggaggaactcgaaaatattgataaaggtcggtactatgggtacatttacagagggtacccctataaatgtactgttagtattagttgatattgagttagggtacccctataaatgtactgttagtattagttgatattgagttttactagcatacctattcagaatgccatggaatctacttgaacaagacagcggccgaggctgccaaggactggaacggtaacatgaaacatcgacacgctgccagttgggccactgccatgcgcggcactttttcaattggagcgcacgaagaaaatgcaacatcggaccaccgagttgcaatgcgcgagctgacaaaacgacgggccgctgcagcgacggagaaaatggaaattgaagcaaaatcagcggcgatcaaatcacagctttccattgaaaacgcaaaactcgggctgttgctgaagaagcaacggttggccaaagggcacggcacgtatcacaaagatgtgatcaagtatctggcatcgaccgctaccacctcaaaacggtaaacggtgatgagaaattatacatttatgagcggtcgcccataaatgtatgattgttaattgctgctaattaaataatgattatcgtgagttaatagactcaacgactgtccataactgtaggatattaagtgctcaattaaataatgattgtcatgagttaataggctcaacgactgcgacgatggcaacgaggacggcaacaacgtcacattggcacgcctttttcgagtcaatgccaaagtggtggctaaagacaaattgaagcaaaccaagctgcagaagttccttcgtccgcacaacattgcagaaaaatactcctccggcctcggcaaaaagaaggcaagtttttaaatgagtattccattcaaaacgtacaagtcaactcgtacactgttgtacaaacgcaattcgtagaaaaatcaactcaaattttacaaaataaagcctaggcttaagcctaaacctgaacccgagcaagcctaggcctaacataaagcttaagcctaatcctaaagcctaggcctaacctaaaaattgtacgtgtttcctttgtacaaaaaaacagtgtatgagttagccttttgtacgagttggcttgacaccagcagttggagaagtgccagatgagagaattggagcaatctggcaattgtggtgtactagtaaaattaaaaattactggtagatttctttggcagatgccggacgtacgggctgaggaatgtctggaagagatatccgacaacgacgacagccatgtcagggacgaggcttctcggcatctgccaaaaccgtcactaccgtcagcgtcagccgtttttaggcgtagctttgttgatggtggaaacgagaattctgaggagttcggaatttttaaacgtggatttttgggtgaaggagacgagaattctgaagtcattttcattgattgaacagttacagtaaatttaaattatttatctttttaaatttatttgcctccattttttcatacatttatttttttttgtttaccgcataaaatcatttactcattgttagtctcatttaaaactaaaagatttctttttaaaaatttgtcattagaaatttgcaaaatatttttaaaaatttaaactttcatatttggagttaattaatcttctctttttttgtgtttttgacaagcgccgcccggaaatctttttttttgcaattttcagcaacaccgctcggaaaatgcttaatttaaatgaaaggcggtacaattgcggatcggcaattgcggactggacaattgcggacgacagttgcggaccgtacttttgcggacgacagttgcggaccgtacttttgcggactggacaattgcggaccgtacttttgcggacgacagttgcggaccgtacttttgcggacgacagttgcggaccgtacttttgcggtcgacaattgcggaccgtacttctgctgaaaaaattaactggaagggtgggcctcgtcagtacgaccccttccgtattgcaaattcaaaaacctaagtgtgtttcggcccttacatagacagaccaaataagaaagctcacagcaataaataaataactgacaatttgaaagcataaataaggagcagaaaagcaaagcataggattataaaatctataattatgtttattttattggcttgctgaaggcccaacaacagcttctacgaatacaacttattaacacaaaaataactcaagactttttccattcatcaaaccatacataagcaatatcgacattgcttttcgtgatcgtccaatttttctatccccaccatctttggctaaattacttatttaaattatattattgcaaattttctcactgtaaaagcggctccgtccggttatgtcttcaatcattgaaaaaaaatttgaataattgaagtctggattctagcaaaaattaaagccaaataagttgaaaatctgttttaagaactcttctggccataacttttttgaaccttaatgaaaaattttcaaaactttgcaggctaatagtgtatacttagggctttcgaatgataccaagattgttggatttcgttgacaaataaaaaagttataaccagaaacgtgttggcgcccaaatgtgccggcgaccaactgagcgagtccgttttctgataattaagttacaattgtaaatgtgcaaattcctccaaaagtgcctctgttccatcctcctcctctttttcattttcctcattctcttctctaacaaattcctctcgtttattcccctctttttcctcctcttcttcctcctcctcttccccatcattctcctccaaaatttgctcctccttccgtcctcctttctctcctccttctcttccttttccattttgtttcttttcctcttcctcctcctcttccccatcattttcccccaaagttgactcctcccctcgtcttcctttctctcctccttttccattttcttccgtttcctccttctcttcagtccgcttttcctcttccccatccgttgtgttgttgttttgttcaaatttctgcttcaaaaattggtcgacaattgctttgatcagcaaaagtgtaaggcaaacggcggcgatcagaagaaatgccaacagcaaaaaatggacaattctttgatcagttgcgattagaagtgactgaaaatttggggatgaaatttgcaattgttccaattataaatattattccaattcttttagactcccccccccccccccgccgtccaatttgacccctaaaaagatttattcaccacctcatgtttggccattttttcgtcgatcgttgcgctgagaagcgactgaaaatatgcaaaatttttgaatttgtcattaaagagtttaaagttgtaagcaattaaataatttttaaattcgaaatttcatttttgtaaatttttgaaaaaaagacattttttttattaatgcctccaaaaaattgtgacttaattactacataattagcacctgaatttcttttgcatttgccaatttggccatcgcctgcggaaaaattggaatttaaatttaaaagaatttaaatcatttttcacctgctgttgctccaatttgacataaattctgtccattttctctgtcacaatttccggaagttcagtcgccgttttgccaattaactgaaaattgttttttgaattgattacttttgtacttatcaaatatttacaaaaaaaaattgttgaaatattcttgtaaaaatttacggaattgaagtcaaattgaaaaaatcaaaactaccacaaaaagaagaccaatcaacaggaggagcaaaatgcctgctgtgttgcgccaaaatgtcattcttttccaccacggaatggcatttttgtccactaaatcggcacacccaatgctggcgggccatacttaattaggcaattaattaataaattatttatgcaattaattaataaattagttaattaggcaattaattagttaattaggcaatgtaatttattcagctttacgtgtgtcgttgaaagattcatgtacaacaaaattatcatcagtagacatattttgtggtaaaattacgtaaaacaaatggcagagaaacctgtgcaaaaactttaaatatatcttagaaaaatattttcggcataaaaatggggcactataattgactgagaatgagccgtttaattggacagttttgcaacaatttattttcgcaattaggggccaatttgtgaaacgctaatcaaagaggcaccaataaaggaaccacaaattttgaaagaatgcgcacggcttttactgtataaattacagtaagccaacataatcaaatggtatttatttaatgaatgaagagctaattgaaatttaattaaacccattaaacaaatgaaaaaactaaaacatttgagtaaaaatgagggaggaggggtaaatggcgattattagtgacccgttggactctggtggacaatgccgtggatgcgacgcgaccgatggacgccaaaaatgactgcaatggtggcattctcattcgttaattggccattggcaaaataccccgatggaaatgccgcgaattcgccgatggacgccaaaaaagacattaattgagcattggaaaaatgaatggaaacggagtccattcattcattatccgatcattatccgatccaattgtcagtcataaaagcggtctcaaagttcaaaaatttggaatatttgtagaaaattttggaatttaagaaaatttgggagtcaaatggccacataggaatctccgggtgcaaaaatggaatttcttaaaaaaaaatttcttgaatttatcatttcggcaaatcggaggccacaaccaacagcttcaatgaatattttcctgaaacaattggcaccacgccatctgctgaggggtcgtattgattttctacctatatatatatataaaattaataatgcattattgtttaaaagatttaatttataataaaaaaaatatgaaataaaaaaaaagtatttttaaaatatatttttgacttaattatatgaattattgttcttgttttatattaatttaattttcttaattttaccaattgattattatgttgaacaaatgaattacccaaatgaattcattttttaatttttgatactttatacgaaaaattacaaaaaataagtgcaaaataaaagaaaataaaataaaaaaaaatgaaaaaacaaaacaacaaaaatggcttaaccaattaaattaattttaatttcatcatttctttccgcactttgtttttttgttcaaatgcacacgcaaattgcgtttcagggcaaaagctcggccacattcggggcactgaattgatcagaaatttaattcaattttatttttaaataaatttaattcactttatagggctttactactttgtaattagtggggttccaatttttaagtgcctaaaattaacaagattttatttttttgtaaattttgaaaaaacaaaatccaaaacttaccacaaaaactaggccaaacaacagggtgagcaggaaaatgatcatgaacacgcgccagaaaacttaattaattaggcaattaattaatcaattaattaatataaattaatttttaatgtaattgtacttgtgccattgatggattgatggagctcaaaaattgaatcagcagaagaagatattttttgtggataaatatggtcgaaaataaattccggtgaaaaaaaaatgaaaaaagcaaaattcttagaaggaaaataaataattaaaattgcgattggtccatttcaaaaatcccgggaaagcaccgccaattttgatgagtgcacacggcttttacagtatacaaattacagtaagtaaactc

SEQ ID NO: 1915 - DNA, 2981 bp, Heterodera glycines
aaaattacaaaaattttttggaaaaagcgccgcaaaaaatcaacttcgtttttcatgttcagagtcccaaaaaatgcttatttctaacaaaaaatgctcaaattgatcatggacaatcaaaaatataacatttgaacattttaaacgtgtttagaataaattttgtaaaaatgaggctttttgacccaaaatgaggcttttttgcttgccaaatgaggcttttgaaaattttcatctgccatccctggttttatggcactttaccatttaggggcaccaaaatttaaaaaaaaatcaaaaacaaaagcgcccaaattcacacagccgcgcacaatattatttagggagaataaatgtgacaattgctgataatgtcacgatttgcgcacctttttttattttcactccaaaaatgttaagaattatatatttgtgaccatcgagaaaggactaaagaaagaacatgaacaggcaaaaaaggagtttccagaaaaacattattgttaatgtttacattttcaccccttcacgttgattgttgatacccataaaaacggcttaaataaatctctgcgggtattaaaaaattaaatattaaacaaataaatatttatatttgcatggctttgttttgcggttccattccaatcgatcggccaactgttgtcgacaggcggtataaagtgtcgacttgacagagtgtcgaaattaagtttggtcccggcttgtattttccataggactgggcccgatattcggatattttcatgtttgggtcaagttttttcaaaaaataaaggtcgagtccgatcccttttaaccctttaaaatatagaatttttctccctatgaaagttaaaataaaataatttaaatttgcatggctttgctttgtgccgccgagcccgactgtatggtgccaattggacagacgaaggcgtgcatttacacgccaactgctccaaatttgacttgccatcggcaggatcagagtctggcggaaattctccgctacaacatggaatatcgacaacaaattgagggtttgtttttgtacaggacggaacaagcctttaaaaaaaacaaggcaaccctaggaaaatcacgtatttcctaaaatagagacagaccccgggggctctatttgaggggagggggcggctctaatttaaggaggggactgtattttaatgaatacaataagtactggtgaggttggaaatatgtgtatacaagtacatatcacccatttccgtcgtgatgaaaaattcaaaccacgagcccataacaattttgattgcttattcaaaacttaaattattttagttggctatttaaacagagaaaaccaactcaatttggaaattagaatataaagttcatttaattatatatttttttgattatgtaatattaaaataatggtatttgcctttttcaaaacagacccatcatttgtgacccacctgagccctgcccatccgcgcagttcgaaccgaccgttgcaatcatcgggaataaaaggattttttgaattggaccgtcgtcataagttcaaaggttctgcagctgaatggcttcaaaaagtccggtgttgctgatgaacaaatatcaattcctcacgtttttcaacaaaaaataatcacaatttcaacgattacgattttttatcggtaaaaacattacaaatcgtaattggcaactgaccaaaacgaaccgaattttgctgtttctaaatgaaaatatcaccattaattcgctttctcattgtccttctttttgtccattataatttctttcattatttcatcatttttcaattatcgtgataaattcaaatgattgggttctcactcagatttcatcttgatttttcattcaattttatgatgtttgaggcgaaaaatgttgtggtgaataatagggacatttcttcaaattttaatccaatgcttacaaaacatacgtttttagtataattcagtagttaacctgggctaccaaaaaaaaaattctaaggcctaaacctaaacttttaaaaatgaattgatatgttttttttgaatttctaagccccacctaaaagagacacggatggggtgcgcccttttataatatttcccattttaattttgcaaaaaaaaaaatcaaaatttctgtttatgattaacaaataataatcaaaaaaagaaaggaaaatttcatcataaattttctttagaagggaacggattagtcgtgcaaatagcgcacttggtagtagcgcagccacaggggagcgatgcaacgcgggttctgtcccgggagcacgcaaatagttttaaaaatttatatttgattatataaaactatagcaccatttaaatcatattatacaccaggggtgtgacttgtctcagaaaagacgagagcgagagtttggcgagaggcgagagtccccaaaaagacgagagcgagagtttggcgagaggcgagagtccccaaaaagacgagagcgagagtttggcgagaggcgagagtccccaaaaagacgagagcgagagtttggcgagaggcgagagtccccaaaaagacgagagcgagagtttggcgagaggcgagagtccccaaaaagacgagagcgagagtttggcgagaggcgagagtccccaaaaacacgagagttggcgagaggcgagaggacgagaggcgagggtttttcaatttttttctgtagccttattttttaatttaaaaaacttcaaaatcgtatattaaattaggggtacgggcctgggtatttgggcaaataccgggtcagggtattgccgggtacagaaagcccggtcagagtcctagttttttaaaaccgagtccaagtcatgaaaaatccaaacaaaaatctttaaaattttttcatgaaaattaaaaaatattttcatgaaatatatttatttttaaaaacaaactttattatttttccatttttccccctttttttt

SEQ ID NO: 1916 - DNA, 2766 bp, Heterodera glycines
ttttcccccctttttttgcggtgcgttttttaaaacttcggggacagttggggtcgggcggtgccggtaggcgccgccgaaaaaattttgaaaattgtcttcggatttgttaacagattttattcaaaaaatgaccaaaacttgttttttaaattttttgtttttaagtcgctttttttgtggcgctgtttttccaaaaaaaaatttttttggaacattgggtgcggggtccggcggtaccgaatcggcaccgccgataggcgccgccggaaaaattctaaaattttgagtgtaatatattaacagaacttgtcaaaaaatgatcaaagttttggttaaatttgcagttttaggctgtttaaaaaaagaaaaaataataatttttaaattgaaatattttttattaattaaaatttcaattgaaaataatttaaagaaattattaaaaaaattctgtaccgttggggaattgaacccaagagaaaaataatgaaaggcagaaggtttagccagcagaccatatttgaattggagctatccaaaaatagagaaaacattaaggaaggaaagaaagagatttaagatttttttttcgcgtaaatttgaaaatttttctggctgctcaaaagttcaatctttaggggtgtattttcaactctcgcctctcgtcccaaaaaacgagaggcgagagacgagaggcgagagttgtcccacccctgttatacatataaatttataattttgaaagtggccattctgggtatttttttccatcgaaacaaaaaaaaattcttcgattttgtgtccgtattaaacgactttacatctaaagatcaatgtggatttttaggctaattataagtttaaaaaaataaaaaaatacttaattatttattatttttgatggaagtaaaatttaaagtatttaaaaaaaaattattcagtgtgtgcgtattaaacgagggcaaaaatggaagaaagacttgagggttagccactttgcgtttaaaaggatttttacagggttcgcatcgccctaactcggcttccaaagacggctgtactgatttccaatgacataacgggcaaatttcatgattccaaggacgcgtaaaaatttttgtcatatgcaatggaaattcattaatttttattcaaatgatttgtgtttatcgctgaaatgaattttcaaatattttttgtttctgttgttattttcttcatttcatcgcatgtgcattgggcacttcgtcaattttggtgctcataaatgcaacgggaaaatgaagatattttggcgctcacgattccttttataatcgtcttgaattcaaggatatttcaattttcaagcgggagggcccaatttcaaggacatccttgccattcaacgacgaatgcgagtcctgaattattttattttttctctacattttccttctctcaatttccaatcaattactgaaatatgagatgagcaacatcactgaaatgtatttctctgtagggtgggaggttttgtggaataattttccatgaaaaattttaaattttgttcaaaaataaatcaatcttcttttttccaaaaatcctaacttcgtcctgttcaagaatttttttaagtcatacagcttataaatgccagagtaaaaaagcaaagcttttaaatttataattaaatttgaatgtatgtatatattgcttaaaataagaattaattaaaaattgtgcttttttggtttataaaaatagtcaaaatttccatctgatcaaacaaagcaaaactgagaatttaaataaaaagtaatcgattcataaattcacaaatgcttttaaaaattccattatatgtcctttactaactagctggattttgggtttttaaattactagagattgtcatattttgtaaataaaaattcaaaaggtaccaaaagaaccaaaattttctgcatatttttattttttataaatatttacaatccatattaacattgaaaagtcaaagaaatattaaattttaagcgatgtccaactttattttatcacaaattccattttttattgctttactatccttaatatttctttttattacctacaaatacggttttccatatgaaaattcgtcgttatttaggtaatttaattgaaattgttcatatttggcctatttttgctaactaaaacttcaaaaaaaaattaattcgcttatttctgagttttaattattaataatttagtttaataaagttaaaaaataatttatataataatgaatttttttttatagttttacctatacaaaaaacaacaacggagaattatcatcagaaaaatgcttcggtgaaaatgtatttaatttaataattttcaaacaatttaaattattaagatggtttacactttgaaaatgaacgactcgcgaataattcgtggcaaaaagtttaattgctcattaacatggcttttggagcgctacaaacttttagacaaatacgcaattaaagagaaaattgaagtctgttttttaatttttattttacattaattttaatcatttttatgtcaaatatcctggccatcccaaatttgtgtttgtgacagccgccaatgacttttattatccctttattcggacggtaattgcaaatgttaaagaaaattttggatgcaaacagaaaataattgcttatgatttgggaacagtgacaaaaaacaaagaatgggtaaaaaatagttttatttattttaaaattaataatt

SEQ ID NO: 1917 - DNA, 1077 bp, Heterodera glycines
  unsure (1)..(1077): unsure at all n locations
aaagtcaaagaaatatannatttaagcgagtccacttattnnntatcacaaatcccatttttattgcttactatccttaatatttctttttattacctacaaatacggttttccatatgaaaattcgtcgttatttaggtaatttaattgaaattgttcatatttggcctatttttgctaactaaaacttcaaaaaaaaaaattaattcacttatttctgagttttaattattaataatttagtttaatatagttaaaaaataattaatataataatgaatttttttttatagttttacctatacaaaaaacaacaacggagaattatcatcagaaaaatgcttcggtgaaaatgtatttaatttaataattttcaaacaattaaattattaagatggtttacactttgaaaatgaacgactcgcgaataattcgtggcaaaaagtttaattgctcattaacatggcttttggagcgctacaaactttcagacaaatacgcaattaaagagaaaattgaagtctgttttttaatttatttttattatatttttattaattttaatcatttttatgtcaaatatcctggccatcccaaatttgtgtttgtgacagccgccaatgacttttattatccctttattcggacggtaattgcaaatgttaaagaaaattttggatgcaaacagaaaataattgcttatgatttgggaacagtgacaaaaaacaaagaatgggtaaaaaatagttttatttattttaaaattaataattaaaaataaataaattttgagtttaaataacaaaataaaattatttaattaattaacaagggaaatttgaactgtaactgttcaaatcgcttaaaaccgcttttctcgtgtagagcatagtcgattttctattgaaatgttcggctttttttgcattggcccccaaactgatcagaaaaaatgaatcaagtttaaaaaataaaataactgaaaaatgaaatgctagatggaataatacttttgaaaaaaaatcaaaataattcagaaagtatcgagcggatccgaaccagagttgtgccggatca

SEQ ID NO: 1918 - DNA, 1765 bp, Heterodera glycines
  unsure (1)..(1765): unsure at all n locations
gatgatttatcatcaattgctgatttcaaggagtcatggatgattttttgagatgatgatttgctgattcttgagaaaatttgctgatttatgctaattttttgaaaaaatcaacaaaaagggtcattttttggacatgttaacaaatcgtattataaatttcaaaatttttctaaaaaaatttttaattgacctggagcccgaatcccgaaaccctacatttctgtcccgaaacctgacccgatgatttttcggccgacccaacccgaattccgacccgatatttttcacgtcccggaacaaccctgatccgaacccagatgaatggccataaatgcaagagggtaaatcgcattaaattgatgtttttttgctattattttgatttctagattttttgctcagcttgatgatttagtccaaaaatgattaattgtttgaaataattgaagaaaatttgtttgaaaattttcattaatttaatttattaaataaaaaaccaaataattttgtattattttcacttgatataaattaaaatttgattttttttttaatttttaaaatttttttgaatttttaaaatttcccggttggtcccggttcccggtttttcttgcggtcccggtcccgaaaaaaaatcgaggtcccggtcccggcttctcaggtcccggcaagtcccggttttggcaaaaattcccggtcccgtggcactctacttttttgtatgcaggatttattttgaatgacctccgaaaaagtctctcgcatgaaaatctcgaacggcttatttttcttcatcataatattatcctttacaattttgattattgataatatgggaattttctaattatgcttttacaaatgtgcgatccgcggcgttttttgcgcgatccgcgatccgcgaccgcggcaaattgaatccgcgatgcgcgatccgcgaccgcgggattttttttgcgcgatccgcgatccgcgaccgcggcaaattgaatccgcgatccgcgaccgcgggatttttctgtgcgcgccccacccctggtcgtccgtcactttccgcagctgtaccactgaatcgtcgatagattctcttacgaggtcctaaacaatagaaatcggcttgtccaccaacaattggctttaccttcataaactgatcgtctgcgctaattgcatccaaaagtgtgtcttcctggtccaccgggctcagatccttgaagccaggcttctccgccacttctctcagctgcttcttcaccttttccacaagctcgtcaataggggtgctctgcaggactttgaactcgttagcgggtttggcgccggctcatttttgccgtagacggcctcacgcttccgttttttgcccaagtcgcaaatggcggtgtggaacagtttgcagccagtatcaaatgtaaatttgccaatgtcgatcagatcaccgatgaagcgacgtttgcgaagggcaacacgatcggaccgtgctgttcgcaaactgaaatttcaaaaacgaattcgcacaggcacggcactgagttgatgcgtaccctgtttcagcattggcatttgcctcggttgtgcagtgatcggactgattgtgccccttcaatgccattgtgccgccttttatagcggacgaaaggggtttttgagtgcaatttgggaaatgagcccatcaatttggcaaatttgttgtccattctcaaggtccaacatggaatccaggtccaggtccaggcttttttcanaataccgatctcta

SEQ ID NO: 1919 - DNA, 2893 bp, Heterodera glycines
  unsure (1)..(2893): unsure at all n locations
cccggcaatatgagcaccgacgaaattcggtaaacattcncctcgagttcaactaattttggctcttttctaaccaaattttactcgtgtaatgcctaatagtccgtgaacttaccaatttcgcaattcgttgcggccctttcaatttaacctgtttgagagaattgtcgctacattcccatcgtccctttgctttttacattttcattgggtttttttttcaatttgtgcctttcgtgttcaatttcgcatgcttcgccagcattttgcaccattatgtgggccttgtctctcaaacacacatagcacttattcttcttcatcattctacaaccatgcaatttgcttcccaatttgtcaacaatcaccaccaccgcttgtttatgtgtccacatagcattcgatgggatttaccattccgaatatccaaaacggtgttacaatatgattataccgagaactgtttcacgagaacggatttgtggggagtttgcgcggtgaattttgatggcctgtgcttatcatacctatagaagagagaagtgctccttattccggttgcccataatttggtgacaaatatttatttaccacaatggttacggaccggttttgactgatcggattgattggttgattgatccaattattatgcaaattaatttatgcaatgcaatgggcttggtgagtttactgggcaacaattttgaccattctgcaaaaacaaccgacaaatgcttttttggggaaagataaaaatgtttcaaattttagtgaatttttcgagaaggactttggcgcttgcacgttcgactttgtcaaagtgtcccctgaccgtaccaagttgtacattgcagtccgatttgacagcaaagcggcggcacgtaaagtcatggaaaagtcggcacaattcctcactgattagcgtctctatttccacacaatttcagcttttccactgacggagaattactcggcttcaaggttgagatgacatggttccgtgacattcgccgctatttggcccattgtgctaaacaaggttatattgtttgctgtcccttcttttgctctcacactctaaacgcgttccgttttgaggaattcgtccaagccgttttcgtggccgttccgactatcgccgggatgacgagcagtacaaagggcgcgggcgttcaaggcaagttggaggcacaaacggggacgtgctgcgtcatccaaaaatatttaaaaaccgaatttggctgctgaaaattttttccagcggaggccccctccaagtcccaaaaatactcattgtcaaacctgcgggttcgtcacatttccagacaaaaattagctggcaattaactcaattttgattctgatgcactcgttcaggtcacctactcggtcccccgagcgtgaagagggcgcgcgcagtcgctccgcgtcggccgcttcgcgccattccaacgccaaccgccgtcgttcgcagagccgttcacactccgcccactcacactcgcacagtcgttccctctcgtcgggcggcgaagtgcgcggggctcgcgacggaaatgcgtcgcattcggagcgcgagaaatctttggactacagcgacattgaagaggcatattttgaaattctgtttttttttggcaaactttccccccattttttgtagaaaaaggtccgtctttcgccgccgcgcgttctttcgccctctccgccgcccctaaaaaagtcgaagaaagagaagcgaaagaaggagaagcggcagcgccgcagcaagcacatgtcgccttcgttggccgtccaccgccagccccactcgggctcggacatggaaatgggcggggaggaggaggacggactgtccaacggcggagggcgcaaaatgctcaaaatggagtcatcgtcgcccgtcaacaacagcaaggcatgtggtcaactgggggaaaacgagccgaaccgcggaatgggtggagaataccctcttgcgttttcagatgattttcattggtccggtcaagcccattgtccaacagtcgccgactgcaccacaaaagctgcccaaggtggagctgcgcaaccagtccatcatgttggacctttccgatgttggttgggctaggggagtggaacagactttattaattggcatacaaaatcaatacggacaaacccctaaaaaattaaggccaattggtcacaaaaacagctacttaaaaaaaagtttttgccagggtcactttttgccgatttttttctttactttttaaaagtaaactccccgtctgaaaatgttgcactttccaataaactttttccagccaaggactgtttcgccaccgaaattcaaaccgattggcgaactgtcggactatcagcagcaaatcaacggatcaaaaggcatgcaaggtttgtctattctttttagtactttgtactatttttcttgaattttagaactttccaacattcgattggccactcctccgccacaaccgccgccggtgcttcgcaatgttccgttgcctcccgtgacgtcgaataacaacgaaatgatggtggaccgcaattacattgcaaaggtgccgttgccacttttctaatgtttgttagtgaatgtctacttttttgcttttcggacacgcaatatccactcgctatcttctattaaaatggatacgaattttagcggaggaggggggcggggatgtgtggcagactcaatgcatataatgggttacgaattacaaattgaagcatttttggacctcccttacggatttctattattgaaacgcagttacgttcagccctttctgtaccctttacacatgtttggtttcattcggtttcaaaacgctattatttttatttgtctgattccatttgtccgaccatt

SEQ ID NO: 1920 - DNA, 4035 bp, Heterodera glycines
atgcgatttgttaacagaatttgtaaaaaaatgaccacttgattaagttttgggttttaggatgcttaacatgaaagaaaaaagttggaatattttttaaaattaaaattttaattaaaataatggtaaagaaaatgtgaggaatattctatccaagtggggaattgaacccaggcgaaaaattatgaaaggtagaaagtttaaccactacacaacatgtgcatgtgtgtattccatgactaaatgaaataaaatttaattttttctcaaaaatttctccttcttcaccaatttcctactcttttctcgaccagacccccattcttaccagtgcaaatttttaccggcggtaccggtactagaaaaaccggtaacggtaatttcatttttgaaaaaaccggtaccggtaccggtaccggtaccaaaaaaaccggtaattaccggccagtaccggtaccggtaccgctcaaccctagttctaaacaattaattgtttgacgtttgtttaccattcgttgggcattaaccaactttttgaccgttgtcatgacagtacaataaattctcagcacagctcgcaatcaccggcttctccccccccccctttttacgcccccatttaatcctattttgtttaattctgtcatttctattcaaaacgctttacacttcgtttttcatctgatggcatccgttgttagcccatcgtcccgttcaaattcggcactttcggtggcacttttgccgtgcttatcatttcgcccctttatgccttcgtccgttctttttgttaggttttcgtaagggtgcgtcccctcggccaaacggaacgccaacgcggtgcctttgaatgtgtccgcgttgtgaatggtcaggtcgtcgtgccctataaatacacttgtgcctttccgtttttcattcatttcgcctcccatttgtcagagtcttctattagttgatcccgaaaaattctccggaaacgcacttcgccaaaatcgaatgcacgaaagggaattccgttttgaggcgattttggcaccaaaaattgaggaggaggaagtgcaggcgctggtgggcacggagggattggtggacggactcgtccgattcggacgcaacggaaccgtacttgcgtacggaccaacaggtgaacaggacacaaattaaacaaaataatgataaagcgaagagtcccgtggcataatttttaaccctaaggcattttaattattggagggagggaaatccaagaaatacgataatttatcagtgctgttaagtgataacgctcatttagggaccggcaaaacctacacaatggtgggcagccgcgaacggcccggcttgatgagtcgaatgacccgggcactttacgagcaattggccgaaatgggcgacagcgaaacccgcgtttacatttcctttatggtctgatcagcaagcttgatcacttactttgtcagcacacattttcccaaaaaggaactttacaacgaattgatccgcgatttgctgagcacagaaagaaacggtccgttggaactttttgaggtgcggcgaaatgacaggaaaacaaaagccaaacaaacgaaaagcaaattggcaaatgatccattggcctccctttgcgaaggatgagcgtggcaatgtccatgtccccggattgagtcgcgttcgcgcgtcaaacacttcgcgacttcttcaattaatccatggaggaaacgcacggcgaacgaccgaaccaaccgcggccaattcgtaacagacaaagggacaacgaaacgagccaaaactgatcattatttgtaataagtacatcgtcccgatcacatgcccttctgatgatcactttgtggcgagacaatgccgaaaaggggcgactttttctgatcgatttggccgggtcagagagagcgacgaacactcaggcaagaagggcacggactttgtttgacttatcggatcttcagaatcaaggacagcgactaaaggagggggcggcgatcaatcgctcactgctcgccttgggaaatgtgaaatttcaactaaaaatataaatattgtctgattgtttctttttggcaatttaaattcaatgctaattacccccctcccccgagggtcactttattaaggtaataatcttaggtgataaattcgctgtcaaatgcttccgatggccgccgacccgcttatgtgaattaccgcgattcaaaactgacgcgacttttgaaagattcgctgggcgggacgggcgaagacggcgcgggacggacggtgctaatcgcacacatttcgccctcatcgacggcttacaacgaaacgtttaacactttaacgtgagaggggcgctcgctcaaaaaggatgaagatgggctaaaaacgattgatccttttaagatacgccagcagagcgaagggaatcactcgtcgggtgggatggaaggatgccaattttatctaaggatttcctaatttgaagctgccccagcccatccgaagaacagcttccgccgaccggctttactccgacgcggtggaaatgcttcgacgcgaggcgcaaagggcggggcgggcggaagggacggacgcaattgcgcattcgtcgtcactgggaatacgtaaaattagaatggcattccaatttggcattttcgctgggacactttcatcactcctttagtgccaacggatggcaacagagcgcggcgtggaaccgtggccattccgagccgacccttgcagggccattccttttcgttgtcaccgtctatccctccgctgttgaataacagtaattcacttcccggcggccgttctcggccttcaaatgcaccaccagcgaacaacgagtcgaatgccgccactccaaaagtgccgaaattgcctcgcctcggcacttcgctgttcgactctctgcgcgaccaacacttggccaatagcgaacgtcaacaccgccttaggtcagaaaacgtttttgtggttctcatttcttctgtttagagagcggctgctgcaagcgaattccgaacattacgaattggaattggcactgaaggggaggagggccattctgaaggcatgcgaagcgcagcaaacgcacggggagacggagaacgcgcaaaagtgcgaaagggtggcggagagagtgcggacggaagtggcggacaaagagcgacggacgagcgaattggccgacattcggcacaaattggagagagctttgagacggggagagcaaacgctgcagcaaacggaggagcgaatgaggtaaagccgaatcaaagcagaagcgaaaggacgaaagtgatcagtcaatttcagagggttggccaaagaccagcagcaattgcaaatcgtcgagttggtccactcactcgcaacacaacgagcggaaagagagattttggcactttttaatgagtgccatttcattttccattcgattttaggggcggcaattcactcggatttcgctttacaaggcaaacgtttacagaaacaagagaaccaattgaaacggataaagcaatatgaaagaattgtggacagattaattggggcagacaaaaatttggagggtaaaaaaagagaaaaaaaggatttaaagataaaatggcaaaatttaggtgaagaaagagcaaagctgcacagggaatatcgccttttgagaagccaattggacagaatgttgccggtggacaacggactgccgtcgtggaacacacaaatattggcggagagaaatgccaaagcgggacccagcaaaaacgaaaagccgagactgagacaaagcgaaagcatttcgcttaatgggtaattagaggatcagtaccaacgactaaataccggacgagttttttgaagcagtaacgaggagttgaataaaacattcacaattgtacggccgaaagagtggtaaaacggtggagaagcgagcattttgccggaaaataactgctggaagaagagatattggaagattagggaagaagcaaacagaataagagggggagagataaccggtgatatgat

SEQ ID NO: 1921 - DNA, 3166 bp, Heterodera glycines
  unsure (1)..(3166): unsure at all n locations
aatttctcgatgaaagattagtcccaatccttcttcttcctcctccttctccctcccgtcgctatgtcctccgttgtcccctcttttcttcctccactcgttctcctccgacttccttttcgtcttccgctgctccattccctcttcctcctcctccttccgctcttttctgatcagcttcttccgctgaattcgtcctcccctgccgcttctccccgctgtccttcccgctgttcgtgtgcccattccaccgtaatctgtgccgggttggcgcttagtcacgtgccaaaggaaattcccccgggcaccactcgcctgtacatactttttctctcacatttttagtttcaaaaatttattttagagatttgcaagaaaaccgaattcgtcaaattcgtctgggcgacttcgatggtctgaacgcacttcgaacattgtaaaattagtcgaacttcgtcctattttggaaaattcgcttttttagacacatcggcgacaattccatcgaacaaatcgaaaagggctctttggatgcattgacttcgttggaaagattgtaagaaatggtcggactctgtctgaggtgactctccaattcgcttcttccctcaggcgcctttcccgcaacaaaattcggactttgcccgagggcgttttctcccacaacaaaagacttcgtcggctgtacgtatttttgagcattttgtgcttttgccccttttttggttctgtccaacctctttctctacaatttttttttgttaaattttatcttctccccttcctcattttataattatgaaccctttttagcccaccaacactcatcccccattttattttatctccccaatctctcgcccctcttcccccccccccctcggaacgcccctatggcgccgtttctttccatcgattcacgcgccaattagtcaaccacattaattaggcatggcgaatatgtttattggaagaagaacgcggaggaaaagtggaagaggggaaacaaagtaaaacagaacggaaagaaagacatttggaagaattgacggaaaaaaagaaggggaaaaagaacggatgggatgaagaagagaaaaggaagggaaaagagcgggaagagatgaagaggaaacaggctcaaccttagtgggagccgcgaatgccatgtaagcgcagcttatttggacagaaacttggtaatggtgctcatccgtcgtctgtgcccttccatgagtaccctctccccccgtccagcttttcattccctccctcgcttttcctatccccgtttttcattccccgccttttctgtccccgctgtcccttcttcaaccctttttcacttcatcttcatcatacaccactcatttatttatccatcgttcatctccgtcacttggacatattgcctttgctttctgccaagtaatgatttcctccgcctttctctgccgatccgtccgatctgatctgatctgatccgatcactttgctctcttctgacaacttttctgtccgtctcccctcctccgtccccattcattcatttccgagatgaatgaggcgataaatgtgcttcttttgctttggcctccgattttctttgcttaagtgatcgcatcgaaagtttatttaagtctgatttgtggccacggcaaaatggaaagggatgggcagcaattgtctctgaaaatgacgaggagagggggaagagaggggggggggggggagagggtacgcgttattcattgccggagaggagccaccaccaaaaagcgaaagtttttggcgacagatgaacgaattcttaatttggtgcgcctttacgtcccgatgaatgcaggcaacatcaaccatgatcacaattaccacaatcgcaatcaatttcacattattttggagtttctccggggaatttctcgcaactatcgaatgaacccgagaatttctgttaatttttacattttttattgttaaaattattgttgaatttatttttaaactgtttattttacatttttatgctgaaatttaaaaagttgtttttactgtgatttttcatttttctgtacttggggcccaaacgaccctggggcccaaacgaccctggggcccaaaaacgggggcccaaacgcgggggcccaaaaactggggcccaaacgcccccgactcgttaaagtctttacaaatcacagtttctgatgaatgcaattctttatgccgtcagaacatttacaagcgcttaattttgacaataaaagaataaaagagtgaattaccaaatgaaaatttgttagtttagtaaaaaattaaaattaattgagatttaattgtttgagcggactattttttgtttttccaagaaaagagagaagaagaccaagaccattcgtcatcgttttccaacagactgttcagcgaagaataggttctgctccgtaacatttttacgtagtcggaattggccacttcttcgggaatttccgaaataatttcattgagcagctgctgccactgggcttcagtcatcttcttgtttcgtgccattgctgacgtggacggctgacaagtcctgacctgctgaggcactgttgacaaggattgcggcaccgctggcacaatcgacggagggggaggaatctgacaaaattaaaaaatataatcatttgaagacaaaacaattaattatagattcaaaactaggcataggcaccggtggcactgaggacgtggaaagactatcagctgacaatggcacggccaacgaataatgctgaattcgcgatgccggagacagccccttgaaagacagaacgatcaaacataaacattttaatttgcaagacagggaatatccaaattgaacaaattggtctgggtggggtttggcttggcacttttttggttaaccttctgtcaaataattccgagtttttcaattaaaaataattatagtaaaagttaataggttatcgggttaaaatcgtgttttataaaaacctancctgcgatagtntntnnnttggcctttttncccnttgtgcggnttgnntgctgtcgtnngnngcttggcgnttttgcccgataggttcttcctgcgcntcntcnccctggnnntgctggactaatgggcgaaaattgcacaatgtcggcatatgactttatt

SEQ ID NO: 1922 - DNA, 4565 bp, Heterodera glycines
tctttccccccccccctcattccgtcactttttcaggcgcctctccgacaatccgtggcactgcgattgtcgccttcgttggctcaaaaggctgaaaattgccccccaaattcgctgttatcggcccacccatttgttcggccgcccattgaatcagatcagctcacaggcaaaacaaacaattttaataatcaattttaattctttttaaagcaattgaaatgttccggacttgaaaaacgcgccagcggaggggggcgaaagtgccgcgacacggaaaggtaaagtgccgggggggggggggacgacgcgaccgcaccacacaggtttggcctttgagatgtcctccagggtgcgtctgcacagagtcggccccggacgcggtcgttgtcgactgccacgaccgcctcttgcgcgccgtgccgcaacgccttccgccaaataccgtggaactgtacgccctaagaaaattatagagaaaaaaggtttcccataatttattcagtcgtctggagcaaaatcgaataagccgattggagaatggttcgttcagccatgtgcccaatctgatcagactcgacctcagcaaaaatgccatcgaaagggtggagcccgcggcatttgcaggacttggccgcctcagttcactgtacggagggcataaagccctttttcacagttacactttcaattttaagaatgctattctccaataatctgaccgatttgcccgaaagagttttcgatggcattggcaattcgttgcaagttttgcttatgaacgggaatcagctcgagtgcctgcgaaacgaagtttttagaggactgaatcagctgaaggtcaggatcaacacaaaatgtcactcatatcctccgatcgttgtcctttcttctggtcactctatcattttacttttccccctctctgatcattcccttctgatcactctcaatttgactgtttggctttgcttatcctttccatccctttaataattttttgatcactttaaatgtaatctgattcagtgcttacccttttccccataattcagctgctgtccctttacgacaacaaaattcgctcaatttcccaggcgacgttcgcacctttcgccctttctcttcaggtgcctttgcgattcgaacttttctacccctaatttattcagactttgcatttggcccgcaatccgttgatctgtgactgcaatttggtgatcagaatcatttgcttttgagcaaccatgctgacatagctgtcgttttttccaaggtttggatggccctccttttggtcgaccgtcctgtggagacgagcggtgcgcggtgccattctccgaaaagagttgcccaacgacgaatcgccacactttctgccgatcgttttcgctgtgtgggctcggaaagattagtgactcagcgggcgggacaatgcgaagtggacagagaatgccctgaggagtgccaatgccgagggacgacggtcgactgcaggtgggcgagaggagagggataaaaggcaataagtaaaggaattaattgataattaacggaatggagtcgggaatggcatttgccttgcttctccctttagctcgcttcatctctcctctctccctgcggcttttccccgcttcaccacctctcttctgctccgctccaatcgcctttctccccggggctctcttttgccgaacgccgatttgcccaatttggtccatttggacctcagtgataaccaaataaatgctcttccgcctgatttcctcagcagtgttccgtctcttcgcgagttgtgagtattattccccacattcgtactgattaatccgacttctgaagagatctcagcgaaaattccctccggcaattctccgcccattcgttgggtccgtccgcgcttaatttgatcactctgtgagatgattaatgactttgatcgcccgttaactcttccaattttagtcagcttgatgggaatgccctccgctgcgttcccctcgaccaatttccttctcttcgttcactgtactctttcgccccattctctgtctcaccgtttaatcttgtaatttcactttcctttagatctcttcgacagaatccgctcaattcgcttgatggtcccgtctttgaacagctcgaacttctcggtttggatgggtcggcacgtttcatttgcgactgccaacttcgccctctcatccgccgactgcggaaaatgggcaaaatttggacaaacgaatgggaggaggaggaatttggaggaccgcgatgcgcagagccggaaaatttgagagggaagggactaagcgaattggaggaggacgaactgatctgccaaggctggtttttaatcatttgccaatttaacggttaattcgatgcctattgatccattggctatttgccaatggttaattagggcaccgcttttttagagggaattccgggcggacaatgctcaaccgaaggtgagttttgtccttccggttgctcttgcgttcgtccgtcctccgcttcttcttctgtcgctgtcgtccctcctcttctcgttgtccgatgttctggccttggcttaagtcgcgttccgatcggaattccggaggataccaccgaattgtttttggataacaatcgcattgaacacctttccggcgactcttttgcccgttttccccaattgatcaaactgtaattgccctcccccattttaatgatcgttttaattatgccccaagggatctttcgcataatttacttcggcacattccctccggcactttcgtccatctttccgttctttccacgctcattttggccttcaaccgaattcaatgccttcacaacggcgctttcgacggcctttcccaacttcgcgtcctttcccttcaccagtcagtgcccttctccgatcactctttctttggcaatttcattccgcttcagaaatgatctctcccaattgtctgaagcgactttcgccccccttttggccaatttgtctcacatcgctttgagtgccaaccctttttggtgcgactgccaaatgaattgggccattcgatgggttcgctccaaatttattgagccgggttctttttttcttatgatttgttgcttttttgtattgtgtgttcggtttaggaattgcaaaatgcgaaggaccgctccatcggaagtgattaattttttttcaaattcaattcaatttttatgggtctttcctaattcaggggcttttttctgctgagtgccgatcctctgctgatggaatgcccttcttcctcttctcctcctcctcccattagcgtcctttccaaatgccgtccttgcctcgaccgttccctttgtgccaatttggcactgtgccattctctcgaaaatggcaaattccgttgcgaatgccctctcggcttccatggcactttctgtgaacatccaatggaaaattgcgacacaaaaaacgaagggagaaaatgcaaaaataaaacggcaacgcaatcatttgaactgattggagaaaaattgacagcagagagaaaaatgggggcagaacaacggggagaggagaaaaataataatgaagttatggaagaaaagaaagggagagtcgagagacaaaaggaagaggtaagagcgacagagaagaagagagatacagaggagtaagaaagagggcaaaaagaaggggtaagagagacagagagagaaagaaagagtaaaaagaaggggtaagagagacagagagagaaagaaagagtaaaaagaaggggtaagagagacagagagaaagaaagagagtaaaacgaaaacagggaggtggtaagaaaaggaaagagagaagagaaagagagacacatagcgatagaaagagagaaaggggagggagggagtgagaggaaggaaaaagaaaacagagaaaggagggggagagagagagagaggagagagagagagagggtaaaaataaggggtaagagagacagagaaagaaagagtaaaaagaaggggtaagagagacagagagaaagaaagagagtaaaaagaaaacagggaggtggtaagaaaaggaaagagagaagagaaagagagacacatagcgatagaaagagagaaaggggagggagggagtgagaggaaggaaaaagaaaacagagaaaggagggggagagagagagagaggagagagagagagagggtaaaaataaggggtaagagagacagagaaagaaagaaagagtaaaaagaaggggtaagagagacagagagaaagaaagagagtaaaaagaaaacagggaggtggtaagaaaaggaaagagagaagagaaagagagacacatagcgatagaaagagagaaaggggagggagggagtgagaggaaggaaaaagaaaacagagaaaggagggggagagagagagagggtaaaaagaaggggtaagagagacagagagagagaaaacagagatttaatctggaaaataactttaggataataatagtcaatttgaaatggaaaaattattcacggatgatgtcgaattgaccatgccgatgaaa

SEQ ID NO: 1923 - DNA, 1033 bp, Heterodera glycines
  unsure (1)..(1033): unsure at all n locations
atttcaaatactaaattataaaaaaaatatttttttttttcttttttgggcaaattcacttcgtttattttaattgaatctaagactttgtcggaaaattatttatatttttcaaaaaatttctaagaggagcctaggtgctagaaacgactaaacgatccaaaaaatgcgcggcaaagtgcttaaaccgcatccgctgatctctatgattccacttaagaaaaatgaaagacagaatgccattgcataaactaggtattaacttccgatcattttcctgctctgctaaggatgtaatataagcagcagtagaaaaagtaatcttaacaggatgctgcatagcagcccgtaattttttaatacttattttacccagaacccttgccttaacccaatttttaagttagtgaaccaagaaattcagctgtcaaagagcaaaaacagaaatccaaaatgcattcttgcccatggtttgtgagtcatctaatgagcctaccccagggtaattaatagggttgtaaattatatggactaaaaaacgccaaatatggacataaaatatggactaaaaaagcccgaaatatggactaaaaagctcaaaaatggccaaatatggaccaaaatatggactaaaaactgccaaaatataagttttaagcgctcaaaaaatccgaaaaatggatttatagtttttaaatgccaaattttatcaaattctagcttcacaattgaaaaccaaatacatttcaattttttggttaataatctcattctttgtcagcaaaatttttcggaagcgaagaaaaaaccaaaaaaattttccaaaattttggagaaattctcattttgggggtgtatttttaaaaattccccaaaaagtcgatctttatgagtgtatttttctctttttttgcatttttttgtggaaatttgctaaaaaggcaaaaatggcgaaatatggatttattncccgaaaccccccaaatatggnnattataaaaattgtgactctttattcagcgtgaactcaatt

SEQ ID NO: 1924 - DNA, 1579 bp, Heterodera glycines
  unsure (1)..(1579): unsure at all n locations
ttcccgtaaaaatcccgtcaggcaaaacagtatttttcttaattcccgcgccctcccgcgggacncccgttcccgccctactctaatttatatgaattcagttaatgccaaattggcaaattcgctaatttacttagaaaagggacatgtcaatgttgaatgaaattcttttcaatattaattaaatgataataatggcaaaaaatttttttttattattttttaaaatttattgtttaatttaatatatctttcaaaatgaaaaaattattgccattttcctttaagtatgaatatgaagaatcaaagcctaatttaagtaaacactaaatcaaaactcttttctgttcatcagctgacattgatacccgttgtcatacccaaagttaattttttgcaaatgcatattttttcctggattctacgtagtctaattagtaggaaaaacttctttttgtgtaattgagtataaaagcctggacttttatttgaatattttgggtttttaagcatattttagatttttctgcatattttgccattttttatatacattttaagattttttgcatattttgccattttcgtcaaatattttctgatttgaaaactcctttaggaaaaatttgattatgccaaaaaagtgagcttcgctgccgaaaaccttgagaaatttttggtttgcaattgtaaaaacaaccgataaaatttatgaagaataaaatttctaattaatttgcccctaattttcaagttttttatgcatattttgtgcatatttaacgactttatttgcatgtttatgcgcatatattggccatttttcgtgcatatttatggcattctgtcttataataaataaaaaattaataatagaaaaacttttttaaattttataaaattcgtataaatttcgtaatataaaatatgttttatttttgagagagagaattttaaaatttacttagctgtaatccttctgagattttacgaaaattttctgaactttaaaaatcgccagctcatatgattcattttttatttctgctatgcttattttataattttgataaatcttttggcgaaaaatccataataaattctcagcaaaattctaatgtaatattttaatataatttcaaattttaatgaatataattacgtgattccgttgtcaaaaagtttttaattaaaatttcattttgggatgccaataattagggaccgttaatcaggtgcatttatattatatttttccgtccatcataaaagttcctcagggaattatgaaagtaaagcacggattaatgcagaacacgatttggaaaattttgccatcgtaaatacgaaaaatttgaaaaaacacatgaaaaaataacataaattttaaattcatacaatttttctaaaatttcctcttaattgccaaaatgtggactaaaaaacgtagaatggcaaattatggatttattctacataatatgaattttttataaattataaaatatttaatgaaaaaaaaactgccgttttcgcattttagttccaacaaattccgtccgatgtgttgtaagttttg

SEQ ID NO: 1925 - DNA, 2598 bp, Heterodera glycines
tcagaatttttgatcgacaaaatattgacttattcattgataaagtgatccgtgttaaacatatgaccacccaaaattaggggtggttgcactttttctgctcgcatatcggccaaagagaattaattgatacatatgtatgtgctagtcaccaaaaggggggttccaggttcgaatccgatgcatgttaacttcacaaagatgtttgcatccaaactggccaatgtctcatactttgaatcgttctctgaaaatgggaaatgacgggtctatacaatgttaatgatgttcaaaatccacgcaacactcactcggaacaaattgaaccccagcagcagcagcagtttgtgcaggtgacagtgccacgggtactcctccgaccattgtaaattgcgttggcggcggcggcagtgtttccccattctgctgaaaaaaagtgataatcattttgtgaaaagggtaattaattaaaaggctaattctgctgggtgtgtgggtgtggcatcaaaaactggcctttttcttacagcaaccgcagcattggctgaagatgatgaacacaacagcgctcacgagcatcaacagaagatgaacgggcagcagcaaaaagacagcggaggaattctgaaccccggacacaaattcgaacaaaaagtgtaaaaatttttttttttacaaaatccacatttatgcaaaaaatcacttcagaaagcacgaattaatgagcagagcccgtgacgattgggactcccacgggatttttatggggattcacggttcagattccattttttgcacagtgggatttttacgtgattcccagtcgcgctcccgtcaatttttcaaatcccaaatgacccaatcgccggagaacggacgttcggattaaaaactcagattaggacacccagtttttttttcaaaagtccacaaagacccccctaaaagctcggattaaaacttcaaaactcatttttcgcttttattttttattcgttttaatacatacagtaagtacagaggcatacaaaaatgacaacattggaatacagtaaatggaggcatacgatatagacaatgacatttgtaagcagtcacagcgttgaaaatggaaatctcatatacaatacgaataatatacacacaattacaaagtggcaaaatgtacatattttatcggtgaatcaatttctgccgaagtgattccctcggagcggctcgtcttggcttgcgggcgggcacatcaatgagcatggcgtcagacacggcgctccgcaaatcgctccatcatcggctgcacatagttgacgaagcagttgtgcgcaccgtacgtctgcgggaggagcatgtagacgagcacggccgtcttcagcagcagatacagcccgaacggcgcgatgaagtggtcgaccagcgagaagagggcgaaggcgcaccagtaggcgagccattgggtgtcgtccgctgaaaatgggattgggatattaattaaaatcaaaaattggaaaaattgactcacttttgctttgcgatcggatggtcatcacgctctggtagaacgggtaacttttgactgaaaaatgacaaaaattagtggaggcggtgaagacaaaaaaaaaggcgaaaacccaccgagcacattgctcacgaacatgttgtaagagccaaacagcaggtagaacgtcaacagggcgaccacggtgaagaacagctgaaaagcattgtaaaattagagcggggaatgtcttccccttcccttcctttacctgctcgcggtccatcccggtctgtcgctccacagtgtcgatgatcggatggtgcaactggtcgagcatctcccgcagcaccgggcgcacatccttgaagctgttgataggcgctgagcgtggctgaagacgtgtcggcgctggcggtggcacttcctgcgcttgcgttggcgcttccttggtcgtctccggcgctgctggtggtggcacttcctgcgcttgcgttggcgcttccttggtcgtctccggcgctgctggtggcggcacttctgacgcttgcgttggcgcttccttggtctccggcgctgctggtggcggcacttcctgcacttgcgttggcgcttccttggtcgtctccggcgctgctggtggcggcacttctgacgcttgcgttggcggttccttgggcgtctccggcgctgctggtggcggcacttctgacgcttgcgttggcgcttccttggtcgtctccggcgctgctggtggcggcacttcctgcgcttgtgttggcggttccttgggcgtctccggcgctgctggtggcggtggctcgtccgacatttggttgctgctcacttgtgcttgaagaattgtgcggcaagtagattaattgttgttgaagaaaaaatgggggaatgaaaatttagcgaatatttcgccaatttatatgcaatttttgtctcattttcgccagcaaaaactaatgtgaatataaagaggaaaggaattctacgaattttcattccctgcttcatatttaccttcatttttgccatcgccaccaattgggggcccgcgtaaatttctgagggatgtgtttttcgtttggttt

SEQ ID NO: 1926 - DNA, 2211 bp, Heterodera glycines
attttatttgtcttacaatggatcgaaaaaagatttaaattcttcaaaaatgtcgtgaacacaaatttttggatacaatgacagcgaaaacgaagggaattctgagcaccacgaataaaacgccaaaatgatggatgtgacgataattttgaagaagaatgcgccatcatcaacttcgaactcggaaaaacaaaagcgaggcatttgtctttggtctgaaggtgggaaatttgatagagaattatgaaaagttgtcaaaggttttcggtacacgcacgaaaaaaacgtccgatggaggtgcactgtgtgtgctgccatgcccgcgtgacaattgcggacaaaagtgacagcagcatgtccggttttctcggacaaaaagaacaatcatttgcctaagcccccgaaacaaaatgtttgggaggcatttaattcattagacaaagaagaatttaggcggaaattcgacggcaaaaaactcgagcgcgtgaaagccgaaccccgaatcaggacaaattgcggctggatggcgaggacatcgtgctatacgacagtcgcactgtcagaattggaacaaagaacgttgtgctcgtttttgggtgcgaacgggttgtctcattaggggccaaagacagaatttatatttaattttttagagtttggacatttgagcaaaaacagtgcaagatggcatttggacgggacaatgatgccgagattcacgatgtcattacggatcttggtctgcaggtcgaaggatacgcagaaaaattgaaggactacgaaaacatggaagattcaagcatggatgttgcttaaaattgttgaatcccaattttcaccctttttattcattcgctttttgaaatattcctttttcatgcaaattcgcggcgacatttcgacgcagcgacattatgacgcagcgacattttgatgggcagcgatttttgtctcattgtcgccagcaaaaactaatgtgtatataaagaggaaaggaatttctagaattttcattccctgcttcattattcacattcatttttaccatcgccaccaattgtgtgcacgcgtaatttctgaggcatgtgtttttgttttgttttttgccatttttctgattttattttaaaatgatcaatttcgccataatttgattgattttaatgcatatttaagaaaaaacttaaaatttctgttcgaattcgggtcctggtttcggagttggtcaaattcgagttcagattcattatcaacaccttctaaaatccccaaaaacttacctaaatagggttaaaaacaaaatgaactttatgaagaaactgccttgtattgcagtttaatgtccaatcgaattctacgagttcagactttttcttactttgccaaatcgtacatttttggtatcaatcgaaagtttgcaaccaaaacctgcgcttacaaaaacaaatcaaacatttatcttgaatatactcgaaaaaacagctaaatttcggattttctattgtaaatcttttcaatatttgcttttttcttttacgcataaattgctgagactttaaaccttcaactgatacaaaaagtgtaggcaaatgaaaaaagatatggcctgtaaaactgagaatggtttgattgaacgcgtaaactgcaatagagccaccctttcattgtgtcgccccaattgtgatcaaatgaaaaaggagaaacgagaccaaaatttctattcactgcattacattttcaaaattgcaattttttttttatatttcttcttaacttaggatccaattcactcaaaagctttaacataatgagcaacaacgaacgcaaccgtggtgacgcgaacgcggacaatgccgaacgacgcactgacggcgaacagatgaacaacgatgagcccgacaccgttgctactggaagaacaacgacaacccaagaggttttgaagggggcgaaacgggttggaaaaattgaaatcggtagttaatttaccgccctattttcgaaaaaataacggatttttttgggtcgctggctgataacgaagctaaaaataagccattccggtatactgcagattgtacccattttatctataagggattcggggtcgctgatcacaaatccggcacccattgaaaacaatttgaactccgggtccgaattctaacaaaaagtcgaatcttcaatttttaatgtttcgaatttttgctt

SEQ ID NO: 1927 - DNA, 2253 bp, Heterodera glycines
ctcttaaacatcaatcaatgtttccgtcaaaaagacatttgttgtctcatttagcaacagcagcagcagacggcggaggggacaatgcccgcccatggcagcacggaacaaacagatggaggaggtacattttctggtgtataagattgatatttgttgttgttaaaacaactctttcgaaaattcaaatttttcgaattgcattttttgctcaaatttgtttaaaaacacggaaatggactacaagtcatcatttggatccggagaccgaaattgttcaaatggataccggatgcgacctcgaaaaccccaggaaacctgttttcatgtcttttgaaaacaaaaaaaaaattttcaaaaacggagggcaccagttttattaaattttccagtcaatgatggtgtcatcccgaacgtgccgccagtgggtgccgaggacctcgctgcgcctttgccgggtataaaaaagtttttttggttcaatttcatttccaaagtttttttattttatcctctcgttcactctctctctctccttcactctcattttttttgttttgatactctcttcctccctttcctccccccccccccgcacgcatcgattcccccaaggaattttttttcaaatttacaaacacatttataagaaaaaatttttgatacgaaaattccaagaaaaaaatttcgataattttttcatttttttaatttgaaaaatctttaaaaaatttttattagaattttattatcaattgggacgacagggagggcgaaacgcagtgcaccccattttcctccgtcctgttcaccccaaccgtttctctttctttagagtgcagctggaccgggacctaaacacggacaactgagtaccgagctcccggttttgaaaattttgaccgggaccggggaattcacagccggctttcccagccaaaaagccccgggttttcaagccgaaaagtccaggttccgctgcgctctactttcattttctctctctctctccttcgccatcttctctcttttttctcctctatttctccctgtcctttcccccctgccgtttttctcgctctctccttcgctctctctcactctcctttactctctttccatcgctctctttctccttcgttctattctttctctattttattctctccctttcctttccccctacccatcgctaaaaatcttcgaaactttttttttacaagtaatttttttatgaaaattttctcaaaattttatgaccaattacaaaaaatctaaaataataaacttattctttacgcctaggacgctttgctgttttggggcgattaattcgccaatgtgacgactacattaactatcttcgcgtgctcgccaacttgatggacgaattgcgctgggagggagcaaattcggtgccgggcgcgtccgatgttctgctcatcccgctgaattgcgtgacgatgatccgaatgtgcctcattgttttccgtgcaacgcttagtttggtgatggagccggtgacatttgcgatgctctctttcacctctgtatatgtgtcttattcgtgttttggcatgtgtcaccagatcactatttatttctttatcgtatttttttgtatttcattcttccatctcatgccattgtactatcacttttttggctaatttgtaatgtttgtttgtttttgtgctaggtcaaacctaaattatcaatggagcgaaataaaaaaaagtatcaatggtaataatatttaaattattaatatttaaatataattattattttaattttatttacatattgagctggagacacttggagctatcagattaaatcatttatttcattgaaatcaataggggatggaaattttattatgaaaaatcgcaaaacatatacataaatatgtaaaaaaaagcccatatattaaaaaaatgtacaaaactcctcatctatgaacagaataagtaaataaaatttctttatattttttggtgaaaaaattcttgaaaaaagttatgaagcaaaaaatgccgtaaaactttctaaatcggtttttaagggtcagagtgtttttcgcattgacctttttaattctccgccatttcaacaaattgtatcggggatttcgttgccgattcccgatttttctcacccgggatcgggacgaacaaaaaaaaataaagaaaaatttgttttaagttttttaaagtaaatattaaattctggtcagaaatagctgattta

SEQ ID NO: 1928 - DNA, 1562 bp, Heterodera glycines
tttttacgtattgtttttagacgtaataataataaggctgttatacccgggtataacgaacttcttcaactctttaaacaagaatcccttttaaaacgcagaacaaaaatcgatttaaaacttttccatgatataattttgggaaagatccatattcagcataatgattctttttcaaaaatatattcatgactgaaaaacgattatattataaaaaccgcttattgttcaaccaatgttcggtttcattcgttttttattcgtacctctcgcctctataggagtttgcctaaagaggcgaggttacttaattctactgagtttgctaaacttcttgacacctatgatattgatgttttacttttgaaaccgccccatctcattcagtgaccaattttattttatttattttgttttaatgtcggtgtcacgcttttgcgtataaattgaattgaattgaattgaacgggcgggggaaggtggccgccggaaaattttctatatttcgttctgatttgttaacagattttctcccaaaaaattttaagaaacaggtgggggtaaggcgtgccggaaaaaaactttgtgcttttaatgcgattcggttacagattttgtccaaaaaattgtttaaattttgccaaaaatcttatttcttgataaaatagtgacattatgccataaatttcataaattttgagtttatttaagaaatcaacaaattttggtcgcccccccaaaaatcagaacatttctgacaaatcacagatgagaaccctgatttaaacacaatacagctatttaatattaaataataattttttccaattaatttttttcgttttatttgaaattcaaaaatgcaaatccaagctgatcgcgctcattggatgtgcttctattttgcattaattgcttatttcgaattattttaaatagttctgctctaattgatgtaaccgccaaatgaggaatgaattaataggctataaaattatttttttacgaatccttgctaattaatgtcattacgtgccaccattatttacctatcttttggcactttgctccattttgaatttcttcacaaagctggccatttctgtttgtttacactgcatttttgacagaattacatttcgtttagcagtgaaaagcgcttttattccacggtttgcaattggtaacaacacaaaataatgttttagattatcaaatttcgcggcaatttctccgacgtgattttcaacggctttgatcggctgattagaataatttctgagaaatattagaagattaaaatctgattttattttgggtttttctatagtaaaagcaatatccgattttctttaactacacaacattaattttcatagatttggtttaggattttgtattacattttatcatattataaatttgtatgatggctagataatcgctggctgtataatcgatattcaaattcagggcccttctcatcaccgaataatatggcttttcttcattttaatgacaattgttatttatttgtttgtttgtttttataagtttgtcat

SEQ ID NO: 1929 - DNA, 8090 bp, Heterodera glycines
  unsure (1)..(8090): unsure at all n locations
ttaacctagtagcggtcagtcattaagcgctcaaattatcacaagcgtgcgctcaaatggcccctgcgggcgctcatgtggtacgcgcgagtgctcaaatgacccggcgtcgcttccctcccgacagctgacgccctttcccttctccattaggctttggttttgcgaattatttatttttatttttaatttaatttattttttattaattaataaaaacccttcaataggtttaggttcacccccgcacccatctaataggctttggttcactcccacacccattcaataggttttggttaaccaataggctttggtttggaacggtggttttccaagggccaaaaagggggtagtaactactaattttattgtctttttcaactgcataaaataaagaattttttcttaaaatcaatttttttaccatcactattttgtttaaattctaaatttataatattcattaaattaaattaatttttatattatagaaaaatgtttattcgaaatatgatttttattgaccatctaatgtcgagattattaaaaattattacaatagatggaaattttacaagttaccgaggtggttgatagtttaactatatatatataggttaatgtattttgataataaattaattagtgtataaaagtgttgtaatgtattcattaaatatctgtatgtctaattattgcaagttttttgtgtaatgttaattaagaaacaataatcactaaatgtaggaaaatgacaattctttgaccaatatgtttttacagaggaattttatgacgagggttagaaatcttattaattaattatgacaaattacaaagaatgttttgtagtgatgtatgatatgggggttaattgttgtgacaatttatgaaccaattatttttgattgaagtgttttatatagggatttttttatagtatgtgtgatgtttttaaaacttatgtgattaattatttcaaattaccgagaatgacttgtaatatttttattagttgtaaaagaattctaattaataatgagtcgtaaattattttgtataatatagctaaaaatcaattaatcatttcaaaggcggaacaatgtttggtgagatggttttacaattatttagtatggataagtattatgataaattactaagattttttggtagtgtatgtatgatatctgtattaattgtaattataaccaattattctttaatttttacaaactgaatatttctagggcaaagaagggttatgatgaaacttaaattatgtgtcacatttttgttgtaattcaatgaaacagaatacttgaagctgagacaaaggaaatgatgaacactaaatgagtatgataattgttgacagattaacttagttatggtattgatggctaggaaatatggcaattaattctaaaatatctgaaaaagaatgcaacttttcgggtagcgataaaccttttttaagtaagtaactaattattacagccacaaggattttagaaatgtataaaaacaaggaaaataataaaaggtgaattttcggtagccaatactcggctctccggtagtcagtacctaattaagctcggccctccggtcaccaatacctcataaggttcggctctccggtagccaatacctaattaaacttggcccgccagtaaccaatacctcgtaaggctctgacaccgaacactgaaaacttcattcttttgactatgaatttttatttttatgcaaattgttatcctcgtggtctaaaatttatatgagaataaaatatacctttcctattgatttggcaaaacgcataggatggaaaagggagtgggtaaactgagtttgcgatggtaaagagcaataatgaccgaatatgtgttggagcaagggcagagctgaggaaaccaaataagtgaaggagaggggggtgaggtcacggcgtcatcttatcctgtaaatcgatttctctaaaatgaacaaatggaaagaggctaacgtcaactgcttgcttaacaaaatccaatatttaagatatttttggtattgggttaagtttatttgaatattttccttttctccgtaatgtattttctctactcttatatctgcttactttcactgttatttcagacctacatattgtctaaataatcgtttccgttagctatttttcaatatcttttcttccaacactatgttttattctcgaaccgttatcttccaagtgttcgtattcttgttctttatcaaactattctcttccctatacattacctaatgtttgcttactaactcacattaaattctcactatttaatattgactctcttcaaccacatttctgagttctctatctctatctcttacacccattattaattgtccttgattctatggtgcactacaatattcttatatgatttcttcatttattcctattacaagacctgcttcacgcatacaattagcccttatctaccctttctcgtcacatacagtcagtcagctgtttgtcaaacctactttctattctcggttcaatcttagattcaaaattgtctatttctcttgtttcctttgaatattacttattcaatggaattgtaaatgttccttattataattagaattattttacgttgaattaggcaaggagcattgtttgtgtttatgattaaaattaacgagttttatataagttaataaatattatgcagaactttcaaacacacttatcctcaccctcgaaaaaacatacaatacacacacataagcacacgcatagacacgcacacacgcgcacatgcttacatacgcataaacacgcactgcatacatacgcatacacacacacacacacacacacacgcacacttacacatatacacatgcacacacaccccatgtgtgtaatttttacacatttttgagtaattccttcatttaatcattatttttcttaatttttgttaaattgtatcttctattccttaataatttacaaattgtgtcttctttctcttaattctgcatatttctacctaaaaatgacgttcccaaatgcttaataatttacaaattgtaacttccattgcttaattctgcatgcatgttcactccttaattatgcacttttctacctaaaaacgacatgctcgtgcattttttaaaattgtatcttctattccttactttttatcaaattttaccatcgatccgcttaataatatattttctttaatttagcaaatactatcttcgttagcttaattatgcattttctacgtaaaatcacattcccaaatgataaattattttcatattgtatcttccaatcattaattattcatgtattttattaaaacgtgaataaaatgacaaaattacacaatttgaggtataaaatagagaaataaaaggggtacatgtatgtgtacgtgtgtatggggtatatgtttatgcgtgtggaagagagatacaataaatggtgaacaaaatacaaaagggtacatatgtgtatgtgtgagagagatacaatgattggtgaagaaggtattacaatgtgtgctgacaaaatagttacaatgaatggtgaaaagacattataatgggtgagcaattacaaagtgtgtccaaaattgagaacattataatcggctcctacaatacccttcccaatataaggctgataacatttttgcatagagcttgatattacagatccaccatcacgaatattgggtctaataaagtttgggtatattacattaattggttcaatctctcctgtttgagcataacgtttgacttgctgtttttatatctaaagccttggttgttgatcacatcataattgagtgtcaatccacggagtttaagcacgtattccatttccgcatcatgtagaacatttatacgtcttaaagccaacgcatactattttgcaccagcagtgcagaattcttcgatttccatcaattaactgcttatagtgtcgatcttattcagctaaaaagcatcgcgtagatgtgagaaaacaagactatccgtgtcggtggagagtacttaacgccccggctatatcatcatttctgaatagttttattacccactttttttattttcgtaggtaatcaaaacatgatacacctttcaatcctcgatggccattacgtctattgaacgattatcccaaatattctccaaaatcgagtacatcattattgaagtaaagtctgttaaaggctgtaatttcgtaaagaaatatgtcgcacaaattgttcaagcatagtttaacaatcctactcttcttggttcacagctatctttgttgggttaagatctctaatttctctttgcactctcttacaaattcagcttccttctcaccatttccttttatgtcagtatcaattggtaaatgggtaaccttcttcaaccgtagtaacattaatttcgattgaaatgcagattgctcagccatctcattgtttgtgtttgcatatgtatttacgtctatcctgcctttttgattgtttttggtgcacttcataaataaagagaatcagagcctaccattcactttgacgggcaaaacagaatatctaattttctaaaggaatcacccaaactttgagtattgtcaaggggtagtgtttatcttccgggtatttaactcgacttattcattcagcacatgtacattggtttaccaatcgagtagtgtgtagtaaaattaacgaaggggtagagagaaatgaagtcacatagaaatttttcattccgtcttcaaatccgctcatttatttgttgctcattaacattttcgcgatctcgcagcctaatacacttacaactggatggacaacttgacttcgtataaattcataacgttttacattcctctcccgcactttatcagttatttttttcaattagacattaatatacatcttctaggtagcgctaattgcaggtatgctaaacatatccgcttacttctattgcagttctctctgtttccaactattcatccacagaataatgatcaatttgccaagtgttcagttgaaaagttattgatctagaaatatcgcaaacaggccttatactagtcatacattcctttagtacatcaatgggtactaaaagacgctgccttccttaataatgccttagttcctttgagacatcaaataattccctcctaaacgataccagcgctgtcattaaaattttcaatgtcattacattttttctcattaatcgcctctgtaaatacaaattttccagttgagaagatagttgtggtagaatttgtacctagacccttcattatatttgaaagatttatgtggttgtttttagtggatggggatattaaataaattgaggagaaaagttttactatttattgtcagtaacaccataaattgaatttaattttaggtataatttacttaattttaatcaatactattgtatttattatttttattatattttaatacaactttaatttaattttttaatttagttttatttatttttatttttatttaacatttattttcttttaattttaatcttatttttatttttattttactttttatttgaattaatttgaattttattttactttatttattattcagttaatttaaaggagttgttcataacctctatccaataaaggctatttcgccgatcagcacggcataaaaggtactttaaccgtgcaccgtttagcattgtatgatatcctcactattttcaatatttttacttgttttaattgtttatttctttgaaatttctattaatattttacttttgtagtgtttaatgcaatcaaagaacattttaacttgaaatttttaacaaaatgaacttaataaaatattagtagttaattattgtaaaatataatttattaataaataagtttaattcatttattaaaatctaaaaataatgataagaatatatgtatacttcatattatatatcattttattaattaatttttcaatataaaatttctttcttccatcattataatgtttttgcttagcaataagtaaaaaattccatatatgcacgctacccctctccgcctcccatctgatatgaaattcttaacgcttttttcttaattattattatttttttcatttatttccttatttttaactatcatcaccattattattattttactaaatttattttaatatttattttttctacaactcttcatctcttcattaggcttgggttatgatgacacaagtaccatttgccacccctccagtcgccacatgtcaccacacccctcaaataagttttgggttatacgaccaccatttggcaggttgccaactaaattgttcatgctatgccacactacactaaaatgagtcgccgtatgaccaacattttatgccatccacggtcagtcattagcgcttaaatgaccaccagtgggcgctcagatagcccatgcgggcgcttaggtgacacgtgcgagcgctcagatggcctggcatcccttccctccccaaaggccacgacagctgatgtccgtccctccaatacgatttgactttaataattatttaattaattaattttatattttttcatttatttttaaatttttatctattattttaattttattttaatttatttaatttacctaattttaatttattttattttatttttaatttaatttgaatttatttaatttaattttaattaatttattattattattatttatatttttgtgtggtattagagagagcaagagaaaagagagagagtgagagagaagagagaatgagagagagagagagagaaagaaaaaagagagagagtgagagagagagagagataagagagagaaagaaaaaagagagagagtgagagagagataagagagagtgagagagagagaaaagaaagaaagagagtgagagagagaaagaaaagagagagagagaaagagagagagataagagagagtgagagagaaagaaaagaaagaaagagagtgagagagagaaaaaaaagagagagagagaaagaaaagagagagagaaaagagagatataagagagagaaagaaaaaagaaagagagtgagagagagagagtgagataagagagaatgagagagagagagaaagaaaagagagagagagagaaaagagagatataagagagagaaagaaaaaagagagagagtgagagagagagataagagagagagtgagagagagaaagaaaagagagagagagagaaaagagagatataagagagagaaagaaaaaagagagagagtgagagagagagataagagagagagtgagagagagaaagaaaagaaagatagtgagagagagaatgaatcttagcttttttattcaattattttttaaattataaaaatttttttttaatttatttatttaatttatttataatttattatttaatttatttttaatttaatttattttttattaatcaataaaaaccttcaataggtttaggttcactcccgcacccatccaataggtttaggtttaaatcaataggttttagttttgggattgtttatttatttttatttttattatttatttatttttaatttaatttaattatttaaatttattattaatcaataaaaacccttcaatatttttacattcactcccacacccatccaataccctttaatttaaaccaatatactttaatttctaaccataattttccaacaactaaaatcacccttactaactacttataatcactttaaaatctccctcttcaaantaaataaaatctcaattcanttttcatacaaacctttttcatacnaccacaactttttacatataacttttttcttttccaaccaaatccaacattcttnttttcattcnatatccctatatatcctctattancctccaaaatttctaaaaatttcattaantttcaaaaaacttatttccataanaattcaaaaanccaaattttccaactttttt

SEQ ID NO: 1930 - DNA, 6191 bp, Heterodera glycines
  unsure (1)..(6191): unsure at all n locations
acacctcccacccacgcctcccccctccccncnttccccttccatgggggctattgttttgaaatagatgtgattttgctctttttaagctccaaaactgactccattttcgcaatgtgttgcgcctccttcgccgttctgaaccttcgcaccgctttgacctcttcaatttcctgaaaaacaaaatttttcagcgttttcctcgcattttttggacatttgagacaaaaataaaaatttgtttaaaatggcaataactttatagaatcaatgaatttgttactttttgttaattccccaggttaacaaaggcaccgccacctcaacggttggccacagtttgctaatgtccacccctccgcgcagtccgtagcggccaaaccgttcgcccatcgcccacttttcgcgctcaaattcgtactccaacggtggcattccgccctcggcaattatgcggtgccgtgggctcaaagtgcaaaaggaagtggtggccaatcggcgaaactgacggggacagaaatatctgagcagagacggctccattctctgcaaaaaacaaacaatgatcatggcaaaaagaaaaaaacacttaaaacagaaaacataagaaatgggagaaaaaaaacaacaaatgaatagaatgggggcggcaagaaagggaaagtggagaacggcacagaacacggacgaacccaacaaaacaaaattcaaaagtttatttggcgaatcgtaacgcaacataacaaaattgccaattacgaattagatgtctgacttccagggattccttttttatgtaagaaaaatcgcgaaatatgtaaataaaatatgtataaaaaatgttaaaatatgtgtgaaatatgtacaaaaactcccaaatatgtacgaaaatatgtaaataaatttttttttaacggttactttttttggaaaaattcttcgtaaagggtgaaataggcataaaatgcaataaaaatgacccaaataggcctagaatcacattttagtactttaaaaattaatttttggtatctgtttttgaaaaaattgattttttagaggtatatttctcaaaaaaaatctaaatttctataaattctcaaaatatgaaaaaatgtacgaaaaattgctaaattttggattttttggggcatttaataaaaatttccttaaaaaatcttcaaaaattgcaaaatatgtacgaaaaaatggcgaaaagtccaaaatatgtataaaaatatgtacatatgtaatatgtagaaaaatcccaaaatatgtaaataaaagtcccgatttttgttcgcaaacacaaaaaagaaagtgtttttcctactaattaggctatggagaatccaggaaaaatatgtatttacataaaaaaggaatccctgctgacttcaatgaaaagcagaatcacgaatatcgcgattgtcagcggaatagttatagttccaattgatttaagacaattttgtcgaaaaaaagaatgtaaacgatttaattgtataattcgttcagcaaataaaagcatatgttttaacattttaacagtgatttttcgttgttccgttttctgtgttaattaatggcggagggcgacaaagcactaaaatttgttatttgtgagaaaacggcataaaatgcccttcccacccaatgtcatcgtcgtaagcacggaagacgagaacattgcgtccgctttgtcgcccctgctgcccattctcgccaagtgcttccctttcccattcggtccattgccgtgcatttctcccaatcgctgccctttccataagccaccaatcgtgcctaatgttacgcagtgccaactgctcacgggtcagcccattctccaactcaaacggcacaacgcgacaataccaccgggcgacaaggataaagccgaccgaagtggtggcattcagaaatgccttaaacggaaaagtgccaatatataagaccataaaactggcacatttctgacagttttaagtgcctccatcgaaaatgcccttcccaacgcgcatctgagcactttcgggtgaccatcggcttgcgctgtgtgcagccatttgcacaccgcttgtccatcggttgccccggggcgatcgtcgggcggaaattgggggaaaaggccataacaaatggaaatcaatcggagattggcacagtcgcgcagaatggagggcgaaagacgcgagcgcaaatagcccaaattgttgttgactttgaagcgcatttcgacgatggccgcggcattcaaaaggggccaaatcgaagaggcaaaagcgtcgcagctgcggccctcaaccgaggaaaagctcagttccaaagtgacgccgccatttgtgtggaaaaggcgccgaatgcgacggagaaaggcaatgacagtgccgtcgatgtaactgaaaagcgatgccaaaaaatatggcaatttgaatcaacggtagcggagagacccgaggccaatgcgtccgaatccgaccacgccgttcggcagcggcacttgcggaattggcagcagtcgtttcactgctgccgttcgaccttcgccgcccttttggttgtgaattgcggcgccgtttttcccccggcaaatccccaaatttccaattggccattttctgcttcggaaatgcgtgtccgcaagcacatcgaagcggtcagagaccaacgccaatgccaagccgactttggcaggtgccaacaggcggcaacagtccaacaaaatatcgtcgcaaatgcaactggaaaaccatgtgaattaccaattggcattgattgggtgtttattaaaagggctcacatttgcttaaaaatgcgtcgcggatggtccaccattccaatcaacttattatgtataatcaattagaaaataaaatgacaaaaactgtaattgaatatttgaagcattaaaaatgcggagaatcaaaaacagaagggggaaaagggcgaagaaatgattcatttattcatcatttttaagcgccaacgcaaatacacaaaataaaattctaacaataagcaaaaactgtttcaaatgcatattattattattattattacaccgacaaatgacaaaaggggcgaagagaaaagtgaacgaacgatcactgggaaaagcgaaaacaaaaataaacagaaaagggaaagaattgagatatgactttgttgaggaggggaaaatgaatgaacaaatgcattgctaccctgggtaattagtcattaattaggtaattaataattattcattgcgttgaaaatacaacaatcattttgcacccatttcgttgtgcctaatcaatgtccgtccacccttttcagtcgtccatgctgtctctgcggaccttaaattgcatttatggcattcaatggacaattaattaataattaattaggtacatgggtttttaaacaattaagacatttgaatttttaagtgagtctttttcgtcttaacctaccacggggacggggaagccgtgcttcatgtcgtgcgatggccaatcgtaggtttcgttgatcagttcgccatattcaaccgaataaatttgtgagcggatgaacatttccttgtccgtcggctccgggtacagcttggccgtgccgtcctgcataaatttaaattgtcctgttcccatatgaatgccataaagacggaaatgtaagtgtacccgctcccaatcgttaggccaacccggcataaattaaatgtgttaacccaaaatataattcgaaacgggcctggggccaaacaatgtgccaaattttatgtttttccacttttctttataaatctcgtggcatccctctccactgttattggtggacagtttgctaatgtcgtggctgcaaattaatgaatgtctcacccggtaacactcttccgcaactctcatggcgattctgatggaaatctcccgaatttctttgagccggggaaacacgcgaccatcggccaaactcttttcggtcaccgactcggcgaccatctgaaagtaagaatttttgggttttgggtacaatttttgaaaaatttccaaaaaacgccttcgactttctttacaaacagaaaaccgaatatattttcttgaataaaatgttcacccgtgcagccataaggaacagtttgttgtcaatggtggacactttgaacagaatgacgccgagggcaatgccggggaaaatgtacgcgttgttgccctggcccggtttgtacactttgccacccaattcgacatttttgaacggactgccggaggcgaacagcgcggtgcccttcacacaaaagagttaaatatatgttaaattgcattgcattgacacggtttttcaaatttgtttccgaacactttgacagacctccccctgggctagagaaattgccaaattcaaattgtaaaaaaatgtgccaccgacattggtcactcggtaggcgtcctccgccgtgcattccgcctttgctggtcgggttggacaacgcgaaaatgatcggntcgtgcgttgtgctcggccattgtgcgaatgacgtcgtcggtgaatgcgccacggaccgtcgaagcgcggatgagcgcgccgggccgaaccgacagaacgacctcaagcagagactgcgagtcgggcaaattcttggcgaacggcaaatgcctgtggggtgaaatgaaaagtgacggctcgcaaatacaacaaaatcggagggatgtgaaaggaaatggggacatcccatccaattatagttcgacatttgaaaaaaacatggaattggattccttttcggagttcgaaattcggacccgaacctggatttcttgtacaaaaatccaggcccaggaaaaacccatcgagttccctctgccaatgaattgaccttggctcaatgtttttgcgctgtgtggtgatcagtccgtcgatgtccatcatgtaaatttggccacacgcctcctcaaaggacagtccctcactttgcatctggcgaacgcacatttccgccacgcccaacgcggcctaaacagaagggcaaaattttattttttatatttcgattcgaatgggggacaacaactggacagcccggaccagctttttgagtacaactccttttttaagttgtccgaatttgtccggtggcgcttttttccctttgcggcgatttaaaaaaacgcactccgccggcaccgaagaaaacgtatttggtgtcgcgcattctcagcttggtcactcgtgtgcacgcgagcagtccggcgacgaccactgaggcggtgccttggatgtcgtcgttgaacctcaaaacgggggaacatcaaaaggagggggaggggggggggataattaaaaaaacaaattttaagaattttcatttttccagcggtataaaagggatttttagctataattttgagacttccagtactagcttaaaataacagataatgtgccgatcgttttttcaattgtaaaatgccatttgtccccaaaatgccgcacatgcaatattcgtcttggtatcgctcgagcaatcggtaggcgtttttattgccaaaatcctcgaattggaccagcacattctgtccgtatctgaaaaatgaatcaacggggaaaagacatatggaaaagttttttatgagtgtttcaagaaaaaataagttccattaaaaaatattttctatgtatattcttgcgaattggtaggcctaggaacgaaaatgtttaatgttagaaaaattcaagaaattgtttttttgtaaaatttcactttattttttttttaattcggagggggggggaaagcattgcaccccttcttaaacagacggactttttcctgcacgcattcatgaaattgtcgatcagttggtcgtactcctcgccacggacacggttcctccgcaacccaatgtaaaacgggctgaaaatgtgcaaaaaatatatttcaattgtaaaaactttgaaaatacatgttcactcgtaaccctgaaaattaaatgttcttcgaaaatttactcgttgagcaacgattggttgtccgtgccaacgtcgatttgcacgggcaaacaccagctgggctgaatgccggccaacgccacgtacagcgccattttgcccacggggatgccaatgccgtaacagcccaagtcgcccaggccgaggacgcgctcaccgtccgtcacgacaatcgcctttagaggggggggggg

SEQ ID NO: 1931 - DNA, 1227 bp, Heterodera glycines
atagtagcaagggttatgaaagctcgttttaaaatgccaaatgcgcactttgggtttctgtagatgagcccatacttttgacatgcgagcccaaccgtcggagtgtaactgaaaatgacaggcaattttattaaattgggagtaaattccacccgaactctcacacaattggcatcagttccttgaggttttcgcacagcacgcggtaaaagagcttctcatttcgatcctgcaatatttgggaatcatttaatcaatttttttaaaatttgattgacttttattccgtctcccttttctgttgtacacaattattccgtagaaaattctcaaacatttccaagacgacaccaattgatattaacaaattctaaggcattactaaaatttgaaaaatcctaaaagacgatgcaaccctaaagtttttttgtctccccgccaaaaaactactatgtttttagcccccccccccccctctgaccacctgcagtccgtccagctgaatgtagcgggccaagtcgtccggctgtttgcgcagtttggtgatcactcggtactcctgctgctcgctggtcataaaggcgggcggcaaaaggccgtggacacccaaatattggcgttcgtacaaagtgaatgccattccctggaaatcacaacttcaaaaaatgtttgtttctgaagggatttcgacattttcccggttccgtgactcttgggggattaatgccaccaaaaagtcttcaaatggaattgctccacaattttagcggttcacacaaataaacggcgttttgttgccctttaaatcgtcgggcaaaagaacggagaaagtgtctgttttgcgcttttttcctgcccccttcccacacactttgttcagccccgggtttttgagcaggtcgacgccccggacgctgggcgtcaagcgctccggacgatacaatttgtagagacgcagctgctccgggtctaaaccaagcattattatgtcattttataatattattgcaccactcaaaatatcacaaataaaatatcggatcaccattcaaatcccattctttgtgctggctcgccgataaagaaaaagctctacagtaaaagcggacatttgaaaatttaaaaaaaagtgccagcaccttgatgaattaccaagggaaataggacgaactgcaattcgatacattacgaggaaacagactaaaaaatctgaaaaagttaatcttt

SEQ ID NO: 1932 - DNA, 958 bp, Heterodera glycines
ttaataaaaacgaaaaattggcaaaagaaaatatttaatttttaaaaatgacaattttcttttatttggcataggtaattccaatctttaagaatgttatttatattttttatttttgttatcgagaaaatattcaaaaaattgttttatttgtgtcagccctcccataatacatggaaaaaaattcatgtgcaattttggactcctaatgatttgatcgtttgattgctagcgtgcatcgatcattttcttctcgcgttgatctattaaagatttcatcagctttttgtggctattgtgtaagcaacggtggttcagtggtagaatgctcgcctgccacgcgggcggcccgggttcgattcccggccgttgcaatttctttttgctttcattttacaattttttgttgtctaattacccccccccccccttcttttctatgcaataatctcaaaaattctttttttttgagcttctttgggttgggtttttaagaggcaattaattcaatgagaatttttctagcaccaatccctaaaaagttacagacccggtactgaaattgccaaatacctttgggactggaccgtcctataaagaaaacgattcttctcggtctgtaaatgatgaattcgagagaatttttgtgtaaaaagtttacaaaagctattggttctcaaaaacgtttaacacttttttaaaccggttcagtcagaagaaaaattggaaaaaacccgccaaaaaaaaaatttaatttaaaatataatttttttgcattatgtagtttataattttaaaaaatttatttattttctgtgttttttgttgttcaattttcgtttcgcttgccaatgaaagggcaaaggcgcggcagcggaggaactgagccgagtgagggcggaagcatcgacaaaaatgggacggcgacggcgccgttttgtcctaacgcgcaatttgt

SEQ ID NO: 1933 - DNA, 3788 bp, Heterodera glycines
  unsure (1)..(3788): unsure at all n locations
ttacaattcgacgatttctgaaccaaaaattaaatggaaaatttcgtggcctccaaatttatgtccgcaaaaaaaaataagaatttgaaaaagtgctcataatcgccaagtcttgctctgtgatctttttttaaactttgccaaagtggaaataaaaaactattttcttctgattcccattttccacagattgtaatgcgtgcattgggcttagaaccgcgtcaggtggggaaacaaacaaagattttgccaattttcatttccttttaaattaaaaattttattttggctcagtttcaggccgaagttgacgaagtgacgcgaaaactgttgcaaaatgcgacggaacgacaggcgaacccaggcaaattttagaaattagccaatttccattcggtgatttgtgagaattaggcaaatttcgcgccacaaaatgcgatctgtttagattcgttcacggcttcggaattggccgatcttttggccgatcggctgaaggacagcgcggcggacggaggcgacagcgaattgcgcagtgtttttcgactgttcgacaccgacgcaaaagtaatttcagtgccgcttcgaatcactgaatttctctccatttattcccgggttttgctctttagggtttcatttcggtcgccgatttgcggcgggtggccgaagaattgggcgaacgtatcagtgaggaggagctgaaggtagaaaggacggggaacggacgcattttcgggaagggaccgccggagccgatttctaaacaccggaggcactttgggaatgggtaaccaatggcatttgaaaaaacggggataaaaaaaattatgtccccaaattactcatttcgttttgccaggaaatggtctccgtcgctgcgtcctcttcctcccccgttgggtccgaccgcgtctcagagaccgaattccgggccattatgaagaaaatatcgctttactaacggtggccacgggcggacgaacgaaagaattctcatcccttcccgatgatctctttttgcattattgtccccaatttttgacactttcctatatgaattaagaaagatacgaattttatggcccacacaaaattcgggcggtgcgccatggctgttcgggattacccttaaatccgacccgtactttgtgtgcgccttttaaaataaacccattcattgggagtgggatggagcagaggtcacactgtcttcattaccattttgcactataggcacaacaaaagaaacaaaaaacaaagaaatgagatggcctttatcacaatggctgggatttcgtcctctcgttgatcccttttttgttatttgcttatccttccatgtgctccttcgcgtcttgccaattaagtggcctcgagtcgggcgtaggcaccaaattgaccttttagggaaaggcattagggtaaacgcataaaaaggatatggacaaaagccgaaaagcgggccagtgttaattagtcatccaaatactaattgtaaaacctaaatttttggcctagcttatgtacgagttgccaggctatggattttcttgtccccattatttctggttacggttaattcttacgtagggagccacaaattttgtctgaactcgataaaatttttttttaataagaaaattcaaaaacattgttactaatataaaatttttcaaaaaatcattgaaaactttttaatgcaacccgacaaggcattcattccaccgtcccccattctcacctcgtatttgactgtgtttttgacgggcacaagtcgtaccgacacaatgctcatcatgcgcaccgtttgccgctgttcctcctcgctgctgctcacccacgtgggcacgtccaactgcgcgtccggcgcaattacggcgccctcctggtcgccaatctctgctggaagttcgtccacctgtgacatggcgagggagaaggagtgtaatgtgcgaaaatgcccttttaccgggaaaacgccctcaaaaaaacccgggaaatttcacgaattagaaatcgtcgtaataatcgaacctccattcggtcgtcctcctcctcttcttcttcgtcgttgtccgcttggtcctcgttcccattttccattgcttctgttgcgtctccgcctttgtttttgccactgtccgtctccgtcccgtcgttgtcattcgccagcagcagcaccaaagtgagcggtccttcactgtccaacttgccgtagtaagtgcgcaccaccgccttttgccgctttaagaaaagaaaacacggtcggatgaattgtccatcttggcaagggcaagccggggcgactgattgagagcgggctttataaccccattttcaaaaaaccgaaattttaacggaaaaagagggttaccaccaacattttatgggaattatccgagtttgtacaccaaatggtccggaggaaagatgtgtaagcaagcaccttcaaataaacgcgtttgatgattgcgtatttgagcaacagcacatcaaagcagccgtcataaatgcccatcacaatgccaagcgcttcgaaatggccctcggagccctgaaaatgccacacttttggcattaaatctatttccattccgtttttcttcacgcacccgcacaatggcgccgaagaaaatttcgccgctcaattcgctgcacactttggcgcccgttttggtgctgttggcacggcccgcgattttgtccacttgttccgtggaatagtcgggcgacgcggcgtagccgaggcaggcggccaacaatcggtggacgaccacgtcggggtaacgacgaatgggcgacgtgaaatgtgtgtaactgaacagagaaatggtggcatttttgaagaggtattggcacaaaaacaaaattttaagggggaggggggtaaacccatcaatggctatgtcttcgggtttgtccgtaagaaacccaattttccatgttaaactaccgaacttacaaatcgacgctgagtgcgtagtgccgaaactcgcgctccgactccaccagaccggtgcaaaagtactgggccaagtgcatgcacttcatcagcatttggttcagcgccggaatcacgccgtacctgtgacagaaagcaggtataaaactaatgaattgggtgcatatttggtaattttctcgccctgtccttgaaaaagtgcactcccaagattcatcagtctcccatttactccatgcccggatcttataatttattcacctgtactcctcccggtgctcgtacactttcaacgagtcggccaacgttttggagctaattgaattgattttgatgccgaggagggcgcatttgtccaccttaattgaacgaatattggcaaatgttctccgactttttgtaggtttcctctaccaaattcttcatttccctcttcttcggcggaggatgccgacgcagcagtgccgntttnttgntnncggcgtgtttttttcgtgccncgcgcgttttggcgctgtnttggccttttgcgttnttcttnncgnggggtnnngcctttntntnncgctcngcnccgtgtcntcttccnccngcnagttggcccctttgcgctgntcnctgtgtgntgccgnntggnttnttgggnnttgnggttgtcgnnnctgtntgttggtgttccctcttngccttttgtgtttnnttntgtgccttcttcgtcccgtcgtgtgccgcgcggttgccccttgccggtgctcgtcttctccncgtctnggcgctgtttgggcggttcccgcttcngtgctcctttgcctcncctgttttt

SEQ ID NO: 1934 - DNA, 1769 bp, Heterodera glycines
  unsure (1)..(1769): unsure at all n locations
tgacagaaagcaggtataaaactcatgaattgggtgatatttggtaattttctcgcccagttccttgaaaagtgcactcccaagattcatcagtctcccatttactccatgcccgaatcttataatttattcacctgtactcctcccggtgctcgtacactttcaacgagtcggccaacgttttggagctaattgaattgattttgatgccgaggagggcgcatttgtccaccttaattgaacgaatattggcaaatgttctccgactttttgtaggtttcctctaccaaattcttcatttccctcttcttcggcggaggatgccgacgcagcagtgccgatttattgaaaaaggcgtgtattttacgtgccacgcacatattggcactgaaatggcatttagcgaaattcaaaaagaggggaaaagcatttataaaacgcacagcaacatgaactcttccaccagaaagttggcacctttgcgctgaaaaatgagtaatgaagaatggattattgggaattgagattgtcgaaaatgaatattggtgttccctcaaagcaatttgagttaaaaaatgtgccaacttcgtccagtcgaatgccgcgcggttgccaaatgccggtgctcgacttctccacgtcaaagcgcagtttgggcaattccaacttcagtgctcctttgccaaacctattttttgtaaaaatggaataaattttgcaaaaaatgcaattaaatggatttgaaagagccaaaaattattattttttgtacataagccacatttagcaataagtaattggcttaagcctaccgttttgtcttcaatttgcgcgcaattaagtccaaattgcgcaccnccctgtttgatgtcacgaattttgcggtcacaatgaatgggcggcatttcggcgatggcgaattgtttcttcggattgtcgatgatgtcctggggaaaattatttcattgtaagtggaatggaatcaaacatttagacagacgggaagaggcaactttttggtttttgaaatcgcccttccctcaaaagcaaaacagagggtcgagactctcggggttgtccccaccgccccccttctttttgtaccgacttgggcatgttcgtaggccaatttggcacacgaacggatgacggaacggcaaaattcggtctccaaaatgttggcatcgttgtccatgtgccacacgacggaaaaggtcagccgatcaacgccagggttcagcgagcagagttcttcacaaagaattcggggcaacatcggaatcacctttaatagggaggaggagggaaattgaaggaaaacacggcaaagttatcccaaaaccagaaattgccgagaacgagaaatggcttttcgatcatttctaccaaaaataagaattccctcattttcaaaaattccccctcccctctggcccatcatttatttgtccttccatttcaaaattgactcgctccaggaacagtctcaggtaggattaacgggggttggggaagagtgacgaggaaaaagttgttttttttcgcaatttttcgggagtttttgtccttttcaaataaatttcatcccccttgggggtgtgaccgtctccaaacttccgcccccctttgcccacctgatgcaccaaatacacactggtgccccgcttgcacgcccaatcgtccagttcggtgcccttttgcagaaagtaggacacgtccgcgatgtagagagccacttcccaacattcggtgccgtcctcccngggtga

SEQ ID NO: 1935 - DNA, 8471 bp, Heterodera glycines
ctacgaggcattgctgataccgattagaatcatggaaatgggcctgatattgaaccccttttagtattgggacgaattactccccccccccctcattttcgctaaaagttaaaaaaaaaaattttttttgtagagtgttattattagtcaaggggtcggttgcttcatctccttgtcctttgtttcttcgtagttgtgtcataattggtgaaacgaaggtgaaggcatgattttctaagaaaattggaaattttcaaaacaaaaaaatttttcatggcattgtttaacaacgaaaacctcttcgtccttggtttgtgaaatatttttttccacatcgttcagttgtctgtcatgttgaacagtgcgcacaagttggagctggaggcgctctgtgccatttcggccaattatttgagcaccgtttatctggacaacaaattaatgccgctgaatgtcgccgtcgcttacccacacaactgtcaattcaacaacaacggtgatcaacaacagcaacagaaccatcaaaaagacttctcagaagacagcgattggagtgataataacggtgatcaacaacagcaacagaaccatcaaaaagacttctcagaagacagcgattggagtgataataacgacgacgaagacgatgattttggaagtgattggtcgtgattgtctattttcttttattattcctgtgattttttaattggtaaatttatataaattatgctttctttattttatttttttcatccgtcccattcatggcacatttctccacaacaattattgctttttcaattattttttgctttttatgtaaaattttgccatttattttattgtactcttctttttttgtgtgctattgatttcaaatgtcacgtgtgtttgccacacaaagtcgctttctgcggcacattttgccggatggacaacaacaacagcaggaagatggtgatgatgatgttggctgccagcggatagaggaaggaatgtgcggcaccggtgggactccgctggcgaacatcgaccagcaacagccttttgcctggcgcaaaattggtacgctgtccaaaaaactggcagtggataagttccgctaattggggcctatttcagttccaaaaatgctatttttttcataatgacccatttaataaatttgaatgcattttcggcttttttatagtttaaacgacaccacaatttaatacttcgcaacttttttatagaatcacccaaatcaatcatttctgatctccattttcagtagttcggagtaatccgttgagcggtggcgactgttcgtccggttcggccagcattgacatgggcaacacccgggtgatgtgcacagtgtacgtaattgtcactaattatcaaaaaaaaacttggaaaatttactttttattgcacggatcggtgggggagaaaaatgcgattggcctagcataaaccagctccacttttgcaggaatgggccgcgtgaactgcagcaacagtcggtgtccagctcggcggacgcggccgcctccatggaggagggtgtgctgtgcgtcacactgcgcggctgtgacattgacgcatcgctgcgctacagtgtcgagcgcgcactgcaggcggcggtctgtctgcgcaaattggcacgggtcagtggcccggcatcaaattttgtgacaaaattcatcaattttttgggtgaatttttatagaaattgtccccctataatttagaccgaaactgcgattgagctgaatgtgctgtcggatgatggcggcgcatttgccgcctgtttggtcgccgccggtgtcgcaattgcgtcggctaacattgaaatgtaataattcccaatacttcttcgacatttacgaatccggaatagttccccctccccctcgaccatcctattcagaaaaccatttgttttatgtgccaggatggaattcaaacgcccaaaaatttttctggattttctgaaatccgatgctccaaatttttaagtttcaccggaattacgaccctaaaaatgttggaaaatctatttcatctctgataaggatagcaaaatccacaaatcttgggacactatcaagttgaatatgtttattaatcaaatctttttaaaggctcgacgttctgttggcttgtaatgtgttgctgattccgtccaattcgttgacggcaccgcttcgaattgtgttcgacccggacaaggccacaattgctgcacacgttggcaaagcatccgccctaacaatgggcgtcataccaaccattggccaggcaaataattcaatttttggcatttttaaaaattgtttttgtacgaaatatcgattaaaatcatttgcgggcacgcgggtttgaaccaccactgtttgtggtgtagtggtctatactctgggttcctcgttgtgccagcgtgggttcgagttcgcgtgtctgccaatgatttattttttgctcgtctaatggatccaaataccggattcctaattagacaaaattaatgcgaatttgtgattgatatgttaatcccatctaaaaaaaatttctgttttaatccaaaaaagaataccccccaaagaaaaggaatatgaattttatcgtctacattcgattacagccatcccagccattttataaatataaatttcgtccttttccacaggtggtctgtgccgaactgagtggcgacgcgtgtccgttgcccgcccatcagttgcgcggtgcgctttccgacgtgtacgagcactgtttgacactgtacggcacagtgcgagcggcactgttaaaaagcgtcaccgagggggcactttgacgggcaaaataaaaatcactttgttgttgttttttgtttttgtatattttttcttttattatctgttatttttgacatggaattccgacaaaactcattgacggatctcgtcgaataaaaataaaatgttggcgattggcacagccaccaaataaattttgtgtggcatttgtcgttgaacattcaattaattacctaattatttatttattttgttgtgtccattacatttctgtttgttatttgtttgtatattatacattgaaattgcgatggacactttgtttgacgtgcgaaacaacttttatttgggcgctttccaacaatgcatcaacgaagcacaggtttttgttttataatggggggaaaaggccgatttatagggaccgaaaaacgaaaaaatggtgttggaatgtgcaaaaaattggtcacaaaaatgtgttccttgtgacccatgttttaaattcagtaattcatatggtaaagtgcaatatcctgtcccgccctcttttttcactcaaatttgatgaaaatcattcattttaaactcatttttggttgcatggtttacatttttttacaaaagtatgattttacacttcagaaggtcaaatgcaagtcggaagaggagaaggagctcaaggacgcgttcatgtaccgcgcttacattggcctgaacaaatgttccgtgccgttgggcgaaattgacgccaccgatggcaatgggtcggccgcccttatggcaatccgacggttcgccacgtttatgagcggtgcgccggagaagaggtcgtttagggaattaagtggggttttccaattgtttagtaaggggtccgtcccctgttttttttttttttggatttccgtttcaattgtggcattttaatttaggtcagagattgttgaccaggtggccaaagaatttgaaacgaaaaagtacgctgacaacgaaatttgcctgctgatcagcacactcattttcatgcacggagaagtacggttttcaaaaaatagggttccgactttcgactcgtttgcgccatatttctgtcgatttctttacgttttatctaacaagcagcaccaatttttgaaaaatcaattctcgactcgaaagtctcgaacctaattgcactctcgagcagtactcaatagacacaaaagcaaaggtaaaattgtcaattccgtcacagaaaattgaggaggcattgcgcgtgctgaaccgcacggcgtccgattcgttggagtgcgccgcgttgcgcgtccaatgtttgctgaagctgaacaggggcgacctggcggccaaggaggtgaagcgaatgcaggagatggacgaggatgccaccatcacgcagttggctcaggcgtggctgaacatggccatggcgagtgaccaccggggaaagggcggggcaaaaatggatcactttttttgtaaattaagtgatcgaagtggtaggatttaatggggttaggtggtccggtatcattgtaaataccataattcggtatgaaatgtgtactaccgagaaaaggaaatttcaacaacaaaaaaaaaatggaaaaattttctaacgcttttacagggtcgtgacaagctgaaggacgccttctacatttaccaggaaatgttggacaaatacggggccaccccactgctgctcacttcgcaggccgcctgtctgatcatgcaacaaaaatatgaggaggcggagaaattgctcttggtactacaaaaaaaaaaacactgaattttaactcaaacttgtcgagaaatttcgcaaatttttacataagcccacaaaattagcaattttaaatttgttctaggaaattttctaattaatagacaattgaaatttttacaacacgacagagtgcccaggagcgtgacccgaacaacgctgatgtgcttgtcggtctgtttgtggttgcacaatttcttggcaaaccgatggaggtgagttgaacccaccttccaggaagggattgatcagaaaaaccaaaggactaatttaataaaggggtcaggcggaagttggtggatgggagagcaagcagttcaagcatttaatcaatatttcaataagcgatcgttttttttttgaaaaaaaccatttttataattttttgacacctcgtccgtcgtcaaggtgtccaaccggtacatgaaccagctgaagcaggaccatcccgcacatgcgtggaccaaagaaatgttggcaaaggagacggagttcgaccgtttggccgtcgcgtgaaacatcgccatgggataattggaggatttttatatatccgtcaaaatggtagtataattgttatttttcgctgcggaaattacactttttttgccttccttcgaattaagcaattccccctaattaaccgttaattactactaatcgatggttttgtagagttcgggacattgacaaacggcaattgctgtcccatcattcatttactaattgtgatcggttttaacaaaattttttgaagataatttaatccatctgttttatacataattctgacacatacacaatttgttatttgcgtctcttctgtgtgcagttaatgaacgaaaaaaaggaataaaaaatataaagaaatttttgtttttaaataagcaataatttgtgtgtacaagtagtggaaacaaaccgaagtttaaagtcaatgattttgcgacagaacagataaaatatatcggacattcatttgcgacgcatttaatgaatgaacacggattagttaagaagatagaataatacaataggattttaatgtgtttgtattggtcataattatctactgatcgcgatcattaaatgaaatgatcagatcatttatgaaattgcacttaaagcggattacaaacacattaaattcagcaggaggaggagacaataaatatgtgtgtgatggtatttctttatgaaaatatatagcccgtgttatgtgtatgttggtcgtctccaaataataatgctcacggtttttttttttgatgagtgatggatgatgtcacaaacaaaacggacgaggaagaggaggggaaggagtgggagcagttcaacgaaccgctcggccaagtcaaatagaatagttttttgatgggccgatcattaaacacgcgctaattgatgtccaacggtgccggcatcgggttgggcaccaacgaggtgaagaaggactgcacaaccgtgaagaacacgttccatgcgctgggctggtgcggaacactggcgctggcggtcgatgttgtgtcctccgcttcagtcgccgccggtggtccgtccgcttccgtgttgttgtcatttggccgttgattttgttgcggaagcgcatgctgtggtggcaacacattggcaatggcaccattttcgtgtgccgcagcggcgttgtcccgctgctgctgttggttccgccgacggtggacaaaccaaaagaacgccacaacagcgaggacgaggaagaaactgcaaaatttttggaatgaaattatgggagtgagtgagaagaagagggggttaactgtgatgaaagagtcttaggcatgtgccatgaacaaataatgttggctttccaatacggcacataattttgagtattttacgaccggcttgggttcagttaagactagacatgtgtgacgaagcaaaacttgggaacatttcgctagccccccccccccgtttcttccgtatttataagaaattaaaagaaaaatttgtccaagaaatcgttgaaaatttttttcgttggccgtttgaaaatcgggctaaacgttttcccccaccctactatcaagttggtaccaccaaagcactactgtattgcatagcaaacactcaccgttccagtgacgcgtacacgtacaggaccatggccaacagtgcgaagcgcaccgacttgtacacaatgtccaacaaatccgcaccggcacctgccgcggccgccgcttcgccaacaccgccgccgcccaccattcgttgctgctgctgttgttgctgcaccatggccggtgcttcgtcagcgcgttgttgctgttgctgatgttggtgttgctggtgcggtacagccatcatcatcatgttgttgtggttttgttgggcctgaccaaaatgcggtggtggtggaaccattggcgtggcaaacagttgctggtggtggtggtgctgcacggttggtggcatttgtccgccaaaaaatgcgtaggcctaaaaagaggaatgcaaaagctcattgaaatgttgctaaataggaaagtttaaaagggtttgacattttgaaaaaggcctgaagctggacaaaaatccatgcatcaggaaaaaccaaggttacgatcagaaaagggaggggtggggggattgtcgcccaggccaaacctgttgctgctgttgtgccatatgtgcagcagaagtatagggctgctgttggtagaactgtgccgccgccatttggttcatgctaaagaacgaatattatttttgtttcgtaatggccaaatcgccaccaaacaaaaaaaattttttttttttttttttgcaaaatttaccccctgcaaactcactaattctgataggcgctcatccatgcctcgtaactttgctgctgtggcgggtggaaagtggcaaaatattgctgctgcaaaggcacattcgacgacgaattcggttgaccaccaccactaaaaagacggggagagtgaaaaagaagccaaattatgtaagtaaaagccctaagttttttgaaaaaattccatacttcaacagggacttgtggtgcttttttgtggattttccagaaaaatttcactcaattttttagtgaagagtgtcttggagggggtaacaaaaaaaaatattttttttttgatttttgtaggtgggttggttctgctcacccatggagttgaaattcaggcattttgggaccacagggttaagtttcaccagaaattttttttccatgtcttaaattccgcacttgttggtgccacggtggcgaagcccttcactggtcgcggcatttgcggttggggcgcccgcattgttttcccgtgacggggttgtgttggtcccagcggttgttgacgaactctttgcaccaatgcaaaccatgtggatcacctaatttgaggggatggattaggataattagctaattaatactactaaaattgctaatttaggtaattagcactagtaaaaatgctagtttttgcgtttagaatttcatttttgaacagttttgtattcgagatggaccatcaaaaattcacaccaccccatttttttttttgccttggactgaatgaatgacgtgtcatttacaataatttcgtgatttcgttccaataaataatcagttaaaaattaaccggattaatcagtccctttgataacagtatgtacatttgttgtgttttttttgagtagaactagacattttgaaaaaaagcctgacaatgaacctggcttcaatgttggacctggatttcctggataaaaatccaggcttgtcatggcctggaccttgatttttttttttgaatttgtttaaaaagcaattaacaaatatttgataaagtcaacgaattgcttaggaacatcaaaaaatgtcggtactttt

SEQ ID NO: 1936 - DNA, 4905 bp, Heterodera glycines
  unsure (1)..(4905): unsure at all n locations
aaatgtttttattaatttcctntaaattggaataaattattggtcacatgaaataacaaactatataaaatactatccaagaaatgctggacaaaaatgcaggtccaagaagaattttaggttgccgaaacaatcagataggaaaatcataaaaaaacaatttntaataataaaaagattgacaacacacaatgtgagctaacaataagtttttttgagcggcgaacggccttgaacatgacaaattgactaccatttatttctaactcaataaattaaaagtgtttgttgcacaattctcccccacgtgccgtcccattaaattgttgcgaaaccccaaaaaaagaggagggacactccaaccccgcccaatttggcacggtttgccatgccaaactaactaattttggcagattttcaaatttctcccctccccagaccttccaaaccaatgatgattaatgcgtcacctgtttctccgcaacttcgttgcgcacaattccgtcccggcgttgggccaacacttcgcgcaccttttgctcattgtccaaacaacggcccgcgtaaatcaaacgttggcgcgacgggtcgggctttgtgacgcattcctcggccaaatgagttttcagttggagcacactgaaattggtgtgatcaattagcatcaataattttggcacagtgttttatcttccggggcatttcccaaagactttttttggtcacagattttcatttttttttgtctgtttttaaaagttctgaacagtgaaaaacaggtttattcatgatgaacaaagttgaaaatcctaattttgtggggaaaaaaactcaaaaatttggacatgaatttacttccaatcagccggacattcaagagtgtggtcgggaaatgattgcatggcgcaacgaatggtcaattgaaaagttgcggcggtgccatcaattgtcgacattattttgctcggatagtattaatactgtgtctttatctcttaagattggattaatgaaatccgttaagtcattgaaatgaatgcatttactaaaactgacaaaatttgtcagaaataccatcacaaatgtcgtatatttcttaaaatagagccctcgggggctttatttttcaatccttcaaaaaatggagggggggggggctttattgcaggggagagaggctctaatttagggggggggcagtattttaattttattttaggactcgttaatcgcaaactcacaaattttgctgcactccttttatactattattacacttttcctgtacaaaacggtggatcattttgggtgtattaaagtattaattgcccggggtgttgatcagttttttgatcatttttaaacacaaatgaatgggggcggggggcagggaaatgcgacactttttggtcagcggtcggtttaataaaaactgacactgacagtaatcagtggctgacagtttgacagtccgtcagcctcccctctcttctttccttccttccgccacggttggtcggttctcctccctatttttgtaccctgtattttgggacggaaaaaacaaacaaaaaaaaatttctccacccctctcctaaagtattgatgaccttgaacagcaaagaatgcggacggacggaaaggtgggggggggggagccatgacatgaacaacaaaagattgattgaatggacagcttgaacaggtggttgctctggttggctgactgactggctgttgttgaacagaaccagccccgttttcaatgaccgggaaacacacaaaaacaaataaatacataaattaatttccgtctttaattttatgtatatgttttttattcgatgggtagcgatgaaatggatgaaaacgggagggagagacgaccatttgacgaaatagtgcaacgtatgcacacgaatagaaagaaaccaccacaaaatgggaggagggaggggaatgaatgaaaattatgtgtatgtgtagagctgacgtgttggaagaataagcattaagtgaagggaagggagggaaaattggtggaaggaatgaaaacagtgggaaaagcaatcgcagaaactcacaatcaaatcatttatttgtcagcagccgaaggaggagggtaatccaacgctgacgtggcgctgattgtgcctctattagtatttctttgctggtgctgtgattgattatcccagggcaaattgatttcagataatattgtcgtcatgtcatgtcatgcacacaaaattgaaaatttgtaaccctaagctatgagtcatcgcaaaaaaatttttttgggctttttttgattttccgtgtaagtgtaacaaatgttaaataaacgacgactactaatttggaaatgattatgattacgttgcattaggcaattaaagagttttagcaattgaaaatgcaggattaactaattgtttgttggatgaatttttcattatgtaattaaattttggtgtcaaacattttttgagttttcggtttacaaatttcacaaaatctcatttgtttcagtgtttcaaagtggtgacagatttaaaaattctggatgaagatgcaaccgaactaagattaggatatatatacatacagaattaaatctatttgcttaaattttaatcaaaattctggatcagaaatcctagtaaatccgttccatcttttctctgtctgtgatatctttagtttcaactttcaacccaaataaaacatatttattcttttgatttcatatgcattttaatcaaaatcgcatttctattctattccattgcaggaattaaaacactacttcattttgttttaaaaatctgtcaattttctccaaaaaatgggcgattttggcgagtggtatcgttccattccgttaatcaccagatattggttcaccggatcaacagtgatcccattgttgggccgactgggcattttccagtgagtttttgttttcgttttattacttttaatttgcatttttcttttcagtccgtatttgatgttgctcagttgggagctgttcttctacaaattgcaggtgattgtcaaaatttgataaaatcatttggcgatgggtcaggcaaggggtcggacagattgaaaaatgagtcccattttgcgattgaattttataaatatttttcattcaaatgcctctataatctggccatccattcagaaggagtttttcactttttcattaaaaacttatggccatcgaggggggggggggcataattttctttaaatatccccggaaaatgggatttttccaggaattccggtcccgttcatttcaaattctgattttgtgattttgaaaaaatcgtgtccatggctgctttagcaagacaaaaatcccatttacttttcccagtctggtcccctcccattgcctaaaaaatggacaaattccctggtccgattctcgcttttcccagttttgactcctgtttttaaaactcaaaatccaaagattgttttacatttgccccctgccaatctctccccatcttttcagttatggcgtcctctcagcgcactgttctactacccggtcaccccacagacgggcttccactggatgttgatgtgttatttcctgtacaattactctaaagatttggagaccagtcaatttgatggacggccagccgactttttgtttatgctgattttcaattggatttgttgcacggtttgtgaaacaatttttgtgtaaagcagagcacccgccaatttgggtgtctaaaaatgacaatttagaaaccggaattaccggaaattcgttagcctttacaaaaaaccatgacatattttttgggtttttttggtacactaaattacgatattttttcaaaatacggcgtttcaattccgtccatccgtttcaattggccttttttcaacctaaaaacaaatttttttttttttttgcgtcgaatcaaaattgattttaaagaggcattttataaatgtagtcatctttcacagattgtgtgtttcgttgccgaaatttacttcttgctcgaaccgatggtgctcagtgttctgtacgtgtggtgtcagttcaacaaggaccggactgttcagttttggttcggcatgcagttcaaggtttgcacagtggacggtccaaagtttttttggccatttaagagtggattttgatgtcatgaaattgtgccggttcatgagtcaatttaagactttgccgaatttgtttcatgagtcgaaattgatcggaatagatgccgaattcgttcgacgacctcaaaactcctccccatccccgagtttcacgacttaaaattaccgtagaattttttaagctgaaatttctccaaaaatggcaaaagcaaacaaaaaaatctaaacgattgatacttgtaacccgtaccataatcaatcaaaacccatttaggccatctatttgccatggattctggtcgcgttcagcatggtgttgcgtggtggcggaatcaacgaattggttggcattcttgtcggccacacctactacttcctggcattccaatacgcacttgactatggtggctcggtgctgttgcggacaccgcaattcttgtaatatttttacatcaattttttttattacgaaaaacgaaatttcagagggggtgacaaaactcggaaataccaaatttttgtaccagtccattttttggggttttttttctttcattttcgaaaaattagttttgcgagctgttcacacatggtttcgcccccatccccccgaataactaaaaaaaattttgaaatttatctaccgggttttttaaacttttatgattaattgaaacattcgtcatacacactgtcttctatctgtcttacaattacccatttctccccaggtatgacctg

SEQ ID NO: 1937 - DNA, 9685 bp, Heterodera glycines
aataaaagaatacattttttattaataattatacacttttaatatttttatataaaagaaaaaaactcactctctcctcattgatcgaaatttcataataaaaaatgtcagacgaattaatgctcagctgcaaaatcggatgttcagcaaacacggaacaccagccttttgcgggaaaattttggagattcttgtgacaagcattggcatcccaataattttgtccgaaatttaaaatagccttaaaataaaatttttttaaataaaattgcttaaatacaaaaataaggaagatattaaaaaatatatattttggtaaatattgttcatatgtatagtcagagtcgaacacgaactataatatgctatgaaaagggctcaaaaatagcatttcacgttaattttcgatttggtgaagatttgaaattattttttgaaacataaaatttattcgtttttcctttttcccttatttagctttcttttcagcttccgtctttctccagttcagtgattttttccaaaatttttgaaaattgatccgcagcagctaaaaattaaatagtttgtaaattaaatgcaaatatttaaatatttaatttcccctcgccttttgactgttctttttgctgcttttccaattcgctgattttttccaagagtttcttctgatcattttctagttgtgagcgcttttcctcgtcagcttaaaatatatcaattaaaatcttaaaattttaacaaattttcatagcaaaaatcattaaaatgccaaaaaaaatttcttagtttttttcgagtttataaatatcattatgaatcttagcatataattggaaaaaaccctatttttttgcaaattttcatcttttagtcttaaatacccgggaaacgacaaaattttccgattattacagaaaaccaaattttaattgaagaagaaaaacataaaaatgataaaaacgagcaaattgatcgaaaacattagtgaataattaatccttccttcagagagtcgccaaatcgaatttgaaattgggcccaaaattcgcctcaattttgtcaccagaaaagagtaaagaaacgaatggataaaaagaaccatcagcaaaagatggagcaaccaaaaaatcagaggaatctgtgaaaaagttaagggatttttgattattttaaacataaaataaattagataaatagacaattaaccaaattgtaatttaaaaatcgtaaaattatattatttattatttgctaacccaaacgaagcccatttttggtgaaaatgatctgtcgagtggccgaattgacgccaattccaacggtatcgccaacaccgtaggaatattcggcatttgctccttttccttttccgttaatccataaaaagccataattgtcaaatgcataagtgcccttttcaagttgaattgattcatccaattttgtctgctgtttaacagcgaatccgaagatgacccaactgaataaagaaaaaaatatattaaaatatttcactttttatacaaaattcgcttacttcttttttttcataactgaaatttcgtagtaaaaaaagtcagacaaatgcttgttcagcaaaatcggacattttgcgaagacggaaataccaaaagtatttcccttatgctggacaatgagacttttgtcaccactgatttggatgtccttgtgacaagcgaaggcatcccaacaattttcttggaattttaaaaacacctgaaagtaaataattctatatttttataatattatataataatttattaaataaattaaaaattatttttcccgtaaatattttattttacttttctcttccattcattcattcacctttttctttgtctgcttctccatttcactgattctttccaaaatgttcttcttatcattttccatctttgaaaattgctccgaagttcctaaaattaattttcaaaaattaaaaatgttataatttatttaaatgaaattcttaattcatataagaaacttattcaaaaaaaaaagaatttttaataagtgataatttattcttcgctaaaattccctcgcctttgtccgtgttttcgttctgtttttccatttcaccaattttttccaaaatctttgacaattgccccgcagtagcttaaaaatcggattaatttttaaatttaaaatggaaacatttaattcgattaaatattttttcattttaatttctcctcgccttttgtctgctgttgttgctgcttctccaattcactgattttttccaaaattttcttctgatcattttgcgattgtaagaatgcttaaaatagaaaacaattaattatttatttatttaaatgaaaataaaataaatttaataattattcctatggttttggcattttttcgcagaatcggtcgagttttaagatttttctgattgtattaattctgctgccagtcaaaatgttctcaataattaaaggattcgaaaaatgtccaattgcgcagttaccaaagaaaagcccaaaaatttcattttcgttaaattggcctcgccttttgtctgctgttgttgctgcttctccaattcaccaattctctccaaaattgctttcaaatgatctcccgaaactgaaatttgaagcaattttcaattaattttttaaaattgttgtcaagttataaaaggttatagcttttaaagttgtcaaattattttatggttatttcttttttatggtttctaccaattctggattcttgaatcgggttcgaatttgggataaataattcggaaaatttgtaaaatggtggtaatttaaaatgtttattattattgtattttaattatgcattttaagaaattttttacgttgaagaggagaaaattcgtcggccgatgaagaagtcgtgaatgatgacattttaattttaaaatctaaatttaaacatttttataattcttttcgtaaaaaatgatcctgttaaaaatatatttttctttatttattttcatttaccataccgtttttctgttcaattttgaccactttttccttcaatgccttctgttcgcctaccaattcctggtgcattaacttttgttcaagtgccttctaaaaataattataaaattttggcatttataatttactcaaatttttatgcaaactcacattttccagttccaatttggccattttcaattccgtttccaatttggcaaacttttcatgaaattcctgaatttaaattaacaaaatcgcttttgtctcacattaattcaatttttctgcaattctttcttctgttagcttttcttccgcccaccttaagctgttgttgttgatcagtgatcgtttcactgtttccatcaaataattgtccatcattttccaaactaattgcatcgccattcacttctaaaatttaaataaattaaatctttaattttaaaataatttaattaattcatattcaaaatttaaatttttctcccatttcctttacccctgttttctgctggtgtaaaatcatctccacaatttattgaattggtcgaaattgacatttttgagttttggtactctaaaaaaagatttaaatttaagttttcattaataaaaatgttactattgaataaatgaaaaagaaaaaagacaaataaaaataaatgaccattacctattccttcgttttgtttcatgtcagtccattttttcaaaatttcggtattgatttctcaatgctaaaaatatgcatgggagggaagagaaaaataaaaatgaaatagaattggttagacatattttggtcagtaagacaaaggaaataaaagaggaagaagagagaaagagaaggaggacagaaaaaacaatatgacagagagagaaataaagagaagagggagaaaagggtaacataatagaggaagagaaaaaaaggtaagtcgccgcctgagcaggcggaagccgaaatcctgggaccgtccctggatcccaccctcaccattcccctcggctccaacattaattttctaacaaaagagaggcctcaagtgtccatggagtttgggtagatttgttgtaattggtttccgatttgtcttcatttgtgagccttccctcttcataataactttgatccaaagacaggataggtttgatccactgacttgtccaatggatgtatttttattttattttttgtccttttgaaattagtcatttgaattgttaaataaaattgcacaaattatttgacctttaatattgtatcttcgtaaacctatttctcgaatttatacacaaattaattttctgcaaggcgtttgcctgcatttttcttggccaaataagtgaatttttaaaatcaaaatacagtattgacctaaagcaaatgcttttgccgagttacggttcggcattttatacaccgtttcaaaaaacgagacatttgtgtcaataaatagaactgaaaatttaatggattcttgttaaatcgaaaaaaaaaatatattatatacaaaaatcgtcattaattatatcctagctaatttgggccgatttttggcattatcctcttattcaaaaaaaaactaagagaaaatgtgcaaatttcggattcttaaatccctgacaaaatgtctaacattattgatttattgggcatttaatcccgctctatttaaagtataatcaaaattatattaaattaatccgatgattagacatttacaaggctttaattccaattgcaaattgattggtcaccaaatttgatcaccttttcatctgttctcactttgttgctccgcatttgatcatcgccgatccccaccattaaaattgctgatcacaatgtgtccaaattgaggcatttttcgtcccatccgtgcggcaccgaattgttgcatgccattggcagtcccatcatttaccggcaacacaggtggtcaaaaagctggtacaaataccggaaacaaaggaccgaaatgcaacctgaaaattttggggaaaatttttattaacattttaaaaagggcttttaaaagttttttcaaaaaataaagcggttttttaaaattcaataaatatgtatttttatttgtgttttcttttaatgtgcgaaatttttatatttaaattattaatttttgttttaaaaaatagagtgagtcttaattttaacttttttgatttatgaattttcaaaaaaaaaatttcggaaatttaattttttgcataatttagaaatgctcaacttaacttggcaaaaacacttttcttctttgggcatataacgctcaaaaattcgatttggctacctgagaaaaaatttggaattttaaattaaattcaattaatttattatttttcaccgatcattttgacacatttgaaaaagcgcacaaagcgaaggttgccatccggacaattaaaatttattaaattatattttaattaaaaattaccattttcgcacgtgcttaaatttaaacaaatttggcatcctttgatggcatttcccccctttttactgtacattaattaccccattaagtgtgccgttggccaccatttgagccaatcgttggtaagcaatgaattcgttcagtgccgttttgatgcacatcagttcagccactttcatcgtttgtccaacattaccttagatttttatttttttattatttaattgtgctcattaaaattatttttcaaaaaaatttattttcgacgactattgaaataataaattttcattttttatttattattagcaaaaagttatgaaaaaatttgggtttttctgaacatttttgataataaatctacaaaaaataaggtacattaatgttgtcaaatattttattatctttttttatggtcgtgtaaactgtgcaatagagccaaatttcccgaggcccgagactaataccgcaaaaagccaagaccttttttcgagtattgattgactcgagaccacgactctcgatcagcataactgattatcctgtctggaacctcaacttgatgatttttaattaaattaatttaaccggcgactctcttttagaaaatatgttatacaaaaaattgccaagcaatcttatcaaatttatttgtattttttgcatttgttcagttgaatctgtgcctactccgctcaggtgattttaccaaaattaaattcaaaaatctgttgaaaatctttgaaagattttcaaaaacatccttttgcttctccttcccttctctcagagcttcctcagtcggttcgtgctcgttggtggtcagtcatttgctatttaaattttcaaaaatccattaaaaaaattcccaaaatttaggcacgtattggcgctctgttcgctcctatggtaagttcaggtaaatttgtgatcaaacctttgatcgcacttcatcaaccattgaacgcgtcgcgtcgttagggttcactaaggctttctccccctccatgaaattttttaaattttttccaaaacatttttcatgttttcaacaatttccaacgagtttcggttagcttacctatcccaactgagtcccgatttatctagctaattaacatctcccaactgaataataatttgaaattaaatttttactttgttttttattgaataaactccaaaagttaaagctaaattaaatcaatgaaaattttcaaaacaaattttcttcaattatttcaaacaattaatcattttggactaaatgatcgaatattattagaaattcaggtttgcttttcacataactttttttcggcgcgctttttccaaaaaactttttgggaagaaaagggtccggcggtgccgataggcgccgccgggggggggggaattttgaaattttgagtgcaatttgttaacagattttcaacaaaaaaggctggtttttgggattaataggttcaacaatttgtacggattttcatttaaaaaatgataaaatatgtaaataaatcttattttctcgataggaaacccctgattatacaaaaagaaaattcaaaatatttaaatttctctagaggaactgaaccatgggaaagaagtagagaataaagacgaaaagcctgctacttttaaacaatatattaatttttattttttattttttcctttaactccaattttcatcactattttttcactcagacccccattcttaccagttcttgaattttttgttttaatcatatatatttaattatcatttacgtttcaattttgattatttttgtcattttcgtttttaattgattttcacgtttacttttgttataaaccccttaataaaagacaaaatcaatgaataggaatgaatttagagtgatcaaattaaataaatgtaatttttccaaattttttgtcttccgttttattgtgaattgcacgtggggaggggaggaattgggggagttaaaaaaggtcttatgtaaagaaaatcttaaaataaattattaaagggctgactgagtaccgtcaataaactgaaaggttcttgttcatttttccaaccgattgtagcccaaaattttaatattacaaaaattccgagtttttctcaaattcattggacatttatacaacgactcacaaattatatgtacaatcagagatatttggaacatattacagacaaatcggatcaaatgggaatgatgagcataataaatacaatacaattagtgatcaattaatgtcttccgaagaaatccatccgccgcttttggccattgattcgctctctctgtgctgtcacatctgctgttgatcgttttgctgtctgaaaatggaaaaaacaattattattgatcaaaaacaatcaaatttttctttacccatcggtgccctccgccgcgtcccgcccattgtccgtcgcggttgcacgaaaaatgtccaccatttcggcatttccgctctcttccgcgaaatcctgtgcccgtttgcctgaaatgggcgaataaaacgctcgctagcacaacaatttggccacttccgctgctgctcaccttcaatgttccgttggttaatgtccgcgccgatggccaccaaatgccgtgccatttcaatcttcccaaacttcactgcccacatcaaagcattgtgtccgtccacgtcaacacgttgaaggtcggcgccatgttcgacgaggaaattcactgaaaattagggagattacatttttggcactttgccacaattctctcccaccgatggccaaatgtcctttactggcagcgcaaatcactggagtgtatcgctcttggatggtttgttggttgacatctgcggcccactcctccaccagcagacggcacacctccaaactgccgcccatggcagcgctcttaagtgcgaaatggaatcctgaaattaggacaacatttgtggcatggtatttttgggtactgtaacagtaatcccccaccttcgaaatctatttgctcgacatttgcaccatgtgacagcaacaagcgcacaatgtccacctgaattcaaatggaaatgttggaaaacatttcgccaatggaaatttttccctacatttcccgtgtaacacgcgtacatcagtgctgttgccccatcaccattctgcagattgatgttggcaccattctcgacaagaaatgtgactgtgggggaaaaaatgacgggaaaaattacgcattttttcaaattttcgtctctctaccaatttccgtttgcgatcttttgcaagcgtgcatcagcggcgttgtggcaaagtccgtgcccaagtcaatgttggcaccacgcgcgaccagcacacggcacagcggcaaattggcatggcggacagcaaggaaaagaggcgtcatatctgcacaaatggggaaacaccattattttcagagcaagcaaaaatataattattttccggtatccgtttcgaccaattccgagccgaatccagggacccgaattagatgcatggtaacaacgatttcatcatcaacaccacccactcactcgtgtttatgttgttcacttggtcagccactggctcatccggatcggcgcccttctccaactgaaaatgccatacaaaattagtgccgacggataaaattgttcattcactaccaagagatcaacaatttggatgtgttggcgtaagaaggcagtccaaagagctgatcgtgatcgggtgttgtcgcgctccactggatcaaccgtccaccgcagcaaaatgttcagctcgtcggcgtccagcgaatcgatcagcacacgcaattgttggatgttgccatcgttgatcaggtcgaagaagcggagagtgagcgtctcaaagttgtccacaacagcagcagcagcgggatgttcagtatctgccttaattgtgggggaaatcagttattgaaaaagaattctgagttgaacccgtgcaacacatttttcagggaggggcgggtgggttcattatcacggatcagtgaccccaaaaatcccggtggaaagatgatttttaaaaactaaaaactcgaaaatatgaaggggaattgcacttgttgttcgtgttgcaatcacaaccaaaacataaatgttaaaaaggtttcatggaaacaaaaaactttaccatgcgaatcagagcagtgaacagtgacgacgaatatgcaatggcaattataa

SEQ ID NO: 1938 - DNA, 1751 bp, Heterodera glycines
  unsure (1)..(1751): unsure at all n locations
caagccaaatggtagacaaaatgactcgaaacgccaaaatagggtagtgatttcggcatataaaagcacgcgacattaacattttccgccatttcatcgcgtcttcgtcttccattttcactattatcgccatcgcacattcgtcgtctccgttcaaccgcgctgattcgcacgggcaatatttttcacgtaaatccttttaacatctttgttttatttgtgattgcaacgccatgcttttaagttcaattccccccccccccccccctcccattttagagtttttttaagaagtccatcattccaccgggttttcaaagtcactttttactatttttcaggaagcacaccccctgaaaaatattttgcacaaattctgcatcagatttttccttttttcaaaaactgattttttccccacaattaaggcagatgctgaacctcccgctgctgctgatgctccggctgatgctgttgtggacaactttgagacgcgcactctccgcttcttcgacctgatcaacgatggcaacatccaacaattgcgtgtgctgatcgattcgctggacgccgacgagctgaacactttgctgcggtggacggttgatccagtggagcgcgtcacccgaacaggatcagctctttggtgtgccttctttcgacgacacttcgaaattgttgctctcttggtagtgactgatcattttttctggtttaaatcactaattttgtatggcattttcagttggagaagggtgcagatccgaatgagccgatcattttcgaaacgcacgatcacagaacgagtgagtgttgttgatgaatgttttaccatggattttcgagtgtcactgtgttaacaaatccggcaccatttcgaccaatttcgaattctttttctcgaaaaatgaaatttggatattttggncgaattnttatccaggattcggaattggtcgaaatacggattccggcgatccctatgaacttttaagcgtcccattgaattttcacgcgtcccatgaacttcatcaattaggaattttctttttttagaattaaccaacttttttatctttggtttccatccgaatagcccatgcttgacatagcgtgtccagacatttgcgcctatgtccaaaatcggattcaaactttaattttttttgattctgtttcacgcatcccacgtccattgtacttttctaattgaaagaaagaaaagaaaatattcccaacattaaaaaaatccatgggacgcgtaaaagtcaatgggacgcgtattctgcactagaaccgaaaattgaatgacaaaaaaatctaccccctccccctaattttcagtgaatttcctcatcgaacatggagccgaccttcaacgtgttgacgtggacggacacaatgctttgatgtgggcagtgaagaatgggaagattgaaatggcacggcatttggtggccatcggcgcggacattaaccaacggaacatggaaggtgagcagcagcggaagtggccaaattgttgtgctagcgagcgttttattcgcccatttcaggcaaacgggcacaggattttgcggaagagagcggaaatgccgaaatggtggacatttttcgtgcaaccgcgacggacaatgggcgacacgcggcggagggcaccgatgggtaaagaaaaatttgattgtttttgatcaataataattgtttttccattttcagacagcaaaacgatcaagagcagatgtgacagc

SEQ ID NO: 1939 - DNA, 1778 bp, Heterodera glycines
ccatccgtccctggctgatattttcgaattcattactttcgttaaaatgttcgatacaataccaaacaagtttccataaaaaaatattataaaaattatagcaaaactaaatttatttttattagaatatctttttggtgcttgtacaatagaaattatatcaacaaaacaattctgacaaatacagtaacagctgtaaaaccaaatttaattttttattttaatttttttcctttttattccataattggagataatcagggacaaaaaaccgaaacatcttcgtaatttaattatgtatgtgtacaaattataatataaaattaaaaataacaatattagcatctcttccgatatagaattgtgggccattcaatgaattattgcttccccaaagaatttactaaaaatattatgacgttttcaaaattggaccacatattttttgttttttttaatttaaaatgaaaaaatatacgaaacttttttcgattttcaattgagcttcacaatgcttttaagtcccaccgtgaggctggactttttcaaaattacttttttacaaaattaattttttaacctattttgacgcaaaatcttttacaaattgcacttaaatcttcaaaatttttctctactgcgtctatccgcactttcggtcacgccaaatctttttaatatgcttttaaattgcttataaaattattgaatttttaaaataaaaatttgaaaattctttaaaaaaaattttgcgagtgcagcagcggcagatgccgatggtccacttcgtttggtactcagtggcggaaatgacagattaattttgttttgttcaaaaaaggtgctcaattgtctgcgctcatatgctcgtctaactgacgagaatgcgaaccgtatcgcctcctgtaaagtaaagaaaattctaactttttttttctaaaaatgttcttaaactgcagcttcccactcccgggtgctacacaaaattttggccgggacaaacaacgctgaatctttttgaaaaaaaatcaaaaaatttttcatgaaaatcttaaaaaatttttcgcgagttttagaataaaatttactaatgcatcataaaatttcaaaaaaagcccggtaccgattttttaacggtatgcagtgaaaaagagcaaaaaaaaaattcaaaatattcgtaaaaacattttttactattttaaaaagaagccgaaaatttggtcacctttagaataaaaccgtaaattttcagcatcttttatttgtaattaaaaaagaaaattttttcaaaacaaaaattttttcaaaataaaaaattttttttcaaggggtgcctaaagaataggcaacaataaacaattttttggcttggaatttttttcaaattataaatttggaatttaccttcaatacggggtcgacatttccatatatgagcaggggatgcattctttggctgaccactgcttcaacacggattctgattattttgccttgaaaatggaaaaaaaagaaatgaaaaacactttttttcggtcgacactgtaaattttgtccgggacgtaacgcgtacaaaaacaaaaattttttgtaccgtgactgatcgtacccctcccccttccccatctcctcccaacacagcccaccgatttgtttttcaaaaaaaacgaggagggagcaaacggcactttgttcgttttgccccccccccgccccccccccccgcccaaacgaaatttattttccttttccctgagcatgtaattttcatttattta

SEQ ID NO: 1940 - DNA, 3292 bp, Heterodera glycines
  unsure (1)..(3292): unsure at all n locations
ggcttcnggataaatcaaaaaaatttntctgaactaaatatttgagacgcaactggccccttaagtactaagacgcaactggcccccagacgcaactggcccccagacgcaactggccagaggcaactggccagacgcaactggccagaggcaactggccagaggcaactggccagaggcaactggccagacgcaaccggccagaggcaactggccagaggcaactggccagacgcaaccggccagacgcaactggccagaggcaactggccagaggcaactggccagaggcaactggccagaggcaactggccagacgcaaccggccagacgcaactggccagaggcaactggcccgttccgtcattcgaaagctcttaatgaggagaagatttttctaagaaaatgctaaacaatttgatgagttagaaaaaagatgttggcgttcaacaaaaaaactttcttataatttttgtattagactatatacaaaaatagattcattatagaaagatgcaaaatttttctctatcgatatgcaaaattaaagaaaatctgtacgggaaaaaaaaagtttcccgtgagaagcaaattcaatttttctctttataatagagatacagaaatagtacgcaaaaatgagaaatttgtttctggtaaatattgatcataggccccaaactcaaaaatgcttaaaaacggtcagaatcgatgtaaaaaggttcgaaatgggttggaaaaatagaattaggggcgcgcttgccctcacaaaggagaggtacccaagtgaccatgggacttccgaatgaaactttcagggtaggtagattaccccccccctttgtattataaatttttttttttttttgctaaatgaagcttctggccgagatatgaagcttttcctttttgccttttcaatatcattttcaaagaatgtaaagccgatctgagcgtcggtggcctggtggttgtgccttccatacttttttcttcttctaaagttcaattccccaaccctgtaaataattattttgtttttttttcatatccaaattagtttttaagctttttaatattaataaatttgaacataatattttttcatttttattcgacattaattttggcacatgtgataattttggtagaaatgagtgaagcaaaggaatttgtcacaccatgcacatctaatcattataaattccgaacaaaaagtgatttgacagtgttcaggaaaagcaaaaaacgatggctattgttaatccttgtcaacaatcaattcgttgatcagatcaaatggcacaacggaatcagcagacaactgaaaacaaatgacaatgaaattgacgggggaagaagcatttgcaaaagcctgaaatttgataaaattgattaaagaaatacgaactgaaagcaccgctttgaacggttcaatattcgacggcaaaatcccatcattcaagtgcaatgaacagttgaacatctttggcaaattgttttgaagcggagtgaaaagccattttgccaatgcttgtccatccgacgccgcgcactgtcatcgcatggaaattaggcgaacaaaccgtcataattgacattgataacgcaaagcgatggacagtcgtcgagaattgacggaacgaattgtcgcaaaaggcaaaaaattctggcagacagatccatgccataaatatttttcttgagcattgcccaaatgttgcacagaataaactccaaaatgcggtcactgaacgtattgatggaaaaaattaattggacatttggtgaaaagctggccaaaacggttgagaaaagcgatgacattttggtcgatgaaactcactcaaatggaaatgtgttgaaaattttatgtttagcctagggttgcgaccccgaccccgccccgaccccgacttttttggccattttccggggataaccccgacaccgacgctcccaaccgcgacaacgccaacccttaaccccgactcggggtcgggttaaatatagacccctaagaatggaatgctttcgtgagagaaaagacaaaaaacatacaaatttgaattatttaaccattttgccaaatttttattaaataaagtaatttgttttttcattcttatgtagtagtggtgtttggttactttctatgggttttttgaggcgtagattccgaatataatatttattttgttctaattcaatccgaaacatgaattcaatagatctggaaaatttaatgaaaaatcttatacaaaaacatagataacggaattctgattccgtcggcgccgaaaatttttggttgatttcttgaaattaaccgtacggaaaaaagcctttgctttttggtttctttttcgttaaaaaagcaatgggttttaagtgtaccatggtttttccatgttttgctcttatttcggaatgtttgacattttttataaagcgaatgcttgaaacactgaaatttaaaaaaaaatggttttcgaggttccagaacagagaatccgattacaaacctatccatttccactggatttcttgttcgttcattttaataaatttcttttatttatttagaagaaataaattttgctaaaaatgatggtcgctgaggtgaacggaatcggagttggccaattctcaaaaaaaggtacgttttacaaaaaaataaataaatgaaaattacatgctcagggaaaaggaaaataaatttcgtttgggcgggggggggggcggggggggaggggaaatcaacccagcgccgtttggaccctcctccatctatatgaatgcaaatccatgacgctggttaggaactatatggaaaaccacgaaagataagttaattatctaaattttttactgataagcttattataattaaaatttccctttgaaagttgcaaagaaatattgtagcacttattgcggcacttcattttttgactcatgctttatagcaccagtaatacgggtttgcaactttaaaaaaggtataaaacaatgtacatttattataaatttttaaatgatagagtcgatgattgctgttattaccatgatttatgctatataaacaaatctactacacgctacgattgcgaccacaagcttttgcaaatgtttgtatgagagtgctgaatgttcattaacaaaagtctgtatttattagtattttaaataatttattttttataatttgttatgcttgtcagttcatgatcttgctgaacatttctaagaataggaatatctctcaaagaaatactggtatatatatatt

SEQ ID NO: 1941 - DNA, 3235 bp, Heterodera glycines
  unsure (1)..(3235): unsure at all n locations
aaggcaaaataatcagaatccgtgtgaaagcagtggtcagccaaagaatgcatcccctggtcatatatgaaatgtcgaccccgtattgaggtaaattcaatttataatttgaaaaaaattccaatacaaaaaattgtttattgttgcctattctttaggcacnccttgaaaaaaattttttattttgaaaaaatttttgttttgaaaaaaattttttcttttttaattacaaataaaagatgctgaaaatttacggttttattctaaaggtgaccaaatttttggcttctttttaaaatagtaaagaatgtttttacgagtattttgaatttttttttttgctctttttcactgcataccgttaaaaaatcggtaccgggctttttttgaaattttatgatgcattagtaaattttattctaaaactcgcgaaaaattttttaagattttcatgaaaaattttttgattttttttcaaaaagattcggcgttgtttgtcccggccaaaattttgtgtagcacccgggagtgggaagctgcagtttaagaacatttttagaaaaaaaaagttagaattttctttactttacaggaggcgatacggttcgcattctcgtcagttagacgagcatatgagcgcagacaattgagcaccttttttgaacaaaacaaaattaatctgtcatttccgccactgagtaccaaacgaagtggaccatcggcatctgccgctgctgcactcgcaattctctcattggcgacgggaagaccagtgcaggcgggcgtttgtgtcactggaaaagtgacaacgattggccacatcagcaaaatcagccaaatgaaagaaaagacgatcgcagctgcagaggcaaatatggtcaaaatggcatttccaagggccaacctaagcgagttcaagaaagtgccttatcgaacccgaaagaatttaaggagaaaaactttgaataaggtggatgatttattttctctttattgatttaattttttttattgtttttccatttaatattttgatttgttatcacttttaccatttatgaaaatttacctttttgaaaaaattgcaaataattaattagggagtcaatgatcggatcaaaatttttaaggtttatgggtttgggccagtagggctgtaatggcggatgacataaagtcggaattcggctccaacaaagtccaacacttttgctgtttaagcactccgagaaaccataggggtaaaggacccttagggttggcaaaaaaaaaattttttttttgggaggtttttggggttattaatataattctgatatcagatttagcaaatctcttcagcaaaatcgaacagaatgtcaaaaatttaagttttccgggttttgatttttgttcaaaatggaattaggctttctaaataggattaaatagatgttatatctgtgattaacgccctagaaaaccccaacgacgttttcacgacgtgccaaagtcccgaaaaaatggccaagttgcgagtgtcaatgagatttggaaaattttttaaattatgattctccggaccgccacacattttcattacttcagaaagtgccgacaaataaaatgacatcagcgcaaatataagtttgagggcaaatcacgtcaaatcatgctcaaagcgtccatggtaatttaaaattgagaaaaataagacgaggaaattggggattggttttttgtatcaaataaaatgttttttgattttttaatgtgccaatgtgcacaaaatgtaaataggaagtaattaagatgcacgccgtcactttggaacagacaaaagcaagtttttacaattcaaaaggtttttacataaccttaatttaaggtgattaggacgtcaatttaagaaacaataatttttctgtatctttattttgtcaaaacattaaattgcgtatgaaatgcgctagtgcttattttgcattttaacggcctattaagcgcttaaattgccaattgctttaatcaaatgattaatttcttaagcattacctaatttacattttttgttttgatgaataggtaattcataacaaaacatgtttaaaagcaaattttttcaaaaaggtaaattttcataaatggtaaaagtgataacaaatcaaaatattaaatggaaaaacaataaaaaaattaaatcaataaagagaaaataattcatccaccttattcaaagtttttctccttaaattctttcgggttcgataaggcactttcttgaactcgcttaggttggcccttggaaatgccattttgaccatatttgcctctgcagctgcgatcgtcttttctttcatttggccgattttgctgatgtggcccatcgttgtcacttttccagtgacacaaacgcccgcctgcactggtcttcccgtcgccaatgagagaattgcgagtgcagcagcggcagatgccgatggtccacttcgtttggtactcagtggcggaaatgacagattaattttgttttgttcaaaaaaggtgctcaattgtctgcgctcatatgctcgtctaactgacgagaatgcgaaccgtatcgcctcctgtaaagtaaagaaaattctaactttttttttctaaaaatgttcttaaactgcagcttcccactcccgggtgctacacaaaattttggccgggacaaacaacgccgaatctttttgaaaaaaaatcaaaaaatttttcatgaaaattttaaaaaatttttcgcgagttttagaataaaatttactaatgcatcataaaatttcaaaaaaagcccggtaccgattttttaacggtatgcagtgaaaaagagcaaaaaaaaaaattcaaaatattcgtaaaaacattttttactattttaaaaagaagccgaaaatttggtcacctttagaataaaaccgtaaattttcagcatcttttatttgtaattaaaaaagaaaattttttcaaaacaaaaattttttcaaaataaaaaattttttttcaaggggtgcctaaagaataggcaacaataaacaattttttggcttggaatttttttccaattataaatttggaatttaccttcaatacggggtcgacatttccatatatgagcaggggatgcattctttggctgaccactgcttcaacacgggatctgattatttttgcttgaaaatggaaaaaaaagaaatgaaaaacactttttttcgggcgaaactgtaaattt

SEQ ID NO: 1942 - DNA, 1534 bp, Heterodera glycines
aaataaccacaataccgtcgcgtggggctttgaaacagtggtggaggcacagatgagcaccaaagcgaggctggcgaagaaaaagaaacgcatttttggataagctgagaatttcgtttcgaagctggcgcctgagaaattttatgaaaaaacatatttcagggcggttaaatctcaacttgtagcttttgtccttattttttttaaaagtataaaaaaatttttatgacttactgacaaaaaataatagtcaccatgaatttcacgggttttttgcgtcactgtcattcagtcacagcgaattctattgaattggttgactgaatgttttcgcttgtaagtactagggctgggaaatttaggaacgaaaaatcgcgaaataggtatttaaaaaggtacaaaaaagctcaaaataggtattaaataggtacaaaaatcccgaaataggtagaaaaataggtaaataaaatttttattaacgattttttagtggaaaaaagcaaacaaagggggaaaattttggttctatttctttgtaaacgaataattaaaatatttttaatatgttcttagaaaataatgacattttaaattaaaaattttgttaataaaaataaataaataaatttttgggggaagaatttttgggaaaattttccaattcttaggggtgtattttttgattttattgcatttttgttaaagaattttctgaaaatccttaaataggtataatgggtagaaaaactccaaaatagcaaagttatacattataaaagtcatcgtagacaccccaaaccaagtggaaaatgcttattttgtgcttagcaaaattggcccgatataatgagcagaaatgagtccatttcatcacatatgtcggttttttcaacttttatatatacgcaattacaccataaagaaatgtataacaaattttaaatttaattgtttgaaatgtgaaatttgctgattcattttgcttattaattttattcaaaacccatttattaaaccaataacacaaaataattttaaatttttatgctccttccaattctcttcacccttccatttattcttcctgctcctcgccttgggtaatgtttgtcatgttaaaggaaggcagggaaatggcgtcggggattggcacggaaatgttaagccatttcacagcagcaccattttcatcgttcttggcaattaaattgaattattttagcacataaattctgaacccaaagttttataaacaaaaaaatgccaaccttggccttagggcaaatgttgatgcacacaacgacaaagcacacttgatagcaacctttttcattggtcttgacagatgggcaggcttaaaaaatatgaatgttttacatttaaatgccttttatcggaaataaccacaataccgtcgcgtggggcttagaaacagtggtggaggcacagatgagcaccaaagcgaggctggcgaagaaaaaagaacgcattttgggagtttcaacgcttaaaaatttgaaaatttgaatgcttt

SEQ ID NO: 1943 - DNA, 1032 bp, Heterodera glycines
tttgaaaattggatgccttttagagttttctatgattaaattgaaaaaaataaaaaatgtaaattctttccgagatttcaatgctaaaaattgaaaaagttgaaaatttgaagtttcattgcttaaaatttgaaaattttaatgtttttagagttttcaatgaataaactgaaaaatttgaaaattttagtgtttttagagttttcaatgattaaaattgaaaaaaatttgaaaatttgaagtttcaatgcttaaaatttgaaaattggatgccttttagagtttttcaatgataaaacttaaaaaatttgaaaattttaatgcttttggctgttttatttttcatttttatagtttcacatttgcttccaaatacattctttgaatataaattcggcatttgttttttggcaaaaatcatttgaaaaatgtcagaaattaattgcgttgaaatattgggaaaataatgaaatattattctcagcaagtcgtaaaagaaagcggggtgaattaatttttatttttaatattgaatctgggacaaaaagacagaaaaatgtgaaaaaataatttttcaaataatttttatttttataaattttaatttaatttaattggtcaaattcaaaattaaaactcctgattttaaatagttttaataacactgattctctcgacagtttatttctattaaaatttcgctaattgaatttctttatttaaagaattctattttcaatttgttttcaattgttttgcctcacatcttttttctgcttacaaattagtccaagttggcatttaaaatggatgggttttctgcttattatctcacaatcagaccaattttgctcaattgaagtgatgcattgagaataaaaggtaagacttgggttcaaggggtaaaccaaaaacacttttaatggttcttaaatagagtataattaatggaaataatcatttttggcgtaaaaccgacgatttcttggcgaaatgcaattttttaatctaaaatttttttgatttatttta

SEQ ID NO: 1944 - DNA, 3130 bp, Heterodera glycines
  unsure (1)..(3130): unsure at all n locations
tttcgccatcaaattcttttcctttattcgtccaatttggctgagaatctcgaaaaaactgatcaatcgaatccctattcaaaaaccattctcccaacaaaattcgtctttttcaaaaatttcaaactagtcctttccctcaaaacacgcggcggaaagtcccagtggtgatgcgacatttgcagcgctggcatttgcggcgccgacacttgcggcgcccagtcaaaatgagatttacggcgccgactggcactcctataattaatgctcaaaaattaaatctcgaacaccttttgttttccttatgtccaaacgaaattcttttcaaaggtaataacgaacgactgaatggaattcttagaaacttttgaattttgctgagttcataaatttttaaggctgggcagcgacgggatattgtaaggaaaagttagatggatgttaaagcaagtaaagcggtggtttttacgaggcggatttgcctcaaaacgcattggccgagttgccaaaggactgaatttccacccctggcttaacatttagcctatttgttcattaaatggaggaatgcataagataaaataaaactttttggccctgaatcattaattctgcgccgcaaatgtcattttgacttgaagcagcaaatgtcagtgccgcaaaatgtaagcgccgcaaatgtcggctaatcatcccagtcgctcgcaaatgcatttttggggttttctcatttttatgaattttagatttttgaataaagcaaaggccaaaataaaaaataaattaattgtaaatagtttcagtgttttattatttcaattttttctcacccttggccaaatttgcgtgggcacagttgactctgcttgctgctgctgctacttagcaacttgtttttcaaaaatgttgctcaaaacccatctaaaaattaccaatcaacaattattcgaactaattaattttcattctttttgcaaaaattcaaaaaattaaatttatttgaaattttcatagaattacgtattaaaataattttcttctgtctgggggtcgaactaagtcgaaacttttatatatggtgataataatccatatataaatttgctttgagcaaaatggtgaccaataatttaacaaaaagttaatttcatctttgttttttgcttcacattctgtgagttctatgcacttgcattttctgctgctttgatcaccttaatattaaaaaatcatatgaaactaagtttgttaatttatgaaatcaaacatttggtacaaaatttttaatattaatacgaatacctcttctgcaatgctggtagcttgttttttgttatttccatttttgccaagaaaagttcgtcgttcatgccaatttccagtttcacaacatgaatggccactaaacccggtttgcttgatcgtatacaacgttgttttgttggaatcaatacttaaaataagggggagatttttatgcaaattttgttattttttcatgtacaaactttgaaaaatttattaaatattttttaatagtctgcaaaaatgcaattaaagaaaaacaacaaaataattctaaatccaaaaatttccgttttttataaacttggattaaattaaataatatttaaataaaacttgcataatttttgaggatcaattcacatttgtatctggacaaaccagcagacaaaattcatacaaaacattcatttgccgatcagtggtttttttgacgagattgtccattttaattgcaaaattcatcaagggtttcaattaaaaccttgttgcattcattaaaggccttaattcgtttataaatattaaagggagctcgaaaaattatttattacctgagcatgaatggttttcagatcactcgaaaaactgctatcatgtttttttaaagcttgaagctcaaacattttgttgcaatcatttcgcaacttgttggcaccgtttttcacggtatcagcaaaaaatctggcctcttgtaaggtttctggttctagttcttgctggaaattaaaacactttaatttttcccaatatttatttattattgtttttgaaaatggaaatcgcatatcatatttcttaatagtcctttatataagtctgataaagtaccttttaatgatgggttgaataagccccaagggcccaatttaataaacagagtaaagtataaaaaaaacatcaaataacaaaaaatagtaaaggcaaaaatgaatttagctaaatccgctttcaatttattttaatgaacattactgaccgttataagagttaaagcatgttcatctacaccaatcattgtaaaatattctacttttgaaatgaacgggacaagggcggactttcataatcttctatttaatttgggattcattagtaaatagcatgtattttaattccatattaataaaatatagaaattttaactttaggcaattttatggatcagttttcacatataacattaaggctttatttttaaaaaaaaaattatattaaatgttaaaattttgctgatttttttgctttccttttcgaatcactttacagcgtaattaaaagaacttttttgcgagtcaggactcaatttttttaaattaatgaaggctggacatcaccaggaaaattgtttaggttttaaattatattaaatatgaagcaggagtcgggaaaggtcagtaatttgaggcggtgacctgttgataggcgacgtgacgcacagcaatttactgaagagataagtgtgatggcctttctcggaaactcggctgtgaacactcaaattgataaaagggcaaaagtgaaattttatagcttaaagtggggtgggattgaggggcatgcattaataaaaaaatacatttgaaaatgtggcaagaggaaccaccagcaatcggaatatcacaatgttgttcgaattattgagagagggtggggagatgggcgtgagataatcggctgtcgagaccagggctaggcatatgtgtttttaattacgcaaatttatccctttattactgtgatttttcaattactngaatcagtaatttttaaaaacaaaaataataaagtcagtttattangctttatacgtattttttttgct

SEQ ID NO: 1945 - DNA, 1124 bp, Heterodera glycines
cgtacagaggctgcaaaggcgagcagaagacttccttgcttttatatttccgcacggtttcttagaaaagagccagaattagcataaaattaacgacacataaagtgttggccccagtgccgtacagaggctgcaaaggcgagcagaagacttccttgcttttatatttccgcacgggttcttagaaaagagccagaattagcataaaattaacgacacataaagtgttggccccagtgccgtacagaggctgcaaaggcgagcagaagacttccttgcttttatatttccgcacgggttcttagaaaagagccagaattagcataaaattaacgacacataaagtgttggccccagtgccgtacagaggctgcaaaggcgagcagaagacttccttgcttttatatttccgcacgggttcttagaaaagagccagaattagcataaaattaacgacacataaagtgttggccccagtgccgtacagaggctgcaaaggcgagcataatacttccttgcttttatatttccgcacgggttcttagaaaagagccagaattagcataaaattaacgacacataaagggttggccccagtgccgtacagaggcttcaaaggcgagcagaagacttccttgcttttatatttccgcacgggttcttagaaaagagccagaattagcataaaattaacgacacataaagtgttggccccagtgccgtacagaggctgcaaaggcgagcataatacttccttgcttttatatttccgcacgggttcttagaaaagagccagaattagcataaaattaacgacacataaagtgttggccccagtgccgtacagaggctgcaaaggcgagcagaagacttccttgcacgtatatttccgcacgggttcttagaaaagagccagaattagcataaaattagcgacacataaagtgttggccccagtgccgtacagaggctgcaaaggcgagcataatacttccttgcttttatatttccgcacgggttcttagaaaagagccagaattagcataaaattaacgacacataaagtgttggccccagtgccgtacagaggctgcaaaggcgagcataatacttccttgctttta

SEQ ID NO: 1946 - DNA, 1119 bp, Heterodera glycines
agaaaagagccagaattagcataaaattaacgacacataaagtgttggccccagtgccgtacagaggctgcaaaggcgagcagaagacttccttgcttttatatttccgcacgggttcttagaaaagagccagaattagcataaaattaacgacacataaagtgttggccccagtgccgtacagaggctgcaaaggcgagcagaagacttccttgcttttatatttccgcacgggttcttagaaaagagccagaattagcataaaattaacgacacataaagtgttggccccagtgccgtacagaggctgcaaaggcgagcagaagacttccttgcttttatatttccgcacgggttcttagaaaagagccagaattagcataaaattaacgacacataaagtgttggccccagtgccgtacagaggctgcaaaggcgagcagaagacttccttgcttttatatttccgcacgggttcttagaaaagagccagaattagcataaaattaacgacacataaagtgttggccccagtgccgtacagaggctgcaaaggcgagcagaagacttccttgcttttatatttccgcacgggttcttagaaaagagccagaattagcataaaattaacgacacataaagtgttggccccagtgccgtacagaggctgcaaaggcgagcagaagacttccttgcttttatatttccgcacgggttcttagaaaagagccagaattagcataaaattaacgacacataaagtgttggccccagtgccgtacagaggctgcaaaggcgagcagaagacttccttgcttttatatttccgcacgggttcttagaaaagagccagaattagcataaaattaacgacacataaagtgttggccccagtgccgtacagaggctgcaaaggcgagcagaagacttccttgcttttatatttccgcacgggttcttagaaaagagccagaattagcataaaattaacgacacataaagtgttggccccagtgccgtacagaggctgcaaaggcgagcagaagacttccttgcttttatatttccgcacgggttcttagaaagagccagaattagcataaaattaacgacacataa

SEQ ID NO: 1947 - DNA, 990 bp, Heterodera glycines
  unsure (1)..(990): unsure at all n locations
aaaagagccagaattagcataaaattaacgacacataaagtgttggccncagtgcggtacagaggctgcaaaggcgagcagaagacttcctgcactgtatatttccgcacgggttcttagaaaagagccagaattagcataaaatgaacgacacataaagtgttggccccagtgccgtacagaggctgcaaaggtgagcagaagacttccttgcacgtatatttccgcacgggttcttagaaaagagccagaattagcataaaattaacgacacataaagtgttggccccagtgccgtacagaggctgcaaaggcgagcagaagacttccttgcttttatatttccgcacgggttcttagaaaagagccagaattagcataaaattaacgacacataaagtgttggccccagtgccgtacagaggctgcaaaggcgagcataagacttccttgcttttatatttccgcacgggttcttagaaaagagccagaattagcataaaattaacgacacataaagtgttggccccagtgccgtacagaggctgcaaaggcgtgcagaagacttccttgcttttatatttccgcacgggttcttagaaaagagccagaattagcataaaattaacgacacataaagtgttggccccagtgccgtacagaggctgcaaaggcgagcataatacttccttgcttttatatttccgcacgagttcttagaaaagagccagaattagcataaaattaacgacacataaagtgttggccccagtgccgtacagaggctgcaaaggcgagcagaagacttccttgcttgtatatttccgcacgggttcttagaaaagagccagaattagcataaaattaacgacacataaagtgttggccccagtgccgtacagaggctgcaaaggcgagcagaagacttccttgcttttatatttccgcacggttcttagaaaagagccagaattagcataaaattaacga

SEQ ID NO: 1948 - DNA, 1496 bp, Heterodera glycines
ggatttttatgttttaacatattttttttgcggcttagttatggcgagagaagcccaaaaatagcattttctccgaacaatttttgatttagagcgagttataaaaacacatattttggcgttttggcacataaaaacatatggcacatatttcggggttttggcacatattttgcacatattttggcatttttgagaaaaatcgtaaaaaaaatacaagaaaatctgaaaatgcaccctaaaaattgactactttacgtttcttaagcatttagaaaatttctttatatatttaaatgcctaaagcagccaaatcaaacgctgtgttaaatcgtcactggatttcaaagttcccggaaggaacttattcaactgatggaaaaattaatccgggactttacaatttttggtttttagcacatattttgggctttttagcacatattttattacatatttcaggatttttagcacataaaaatcccagccctactgatatctcaatattttaattataaaatgctgatgtttatttaaaaaattcataaataacaaaaatcacgagtccataaatgtattgcattgagtacggcgagttgggcggttctcccccgccccgcacaaaatttagaaaaccccagccaattgcaaagtgcacattacgcttttattgtcctaataacctatttatgtacaagacacaattaaataatccattttggtccgatcacaattggagattagtgccgatcacttagccactgttgctttgttcaccatcaggtatgagcacaacgtgtccatcgttgtacgcgccctcaaacacggcgtttcccgaatgatacaattccgtgcgaaagttgagcagacagacggggcaaaacaggcgatatttgagccaacggtggaggcagacgtagtggaacacgtggtcacagatggtgcgcacctgacggacttgggtcattttcttcaagcagatcagacaaatggggcgcctgttggcagcttgcacctgaaaaggggagaaatgaaatttctgccttcgctctgtctggaaaagtgccaaaaagtgaaacgaaaaaacaattgagggacgcctagcacagctgcagaataaaaacccacgtttgcagcagtccctgcggcctcctttcttttgttgcccgtgtgatgtcttgccctggcactgcgtgctttgaatgggtctcttccactacccctgggtctggcgccattatgaactgaaaagtttaaggggatttaacttttattaaagaaatgaatgcaattaagtgcttgctctactgagtctatacgtccagacagcaaacaatttttatttttgcatccaaaaaataacgaaaaaagccatttgctgcaattattagaaccaccttttttggcagcattttcagtttaaggctttaagttgtctcaaagagaacgcattaaacaaacatttgagcgtaatatgaaaaaaagcatgcaaaaac

SEQ ID NO: 1949 - DNA, 3272 bp, Heterodera glycines
acgaatgtttgggttgccaaaagttgttgaggtgttcgttaaggagaataatatataatgaatggcgtgcacacagggaaaagtcgggaaagagagttgcttaaataggcaaatgaatgaaagaggagggaaaagaaggaatgacttttatagtacgatgcagcggggaaggggaaaaaattacaattgcccaaatgccaaatgttttttctctctttataaggggtgcttttctcatcggactgattattttttctttgaattaacaatctttgcattactaaattgcttcatttgtctcttcgttgctcaatcctctgtgttccaaaattccattttgtttttcatttttgaccagcatattgtttgattgttacggattaaccgaaatcgcgtttttttcttaaccaattaaacctaagacctaacccaagttccgaaaaaacccccaaaaattgcaatgtttcttattttgaaatttataattcatttcattatatattgtttttatatttttttcctttttttagatcagaactatttgcgtttatcatcatcatcccttcattgtgcaacaacaacaacacttcaaaagcgacctcatcgccgtttctcatcgttcgtccgtccttcacatcaattcgctcgccgttcgcaatgacacgtcgacgcatcaaacaggtggcgaaatgacaactctctgatcagccaatgcttaaaacgttttgatcaacttgcaggaactggcggagctggagcaggaaccgatcacgggttgcaccgcgacaccgatggatgacggcaaagacttgtaccattggagggcctccatcaaaggaccgcccgagtcgccgtacgaaggaggcacctttcatttggacatcgttttgcgccgcgactacccatgcactccgccaattgtcaaattcgtcacagacatttaccatccgaacgttggagaaaggggcgacatttgtttggacattctgaagcagatgtgggctccggcgttgaccatttcgaaaggtgaaagagtggacaaaacgccgacaaaatatcgacaaaacaaaacaaccgccataaccagactttttggaaaagtgtcgatattttgtcgtgtgaaatgggatttttcaaattcggtagtgccgttttaatctttacccccccccccccccatttcagtgctgctctccatctcttcgcttctctgtgacccgaatccggactgtgcgctgcggcaggacattgcgactatgtaccgcgacaaccgagaggagtacaaccgaaatgcccgtgaatggacgaggaagtacgcgatgacatgacacgacaaacgaccgatggatgggagaggatgcagaagacaaccgccgaagaggaaggaggaggaggacacattcagcttaccctattcccattcactattatcaatgtgttgtatctctgtgttatcatttcaaacgatttgtgattaattgttgcgcctaatgtgtgtaaataaatgtgagaatccaaaaagttgttttgactttattaaaattgcattaaaaaatcaatttttgaaggcctttcccagctccgaaaacccccgggttaatccttttataacagaattggtgaattgttaacagtcgctcttccttaagctaatgaagcggcaaagagtgccaatggatcattaaaaaaataattatttaaaattaaaatggagcggaaattcaaaatttaaatcataaaaatgacgggccaggtcgttttcgcgccgggtcgttttcgcgccagcctagtttttgaactataagttttttcattggcaaccaaatccaacttttttggcatcattcaatagccctaagtatcctctattagcctacaaaatttcaaaaaatttcgttaattttcaacaaacttatgaccaaaagtacattagaaaccgggtttttcagcttttttggccataactttttgaaccttaacgaaattttgcaggctaatagagcatgtgaagggctttcgaatgatatcaagaaaattagatttggttgacaatggaaaaagttatagttcaaaaactaggctggcgcgaaaacgaccggcgcgaaagcgaccccgacccggatgacgacaattgaaaaagagaaaaaaattgagggaaaaaatgtatttgtgattttaagaaaatgcttttaaacaaataaatttcttctgttctgtcattttgtctttattagtcatttaaattaaaatgcagctgtttttaatgtttttttattctttcatctttcatgtctaattaattcatttttacggcaattgaatcattggctttttcgctgtccaactgcttctgctggtcctcaatctgttgctggatgcatcgaagggcgatactgtgccgttccgatgttttctgcacaaactcaaatgtgcccgtcagcacatcagtcagtgacggcatgccgaagtccgccgatggcattttcgaacgcatcgaacgctttgtcaatgcgggagtcggtcggcagaatggtgtcgcgcaccattcgagtccatcgttcttctccgcttcggccaaacgcatgatggcatcatcaagaccaatgcggtcgccaatcgtttgggacgacgtgccgttgttgttgtcaagcggtgccgctggcagcatgatcacgcttggtgatcgccgccgctgctcatcctcacggcgccttgggctgctcagtggcacaactcatgtgcttcttgcatctgttttggctcgtttggcaattgctggaccatgaccatcatcagcagggtggttaccgtgtgccgcagcttctgctgttcttcgtgttccggcacgggtgttggccctgttactgttggtcgcggtccgatccgccagcctgccggcgcgggccatggtgttggggcagcgatgcgggttggcacaactgcgcgacgacggagcagcacgaggtcggcggtggactggactggtcgccatcgttcgacgagcggcactgctggtgctgctgctgctaacacgtcgtcttcgagccgacattcggttggagcgagcagagtgtgccattgtggaaatttaataaaaatggaattgtttaatggcgttttggagagactgttcatttgtcagcagcggtttatatagcattgttgcttctgtttggatcagcagtaggccaacgaacaatcaaaaatgtgttgttgataatatgctaactcgtcatgccgaacgggggagggagggcatgacaatggattag

SEQ ID NO: 1950 - DNA, 1812 bp, Heterodera glycines
  unsure (1)..(1812): unsure at all n locations
ataagtccgattntgttcgcaaacacaaaaaagaaagtgtttttcctactaattagagcatgaaagccaggaaaaaaatgtatttacataaaattggcagccctactcatatttttatttttcagctgacaaatttttataagtttagcatcattcgaaagctctctacatgttttgaagctgtttgtaaaatatttctaagcgattcttataaaaaagttgcaagatgaaaaagtccgaatttttcgcatatttttatccccgatttacgaatcctcgtttccagagatcccgttttagtcatccccgctctccgtttcagagatccccggtttatacgttcctaaatcaaaggctttcaaataattgcttgttgttttaaactagggttgcacccccgaccccgccccgaccccgaaccccgacatttttggccatttttcggggttaaccccgacccgaaccccgacgcttccaaccccgacaaccccgaaccccgacccttaaccccgactcggggtcggggttaaatatacacccctaagaatggcatttttgtgagagaaagtcaagaaaatttaaacaagttttgaatttttgaaccattttgccaaatttttattaaataaagaaaatttgctttcaattatgacatgtattgtggtgtattggttagtgcatcacactgacattactgtctttcataagttcgataaccattgacgttctcatttttaatttatttttttgtgattaatactagagttcgggtacggaccggatccgtatacggatttttacggatccgtagtccgcattttttgggccgatacggatttttacggactacggattttccggatttttagtccgtaatccgtatgggtgcctagtccgtactcttggtccttatccgtattttctcaaaataccgatctctaattaatacattttttaaacaaaattatcaataaaaatagaccattcttggcataattgttaacagattaaacccaaattttcaaaaaatttttactttcgttgaaatttaaaattcaattttcatgactaaataaatcatgaaaacaatatatttcaaaatattgacaaaatatcgaaacaattaaatttcaaaattcgcttggccgagtccaaaaattcgtaaatcttattaaaaaaattggctcaaaatcgaaaatattcagcactttttgggcaaaatctgttaacagacccatgcaaattttcaaaaattttcccggcggcgcctatcggcaccgccggacccctttctcctgaaaagtctttagaaaaagcgcgccgagaaaaaaagatggtttgaaaaagaaaaaagtaatcagaaatttttgatcattttttgaataagattcacttttttcaaattgccggatccgaaaccggtttccggattgggaaaaatttaaattttcacatgttaatatttgtaaaaaccggcaaaatttcatttattaatatagaaattcgatgcaccagaaatgtcgccgccaaaaagacataatgttgccgacaaaataaaaaattttaaaattttcaagatattaaagcatacaaaaatatttatgataaaaaaaaaataaatataaacaaataaaactttattatggaaattataaaaaattttgactatatggcataaggtaaaaatttaaaaaccccgaaccccgaccccgaacgattttgttaaccccgaccccgaccccgaacttgctgaccccgacaaccccgaaccccgacttttctaaccccgacgttcgggggtgcaaccctagt

SEQ ID NO: 1951 - DNA, 5227 bp, Heterodera glycines
ctttagcctcttcttgaccagcacaaagctcgcctcgctgcacccatcggccgatgtccgacaatgaaatggcgccatttggattagagatcggaccggtcggttttttttcggttttttcggtatttttcggaaaccgaccgaccgaaaattttttgagtttttcggtttcggtttttttcggtttttataccgaaaccgaccgaccgaaataatcaaaaaaccgaccgacttttttcaaaaaccgaaaaaaaaccgaatcaaattggagcgatataacctgttaataataataaatttattgctttttttgtgctctttttcattttgaagaattttttgtaaaatattttctgctattttgagaaaaattattaacaaaaatgcaataaaaactaaaaatacacccctgagaaatggaaaattttatcaaaaattcatattcaaaatttatttatttatttacttgactacatttttgatttttaaaatatttatctcatttccatttttagtgtcccaatcgcagcagaaaagttgctgatcacttaatacgaatgattagacaaattatttgctgaaaaaagcagcaaaaatattttaaaattaaaatttttaaacaatttttaatgccttttataaaatcagagaaaacttaaacatttcaaatcaatttcaaattaacttcaccgggggctctgtttcttcaactctcctcgatggatttatttggaagcaacagtttgttcccgcccccgccgaaattaaaaaaaaacaatttttttttatttctagaaaaatttttaaaaagctttcatcgattttttagaaagcttatgattattttttaaattttcccagaaaatctttttattttatttttcttgaaattttctttgaataaaaattttataaatttttttgaaggaatttctaaaaagtccgttttaccgggcggcccggtagtgacaccattcaattggaagaagggaaaagtgtgctaattaccgcaaagaatgaacgaaaaattttgtaaaatacacccccataattcaggatttatccgaaagaatttttttgcggcaaccaatctctgaagagttaccgacccgggactgaaatggccatatgcctttgggactgaaccgtccaattactgaaaacgcatgaattgcgacaaaatagataccaatcgactcctctcggcatgtaacccacgaatctgaaagaattttttgacaaaaattaaattgaaaaaagttgtgggacctcaaaatcgttaaaactatttttaaaccagtagtcagtgaatttagcttattgcgctaaaacgtgctgagtcgaagcacgaaaaagtgcaaagtgaacaaattaaagcaaaataattattaataaattaaaagcaaaataattattttaaataataataataatctacttaattaatgcgtttattttataatatttttaaatctcaataaaactaacatttatagttttctcattttttattaaaaacaaaaaatcagagacttttagagggatggggtcatttcagtacagaaaattatattaataaataaatttaattattttaaatgtatttttaaatattttccatattggttcgaggcaataaaatccatcaatatattttttgcccattaagtggattgcacttttatttttattcacaattgtatctttatataagcttttttgccatgccagccgaccactttttaacgagacgtaggaaaagccgacgaaaggaaagcaaatgctaattacagaaatttatctcgatcttaattttttcttctctcactgattttttgtttttaataaaaaatttttgaaaaatggaggccaaaatggcaaaaaaaaattaattttttggcgaaaaacggcgaaaaattttgtaaaatacaccccataattcaggatttcaaaaaaccaaaaatacacccctaaaaatcgacttaaaaaagaaaaatacacacctaaaaatcgaattttagacttcagcccccccccccaaagccaagggtctggctacgcccttggacgacggtaaggaattaattattaatataaaaaaattacaattttggtctccaaatggcattgctttcttatcgttttgatgttttggtggacaaatattttggtggaaaaagcgaattgacaatttggaatgcgatgacaattttcgactgcattggatctctggaagtatatgtacggattgatggcaaatttgtgcattttccgttgccgggccgtcccctgcccaataaaattcgttttcgttcccttcactttgggtaatttgaaagtttgtatatattagcattttcatatttcttcaggtacattgaccattccgtgatcacttttttccgttccaacaaacaaatttttgacagaattggcatcgaattggaattgtttattaattttattaaaaatgtccagccaatttgggatgtttttgtgtgtgaaatttggccaatttttgcaacaaacattcgccatttgcgccttggccgtagttataatttggacaatttgcgtcgccgcacttcgccgacaatcttcactgatcttgatcaattgaatccaatcgattccgttgatctgttacccgatgtgttcgctgatgatgggccaaatgcaactgctggccaagcgttggccaaatggttgcacactccaagcactgatggtcagtcgaagcgcttgttatgccgtaattattcattaaatttcgaatggctcaacaatttcatagaggtgatccgccatattttcgttaatttgtttttctcaattttgttcagacatttctccgtgccaccacttctgtcagttacaaaattcgaaatgatatgtcttcgtcaacaaggccaattgagccatttgaattggtgaacgaacggaccaaagagaagttgacactgacgaacgatggatttggttggctgttgaaacggtgcccaattattgtggagatggcggcgcagaaatatgaaatttttggctattggaaccgagtcatcttccgtctgtgaaaattacattgggtgagcagaaggatgcttttgtatagagcacggacagggggacagtatcccctgtacagtactttcccagaatcttggtcctcttgtacgttttggaaacgacaaggaatccagttaaaacaggacttcagtccttgtcttgtccctcctgtcctgctggtccatcggaaaccatggtcttggttccagttttttccaaaattctccaggctctatttttacaaaaagattgttcatccaattcaaattgtgcttaatttaggcctttgtctccgccaacagaccaaagcgacgaaaaagtgttctcttttcccgggcccagtgatcagcggaagaagaagtgatcatttgacaaatgaccgatcatttttgcgttatgatttggaatttggataaatattgtttatctgacgtctcaaaatttcataactaattcttaccccaattcaaataaatacacccagtatcaccgacaatttttacgatgaattggcaaataaaaactaaatgacttggcctgctgataatgaaggtcgcttgaaatttttatggctaataattttatcaaataaatttcaaaaaattcacaaattctcaaaaaagaatttatatttttttcagaaatgttttgaaagagttcgaaaagtctcaattccgaatatggcacatcatcttcggcttgcaattccaattaacattggcaagtgccgccatttaattgagcctttccttccgccaaaatgtgaagaagcgcgagtgctcttcattttagtgatgccgaggaataagacaaaagaaaatcataatttgaaaaatttacgtacgccaaaagtcactttttacatttttgttttgttttgctgcgtgtactgctccaaaatcagcaaaaattcaaagtcgggaaatgttcatcgccattaactgctgctgctcattctccattattattctctgctcctcaacgatgttttttgccgttggccaaccgaacactttggaggcaccgctgctgctgctgttgcagctgaacgtgttgccgaggacggaaatgccaacagcgacggcactttgcctggcccaatgacttagactttttgcaaaaatgggcacttcgcgaaacgtgcaaatttaaccgaaagagaccgggcctcatcagtacggtgtctctttgggttaaataatttaaattaattattatgtgtgtttcggccctaaaccgtatacacacaaagccacagcaatcaagcaaagcaaataaattttattaagcaaaataaatatttatattggtttattttattttatttttaactaattattttgaatatcattattcaattttataatttgttagtagtatttttaaatttattttgagcttgcaaggctccaacatttgcattatctgtgtaaaatcagttacacatgtacaagtctaaacgttttccattggctaaacaatatagcaagataaggggaaggttttcttcgtctttgtggatttctctctgcttttgtacttgtcgcgaaatgacatagcaccccgaaaatgggggactgtgaaatttggcatttttattaaattttttaaaaatggggcatcaaaaaatgtccctcttctcctctcagttatgccgaggggcactgtgccagctccgttctcagctggcccagcttggttatctgatcgatttgacaaccgaagaaatttattttttggctggagatgcagccaccgttgggccctcatcgactggtgccggtacaacactttaatcccgacatatgccgtgccaagtgcacaaaagcgtgtttttggcactatcacaaccactgacgctgaagttgcagcaatggcggcacaacaacaaaaaggcgaaaaacctccagcggcacgttgcgcattgtgccggttcctgctatacaaccagaaaaacaacagctcgttgctgctgatcaataaggccgccgtgccattggcgcaatgctccgaccactggtcaaattggtatgaaattggctgtggttggataataaatgtccaaatggatttgaatgattcccatacaaaaaatggtgcttggtcattcattccataaaatgcgcctttttctataaaagttttggtaatagtgtacttt

SEQ ID NO: 1952 - DNA, 1062 bp, Heterodera glycines
  unsure (1)..(1062): unsure at all n locations
atcatcactcaatgctgcggcggtggacagaaggtagcgatgcttctgtcgtgactgattttttaaaataatttccctttttcattttcagaacacggaagagccgcaaatgccggcgggaccggaaggggcggaggccagcgccaaaccgacaggacagagcgcagcacctggtggaacttcagcagctggtggaacttccgcggtgggacagcagccagccgacgcctccaagaaatcattggctccagcggggaccgcatcggccggtgagaggagagggacgggcgggcggggaagcgtttttggttcactctaatactttcattcccatttttagcagttccttcgacgtacgcggcgcccggcacggggacgactttgagcaccgcatcgcagaagtcagcagcgcctgctggaggagcctcggcactgagcaccgcgtcgcagaagtcagccgctggaggagccatgtcgcagaagtcagcagcgcctgctggaggagcctcggcactgagcaccgcgtcgcagaagtcagccgccggtggttccgtgtcgcgggtgtcggcggctggcggagccgcgtcgcggggggcctggtcgtcctccggcctgcgcgggtcctgggtgctctgcccgccgcttctgtgctgttcttcgtctgtgttcggcgttgcttttggntgctcccgtnttgttcccccctttgtgcctcgtgtgctctcttgtctgtgctcgcttgtcgttgtcccgccgttgtgtgctcgttctttgggtctctgtctgtctnttgtgtgtgtgtctgcttggctttccgccgggtctcgctccgcgtgttctttctcgtctcctttttctgctttcggtttttntgctcggttccgccgcccggtctggctgtttttgttttggtggtttcgtcttttgctgtgttgttttcgcgccgtgcttgctcgtttgtcttccgccgtttgtttgtgcgccttggggtttctgccttcgttctttgtggtctggtttggttgtcggcttttccgcttcgttcttgcggctttttggttt

SEQ ID NO: 1953 - DNA, 1748 bp, Heterodera glycines
atttatactctatcccagaaaaatggctatctcttttttggagaaattttatgcctcacaaaagcgcttgcgtatgagacggagggcggtgcacaatcgccattttatttcacagaggatttttatatttagaggttatcccagaaaaatggctatctctttttttgataaattttatacacatacaaatgctctcgagcatgatagggagggcggtgcgcaatagaccttttatttttgagggaatttttaagtttatactctatcccagaaaaatggctatctctttttttgagaaattttatacctcacaaaagcgcttgcgtatgagtcggagggctgtgcacaatcgccattttatttcacagaggatttttatatttagaggttatcccagaaaaatggctatctctttttttgataagttttatacacatccaaatcattgaggtccatagacagagatcagaaatgattataaatgatctcatagagttcccccatatgtgcctaatgtgctctattgtctgtgatcacttgtcattgtaaaaccgttgtgtgatcattatttgggtatatgtatatatattgtatgtatgtataattggctaatcaccggatatcgataacacgtgataattcaagtatacattttcaaaattcaaattttatgctcagttcaaaagcacgaactggctatttttattttggaaaaaacgtattttgctgtggtattttcaagccgtaattgatcgtttgtcttcaaaaatttgattatgagcctaggggtaaatgaattcgttatttgtggtctgatttaattgtcagattttcagcttaaatattgaggctttttaatttctatttgcaataaaccaatttggatgagacgcgtaaaacatttttcagacgccaaaatgtcatggtacgcgtaaaaccgagaacaccacgtagagaagtttaaaaaaaaaatcaaatttgatgaaaaatgatagaaaaatcggtacttgtgggttaggtagcgtccagattttcaaaaaattttttttgaaataaacttgctttaggggttttcagggtcggagaaaccgattccggtatctattttcgcccaattcgaactccgaacccggattcgaacaaaaaagtcaaaatccatttttcaaaaaaattcacattttagagacaaaattgagtcatggcctttttttggttatacgagtcgtcgtcgtgccattttttggttatatgagccgtcgtcgtggcattttttggttatacgagccgtcgtcgtggcattttttggttatatgagccgtcgtcgtgccattttttggttatatgagccgtcgtcgtggcattttttggttatacgagtcgtcgtcgtgccattttttggttatatgagccgtcgtcgtggcattttttggttatacgagccgtcgtcgtgccattttttggttatacgagtcgtcgtcgtgccattttttggttatatgagccgtcgtcgtggcattttttggttatacgagtcgtcgtcgtgccattttttggttatatgagccgtcgtcgtggcattttttggttatacgagccgtcgtcgtggcattttttggttatacgagtcgtcgtcgtgccattttttggttatatgagccgtcgtcgtggcattttttggttatacgagtcgtcgtcgtgccattttttggttatacgagtcgtcgtcgtagcattttttggttatgcga

SEQ ID NO: 1954 - DNA, 6031 bp, Heterodera glycines
ttaagtaatgcttggcaattcgttgtatttttgttcctttgagttttgcaatggtcggatttgggttcgggattaaagtagcacgatgtttagattcgtgatcactgatcaagcgaacccgaaaacctataaaaattggttttaaaaatttttatataaaaaattttttgggccgtaaactgcataagtagcaagaaaaatatatgtaagaaaagaggcaaaacgttcaaataattttgtggagttttaggccaaatttgaaattttattaggattttgtgataatcctgcagaatttcggtcccgacgaaaaataaagtaaaaaactaatatgtacccaaatgttgtaatttaccctaataaagacaaattaaaaattaatttttcgggaccgcaattctgcaggattaccggattttgattgcggcggtacggtaggcacctaatttgtaagggaaagaaaacacaaatttgacatttttattaatattttgccgaaaaatcgaattcttaccagtatattttactcccgcatatggtgagaaaattgtaggaagcgggatcgggaatccgaaattttcccagagtgggatcaccaatcccgtaaaattcccgagggagttccgatccttccggtctgaaaattttcaacaaaaaattgttcaaaagcaattaaattttaattcttcatattattcgataaccccttcatgtttcctattaatatcctgaaaaattcattaagatttaacaagttatggccaaaaatatacaaggaaccaggttttcaagcatttttggccataacttttttgaaactgcgaaattttttgtaagttttcaagctagtagagatttctaagagctactgaaacacattctgattctctttaaaggatagcgaatgaaaaacaaaaatttgattggaactttatgattgaagcaggggcaatttttaggtttttgtccgtgataaaaaataatcttaatcccccctaaacataatccatgcattatcacgcgtagtcctttttaatgaccaagttatttgttaattcttatcaaaagcaagacttatttgtcccctgtaatactcttaaaaatacaaaaaatttcgctgtttcaaaaaaagttttggccaaaaatatttgaaaacctggttcattgtgtatttttggccatatttgttcaaccttaacgaagttttttgaaattgtacatacaggctaatagagaactcttaagactatcgaatgatatcaaaaagaattaaatttaattgcattgaacaaaattatgggtaattttgtgtcgaaattttatttgatagtttttaattttataacaacatagcacctgggaaagtaaatttttttcttcataaaaattgtaatcccgaatcccaacccgacaattttctcgaccagcggcaacactgattgcttcaaccgaatatgtcgtcggcatccgtctttttcttgaataaaatttttgaaaaatatttattaaattgattaaataaaaaatatatagcttaaatttgtttttatttgaattaagccaatcaatatgtcaagcacagttttggtcgttaaaaaaagaaaaatagcaataacattaaagttatatcgcttaaaaatttcaaaaagtttaaaaaaagtatttttataacggaacctttaagtaaatccaagttttaaatggattttgcaatttaattttttcataaaatctttaagtaggcactatttaggttttttaaaatttcataaaaataacctgcgcaataaattagaataacatacaataacaaatctaatccccattacgtcaagggaagaaatattggcatttattacgtaaattagacgtcaaattatgcatatgttaacaaaatattaaaatatttacgtaaatattatttggacgtcattttctgaaaaaatcatataaatatattttaacaaaaataagaaattaaatatcatttaaattcattcgattacgatgttttactcaattgctattccattaattcaaataatttttgtaaatttatgctttggcaacgacgaaagcccaaatgatggccaaaaaactcaaataaatttattaaaagaagctggaaaaaagccgggaaatgagttgaatttgaatgaagaaggcaattcaaatggcaatcaatcagctgataatgaagaaaatgaattgatggtattaagcagacaaattcaaaacaaagtaaaagtttaaattggcaaaattattattattaaaatttttaactaactttagggcaaagaaaaggaaaaagattcacttgaaaaggagagtcatttaataacaaaaacgaaagagcaacaaaatatatttggtaaaatcattttaaataaaaaattttgaccaaaagcgatgctattatgctggccgcaaaaaatgtttaaatattcgttattttctaacaaatttttgtccaaaaataaaaaatattcgaggaatttagtatatttaaaaaaagagtatttttacgaataaattggcgccgctgaaaatttccaaaaaatataacaaattaaaaagaaaaaacccaatttttctctcatgcaaaatttaaaattgctaaccattgaactataaggaaaattatgatgaaacttaaacatttgaaatctctaagacttaaagattttgatttaaacactttattacagcttttagaaataattttcactcttgaactctgtttaatgacaattttcttttgcttttctttttcaaattaattttagaattgccaacggaactgaacgaatttgaacaagatttattaccattaccatgggcattcgacaacgatttgttgcttttaagtgaacaaatccaaaaacaaagtgaaatgctgcaattagcgaaaagtaatgaaaaagtacaaaaaacaccggcggtggaaaagcgacaggaaaatgggaaagcaaaggcggcatgggtggattacggtaggataatacaacaataaacggctttacaggttttagtacagtataccataagccttgtcggtttttgtcagattaagtcaaataatttacaaatgacaaccaaaaaataagtgaaggattgatgaattttttaaaattatcatctgatagagtcaatttctgctgcactattttacgtttttaaatgaattgcctcattaagaaacggttgcccaaaagcgatcacgcctttcccttgctcaaacttctggcacttctaagcccaattggccgaataaaattgcttcattggtagatatttttttggaaaaaagtaacaaacgatggcaaagcgtgaattgcaagtgtttaaaatgttatacgaagaatgcaatgcaaaacaaaaattgctgatccaaatgagcggatttggagtgggaaaaacactttttacttttttaaaatcaaaaaagcgaaaaattaaagtgactgtgactgcaatgggactgtaaaatgtaaataatgaaatgcaatgtgtaaaattttgcatgaatgaatggtatgtgtggaaaatagggagagatgacgacgacaaaagataaaacatcgatttcattggatgcgttgtaatttatttaatgcttttttaatgtgcatttttaagagaatgcgacgtattcattcatattcacatgaaaatcggggaattcgtggcaatgaaaagagagagaaagagagccacggtcttagctcctttatttaagttttcaccagtttcaaagtgtaattttaggctttgaatttaggcattaaataggcacaaaaataggcaaaaaaaattttaggtagcaaaatactagagaccggattttccaaaagtgccggaccggaccggtctgatattttcagaagcaaccgatttccgggcccggcctctcaaaaaccggtcaaaccggaaaaccggattttcaaattgccgggcccggaaccggtttggtaaaaatttaaattttcacatgtatttcacccaaaattgaccataaatcgtgccagatgtaaaatttcggatctatttcacttcaggcgtcaataaatgacctcttcaataataaaatttcaaaaaaataaaaaaattttaaagaattttttgaaaaattttttggtaaagtgcattagtacaggaaaacctagtaagtaattctccataaaaagaaaaaaatttctttcttagatatttgtggaaaattttttaagattttgaaatttctgtttggaaataaaaaaaatttgcgattttgagcaaatttttaaagaaaattaaggatttttagggtccggcggtgccgataggcgccgccgagaaattttttgaaaatttcgatgcaatttattaacagaaattgtataaaaatgaagaatttttggctatatcataaaccggtaaaaaccggtccaaaatgccggtttccggaccggtttggcattttcaaaatgaccggtttccgggcccggcctctcaaaaaccggtcaaaccggatttttccaaaaaacgccggaccggtttgccgggcccggtaaaaaccggtaccgggcccggtccggtccgctctctacaaaatacataaaaacttaatttaaacatttaattttgcttatatttcaattattttaaagttttttcgaataaggacaatttttaaaccaaaaaattttaacaaaaatgaataaaattttggggatcaatttctgtgaaaaatttttcaattcttaggagtgtattttttgatcgaatcttaggggtgtatttttcatttttattgcatttttcttaaggatttttccgaaaattcagaaaaaggcgcaaaaaaggcgaaataggcataaaaataggcattaagcacaaaaagtccaaaattggcaaagttagatgttttttcaaaaattaatttttagaaatttacacttgaattatcacgtttatcgatatccggtgattagccaattatacatacatacaatatatatatatacatatacacaaataatgatcacacaacggttttacaatgacaagtgatcacagacaatagagcacattaggcacatatgggggaacaatatgggatcatttaaaatcatttctgatcactgtcgatgaacatcattgaagcgggttgtagagcatcttgttcttgtgctgtccggtggttgttcaggccttctgcgacgcggctcctccagctgccgacttctgcgatgcagtgcccagtgccgacgctcctccaaccggtgccgacttcagggtggttcctccggcggccgacttctgcgatgcggtgcccagtgccgatgttcctccagctggtgccgctgcggtcttctgcgatgcggtgcccagtgccgatgttcctccagccggtgctgctgccgacttctgcgatgcggtgcccagtgccgatgttcctccagccggtgccgctgcggtcttctgcgatgcggtgcccagtgccgatgttcctccagccggtgccgtcttctgcgatgcggtgcccagtgtcgatgttcctccagccggtgccgtcttctgcgatgcggtgcccagtgtcgatgttcctccagccggtgtctgcgatgcggtgcccagtgtcgatgttcctccagccggtgccgtcttctgcgatgcggtgcccagtgtcgatgttcctccagccggtgccgtcttctgcgatgcggtgcacaaagtcgtccccgtgccgggcgccgcgtacgtcgaaggaactgctaaaaatgggaatgaaagtattagagtgaaccaaaaacgcttccccgcccgcccgtccctctcctctcaccggccgatgcggtccccgctggagccaatgatttcttggaggcgtcggctggctgctgtcccaccgcggaagttccaccagctgctgaagttccaccaggtgctgcgctctgtcctgtcggtttggcgctggcctccgccccttccggtcccgccggcatttgcggctcttccgtgttctgaaaatgaaaaagggaaatta

SEQ ID NO: 1955 - DNA, 978 bp, Heterodera glycines
ttttacagacattcctccaagttgtgctgatcagcttcttcaacggaatggctgctggcatttacatttacatgcagtcagtgccgctgacccacaaaatgtccagcccacgaaatgtccaagtctcgaataaaaatcctaaattactcattttgtttttataaattttgaaaaattttggacatttcgtgggtttttactcttttggacatttcgtggcttggacactttgtgggggtgccgtcagtgcgtatcagcgatgcactcactgatcatcgccggcacatacgcatggcgttggcacatggtactcaaatgggcgttttatattaaaaattatacacataaaatatgcatataaattctcgaaatatgctgaaatatgatccacatggaaaaacgttatagaagtttcaaaatatgtttttcttacctgtttgaccattttcgatgagccgatcgagataaaatttattgagcatttctaaaaatatgcagacccagaaagtcggaaagcaaaatgtaagctagaaaaattttgacattttttcccgaaaacgagtgtttaaaatagggacattttttcggaagcctagaaatccctaaatacactgaaaatgtgaaaattttcgaaaaatttaaggattggaaattttttaaatttatacattgaataaagttaaaaaaattagataaattatttatttatttatttaaaattccgccgctgatttatttggcactgaacaaaaccattcgtacagactttgtgcgctatgccaaaattattgtttacaacaaatgtacacatcgttctcatcaacagcaagcgcaaacactcaacataatgccaatgacggcattgcgcggggtccaattgagaggacggaacaatgccaactttgtcggcacaaatgccaatttcagcacccgcggaaatagcaacagaacacgaccaatatcatatgcattttaatg

SEQ ID NO: 1956 - DNA, 2335 bp, Heterodera glycines
acattttgatcgactgcataaattttttttttaatatttacttatcaattcggtaattatgcagtaagaaaataagtcttggattttcgtaatatatgttgggttgaaattttttgtgggttttttagtctgtttaataatcagggctgcaaaaaatatgcaaatgcatatttttttcctagcttctccatgctctaaattagagtgcagcgggaccgggacctgaacacggacaactgagtaccaaggtcccggttttgaccagtttgaccgggaccggaaaattcccggcttttttcccggttttcccagccaaaagtcccggttttcaaccaaaaaagttttttgcatattttgccacttttcgtgaaactcgccttcgttgagagttaaataattgttatgttgaaatatttttttattaattaaaatttcatttacataaaaatggtaaagaaaatatgaaaaatattctatcccagtaatttggctaatttctaacaaaattcatatagtcttaaaaattttccgcttgcggcgccaatcgacaccaccggacctctcccctcgcacattcactaagttttttggaaatgtgccgcaaaaaatgttaaatctgatttagtgatcccgaatgaactgaaatttatcaaaaatataataatagaatgaatacatttttgatcgaataaaatgtaaaaatatttgaagcaattttgcaaaatgttcttatttttgaccctaaaatcttattttttggcctttattcttattttgaaaattttgaaatagatttggtcatttttagacaatatctatgcaattataccaaaaaagaattgaatcgaggcgatatatcgaataaaggaatgtggagccaaacacatcattcaaaaaaaaaattttgtgccacccccgcccacggggtccgaaccctagtaataatcatttaaatgaataattatcatgcaattaatgttttaattgtctgtgtggggctcaaaccaaggcaacaattaaagaaatatttaattattatttcttctcgaaaaaatgttcctattctccaaattttcaaaaaatattttctctcaaccccatcccccattcaccagtgcttgaaaatttcgtatttcgtgccaaaatacgaaaacgaaacggcacaaaaacacgaaaagatcaacattcctgatgtatagtagtgaagcgttgatgagtgttaatttcaaatatgacccaaaatgacaattttccctgagaaggggggcaaattggtgacctcggcattggcatcactgtccgcgaatgtcagttattaaaacaatctttgggaaatgagtaccataaatctcctcccccctttcaaagtccatctgttcattttcctctaactaacaaatgagtcaattattctcaactccaactcctcctcctgccttcatcaaagcaattcaatcttctctatttggaaacatctgaaagacaaaaatttttaaaacccggggttcactaaactgcatgggcccacctcgtttgggcgctcatgtttgggcgatcacatttgggccatcacgtttgggcgccagcgtgtttttccattataactttgttatttgtcaaacaaatccaacattgttggtatcattcaaaagtttaatgtgtttagaagctttttataagctattgtaataaaattttttccaggcttgaaaatctttttattttttgtatggataacagagcatgttaagagctttcgaatgataccaagattgttggatttggatgccaaagaacaaagctatagtggaaaaacatgctggcgtccaaacgagcgcgcccaaacgcatgggtcgcaaactggataaatgctaattttgccttggattatattttcattttttaatctaatataatattcttaaatgaaataaaaaatagtctaaattgaaaacaaactttagtaaatttcctgcgtttgttgcttaaccttttggcttttatgaaatacatgaaaacaaagaaacgggattccgttaaagaattgacgggatcaggaaaaatgcgggaatcccgtccccagtttaggtatggacgagggtaggtcgggaccgggaccaaatcacggacaacgctggagcgcgcacagaaaaaaaccgcggccgtgcattcaaattgccgcggccgcggaccgcgcaaaaaaaaaaaaccgcggccgcgcaccgcgcattcaaattgccgcggccgcggaccgcgcaaaaaaaaaaccgcggccgcgcaccgtgcattcaaattgccgcggccgcggaccgcgcaaaaaaaaaaccgcggccgc

SEQ ID NO: 1957 - DNA, 2321 bp, Heterodera glycines
tttccaggaatttcatagataaagtgaataaacaagaaaaattcattcataagaattgtctcaaaattttcaaatatgcccctatagtaatgtaaaaataagtttattgtaaaaatcgtttccaaaatatatttttgtatatattttctgggcaaattgcaattgtgcgggtgaaattgggaatattgtgcatattgactatggaatattcaatttaagcccaaatagtttcgcatattaggtaaattgaaatgttttggccataacttttgtaaacctttacgacattaatagatattttgcagtttaatagagaacacttagggctttagaatgatcccaacaatgctagatttgggtgacaaagaaaaaagttatagtccaaaaactgggctggcgccgaaacgagggtgctcctaaaaagagggctcttttgtaaaaattttcttttttttggtctaatatcacataataatgaatagccgggggttttccaggtcactgatcacgaatatggcacccaaaaaatgatcattttgttcagattctaacaaaagcaaattttcaaaaattcgactttttgttcgaagttggtttctcggaaggcccaaataattgtcatattcgtgaccaacgacctcgaaaacccccagatacttggttcaggactttttaaaccgaaaagaaaaatttgaaaaaaatttagggcaaaaaaaagtgaaaaaattttcaaaagagccctcttttaagtagcgcccttttctccttttcaagaatgggcacacaattaggtatgcattaatactgtgtgttcagaaatgacatttttttaggcgccttggcatttgatggcccagtcaaagacattcatgcaaatgtggcacgtaatttttaattgacgaaatctggcaatatttgattattatccctttgttttttggctataacttttttatttgccaaccaatttcaacattgttggtatcattcgatagccctaaatgtcctctattagcctgcaaatttttgaaaatttctttatgctttaaaaaagttatggccagaaaatttcaaaaaacatggttttcttaacatttttggtcataactttttttttaaacaaaacgaaatgtttagcaattttgcaggctaatagaagacatttagggctatcgagtgataccaaaaatgttttgatttggttggcaaagaaaaaggttatacccaaaaaacatgtgttcagactaaaacgaccccaaccgaattttgcatggtcgtcgagtctatgatcattttcaggcggctttatttgatggaatgggcccaattaaaaaaacaatataaaagttaatgaccaattcgtatttcaatttagggaaagtctcggcatggaagaaaaaacggaagagaattttgcggacttcgtttttccgctcaatgacatcaccagcgactgttttcaacagattcttgcttggatgcgcgaacatcacagtccgttggcacttacaattaaacataataattaccagaatcgttttaccccctctaaaattgataaattcataatcctttaatttcccaacgggtaaataaacagtcgagcacactattccacctccataggataagtaaatattagtgaatgttagtgtttttacggatgcaaaaaatttcgctgcccaaatttcgccgaagaaattttttaaaaaattttcaagaaaaaaatattaaaattttttatatgaaaattccaaggggaaaatgtttgtaaattttttttttatcgacttttggaaaaattttcgaaacaatttactaatcaccatatatttcatggaaaatcgctgaaaaatttttttttttttaattttgtctctgcgaaatttcggctgctaaattatgtcccgtctcctgtttgtacatcgtcgggggccaactgagtttctgaaattttggtgacacaaaaattcggctccttttcagaccttgccgagccaattgtcaaggaggacccggtgacgcaggaagtgagtgctcttcaaagcaaactgtgaaaagaggccactttaagcgcatttggttcaaattcaccgattgggaacgccaattcttcgacgttgactttgaaagggtcaaggaatactttttggcctccaactttttggacattcgttcattgtacctctactgtaagtaaaaaaaaaattttttttttccatataaaaaaggaaccattttacggttggggtcgaatgagcgccagcccgatatttttgaacataactcttttcatagttccccgaaaatgagactctaga

SEQ ID NO: 1958 - DNA, 2803 bp, Heterodera glycines
tttttcgtgcgaaatttaaattcctttatttttagcgccgggggctccagccagtcgtaatttttcaattggatgaaaaagggatcagaaaaaaaatcattttgacggcttggattttcttaacgactttgcattgttttcttttgtttctcctttttatttgcttcttaatttaacaaaataaaagttcaaatgcctttggaaatttttgttggactctgacgggcgcttcggctaattaattatactgcaaaattttgtgtttaataaataaaagggaataataatttacttttaaattaattgttaatgcatcatccatttttaatcttattttgcttaaaaaaatacatagaataatttgcacacagtccgggttcgaacctgacccatcccccctcagaaagatgcctcagaatccccatttacgaatggattttgaggccttaatgaatgcatataagctatataccaaaaagttacagggcctccaaaatcgaaaatttggctgtgttttcacatgaagttggtggctcagttggttaaattcctaatttttggggtccgggttcgaatccaacgtaaaaataaataaatgtaattaaatttttaacaaattaaagattttaaaaatacatttttaaatagggttgcaaccccgaccccgaaccccgacatttttggccattttcggggaaaaccccgaccccgaaccccgacgcttcataccccgacaaccccgaaccccgatcggggtcggggttaaatatacacccctaagaatggcattttcgtgggagaaaatgcaaaaaagttagacgaaatttgaatttttttaaccatttgccaaatttttattaaataaagaagatttgctcaatttggaggtgctgtaacatttcgacagtggctgatttcgacagtgacagatttcgacagtgactgatttcgacagtgacagatttcgacagtggatttcgacaatggctgatttcgacagtgacagatttcgacagtggatttcgacaatggctgatttcgacagtgacagatttcgacagagaattaaattattattttattattattatgtattcacatgaaccatccggaatccacggtttgcccgaagcaaactgcctcagggtcaaactgacccaaaaagtcatttttatttaaaaaatcactatgcttaatgaaaattgatatatgtgtgtagtaaaaataacgcatctttctcttattttcaatgtggtaaaattcagtggtactttggccgttggatagtgataaggccggtcgttcagtttatctcgggtggtcaattttcttgggaggtcattttgataagagaatttggagaggaattgttttggcattcccgaatgctgatggtcattctcgagttgtaattgctggtgttcatcatttgctgtttttccctctattccttttccaaattcattggctcatggctcttctccgattcgcagaaactaaaacaaatcgcgggaaaattcttctatctcgtggtggatatgagtacacttttgaggttaaaaagctaatttaatttggtgaaaatgttaaacggcaagttctaaaggcggtttcaaaaactgaagacggaatggagtattggcgttgccctaaccgtccaccttattgcccagggcgtgcttgtgtacaatgccgcagggaagtcgatgacgatgggtcgcaatataaaattggacgaattaccgggcagcataatcatccacccgttttgggtggtcatatggtagaaatttaaaatgtaaagtgcgttaagtagctaattaggtgagagaagcatctgaacgtctccgacaagaggcgaaaagcgaatttccgacaacaagccgtaacatcatcagagaagttcggtcgaaccttagtgatgaggttcgggcaatcagtgcaccatctgcagccgacatgaggcgaacatataattatcagaaacggaagcatcaggaagaggcaaaatgataatttaaaaaataaattaaaacaaaataatatttaaaaataattggttaggtcggcgatgttggattggatgtctacccgcatcgcaaatcacatcataccggacagattgcgtgatcgtacaatttatgatcaaacagttaatggggaaaaatgatcattttttgttctcgttttgacctcgatcttttggcgaattatcactttgttatctaattttgtcgtattctcgaaaccatcaatttgacgtcttcaaatgttccaaatggcaaagttaactaaaccagatacaataatattcgaatgcacaattaaaataaaaattcaaatttaatttcattagtacagtaaacagtaaattttaaaaaataacatttccttttttatgtgaataataataaaataataatttaattctctgtcgaaatctgtcactgtcgaaatcagccactgtcgggaatgtcggaaaactgtaaaataaatgaaaatatttcactgtcgaaatcagtcactgtcgaaatcagccattgtcgaaatccactgtcgaaatcggtcactgtcgaaatcagccactgtcgaaatgttacagtaccgactggatgtagtccacttggccgagtggactacatcccagtcacaacaaaaaggaacttcaagttttatggctccagtcacaaggaatgaatgatgtgccttcaggattggttacctccgtcgggctcgacttttcagtgcaatgaatggtgcacctacttcctccctcttaacggccccccttgatgaatgatga

SEQ ID NO: 1959 - DNA, 2060 bp, Heterodera glycines
ctgtcgaaatcagccattgtcgaaatccactgtcgaaatcggtcactgtcgaaatcagccattgtcgaaatccactgtcgaaatcggtcactgtcgaaatcagccactgtcgaaatccactgtcgaaatcggtcactgtcgaaatcagccactgtcgaaatttcctggcacgtactaaactgacccggtccgagaaaatgcatagtcataatcacttaaatgaataatttatctttgttattaattaatgttttaatggttacctatcatttcgtcactgatccgtcacgttcatttcgtcactgagatataattttaaaaaatattggctaatttcaataaaattatcttattaaagtattacctaattggtttaaatttctcaaaaattatttctgggtaggagtaggagtaccaccggtggtagcccctttttcgaaaagatttttagattttaaaaaggcgaaaaatgaatttataagggttttgaggtcgcagatcacgaatttgagtgttatcctttcgatgtggattttctgctgctgctttctgtataaattccagcaaaaatgtgacgcaaattattgtcttgatcaacatagagggaattgcgctacgactttccctctaatgctattttctgacgcattttcataatcagcaacgaatgttactgtaatgactgatcgaaaatagctgtgggagctcaaagtgctgtgggagcaaaaagcaaccggggccaaaatgaaggaaagatggccccataacaacagtcatccctccagtgttggatgtggtctagtggctaagacaacggatccacgtaaggggccacgagcggcggttcaaatccggccttacaccccaatttttcgcctaaataatagttaccatcgctgaaaactttaagcattccttttaacaaatttattgatgaatgcatgatccctggttttttgtcggagttgaatcgaattggtcattttatgaaaataaaacggaaactcaagtccacaatttgcgagaaagcctatggaagtatataaaaataaataaaacaaagaattttcaataattaactaatatttttaaaaattatttctcagtgacgaaatgatcggccaccgttttaattgggatttaaaaatttataaatttgataccacaaatggttgaaatagcgaagacgaattcggacaatattacaattttagcactgtccggcacagaattagggtcaggtgactaaaaataaaacattttaccggaaaatggattgttctgttttaaactcaatttaatttaaaaattacagcgaaaatgaaaaactaaattatataaaatttcaataattttttatgcatatttagctaaatacaacatcaaaataaatttaggcttcaatgcctttgttcatttatgtgtcagttttatttctgatagcacttcaaaggcaatgccagtcaatggcactggatcaatcattacaatgtttgtgccctctgcattgaacccaattttctcaatttgcatgataaaaagctatcgaagtgcttttgcaaaggaagcgctgaaaattggtaaatttcaggaaatatcgtatttccttcattataagcctcctctcgattagaagccaccctcccctcgaatataagcaccttcttgagggaggttgaacaataaaagccccggggcttataattgaggaaatacggtattattcattaaaaactattgtaaagatttaaaattaaattgaaaatggtttttagacttaggcaatttttagattttttcagaaattattcgctaaagcgtacacacgggcaattagtttctataatttaatattataattttgctaatagttaatgtcctctttttattaagcaaaacgttttcaaaaatttgattattcggcaacaaaatgtgcaaccgatggctgagaattgtgcaaccgttccttctaaaactaataaaatttacagttataatttgaaaaccaacgcttaggtcaacagatatattcagcaggaaagcaattaattttaaaaaca

SEQ ID NO: 1960 - DNA, 1219 bp, Heterodera glycines
ataaatcaaaaacagtcgcatttttttgaattcccgcatttatcatcattatcgatatgcttaacaaatgaaaaaataataatgttcactcactgttgttcatggacaatatatagttgaaggcttagacaaatactcatttaatacttggcttaatgtttcatttttctgcagtattctcaatgcctttgttccttttttctacatatatatgcatgaattttaaaagagtcacagattgtagtaaacagtttgaatatctgctcattaaagggaaaattacacaatcaaatataatattctgaaatttcaatttatgctctattttcttactctttttctacaatccttatcgaatttttctcggcaactcaaatcaagtagtctttcttttttataaaaaacagaattttgcattaacaatttaccaaaaataaattaaacccgaaaagtttggcttacagttttaacttgcacgcgctataaagacggtttattttaagcttcccatcaaaaaaggatcagatttaaaagagtttataaaaatggcctataaaattaaaaaattttggtttttcgctaaattttactaataaatactatggtcattcacgccctttttccagtattataaatcaaaaacagtcgcatttttttgaattcccgcatttatcatcattatcgatatgcttaacaaatgaaaaaataataatgttcactcactgttgttcatggacaatatatagttgaaggcttagacaaatacccatttaatacttggcttaatttttcagtaattctcgtgaagggcctaatttttctgcagtattctcaatgcctttgttccttttttctacatatatatgcatgaattttaaaagagtcacagattgtagtaaacagtttgaatatctgctcattaaagggaaaattttttgggaatgggatgaggtatgggtgcattatttttatttaaatttgttggttgattttccgaaaagcccccaaacctcaaaacattgcaataggaagtcagttttttgactgatgaacgttggtgatcagagaaatggttggcggaaacagcgcgttggattttcttttgatgtcgtcccgcagagtcaagcgatcgttgtaaatgatccagtcctgtccggtttgtgctcgtttggctgtgcattctttttgcatctcacaccgggctgacaattgttcaggc

SEQ ID NO: 1961 - DNA, 6105 bp, Heterodera glycines
  unsure (1)..(6105): unsure at all n locations
aaaaaggcgagaataaaatattacatagaggtaccatgactaatttttacaagtttttaaagactattttatgcgcattagaattatatagagaaatataaaagctttatttacccaatactgacttaataagcaagaacaaaatattgtaaagaggtaccatgaaaaatctatacgaatttttgtagaccgcttttatgcgctttagaattatatagagaatcggaacgcgaaattaaaacggatgatgagaagccggaatatgaaaatgaaacaacaaatgatgaagagtcggaatatgaaactgaatagatgatttgaatgtataatctgatgagaatggttaggcaatgataccagcaaaaaagataaccgtagcagattgttaaaaatgattgttgaataatttttttattatattcaggatttctatatgttcttattgctaagaaatgttctgatttggaggtggtgccttattttcatcagaaagagggaaattcatgaaaaattttgctaatttctaacaaaatttcctccataaaattgttaaaatcgataatgggagactaaaaataaaatattatctatatttttgatagaataaattgtaaaaataactgatttgaaataaagaatatattaactttttcaacaattattttctttcgctctctaaaaagtaaaaaatgtcattttctgttggaaaaattagggttgcacccccgaccccgccccgaccccgaaccccgacatttttggccatttttcggggttaaccccgacccgaaccccgacgcttccaaccccgacaaccccgaaccccgacccttaaccccgactcggggtcggggttaaatatacacccctaagaatggcatttttgtgagagaaagtcaagaaaatttaaacaagttttgaatttttgaaccattttgccaaatttttattaaataaagaaaatttgcttttaattatgacatgtattgtggtgtattggttagtgcatcacactgacattactgtctttcataagttcgataaccattgacgttctcatttttaatttatttttttgtgattaatactagagttcgggtacggaccggatccgtatacggatttttacggatccgtagtccgtattttttgggccgatacggatttttacggattttccggatttttagtccgtaatccgtatgggtgtctagtccgtactcttggtccttatccgtattttctcaaaataccgatctctaattaatacattttttaaacaaaattatcaataaataaaaatagaccattcttggcataattgttaacagattaaacccaaattttcaaaaaatttttatttcgttgaaatttaaaattcaattttcatgactaaataaatcatgaaaacaatatatttcaaaatattgacaaaatatcgaaacaattaaatttcaaaattcgcttggccgagtccaaaaattcgtaaatcttattaaaaaaattggctcaaaatcgaaaatattcagcactttttgggcaaaatctgttaacagacccatgcaaattttcaaaaattttcccggcggcgcctatcggcaccgccggacccctttctcctgaaaagtctagaaaaagcgcgccgagaaaaaaagatggattgaaaaagaaaaaagtaatcagaaatttttgatcattttttgaataagattcacttttttcaaattgccggatccgaaaccggtttccggattgggaaaaattaaaattttcacatgttaatatttgtaaaaaccggcaaaatttcatttattaatatagaaattcgatgcaccagaaatgtcgccgccaaaaagacataatgttgccgacaaaataaaaaattttaaaattttcaagatattaaagcatacaaaaatatttatgataaaaaataaataaataaatataaacaaataaaactttattatggaaattataaaaaattttgactatatggcataaggtaaaaatttaaaaaccccgaaccccgaccccgaacgattttgttaaccccgaccccgaacttgctgaccccgacaaccccgaaccccgacttttctaaccccgacgttcgggggtgcaaccctaaattatttacaagtaaaaacttaaaatactatgtttagctacaaatacgaatggaacaacgcaatcaggaaataaagacaaagagaaacaagcaaaagctggaacatgaaggtgcactttatgttcttcaccaaatcagtgacgatggacttcggaagtattggcgctgcgagtttttcggacctaacaacaaatgcaaaggtgtatgcaaaaataaaatatagattattttttaaattcagggcgaattcacactgacattaatggtaatgtcctcanaataattggaagccacacatgcgacatgagtgccgcacaagtggagtgtcagcgacgcgtgaccccagctcaagcggcgtgcagttgagacgtgcgaagcgccggcaacaatccgtgcgcaagtattgcagaacacagcaacccccgtgttggccgcttttcctaccaaagctgcgacaaaaaagcagggacggtcccaggatttggcttgggggggcacctccccccgggcgacgacctttttttttttttgcttttcacccccgttttttatgtggcgcggtttttccaaaaaaaaattttgggggaagggggtccggcggtgccgataggcgccgccgggaaaatttttgcggttttaaatgcggtttgttaacagattttgtccaaaaaatgaccaaattttgtgattttgagccatttttagcagattttcagtaaaaatttgtggattttttgtaaaatttagcgacatttcattaagacatacaacaacaatgccgtgtttgctgaaaagagcaaaatgatcacctctatggcttttcttcctgtccaccatctccgtgctggcctcaatgttttgcagacacaactccctcaacaacttattggcgtcttcgattggtgttttttggaatgttaaatcaatttttttttatcttaaaggttcatggacaattacaccggaaggccgtggttcaatggtggtttgacagtgccacggttcgcaaaatatcgtgccgccgatgcgagaattcttcgactcttgcagagctacaatgccatcaacaataaccaggctcaccaaaatgatcacaattaccatgcccttatcaatgttaacccctataacatcatcaatttctccttggtatttctcggaattatgagatgcgcccgtaatattttcaatgttttgttatttttttgttgttaacacattgacaaatctgttatggtgttaattttaaagaatttttgagaaacaaatcagaattggatcaatgtaggacaaaaacagcttgccagactagaacgaccctctgactaaaccggccagactaaatcgaccctctgactaaaccggccagactaaatcgaccctctgactaaaccggccatactaaactgacccccaccgcaattccggcactttttcggcttgaaaaagggcaagcgcgcctctaattctatttttccaacccattttgaacggggggcggaagtttgggcaccgggaagtttgggcaccagaaatttgggcaccgggaagtttgggcactaaatttaggatttaaaaaataaaattatttttaattgtctataaattgcaaccatctaatttaaaagcatagtaaatttaatcaagttacgaatagaaagtttttttaacgaatattcactcgattaagcatgcttattttgctaaactgattaccattcattctataaaatgccttacatatatatgtattatttgtatcattacaaggctcagtatgttcaagatttaaaatttataaatttaaatagtattagacgggtctcttgtcatttcgggcccaactaagacggtattcagggtctaagtccataaccagtacatgtttaattctacgtttaaacaaccgtaagaattgactaaataataagaatgccaggtttccatataaaaactttttaattttcaagaacatagaaatttttgagcacaagggttgttaaatttactaaactttaatgatttatataacattttatatatttatattgttttatttttttgaaaggtgctgtaacatttcgacagtggctgatttcgacagtgaccgatttcgacagtgaactattttcatttattttactgttttccgacatttccgacagtggctgattacgacagtgaccgatttcgacaatgaacaaaattttaactttgccaattctaacatttgaaaacttcaaattgatatcgaaaataacgacaaaattgtgtaaaacgacaatgctaaaatcctataaatgtttaaaagtgcagatgataagcgcaagcgcgaagaaattggatcggatcacgattgaaaaaatcctgcacaagtgcttccaagttttggtcttgacgaatgtatttggcctttctcgtttcatgaggccctttaatgccgtcagccggtgcaagcatcgacttcccaacggcactgtacacaagcacgccctgggcaataaggtggacggtttgggcaacgccaatactccattccgtcttcagttttcgaaacagccttagaatttttcgtttaacattttcacgaaattaaattagccttttaacctcgaaagtgtagtcatatccgctacgagatagaagaattttcccacgatttgttttggtctctgcgaatcggagtagagccattggtcaatgaattcggaaaaaaacgaatagagggaacagcaaatgatgaacaccagcaatgacaagtcgagaatgaccatcagcattcgggaacaccaaaacaattcctctcaaaattctcttatcaaattgacctccaagaaaattgacctcccaatataaagtgaacgaccggcccttccactatcaacggcctacggccaaagtacagtacaactgagttttacctcattgaaaataaaagaaaaatgctttattttactacatcatatataaatttcacccattaaatagtgacttttttaaataaaaatgactaatacacaaatataattttgttcattgtcgaaatcggtcactgtcgtaatcagccactgtcggaaatgtcggaaaacagtaaaataaatgaaaatagttcactgtcgaaatcggtcactgtcgaaatcagccactgtcgaaatccactgtcgaaatcggtcactgtcgaaatcagccactgtcgaaatttcctggcaccaattttaatgtgatagaaagacaggagaattgtgtgaccattagccaacggacaacagattaattatatagtcaacaaagagatcgatccataaattccactctgtcagctgttgctcatcgcttttctttaagttcttccaaactgctccaaatcattgtgagtgggcccagtttgagcttcaggtcggttttcaactgctcaaactgaaggcgaagcaatgaagcgccgttcacctcctcttcaacaaaacggtggccgtaagtgtctgatccggtgacaaaattgacccagctggacacttcttccacctgaggaagaaataaaaatgtaaaaataggagagcagtacaaaacattgacaacaaaaaatagaaaatatttaagggaaaattaaaaaattttcaccacctttcgcaatccaaaaatttaacactattaagaaaattcatttttcaaaatgtttttctgaaaattgagtacaaaagttttcaaaaaagtttccttttttgtgattttttgtggcaattgtttggggagcatagcaaaaaagtgtctagcaaaatatttaaaaattacggtccaagtgtgaactcctcgcgccttcagcgcatcaattacagccgcccccctccttaagatagtaataaactacaattagaagaaaaaaaatttagaaaaattttcagcaatttttttttggcattctatgataaattacttaattttttgaaattaaaaaaaatttctagcggcgtgatttc

SEQ ID NO: 1962 - DNA, 888 bp, Heterodera glycines
tcagggacacccgacacaattccaatctttcatctccacgtacagcatatagcatcagaattccaagatccgcttttgaatttttcacttttcttgtcgccctgtttttggcttaatagtttataacagtatttactttttgtaaatataaaggaaacatactagtaagacaaatttcgtcaactcgtcgccccatttgctttgatattttgttaaaaaaatactcgggcgtatagtccttcgcggcaatattaaattcgtaattgtccaacacgaagttcaaggtgaaaaagttttgcaaaagctcctcataatggtttgaagctgaaaattaagtctttttcttaattgtctgaaggctttgatgcgattgagaacccaaatgaggatgaaatacttactcatctcagatctttgcaataccgacttatgcgcaatgattttgaaaattgggatgatccagagaacgaatagttagttttatattcgctcccgttggcccttgggaaaggcattttcttctttttataatggaaaggcattttctttttataatgatataaaataaaatttccatttatttttccgggctggacagactcatccaattggcatttgaaaaatggtgccgaattgcaacattaataaattgattaaatgaattaagaattggcattaaatataaaatgcaatttcaaaattaaggcatgcaaaagtgaatcgcactgtttacctcggcacttttgtgcttgtttcgctgtttttcggcactttgatgagcctcaaatacgcccaaattgccttttgccaccccaaatggccccagacaggcacaattagcgacattttcctgttcgagtttaagcccatcttcttctctttcatgct

SEQ ID NO: 1963 - DNA, 1639 bp, Heterodera glycines
gcaaaatcagcgtgcttgtctttccccgaaaggggttggtaaaccggtgaaaatttgccgtgattgggatcggacattgcaattattgtccgtgaacgaggaattccttgtaggggcgacccaccccctttatcaacaaacttcctaccccctccctcagaccgaggcaatttttaaaaaatcagataaatgagagctgtactttcatacgcagaccacccgaattggacggggaggcagacaattgcggaacagcaacaacgttagtgacattgttgacttgcgcggtgggcaaggacagctgctgctcgcaattcacacaaaggagacgcgcacatgacagacaaaaacgcgtaaatttctcgtgtttgatacagatttccacacgcgaactttcagtggattgacccgaaattgaagacatttcaaccttaaaacggataattgttaaacattgagtgagtgagcaacagaaacaatcaattaattggtggtagtagaggtcggtggacaagagagtaaatgatcgattatgtacaggatttgccaaggaactgagtcatacacatgtattatgtatgaaaaatacagcacagcccggagtgatttatttccttatcagtttttacttttgacataatacaattattttttaggtaagacttccgtttaaggggtaaatgaaaaacacgtttaatggttctaaaatggcacataattaatagatatcatcatttttttgctataaaacttggtatttcatgctgaaaacaatttttttgaaaaaagtaaaatttggcaattaattttaacttttttcattataagacattggatcataggtagaccaaagtttaataatattacgctacaaaaccgccgcacactcgactacggcggccagtaggtggggcgagacggagggcggaggaaaaagtctaagcaaatgaatatttttgagccagttataatttgcaaaaaaatgcttgaattcttttctgtcactttttgtccgaaaaaactgtacatgtcatgaccagcttgaagccattcattaagatcttttgcctacacattttgatttgctccccaacagatgcgcgggttgcccaaaaaattcataattaataatctaacttttaaaaagaaacatattgcaatgccccacaacactccgagcgttaaagccggtggcatttcccaagattgccacgcgctgctttcccctatttaacactaatgatgggcccgtacttggctgcaatttgggcatcggatttcgtcgggctccaaattgtccagcagcaggcattgttcaggcacacactcttcgcacacatagtgcagacagtccaacaggcgactgggctgaacaaaaaagggggagggagggtgaaagcagcgatgccattttgaccaagaaaccgggcatatttgccaaattttgaggtgtccgcgcccggtttttttattttgaagcagcagttgccatcgttttattttttaatccaaatttatcttatttctttaaaaattccatttaatccgcgcaattactttcttcctagccaaatttctgaaaataagtgaaaattggcgtaatatgctaatttttacgttttcattttactggctaaaa

SEQ ID NO: 1964 - DNA, 599 bp, Heterodera glycines
agcgttgttgtggtcggatagaagaaaaagttagatgtgaaaagatgataattcggcatccaaaagtgtcggtcatttgcaaaaattttccggtggtattcatttcaaacccctcttctcttttcattttcctctcagttttgtagctattccatttttttgtgaattatttcggcgtaaaattacaaatgcgtctggcattgtccgtcattgtttcgactcttcttctggtggctctgaattggccctctgctttggcttccgcagaaattggtcagcgaatgaattgcgatcggtggggcggggagagaaagagagagagagagaaagagatgaaagagagtgagggcgagaggggagtgcgcaattgaggcaaaaatgggtggaaatggcataaggcagagcgagagaaaaaaaaaaggacaaattggcgaacaaatgcgaacaaaagaaatagaaataaaataataaaaaaacgaataattggttagatgattatggctttatttggaaaagcgaaaagggatttatttattttaatttttgaatttttgagtaaaatggttaaataaaagataacataattaattttttttttt

SEQ ID NO: 1965 - DNA, 7408 bp, Heterodera glycines
tgcatagcaaacagttttttctcctgattacttaataatttagctcaaacatcgctttttatctcttcaaattatttttattataaaaggtcaaagggaatatttaaagaatcattcacatgtaacttttgttctcataataaattaaaaaaacagagattttttggcattcttgatcacatttcatcgtctttggtttatggaataggctgcatcaatcaaccattataatttaaaaaaaattaaaaatatgtatccctatataagtatataaataaaagacacgtgcagcatttaatttagcgatggcaaactatacaactttttcttttttcgatgtcctctttctcggttgagtggatggccaacacaaggtaatctaagttgagctattcacagaatgaatgatcgtacggtccaggggaattgagggtggcagaaaggggaggggcagttggtcaattgaggggacaaaaagtgatgagaggggctgacaccaaggaagggggaggaactccaagcccaatccaaaggggaaccccggtcaatgaccatcttttcatcacattccccaccgacgacattgccgcgccctcgcggcaaaaataacaaagcgatgtggaaaaggggaaaaagcagagagaaggaagaaaaatgacgttaaagagagagagagaaaatggagaaaatgaaatgattttgagacaaagagatgcagccccctgccccaaccgacgaccgatcgctccagcgttgttgtggtcgggtagcagaaaaagttagatgtgaaaagatgataattcggcatccaaaagtgtcggtcatttgcaaaaatttttccggtggtattcatctcaattccctcttctcttttgggtttcctctcagttttgtagctatttcatttttagtgaattatttcggtgtaaaaattacaaatgcgtctggcattgtccgtcattgtttcgactcttcttctggtggctctgaattggccctctgctttggcttccgcagaaattggtcagcgaatgaattgcgatcggtggggcggggagagaaagagagagagagagaaagagatgaaagagagtgagggcgagaggggagtgcgcaattgaggcaaaaatgggtggaaaaggcataaggcagagcgagaaaaaggacaaattggcgaacaaatgcgaacaatagaaaaataaaataataaaaaaacaaataattgtttagatgattatggctttatttggaaaagcgaaaagggatttatttatttttttgaatttttgagtaaaatgtttaaataaaagataaaataaataattttttttttttttttttttgattaaaatgtaatggattaaaaggttaattgattttaatttaaattttttttttttttttaatccctttccgattttccattttctttctgctgtttttccttgtcgccactttgcccattgtttccatcgctttcttcttcctcctttttcttgaaagcggcgatcagttcgttcagcttcgtcttcatcagcagcatttgttccaccacgtctcctgtgcagctgggccatgcggtcgtcgtctgcgttccgacggtgctgcttcgtgctcggattgggctgatgtttcgaagcggactgacgaagcgcggtctttttttgaagcggctccaactggcatttggtgtgggtcctctgcggataccttcgggtgggatcccgggatttcggatgacgtcactctcagctgggcccaacgcattctgcacgaacttttcgaccaatttcggtctttctctacccttcggtcttctttccccgccaattagctctttccattcctcttctctttcctctctctttcttattcgcatttcgtcttcctttgaacggttctgcaacgctttggccatgtcccattccccttccttttcctctcgcgggtcttctatgtagccgaccactttccctggcacatattcttcttccattgtgtccaaaatcaatttttttgagtcctgccctatcagcggccctttcaaagctactttctcattctttctttttgcttcttcttctgcttctctcacgattttccgaatttcttctcttccttcatccattgccttatcttccgctttttttgctgcctcgctactgtctttcttggctttttcctctttctctttctccgtaatcttccttcttattactcctctggcaattctctcccctactttctttctttcctcttttttcttagctatctcactgcttttcctcaatatattttgcaccttcttttccgcttcttcccaatccaactcatcctcacaaagactaatctcggatggagccctcagattgtttttggccttcgcttccacctctttttgcactttctcttcgctctctcgtttcgctctttcctccgcttctcttttggctctttcttccgcctctctctgcgctctcgcttctgcctcttttttggctttttcttccgcctctctctgcgtttttgcttccgcctctctacgggctttcgcttccatctctcgcttggctctcgcttctgccgctttttttgctttttcttccgcttctctctgcgcttttgcttctgcctcttttttggctttttcttccacctctctctgcgctctcgcttctgcctctttttttgctctcttttccgcctctttcttagctttagccgccttccgagcatcacttgccttttcggcctccaaaagcaggagtttttgcttaagctcctgaatctccttctcacgatccgtttccttgttctgtggccaggccggacgttgttttttcagttgagttcccgcctcagttgccgtttctttgtctgattcgtccgacgaaattgacaccaaaatcgggggtggagttggtgacgattggtcgcgagactggcgcactttttcgggaataaaagcttcgtgccgcgatatttggtgtgaaagtaaatatttttgctgtaaaatggcggtaattttgtccaaattatatgttgtataaggaaatgaacggtcgaaatttgaaaataggtgcggattatgcgaacatgggtgaaaattattagtagaaaatatttcttcctcattttttgtaaatttttcattttcatttaacttgagacagtttatttgggcattttccaaatcaaaatcccaagagtcccgatgagtgacttcaacaatcggcataatcatttcttcccaaatttgtcccctcttgccaatcgagttccaaaacattgccatatcattttcggccgtaattataccattttgcctcaaaagtcttttcatttcgctaccgatgtacggtcgatccgccccttcctctacaaaaatttgtaactcttcttcgaatagccatgccgtgatgtaaggcttttgtcctcccgaatatatttcccaatgggcttggacacggtttcttgggattattgagggctcataattttcggagaagttaatataagccaatattgtgtttccgtcgatttgaatttccattagaaataatggatcttccaaagcatcatttgtggactcttcgtcggtgtctgatgttctcaaaaaggctatagttgttttttcgtcttcattttcgtcatctgattcctccagatttgggtcgcccaacgctctcgtttttatttcatcgccaggttcatttctctcttctacctcacgctggaaatatggcttgcatctgtccatatgagcctcaaattctgtgccgtcgggatttaacttcttcagcaacaaatttggcttctcaattccaatcacgcgatacggcccttcgtagttcgcttccagcttatgttttttgtcgacttttcgcaacaaaactagcattccttctgtccacggtatttcattaatgcgtttttgctgctttttcatttggaccgcacattttttcaacttctcattaactttttgtcggatttccgtcattcgcactgtcaaatcgcttataaaaatggccatgtcagagaaatttctgtcatccgcttttggcgagagattcaaatgttgtgctcagaaattgagtcccacaatcagtgacgactatttttggtaaaccgaataagcacaagaatttgtcgacaaatacagctgtgacggtggttgctgattgttcccgcaatggaatggccatcatatatttagaaaaggagtcgacaatcattagaatgtactggaatcctccttttgccgtttttaatggacccattaaatccaaatgtaatctctcgcagggccgtgatgcgggttcgattggacaaattggttctgcgctcatttgaattccaataatttttctccgttggcaggcatcacatgttttaacaaagcgctggacatctccgtccagtccttcccaaaataagcttctccttatcttctctctcgtccgtttctctcccaaatgagcgccttggaatgggtcagaatggtattcgcccatgattttcgaccgtagacttttcggcacacatattttccattcgcctttgtccataatacatagcaattcctcaaaaagtttccatctcttcttttcattttcgtttgactcttccccgtctacggttgttttcaatctgatcattattttttgtatttcggcatctctcttctgagcctcgaccatctcactttgtgatgtcttcgcttcgacattcagccaatttatttggggttcagcactctcttccaaataccgagacaaatggtcacaaaattgatttctctttccaggcctatgaattatgtcaacgtcgaatgccataatggctaattggtagcgactcaatcttccctctaagtcttttcgccggaatagagatgttaacgccgagttatctgtgataacagtcgattttccggccccttccaagtatgggcgaaaatttttaagagaggcacaaatggccaacgcctcaagttcaacgacggaatatcttttttcatgtttggtgagaactctgctgaaatagctgattgggtgcacttctccgtcacggttttcctgaagaaggcagcctgcgatggcctttgtactggcatctgtctcaacaacgaacggctttccgaatttcggtggagccaacactggtgccgtcattaatcgctgtttaagttcctccagagcattttcatggatttgaccccattccgttgtattttcatttttcgtcagttcgtaaatcggttgtagaatttcggcgaagccaaaaataaatttccggaaatacgacagcattccgatcagtgaccgcagttcggtgatatttgccggtttctttagtcgttggattggttccaaatctttcgggtcaattcgaactcccttctccgaaatcaaatgtcccaaataacgaatttcaccaagcgcaaagcggcacttctccggtttcaaacggaagcccacctctgccattgtctttagaaaaatgtcaatgtccctcaagtgttcatcctcagtcattgatccaacaatacagtcgtccaagtagacaagaaaagtggccgagcacatttggcggacttcctccattgctctttgaaaagttgttggtgctcccgctaggccaaatggacagcgtagccactcaaacagccccatgtgacagataaaggcactcctttcctcatgtcctttagccaattttatgtggaagaatccactggagcagtcagcaaccgaaaaatacttctttcccgtcacttcgtcaagaatcgattggattctcggcaaataatatgttgatcgctttgtcaattgatttaattttcgataatcgacacaaaagcggtaggacccgtccggttttcgtacaagcacaataggagaagcccaagcggaggaagaggggcggattacattctgtcgcagtaattcttttacttgcctctttatttctggttggagtgccacgggataacgatacggcctttgttgacatggtctggctccctcagtcagatcaattcgatgaattgtcttccccttaaagagaccgacttcgcccggcttcacaaatgcattttcgtttgtttcgatgatttgcctcaattttatcattcctcccggactcaaaattgattccttcagcgagattctttccaaaattggcttggtggcctcgccattttttgggaacgccagagtttcatctgtccaatcggcttccggtggtatttgatcactttctgctttgaatttatgccattcctcgtcgttcatcagcatgttttcttcggtttctgtacactttcgcaacgaattaatatgcgtgtcagctgaaagcggttcaagtacagccaagcgggatcccccgtgcacttttatgtcacaatttccaaagtttaacaagcggagtggtacgattcgagtcgccccggggctcgttagacacttccccacacgcattggaaaatagtcgtgttctctctcagcggtgatgaatgtgtcttctggactcaaatttctgtttatccgtccccacacaaaggaatccgagagcggtggaagagtgtgtgtttgcaaaagtcgtacttcgatcggtcggcactcaatattaacggctccaaccatgggcaattggacgtgccccactcggacaattccctgtttgaagttgagaccaatttcctcttcccctccttgctcgctgataaagtccataaaatcagtcccaataatggcggcacatggacagcctccgtcctcgcttataagaattgggaattttccctcaaattctccgaatttcacgttcgtcagagcagatccaataaaatttatagacgttgaattggcagcacgagcttgtgggaagtctcctcgaagtatgctcagcccgtatttcttggcagttgagagctcaatgtacgtgacatctgctccggtgtcgaacaatgcttttatgtccttcccgtttattaggacattcacgtagcatctcttctttcggcgttgataatgatgaatttgacaaattttcggcaaataattcaaaatgtaggcagtctgttcgagcgctggctcctccggcggcgcggaaggtttcgaaaagggctggagttccacctccataacgaccgggtgtcgaacacgttcgacgacatttcttccggatgtgaaacaatccattaacatttgggtcagggtgccaatcatgtggagcggaatcgtcagaatagtgccgtaaattttaatttttccgaagataaaacatgagccgacggcaattaagacgattaaaatagaaaacccaatccatttgacgtattttattatgccaattcgaggagatcaatcccatgtcttccctttctcaattgtttcttctg

SEQ ID NO: 1966 - DNA, 1751 bp, Heterodera glycines
tggtggtcggaatcgctgtgatcggaattttggttgtcgtggccggaatggtggtggtcggaatcgccgtggttggaattttggctgtcctgaccggaattgtggtggtcggaaacgccgtggtcggaattttggttgtcgtgaccggaattgtggtggtcggaatcgctgtgatcggaattttggttgtcgtgaccggaattgtggtggtcggaatcgctgtgatcggaattttggttgtcgtggccggaattgtggtggtcggaatcgccgtggtcggaattttggttgttgtgaccggaattgtggtggtcggaatcgccgtggtcggaattttggttgttgtgaccggaattgtggtggtcgaaatcgccgtggtcggaattttggttgttgtgaccggaattgtggtggtcggaattgccatagtcgagacggaactgttggatgggagtccatcattttgatttcttcttatgtttggtgtcctctttatttgctgagtggaaaaccaagccaagcgaaacaaagttgaacaattaacagaatgaatgaacgaacgggccaggggaattgagggtggcagaaaggggaggggcagttggtcaattgaggggacaaaaagtgatgagaggggctgacaccaaggaagggggaggaactccaagcccaagccaaaggggaaccccggtcaatgaccatcttttcatcacaacctcaattagctattatcaaactaatgaaatatataatttttgagggatccactggtgctatgacgttagtcaaaaaccatcaactgaaaatttggtttgatataactttgcccaaaatgaatgaactcattaattcttgatatccttcgatagctctaagtgttttctattatcctgcaaaaatttgaaaaaatttcgataaatttcaagatgactaaaaatgttcaaaaaaactttgttttttgagtttctcaggtcattatttatttgaaaattaatgatttttttttgtaatttttcaggataatagaaacacttaggactatcgaaagatatcaagattttaaaatttggtatattttatgcgaagttatgaaaaatttttatgtcaaaaattttgcattttggtctttattttatagtcattttcttcgagaacatttctgactctgggcaattaccttaaaggcacaattagctattataaaaataataaataaaattttttgtgggatccactgcaagagtatctatcatccatagcttaattgggtggatcctgcaaaggtattcggctgctacaggttcatgacctgccggatgtgtaaccttttacgattcctttttcaaaaattgatattaaatctgggtgttaacttgtcaggagtaaaatgttttacagggtgcagtgtcgttatttgaaaactatcataatgtgcgttctttaaaaaactatcaaaataaacaattatgtgtataactttgctctaaagcaactaaatttttatttcttgctatcacttggtagctagccttaaatgttctctattagcctgcaaaagaaatctaaaattttggttgactttgagccaaattataaaataatttttcatcaaaaatttttatattggtgattttttaaataaaggcccgccctttatgatgttttttttgtagaaaaacaggcaaaagaaacaaatgaagaaagcaataataaaaactgaaaaggtccaaataaatttatttctgcttaaa

SEQ ID NO: 1967 - DNA, 8642 bp, Heterodera glycines
gttgtgcgcagcgacaacgcggagattcgcccgggcagatcatcatatccttcagctccacgtacaggacttcgctcctaaattgaaaaaatgtttttatctaggatttcggattgctccattcgcttaccagttgattgtccctgcttccgtcctcggataacatgtggagtacagttccagtccggcgatcaaatcaagcgttccttcgacgaacaccggcaaatcgggatgatcgtcgttgaaaatgtgtacacaaccaagaacacaaagaggattcgggtaatattcacccggggcgctcaaaatctcttctttaaaatgtgtatacaattgttcaacgctgccaagtccaaaggattcttgaaaatgctttatcgctctttgcatgaaatagttagcagcagcaaatacgcaatataattatttttggctgtcataaaatgacagtaaatttatgcaagtgtggtatggaaaattcaaaaaaaaagtgagcatttaaatagtggcacatgatcttagctggtgggcggtccttggtgctatagtggttggattgtatacagcagacgcgtcataggctccgcccccattgttgttgttttgcaacgaaagtgaatggaaaagatcgtattcatttagttccatcgcgtcatgcccatttcgtgcggctccaccacctcccaatcggcggaactggcggaagaaacaaatggcaatcaatatgacgacaacatcaaagaggtaagtcaaggcgagcaagaggcgttcaattccattggacgagaccgctggtacaacaatagctgatctgctatttctacgatcgccgtcttcaccccgcttttcggcgcctgcttcaaataagaggaagttgaagcgaatgtcgcttgagttggtcagaaactggagctgtgacgaaggatcgttgaaatagtgtccaatgcggaacttgtacacctgccttcgccaaatcaggtacacatggtcagctgcaatgaaataatccgttttttgttccggcaaaaagccaacaaaattgcttctcagaacatgtgccgtcctgttcagtgcattgtcagtgttattcagagtccaccatcgctccaaatcgccaatgagcaattcgttgattcggcgttcgctattgtccacaatgtacaatcgggcggcgatatgatcatacaaaatgcgaccatgtgcactcaattgccctgctattttttgctggtgtccacgaagaacggtcacctcacccacggcattttgaaggttgaaaattacaaaactatggccgccatgcccaaaacatgcccatggtaaggcggttgacggtatctcaattgttgtccgtcccaggctcattaaattatccacatctgtcagggcaatgttccacgtatccgggttggtgtacagccgattgatgttcctttccaactcaacatggcatgctgtgtcccggttatagccgaaccaatgttgcgccggtgaagtcttggaaattgtgcgaaatgaacggtcaaaaaagtttggtgggtcaacactcagctcaacattaatccattcgccagcagatagacggagaacatggaaaaaaattacgatgaaggcgatcagcaagaaataaaagaacaacatccttctgttctcgcaatgaaagaaaaaatgtggcgccctccccacttttagtcggccttttatacatggcgcgccagtgtacgtacataccatttgaccaaccagtccgccatcccacgcgttttgcgcagcgtttcaattacatcgcaaaacggggtgccagaacatcggctggccaagaaatagacacaaaagtggccacaggcatcagatgaggggaactgaatttgatgcgtgttgacctgcacatgttgaaaatggttgagataggcggataaatcgggatttggtgccgcacctaggctgtcaaagtattcaattcgcttcgcacatggcacatagcacgctatccaatgttctccgcgtgttccctccctgtctgtgttgactaccatgcagtgggggtagcgacgtaatcgtttctgtctctcaagaacaaacggtattttgttggatggataaactccaatgaacttcccgcttgtaacgcgcattcttcttagtagcacttctatttgtgccgaattcatatctatctcttttttttctcccactgtttaaacacttccgtccgtactcagcactcggtcagcgttgatggaaaggacagaatcgaactcaccaaggatcaacatttcgtaaccgtcctcttttataggcttttcaaattggaccttaagcgtacacgtgccctgacggatcaactcaaacccgggcgtatcgtctagcgtggaggtcatcgggattacgaagaaggcccatccgctgaggaagcgttgcatcccaatggacactgtttttgtgtctgagtcatccagaccaagaccggcgtacatgtcgacaaaagcacgaacaaaacgttgctgtgcaccatcaaacgacaacaggtatggagtgctgggaaaagattgtccgtttgcctccgcacttatcgctcgaacatttgcatgttcaaatttgaagggtgacaaccgtcgattgccagaataagcgtctgtagagacaaagcagcaaatcagacgacggggcaaggttgaagtgaacacgttgtgagccaactcagtcctgcctttgcccaggaaaatggagcgcaactcaattttacgcagcgggtatttggccgaggttgactccaactgacgactgattgccaggttaaggctaggtgtaacatccaccgtgcgaacatacagacgcagatcgtgcacgcgaatacggtattctttgctgttttcctgcaatgttccgtccgctttcttcccggggggcgtaagcagaaggaaagaatcgctgttacgatgaatagtgaatatcacgtcttggttgttcagcatcaatgcactctgatgtgcaagatcaaagttcagcctcaccatcgtttcgcattgctttccgttagagaatcgcgctgcacgggcgatgaagccctcattggtggcactatcttggccatcatcctcatctgtgtaatagcacgccgactcatggaaagatttgcgaatttcatgggagtggcccagttccttcattatgtagtcacgataatgatagtaaatggagctgtcgaacacttctatacccgaaatgttgattttcagtgagcggacaaaactgctgccaaagttttgaattacacccactcgcttatcctccggctcagcatcgctggtcggaacccattcacctgcggcatttttgcgctcaatagagctgagcaaatacatgtatgttttgctcaagtcgcagtactgactgtccgagaacaaacgaaacagatatgggccggtctggttaagtgccgacaatggcaacaattcgcggacgtttgtcctatttatcgccacattcgttggtggaagagaaaacagtgaaaggctaccctcaaggccttcaacactgtctttgtcaattttcttgattacgctcattattgttagttttatgccactgaatttattaagtgaacgtcaagtagacagaacatccatttacgtgcctatttatagattttcatgtgtgtgtccattgacaggcgcgctaccgtgtaatttaaggcgcaaatgtgagttggtctattgcctgtctcttgttgcctctcaacgaatgcattggcaatggcaccttcacttttttcaccggtctcttcctcttccttgtgggggctcccttcccacattgcttcaatttttcagccaggttttccataccatgttttgcgtgtgcctgaatggattccttgagggcctttccctgcgaaagatcctccataatccggcttccggcagtcaccccttcgcgtgacaccgccttcagcatattggaagcgaccggcatcaggaagcgggcaacatttctcaatagaccagcaccacgctgatgccgtgtaccaacaaaatattgcatttctccccctcccacttgttctaaagcaagaagaggtccccaattaatgctatccgggttaaatgtgacgtgagtcattttgttgctgatattttttaaaataatttccgtctaaaatgcagagtgacaatgcaggttccccaattaaatttgacgtatcgtccaaatgcgttctgaatttctatgcgaatttcggaaatgcgtttgttttgaagtgaatgaaatatttcattggtatatataacctcaggcacgtccgtccctcccccactgacaggtgcggccgaaacattgacaactctaagcagaggagccattcggtcacctatgatacactcctcaataagctttggagcataaacatacaattgtttaacaccaccagacagatctggcatatagcgtgcctgttccccatgaaacagacgagtgttgtcaaagcctagcacatatgcaagatgcttacttacatccacatgcagaacgcccgcaccggttatcagaacgaaccgttgtgcaagatcgttgaacacaaactcggcagcggttgactctttttgctgcttggcgacaagtttttcaaagcttacctcttcctccctggaaaacttcatatgttccaacatcaactttaaaatttctcctcgcgtttttgcagaggatttatgcaaaggttcattttgtgtttttttaatcagttccttcaacgcttcacctcttcgcagtgttgaagaaagataggctgatttctgtagatggtgataattttgctgtgcatccgcagtgtcagttttttcttctaatatgtttttcaacagctccatcagtacctgtccacgggtttgttcagcatcagcaaattggtggtggatgacatcgcccatttgctgttggttagtcggcaccgttgatcgcaacagtttccacagcatttctccatgcttcggcgctcgcccatcatcatcattatcttggggtgggtccccccattcttttttctgctcctcgctctgtttaagtcgggcaattagcgtttgaccatgcgcgattttctcatcagtaccgctaccatcatcttgttttgcattggcagaatttgacttatcgtcaactaggtgcttctgctcttgcgatattttttcttttaacgtctcaccacgtgtttttgttgctgttgggattgtttgctgaccgacagctgctttatcatcatcgtccgtgcgcttttgttgatccaatattttctcacgtactgcctccccatgcgttgtggtagctgcttgtggaccggcatctgctgtatcatcgttgtccgtgtgtttttgttgatccaatattttctcacgtactgcctccccatgcgttgtggtagctgcttgcggaccggcatctgctgtatcatcgttgtccgtgtgtttttgctgctccagtattttctcttttaatacctccccatgtattgttgtggtagctgtttgtggaccgacatctgctttatcatcgttgtccgtgtgtttttgctgctccagtattttctcttttaatacctccccatgtgttgttgtggtagctgtttgtggaccgacatctgctttatcacctacttcaccatccgttctggcagagatgcctgtacgtttttttaacgcctcccttccgatcaatgccgacgcagtcggtgcagtaattgtatttgctgctgctgcaacaaactgttgttgctcatcacgcttttttgcctcaaattccagcgcagcgaatctctttcgtctgtactcaatcatctgttttgctcgctctatttgcttttcgaaagaggcattatcctttaaccctactgcctttgcttgcagttcttctatcttctgaaaatgttctgtaagacccctataattgttgtgaataatttgccaataatttttgggatgtttttgaaaaaattcctcaacaaatgcactattctgctggtggctgagctcctcatattccgacaaagatttttggtggtcacgctgaagcgcagcattttcaaagatggtcaaattgtgctgcatgtgttttatttttgtgcgtattttgccaacctcggtgttaagctgacgaattttatttatatctttttcaccaatgtacttgctcatcacctcttgcagccccgagagatgttgtgtgaatataagtcttgactcgttcaattttttgttataatcttcgggatgatgttggaaaaaatcgctaatctttctttgctcattctccggactttcctgatcacgacgttcagcagcgcgttccaactcttccagctcttcctttttcctctgcatacgaatccgtttgagtggaagctcgctttgtatcagttttttcctctccacatccgtagtgtctgccgaaagttcactctcctcctgttttacctccttttcgaactgctcttgtttggtgcgtaattcgccaatcttttcccaataatccactggattttcatgaaaaaataggtctgtgacctgccgtttcgtccggctagctccatcatggccagaagaaaattgctgctgctgatacacctcacgtatgaggctgttcagggtgagccgcaaatgttctacactcgaaaattgcatgcttggaacctttagttctatatgtaaaaattttttgtcgtctaggaatctatagttcgggttaacaagtttaatgctaatgatatcatcctcatcaattccgactgatggaaatgaataagggtagattatagatgctagagcgacggtccaatttgagtccaactccaacgtgtgtggaagccgaaccgtaaaatttgatgccgtattcgttgagcctggtgtgttggacggaagtacaatgtaaaattcgtccatttttgtatcaattaatttcggacaatgtcctcgtctcgaatccaacgattgtgtttgtcagagtagccaatccacctcacaaagtgttctttgacgccttttctgcgccgggtcttcagcacttcagctctatgcgctgtttctgcaacggtttttaccagctcttgctcgtaaaaaatccctttaatgtcttccccgtcttgatcacggatcctgtaggaaggtggatcggtcggattcactttagaaatccgaaacagttcgtccgtaaaattcgaaaataacctttcgaaaaatcacccttttctttgcttattcgcactatgtctcccaccttaaattttggcgttttgggactcgactcgccttgcttatatagccgattccgtagagcagaggcatttttaaagttaacgtccgttggccttagtccggttgttcggttcgcggagctgttcaggttacgcacaatgctgtccagcacatcaacccaccgctttgtgttcttttcgctaaatacttgtaaagtcgctcctttagcgtacggtttgctttccacaactccagcatgcaaatgtgggctgtacatcacgtgcttgatgatctccttttgtttccagtagtccatcattttctttgcctgaaactcaagcccagcgtcgctgtacagcttattgggcagcacacctgctttattgcaaatcttctcaaatgccgcaatcatgtgctcactttttttggactctacctctgcagtgaaaatcttccgacttagcacatctatgcactctaggatgtagcgaaatccatcattatactccttcagcgcgtccatgatgcacaaatcgcattgccagtccgtgtgtagtccgctaggcacagtttttagtctgcggaagcggtttttgcgcggcttaaacaacgtgtaggtgcgctgtttatgcaaaaaatggtcaacatcacgaagagtaatgctcggatttcgcttccttcaatactttttgaatacctgcgtaacttgccggcgacccaagatcgtaatacacttgttccagtaatttttgtactacagctttgcccatagaagcggtttaaagaatttacgcttcgtgttatttggttgctctattcggctgagtcctaccgtttttatagcgtttgctttaacaagaacgaatttttttgcgcttgctccgcttactaccaccctctccccgttgggaatggaaaaatttcatcatttccgggtcgctgccaattttttgaacaaaaaatcgatgacctttcggcacatctgctctctgtcctgtcaggtacattaaagaatcaatgtagttggacctaatcaccggctttttgaagttagttaaaatttcaccggacgatttatctactccgtacttttcggggtttcgttcaatcatttcctgtagcttatcgtaatgctctgggcctgttttaagttcaagaaacttttgttgtctctttttgcttagccgcaaatctgtctcaggcgcagacgtatccgtttcttcaccaaagctggcaccattgtgagtttggattctggaagcctgaaccgattttcgtctgatcttcttattaattttttggccatcctttccgttcacttcttcaatccggttgagtgttggtttttgtatgcccatatacggggcaaatgttttttggtgctatgcctgtagcgttttc

SEQ ID NO: 1968 - DNA, 4221 bp, Heterodera glycines
aattttctggtcgcgatcacagtgacctattattctcaacgcaggtaaaatatgattcgttctttctgcagttaaatcttttaaatttaaagaaaaatgtatgagtacgatcattatctttttgttgatttattttcactcaaatgaaattattttatttttaaggtttctaaatatttttttatttgattaatacaagatttgcatcttctttccatatatatttaaatcaacggtaaaccaattcatttaaaaataaaataatttttaattcacaaaattaaaattcattgttcattgaaaaatggtgcaaattagtttaattagctttatttttttttcatcatttgcatatttttaaactaagtttgcaattaaaagcaggttttattgtagagcataaaaggtaaatcgcccggtgggactcgaacccgcgaccccagcaatccgtgccatactctaacaaattagcttcgggcactacttttggaggttctctcatgtcctttgtcccactttctcccatactccgttccttttggcatcacattatagctaaattgacgatgtaaatatattattttcaaaaaaaaccctaaatatttgccaaaaatcctaaaaagtccaaactatttgccagaaattaaaaaaaatcttaaaaatacgtgattttctcaaaagatctcgttcgttatccaattcgttaaaacagttcaaaaaaaaattttgtatgataccagtaagaaagtttttaattttcaattgaatttatctgtttgtggtaacttgcgacacaattattttttacaatcatttttcattattatattaatttgcagaatcaatattgtaaattatttgtttgcttcatgttggtggtacaatctttattctttcttggaagaaattgtatttcttttaactcgtttttgtctttaattagtctgtttaccatgcttggagttggatcgcacgatgaaaacttttagtttaagttttgaattatggtaaatttggttaatttggcttcaaataaagccacaagttaagaaataaattttattgattttattttgttatttatatcaaatttattttggtaaaattatgttgcttcgaagaaattttttcctccgtatttcttgcacactaggaattgtatcttgttctttattcagaattatttaaatatttgtatttatttgctaaataaaaatgtaaatttttgtgattatattattagaatagattagtaaaattttaattttctggtcatgatcatatatgtatttatttgttaaatcaaaatctaaatttgtgtgattagtttattagattagattcgtgctgagtcgatccacaaaaaaactcagtgtgggcgatccacaaaaaactctgtgtgggcgatccacaaaaaatctgtgtgggcgatccacaaaaaactcagtgtgggcgatccacaaaaaatctcagtgtgggcaatccacaaaaaatctcagtgtgggcgatccacaaaaaatctcagtgtgggcaatccacaaaaaatctcagtgtgggcgatccacaaaaaatctcagtgtgggcgatccacaaaaaatctcagtgaataataataattttgtattatattatgcgcttcacaaaattcatgtgtcaaatcaataacactcaatattaaataattttcgctgcctgtaactgcaaaattaatatacatatgaattttatttaaaaaatatatatttataatattattctaaactagaaaaatgaataaaatttttattttatttttttcttatctctatttgagtattcggtcaaggaatgttctttttttgtaaacggaaaaccgatcgaattctgatcatttttaattaattatacgcaaatagtaaaacaacaccgtgcaggcaaatgctctgtatgcttggatttttggttatgcgttcaatttgctcaaaaagaaactcatttgtaaaattttcgagcgaaattgagagaagctgatcgtggacggtcacttggacctggaaaaacacttttaccagcttgctttctaaaaaaaacatagaaaagttaaaattgatgaccaacgatcattgtttgcgtgtgcagtattgcttccaataacatatcctgcaaccacgctgccgatgattattggtgtcaacacggcagtcactgccccaattatgagcccaacactgatcaggtctcgttcatttcgagatttggcattttcagtaatgttttcagcagaatttggtgtgcaaatcaagaaaattagaagaataatttttattggaagcatttcaagccattccattttattttattcttttttcaattttagtatgaaatttcatgccattccttttgtttacccttttttttgcattttttgccataaatgacaaaagatatttatgcaaaaaattagaacaaaaatgacaaatttttatttgttctttttaaatttatcttgaaatataatggtataaatttaattataattaattcagtgacacgttctatataattaaaattaattatttaattattcactgagattttttgtggatcgcccacactgagattttttgtggatcgcccacactgagattttttgtggatcgcccacactgagattttttgtggatcgcccacactgagtttttttgtggatcgcccacactgagtttttttgtggatcgacctagcaccgattagatttactcgcgtttaggctctcagatgcaagaaaggcagaaacaatggagcgttaaacattttaccctgcctgtgctagcttgttccattctttataaaatgataataaattctttcatttaataatgcccaaagcttactctggtgaaacggtaaaccaagcaccgcgtcatttgaaaatctttaaaaaagaaattatgtttatatttttacaagaaatataaaattaataataatatttggtaattaataaattttattttattttaaatatggttccttattttccataaaagattattaaggtatagctttttctgattttaataatgtttagaggcaatacgagttattctttgtattcaatattaaaattatttatatatttctaacaattgagaatataatttcattttttattccttgataaaaagatgaacattttttaaaattttatatgcgttcctttcattagacaatttaagcatttcgtaattatttgcattttaattttaaataattataacaagcgctattataatcacatattttttaaattagtatttaatatttttatttgatttttttaccgaaaattcacgcaacatttctcgaaatgattatatatatatatatatatttttatttacatattatgttagtaaattgaaaagaatagttggttacattttaaattttgttcacaatttctctattgggaatctcattcgaatttttgtatgcttatacattaatttttttaaagattttagatcatcaaagaaataattgcgtaatcccaccttttcgtttaacgaatattgtatagaaaatgtattcttagtttacatagaataaaaatgcttttttagcttattctattcgatttcctttagaaattattgttataaaagaaataatacatttggtggtgttcttcgggggtcatgtcttttttctgataaattgttttgtaaattgaaaactttcagctaaataagttccaacagggaactttgaaatcctcccatgacattaattaagaattcgatttgtttgtttgctttcaacagttgaaataaatttaagaaatacgcaaaaaattgcttttttaggaatgtatttttcaaattttctcaaaaatgccaaaatatgtgcaaagtgtgtgcaaaccccaaaatatgcccatatgtttttatgtgccaaaatgccaaaatatatgtatgttcttatgtttttacaagttgctctaaatcaaaaattgttcgtagaaaatgcctatttttgtagaccaacttgtttatttattttaaatatagtaaggttttataatccatgtaaaaaagtaagaatattttgctcatcttgatatgttttgtttgaaaatatgaaatctttttattaaatttgtgacttagtcttgtcaaatatattttggcaaatttttaggttcttagtttcgcataaatttttctctattcatttccc

SEQ ID NO: 1969 - DNA, 2158 bp, Heterodera glycines
tgttaaggatttttgaaagtatttatgatgataattcttgctagtttttaccttcttaaatctttttaatttttttgcgaaatgttcgcttataatttcgttttattgcttttttaaattttgaacataataatgaaaataataagtatttaggtactaattctaatgtcatgtttaattacttcgaattattttaatgtatttttatttaaatttaaaattaagcatttttctttgtttcagataacaataaaatgatttaaaataaaataacatgatatttatttcattattataatatttgtctttaatataattgtttttttaaaatttatcaaatcatatttaaaatgcgttttttgtgttatttgtagtaattttctattaccttgatctccagtgaaaaaattgcatttattatatatattcattactttttgtgaaattaaattattccatttatttttatttttaagttatatttaatcaaattctattaaatgtttatttgtattttatggggtttcttattttattttatgaattattaatttggattgcatttattcaattaaattaaaatgctttattccttctttcttaataatgagattttttaatatcttttcatgcatctctttttttatttgttaaaactatatttttattttttataattataatttatattttcaattgtttgttgtattattgtttatgttttatttttttaataattcaatgaggatacttaatatcagtatctggtattttattatctacataaaatttctttctttgttttctcttttttcaataagctggctccattagtattccgataaaattattttgtcagtactcttctataaatataattattcaaatttaaacgaatattatctcaatagaattattaagcttatccggctcgaacttttattagaaaatatattatttttttaattttaatgaaatacatgtattattaggaattcttttatatttttcggtgctaattcgtttcagaaaatccgccaacatgggagtttataaaattcaacattttagcgaatttttcgacagaacagaaccgagcatggcataactttgcttaaaggcaatcaaatcttggtactatttgatagcccagctttttctctaatatatcgcaaaattttaaaaaaattatcaaatttaacataagttgtgccagaaacattacttgtcttcatacaactttttctaaagttgaccaaattttttacctttccaggctaattgagaaaaatatgggctaccaaatggtgccaagaatgtaaaatttgattgcccttaagcaaagttaggctcaagtacagtttatgcgtccaatggactttcaacatgtgggatgccacggcttaatcattgacaaaatgggatatgtaagatcgaaaccttggcatttttgcggatgttctaacagatatgaaaaggaaaacattttacgtgaatataactagtaattctgagaaaatattcataattttgggaaattctagcaaatctttgtgtcatattgtcaatgtgatacaattcgaagtattgattggacacataaaaatttgattggacgcataaactgtacttgagcccaaagttatgccatgtttggtcgaaaatcactaaaaattgcgcattttatggaacgacccagcacagtatgttcctatcccattgtgagtgtcaattgcattatggatcgaaatgaaattttaattagtaaattctttaattagatttttcatattttccacatttatttgggttgtgtgtagttaaaagattaattacatttttagataatcattaattaaaaaaaatattatttcgtcggaaaacatctttgtatcttaattatttaatttaattaataaattcatttttttaattttgaaatgaaattttaattagtaaattctttaattagatttttcatattttccacatttatttgggttgtgtgtagttaaaagattaattacatttttagataatcattaattaaaaaaaatattatttcgtcggaaaacatctttgtatcttaattatttaatttaattaataaattcatttttttaattttcaaattagattatctatcgatttctttgtt

SEQ ID NO: 1970 - DNA, 2637 bp, Heterodera glycines
  unsure (1)..(2637): unsure at all n locations
tctctctctctcgttctccctctccctctttctctcttctctgtctcttcgctctatcacccgtcgctctatcacccgtcgctctctctctctcttcactctgttctccttttcttccttttctctatttctctgtttctttctctctctctcccttcactctctctactctctttcccatcctctcacctctctctctctcttcgctctttctctctttctcacttttttctcttctctctctttctctctttttctctctctgatatctttctctctcccaccctctctgctctctctcatctcttacctctctctctttctctctctctgctctctctctcccagcctctcacctctctctctctatcttttgcactttctctctcactgctttctcccttctctgttttttctctcttctctctctctttcgctctccctcttttctctttcccatcctctctgttctctctctatcatctatcaattttcccccctctttttctatcgttaccatttctcacttctcgattgggtgctatgtcgttatataaaaaccttcaaaaagggcattatataaaaaaccctcaaatggtatttttgtgtttttattgatttttccttgtgttttgggcgttatataaaaaaccgtcaaaaagggcgttatataaaaaaccctcaaatcaatcaaattgtaagacatttcatcaaaattgggcgttatataaaaaaccctcaaaaagggcgttatataaaaaaccatcaaatcttattgttaccgtattaatttagaaaaaacaatcgtgtcaataaaattaaaaaaaacaatcgtgccaataaaataaaacctatataaaataataaagcattttttaaaaagaaacctttttattgaaaattcacacatagaaatactttctgtatacacactaacaattttataaattatttattattatcaataacaattattatttttttttaattttttaaattctattttattcaaccaattttcatatacaaatattatttaacctattttcaatgaaatttttatttaaatttattcgcctttctcaagggctaacgagaaaaaatagcaatcaacaagcattcagtgaaacaggcaattccatttttgacagataaaataaaaatatttcaatttgtcccgatcgagtgtggcgtctttttgttccttttaaatctgaaaggaaggctgatttatgtggttttttatcagttctttcataccaaaaaaacaaatctcatccaaatttggcatggaccacatttcaccaatttttcgaaacaaaaattcattgttaaagttttccaaatcaattgaaatttcgcggtcgccaaacgaaaatttgatggggaaaaaagtttgaggtactccttatctgaacaaattttttgattttttaaattattaattaatattttaattatcattttatttattatttttaaatttaaatttatattcatacattcacgaccacttccatcttttaaagtataaccaaatacaatgccggttgcaaccgaaccaagtattattggagttagaacaattgccgaaataattgcaatagccgcaagagtccccagttatctttctttgcgacgaattggttttgaaattgtcaaattttgtgacaaaatcaaaaatgcaaaaaaaaaaatttttaatttagccattttataaaaatataatttttaagaaaaattaacccttttataattgtcaagccaatgcacaatcacatgaaagcacaaaattagaaaaattgatcactttatcgccaaaacccattaagaacaatttaaagaattcacattatcaaagaaaccttaaaaaattttgctgcagcaaattttgcaaaatttgatcagtttatcagcgaaacccattaaacgaacaatttaaagagaaagcatttgatcaataattttttggaaaatttgctcaatttttaattaatttcttgaggattgattatagcttcaaaatgcccatgacaatcataataaacaaaaatagaatttatatcactttttaaagaaattgataactaaaatttaagaaaaatgaaataaaattcgaaagaaatatttaccgaattatttgaatctggagaataaacagcccatgtatactttatattactttgggatgtttgaatattcggactacacactataacattgagctgaaaaagctttgctgcagctaaaaagtcaatatttgatgcccatttaaacatttctgttgcatctattgctggcattttatggtttctaatatactcttcgagttggttaatttccggatgaaataatttttgctgtataatttgacatttaatacaagaaatataaaatttgttattgtaaattaaagtgacaccaaattttctccaattgtcttcctgttcttttcctattagaaacaatttttcttgatcgttttttgttatacattgtcttgcgatgtattttgtttcatctgctttcgtagaatattttccaacgcttgttttgattntagaaagatatctttccagtgtagatttacttaggttttgagatgattcattattaanttttttgaagtaagtcatt

SEQ ID NO: 1971 - DNA, 2526 bp, Heterodera glycines
  unsure (1)..(2526): unsure at all n locations
cagcaaacnnncgcaaaaccttttcagtttatcagcgaaaaccattaaacgaacaatttaaagagaaagcatttaatcaataattttttggaaaatttgctcaatttttaattatatttaaatttgccatattaacttttaaatgtgttaataatgctttggtataatggaataaacagccataaattaggttgttgtcaaaaacagtcttcaaaacatttatttgagcgccttcataatcaacatgtattctttttatatttttattaaaattggaccattaacgtttaatttctcgccatacgattgaatatgaatttatatttctaataaaaatacaatttaaaaaaaaattagaattaccttctctccattaacgcaaaaactaacgggacccactctccgtcaccttcaggtgcagattcttgagtgtactatataacaaaggaaaagtgaaaaagtttaaaaattttattttaaataaatataaaatctaataccaatccgtgcacaatatataattgcataaaaggttttggtgctacttcaaaagtcccgtctagtgcgataattggacatttttgcatagcttggcttgcagtttttgttgcaaaaatgattataccatcttctctatttcggtatataacccagctataaaatcaaataatttcaaaattttattccgagaattttaagcagaacttacttatcttgacttgaaagttctttatttaatgccagctttatagaaccaaaacgtgttattaataaagattctggcaaattatatgagtcagttgaaattccgtgtgcttgctgtctacgtctattatatgaacgtctgacggaattataagttgggtaatgaaatgataatgattgttctgataatgtttcggtatctgttgctacatcaaaagactcagctttttgaaacccctagttaaataaaattacaagttaaaatatattttaatttatttcacgccataaacttttaatgttagcagtgcaatttattattttatttcgttgttgtctgtctatctgttctgcgctaaatttttcaattttttctcccaagcagtcgtgatgatgtattgttggacgtgaagaaattatctcggtattttcattaattatttaatacaagaaatataaaatttgttattgtaaattaatgtgacaccaaattttctccaattgtcttcctgttcttttcctattagaaagaatttttcttgatcgttttttgttgtacattgtcttgcgatgtattttgttccaacgcttgttttgattttagaaagatatctttccagtgtagatttgcttaggttttgagatgattcattattaattttttgaagtaattcatttattgttcggatttctcttttttcatatttatttaaaagatttttaattatattgtcattgataaaagagtcaaaggaagaagcacggcttccaccagtaatgtaatcgtaaatccgatttttaaaaagaaatatgaataaaataaataatatacaatatacggcttttgatggtccatgcatttccattaatatgaataataaaaaatataaatctatcgaatattttttttgatgacgtaacatttacataaatccaataattgattacatttaatgtcaatattgtataaaaaatatttatttaaaatgatttattattttatataggttttattttattggcacgattgtttttttaattttattggcacgattgttttttctaaattaatacggtaacaataagatttgatggttttttatataacgcccattttgagggttttttatataacgcccaattttgatgaaatgtcttacaatttgattgatttgagggttttttatataacgccctttttgacggttttttatataacgcccaaaacacaaggaaaaatcaataaaaacacaaaaaaaaaccatttgagggttttttatataacgccctttttgagggtttttatataacgactcagcaccatcaaaacttggaaccctgtcataagtttttcctaatgatagaattcttgaattacagattgaaattacaatgtgaaacgtaaaaattgatcaatcgtatttaacgaggttagacaggcactttttatgcagttttgttgaaaggctgcactggtcgaacatttgtctggatcggcttcccgtcctccccttcaattgtccgtaacaattggatctgttgattaaagcaataaattaatgctaagaaatttatctttccatttaaatggcaccagttcggcattgttgaatctcggcacttcgtacactgaccaaatcaccgcttcgtggcagccccccgtggtcagagagccgttgtagcggaaaaaagtgttcataacggtgggcaaaagatcattgggcatccaattgtcaatttgaacggtggcatcttttattttttgagatttaaatttaatatttaaatttttgactctgtgaattatttaaaatgaaattt

SEQ ID NO: 1972 - DNA, 667 bp, Heterodera glycines
cattgattaaattttgaatctgcccattctctcaaattacttgtgtcgtttgccggcattggcactgtcattcgatctaaaaataaagatcttctggtaaagctttcttcgaccatttcgctctggcatatgtgcagcgattagagcgaaaatagcaatgcgaatgtattcaaccattttattttattggaaaacaaatggtttattattattatttattaattatggcatcaacattttcttaattaaaataaatcttgtcttatatttaaatgaacgttgagttcaatattttttaaaaatttagtgtgcttttgcgttgtttgactcacgtgtgtatattatataattttcaattttcaattatttgatgataattagtggcattattatttccctaaattaaaataaatctttgtattataattaaattaaaattgagttgaatattttttaaatatttagtgtacttttgcgagttttgacaaacggatttcattatttaataagattaataagtttaagttcaattaattgttttaatattagttttaattgtctttgttcttgctatattctagtattttattcaattttttattttaatgattcatttaaagaaatttatgactaataaattatttgttttctaaatgtatcttttaat

SEQ ID NO: 1973 - DNA, 1429 bp, Heterodera glycines
  unsure (1)..(1429): unsure at all n locations
tttgctctcttttaaatgtattctggcttttttcttttatctttccttctctcttctcttcctctctgtctccctcacctttctttctgaatcttcgttctatcccctctctcgcttcctttttcatctctctctatagtttctctcttctctaacatctaattcccaaccactcctatacacccatcacacacacaaaaacgcacgcattcaatcatgcgtgaaaaccgcacgcgttacccactctacccctcccatacgcgccgacagagaaacatacactgcactttcttctctacccagcctttctctattagtccccaattacatttttcaattttatgtttctttttctctatgaaaacaaaacaccactttaggcgcaaattcaaaagggcaaaagtgggcggagcttcgcctcacttaatatataagtaagggatttctatactctcgctttcggccgcaaatgcgctggtaagagacatatatgataaacctacctgacatcatcgattctgaatcggccgttaaattgcgtttctttctgtgtttatatattattattaaaaatttggcagcacttttttcagattttattctatcttgggcatgatgtgctaaatattaaataaaaaatatcttgtttagagcgaaaatggcgatgcgaattgtattcgacaattttatttcattggaaaataagttttcaattatttgatgataattagtgacatcattatttccctaaattaaaataatataattaaaataaaattgagttgaatatatttttttaatatttagtgtacttttgcgagctttgtttgactcacggatttcattatgtaataagattaataagttcaggttcaattaattgttttaatattagttttaattgtctttgttcttgctatattctagtattttattcaattttttatttaaatgattcatttaaagaaatttatgactaataaattatttgttttctaaatgtatcttttaatcaatgaattcatttttttaaattttcaaattcgattatatatctctatatttgttataacatttggattttagtatttaaatattctcatgggcaacatttttcacctcgtttttgctcctccatgtaatccaactgggaaaatttgaaactataaataaaactattcattcgagtatatttactgtttttacatctaataaattttacatatacttttagctaattaatatatttattttatgattagttgattcatttttattaaaagcaataattttataatataaatttcaaaataatatttatttctataacaaaaaaaaacaagcatatattattttttaatattcttttgttatgtatattaatagctatttgtttctnttattaaaattatgattttctattttaatt

SEQ ID NO: 1974 - DNA, 9998 bp, Heterodera glycines
gatgagtttgcatcgtgtgttatttaccacgagccagtgcccgtgtgcaaaaacgataaaattgaattgaaggagccctttcctcccttcaatgatggccatccccatcgatggtttgtgtagtaaaaaagttttataaaattaaaacacatcaaaaaacaatttattctaaataggtgtttttagcttcttttcgatggtcggcatgctctacacctttttgttctattttggaatgtaaggcgttgaaagtgatggagcacgcgtaacacgacctgacactgtcgcatggcaactttggcttgaaaaagagaagaataataaatatttaaaatgattttcatttaatttttgttcatcggtttattttgaaatttgtcatcctcaacccaattacacgttgagaccacgaaaatataccccctaatcggcaccgcatcgaaaatttcaaattttcgccgatttttcatattctttaaaaaggcatattttttcagaacgtttcctattttatggtaaatggatgtgccgaaagaaatacgtgttcatcaaggttggagaaactaagcaaaaagaatgatgagtttgcatcgtgtgttatttaccacgagccagtgcccgtgtgcaaaaacgataaaattgaattgaaggagccatcctccctccaataatgcccgcgcccaccgaaggtttgtgcagcaaaaatttttttataaaaataaaacttaattttataaaatttcgttgcaattaatagtggcatttaggcttgtacctattttttcggatactacttgatgagagaaatacgaaaaacatatattcaccgaacaatttttattttctcagcaactttttagcccctataaaacttaaaagcaggggttagcagttagcacctattggcattttcgaattagcacctattttgggcgttttccaaaaattttatagcaacaatgcaataaaaacgaaaaacgcacccctaagaattggtctcaaaaattttgaaaaatatacccctaaaaattcataaaaatttatttcaacaggatattattgaaaaaacacagttttcgcacaattctttttttggcaacatatccaagcagggaaaagtgtcaaacattggccctgcactctgatcaggcacaagggtggaagagaatttcatatgatttgattttttccaaaatatccaattttggaattaaatgagatggcataggggacggttcagcaaatgcttagtcaaaaatttaaagtcttcgtgtttttatgcttctcgacgaaacccttgatccaattgatctgcagaagtgaatgatttgctgagcagttatggattctaattgaattttggaattatttacattcaacttggattgtgttatgcatttttgtgacggcattttgcatagaaagtgaaagcccatttcgaggccagccccagcattttgccaaatgccaaacgctttaactccttcgccaatatttctgtgtttttctcttcgatattccattttttacagtttttaattgtgtaaaatcatttattttaaacctcatttttggactattcgaatttgatttagtctaggcttaacaaatgcgaggaatgagtcgatggaaagggacccatcgacaaaatacaaagaacagcacaatctccgtgttttatccaactttatattaatataatgtttaacttccctcaacagaatggcacattcgccatgtcttttcccattgtggcacaataacttccgtaacagaaatgaatggcggcgtttgcatttggtcaatgatagaacgaattatgactaaagaagaattacgcaggcgcttgttggtggtcagcattgaacgcagccaaccgaaggtttgcgaaacgcaattagataaaatgatggacgaccgaattttggagtaaacggtcaaacatttgtacagcaaaggagaccacatgacactttcttatcaaacttgatgaataatgggataggaaatttttctcaaaatttggtccacgtaccgcgcacttcaacccgaacccgaaatgctgaatttcaacagcaaataggaccattcccgtttgttgttgaccacaacaacagagcaccagccccacctttaaacatacggcaacaaattttccaccccgtaccactgatgcacaccgcattaaccaagtgtcggttaacgcgcaacgcaacattgactttcagtatttaccaaataatggcgttaatgcaccgacaaacttacaatgtcatggcgacattcagtacgccgctgttaaccctgtcactgcgccatcaaacgcgcaaaaatttttagctcaaaaccaacaaaaattcactcgccaggctttccaaatgccagaaatgaatcaagagcctagacatttccctacctacctatacccaccagggctggccgtgattgaatttccaatcacggatatccgtgagccgtgatcacggggcttccaaaaaaatccgtgacccgtgaaccgtgatcacggcaccccaaaaaccccgtgatttccgtgatccgtgattataaaaattcttgaaaattattatttttttaatttattagcaaaaacgaaaatttattcgcttgaaaatcctgtcaatatcaaattatgatggaggaacagaagttttgcgagattttcgggtgccaaactttttcggagatcattagagataaggcccgcggtcgagaaaagtcgttcactttctgaactcgtagcgggtggagaaagaaatttgggcacaattcttccgatcatcggccatttttgtgaattgatttcccagtaagcataaggatcggattttgccttaattttcgcatctctccaatattcgttcacttcaacttcagccttttgttttatttctaacgctgatgggctgggtgatggtgcctgtgaaatgaacaataatgcgattgtttaaaaagaaagctttactgtattaattaattggtcgaattcagcatctttttcaaattgagaaaaaatgtcggttgaacttgacccgcttgcattattttcaactaacaaatcatcggtatactaaaaattaaaatataaactcaaaataaaatatttcattacgtaattttcattgtgaaaactctcgatttcactgattagccaatttttgtagccatctacgcgattgcaatccaaataaacagccttaaaccgtggatcaagaagggtcgaaatcaccaaatatttttggttctcgaattggtttagtctcttttcaatggccgatgcaattgtatttttgatatttgaaaatcgattatccccctctttacgtaatgcaaacgtaatagcctaaatgctatttagattaagatatattgttaaataattaactttaaagagtggaatgataatggaacttgaagcgtttcggttctgtaaaagcagagtcgcttcgtaaatcggagcgagtacattcttaacagaagataaaagtgtccaatcgtcggcatttaattttggcagttccgcgtgttcaattgccaacaaattcacagccgaacgattaatcaaaaaacgttctaacattttgtaagaactgttccaacgaaccttcaaatgattttttgtaattaattttaaaaaataatataattacctctgtgttttttagcaaaaccgtttgtagtatttcttcattggattggaattcagctaatttttctgtcaaaactcttgactttcgtacttttcgaacaaattttttgacattttcaataagttccttcaatctttcttcttcatcaatttttttaagtccttccttaatacacttaaaaaagaaattgaaattttttaaattttaattaccaattgaagtacatgggcagcgcaatcgattgattcaaatcccaaatcttttgaaactcttttcattgtattttcagtgtcgcgtgttattgctgagattttgtcctccgaaattttaaattcgttcaagctttcacgaataaaagcagaaattgcatctgctgtatgtcgcccttaattttgtgccggtttgctgaccgccaactatttgggcaatcagcacataccgaagtggatgagcacggaatatcacaagaacaaacagatgtaatcaatggaactaataatgctgatcacagctgataaaattcggatagagccaaaagtggagtccctttttttgctgttcgctataggaaaattttaaaaagtgccaaagatagatgcccccggaaatattaatgttttggagcaaaaataaattaatcattgataatgtaaataaagatgacattttaggcataaaaaatgcaaaaaaggcacctaaaaaggcaaaaaaaaaaagtcacaaaacattaaataggcacaaaaatctttgaattgacataaaaagcaaaatttttatgaaaactttttggttgcaaaaacacacataaacttaatttagttataattgtaaataaagtatttaatatttagaagattttttttaataaggacaatttttaaaaatttttggtcaaaccaaaaaaaacattttgggatgaatttttgagaaaatttctcaatcaataaaaccaaactaaaatcacgttttacaagccgaacacaaatcttaggaatttacctaaaatgtcatccctaaaaattgtaaataatacctatgcattgtttaattatgatttattagtatttttaaccgcttttctgatcgttattttttgccccttaaaagtgtgccgttaatttatgattatgtattgcacttaggcttgtccctgggaagcaggatggtgagtttttggcatttgccaaaataatttaaatcaaaaaatttatgataaaagttgtgggaattttgtcataatactcgtaaaaatttagtaatcttataaatattttattttttatttttttaaaactaaattctaatgagcataatgttcctcatgcatttaaggctgtttctagtccaagaaaaaaataagcaagtattaaaagccatacttatgaccaatgtgtcaaatgtactcaattttgtctcaagatatatttttttcttattttaaattttctcatttttatgtgtcctcaatagtgcttcacctttcccaccacccagcagcagattaaattatgtgcatatatttatttccctcaatttcttcgtcaatttcatccatttgttgaccatctatgacgaagaagaagccaacaattgaataatattatatatttttttctacagcccatttatggagaaggacacacaaattggataataaaatcaaaaacaaacgttgagcacaaatctttgaaaaattttgcagaatttttttttagtttttttttaaattattcgctattaaatgttaattggcatatgactctgtcgtccaatacattatcaaattggctctgctgaatgattaattgctttaatacccgcttatttatgaatgttttctatgagagcagctctaatcgctctgttcggggcactgccgccgaagtttgaatgaaatgacataatgccaatcgatttctgttccatttcatgttccttccctcgcccataaatatgctctctttccccttaagattgtcttcccttctttcattttgcatttatatatttgttccccaaattgttgtgactttattttccttctccaataaattataaatatttaattggacttcaacaaaacccctcggaccgaacacgctctaaccgattgggctgtaaaatatgtacatttaaaattatttcttgtgaagagcattaattaatttatattttttaatgatttttcgcagattcttgtcttttgaaaaccgttttttattactgtttcaccgccttagaaatttccacgataattaaaatggcactctgattttgagcaaactaatttcttactttttctccacaattttacaaatttttctgtaattacctagacgtagccggacatttttagcaaatttttgtatgaacagttattaaaattaaaagtgaatttaaaaaaacaaaaattttaccccgatttagccattttagagatcttcctacatatcaccttgaataattgtaaagtagtatgagcaactaatatgattaccacattttactcaattcgatctccttttttcattcgtttcccacttatcgtccctttcattatctaattaattaaatatgcaatttacggaagcattctaaaaattggtattgttttttttggtctcttcaaaaaacacaacaatggaacaaccagcgggaaatgaaagcaaagtgccgcgtaagtgaatgtgaaaaattgaaaatttggcaatttcagggtcctttaaataacagtcagctatatcgattaagaaaaggccaaaagcttaaccaaaattccaacaaataaaaaatatggacaaagatttgggtttcatatgaaaaaccgataaattttatatttaaatttgtataaatgctcggtcaaaccaaaatgtgccacccacggcgttaattggttattagcgcactaattacacctggtatttccagcccatgaaattcgtggtattgcgccggtcggagtgctgctcaacgcatttgagctgaatttgagtgcggtgccagacaaagtgttccggcacgagcttcgcttcgtagccgagtacccaaatacgaaatggggtcaagcggacattcaggaattgacccgtgagcttcgcaatgagtgagtcactcattagcggagtgccaatctcaaacagcaaaaatttgcttaggctgatttttatggcgattttaaaattcgatttaaattcataatacctaataaaaaataaataaaatttcggctctttttttgggggggggagagcgtgcaaaatccggtgattcaattcatcaatcgcatttttaagcggtggtcagcgtgtgccgttggacaagcaaacgctgcaagccgaggcgcagcagttgttcccgctggcactcgccttcgccgcatccaatgagcaaattgagaaaattgagccgaccaaccgtggcagtcagcatatttataattaattaacgcatcattagcttttttgtttctaagctcttgttttttcttgtcctgaattttctgagaatttcatgaaaaaatatctgaaaaagatattttcttttttaaaaataaatttagaaaattgaatatatattttttgccaattgtcatttaagtacgcttactgtctatgtcattgtggcaaccaaattaaaattatttaagtaatgcattaattcaatatttatgaatcccctaaattcccttcagttttggacttttctttggctgcccgtggccaaccgttgccgtgccgttacacattcccatgtcaatttccaaaattctgggctgtcgtcatcgtccaatgcgctgtttcaaaggaccagtgcaggtgcgcctacgattgttttgaatatgggtcaacgattactgtatttgttagaaggaagagatactgtaattgaaaatctccggtacttagttcccgctcaaattttaatccaaaacccgtgacccgcgtcataaacaaattttgaagttttacgggctatagagaaaaccttaattatttattaaaaaaactctcaattggcggtttttataaaacgaccaggcaccaactgtatcctcgaatcccatttttacaactacagtatcactctttgggtagctaacaaaacgtcctttctcacatataaattcggtattttacatattctctaattggatgtgcaattttgaaaaaatttggccaaatcttaaaaaagtaaatgatcaaaaaataggttttacttttctttataatattttttcaaacctttttcatttttaaaaccgattaaattttcatatatttctattttaaattttgttaaatcttcttataatcatcttattgttttttttttcataaataaatttttaaaaatattaaataatttttaaaaatgctattgaattgtgccaaaatataaaatttttgttcattaagcaaaatttaaaatttattattctattactgaccagggttgttccgggttacccgaaacccgatacccgaaacccggcctttttctcgacccgaaacccgacccgatgattttgggtcgggtttcgggtcgaaataagcactggtaagaaaggggtctgggtgaaaattaggtggataaggaaattgagaatttttgttgaaacgattgtgttcaatggaattgaagaaaggagctcaaaaaacgcatttccgaataaaaatttttcgattctgatgtcattatcggtcactagaaatcgggccagggtcgttttggcgcccacgttttggcgccgacgatttggcgcccacgttttggcgcccacgttttggcgccagggtcgttttggcgcccacgttttggcgcgaagccaaaaattaaaaaaggtaaaaatttgatcaaaaattttacaaaaaaaagtgaaaaacttttaccttccaatgggtttttcaaattttcaaaaaattcacaaccccctagaattttttttcaaacttcccgattttgactgtgttttatgggtgtagattagagatcaacatgtacctggatccagccctgtatttttcctggatccaggtacaggcacaggccatttttcggcaacctggatttttcctgtacatttattttcctgtacttatgcacagaaaaaataggtacaggccattttttgaaacaggtacaactacggttttttcaaaatgttgatctctagtgtagatcaacattaaggagtgatatgatcaacttgctgtgaacattttgttggtcaacatgaaaaattgacttagcaagaattttttcaaatttttctcttcgctatgcttcaaaaaatgtcaaaacattttgaatatttttaaacttaaattttttcggttgaaatttcaaaagagttagtgatacatattttcatttattcaaacatagaaaaaatttaaaaacctgaccctggcgccaaaacgtcggcgccaaaacgaccccgactcgtttctgggtttctctctgctcacgaaatgataaccatttaaatcaattgcaaagaaaaaatcgaaagttaaaaattttcgaatttcgcatttttcttctaaataggcttaaatacacggaaacaaattgaaagccatcacacctgcactatgggtacgccccactgtgcagagaaaagcctagtactatctcgtcgtttctctttctttgtattttctctcactttggcgtactatctcttcattttaacaatgtaaaaaacaacttttacttttctccgtctaactttttttctatacgttaaacctacaccaaaatttgcatatcgatagagaaaaaaattctgcattattctatgctcaattattattgtctgtgctcaaactcaaaagttaagaagttcctaataaaaagtatttcttttcctctccttttggcgtactattttcatgtctctaacacattaaaaatcatgaaattcgcaaattctaataattttggttataagggtacaaaatcactttgaacatttagaatcaatagaaaaaagaataaatttagcattttggttagaaagagctggctaggacttgagttataacatgataaaagtttgaaattccgacaacttttttctgagatgacaaattacttaacattcgcttagaaaaagattctccttttcaaaaactttttttttgataccaaatttgttcagtttagttgggaatgaaacgagttatggcagatcaaaataaaaaatacaaaaagggcattttccagtgtcaattttgaaatagcgcgcaaaaatttacgccaaatgcgctatttggcgttatgagcaattttgtctgacactggcgcgtacccatagtgcacctg

SEQ ID NO: 1975 - DNA, 4134 bp, Heterodera glycines
attattataatgtatatcctaaattttcccattttttattacaaaataaaattatttaaaaattcattgagcaacatttaatgtgtgtgctctcttttctgtgcaatgtgtacaataatttttgtacagtcaatcccattttcccatcgacccttagccgcggcatttatggtcggcattggcatattaatctttgttgattcaaatggggttgggggcaaattccgatgcaaattccgtccgtcgtctttgttcgtcgggtgccgtaccatgccgtcgtggtgaccttgctgctccccatgtgggtaattaagtgccattatgatgtgccccgtccaacccattcattatccctaattagttgtataattaggccccgccctctctcatttacatttcgtttatcattcgctcttatagttggaacacaatgaatatcttcattcctctgaatcatcctcgaaaatgataaaatttgtaaaagttgtttcaaatctcgcgcgggactttgatgagggaagggatcccagtgcgaaaaagcctatagcaatcccgcgcgggctcccacaaacattaaatgcgggattaatcccgtggctccactcctagaaggcacagattcacaaacgcggcacggactccaaaaacctgctaaatgccggattttccatgtgtaaacggcaacacgcgtagacccgtgtggccgaaaataggtgaaatgtaggagtgaatcagaatttcttaaaaattattatgaaataattaaaatgtgaacaaatatacaataacccagtacagtacatacatatgtttatttttttacggattttgttaaattttataaaattttagtaaataatttttgaacttttcaaaaatttaattgacaaattcaaatcgatgtgtccattgaatatgtattagtgaaattattcgaaatttgttaattttttatataattacaattaggtaaattttcttaatttatttgattacttaaaatgtctgaccatcccaacgatgcgcagcgacacttaagaaaaatgtgtgttttttacacctttttgtgtacaaaataaattaatttttattgaaaattattgataaatatgtaaaaaaaattttagaaaatttaaaaataaaataaaaaaatttatttaaaaaagaaaatgattaatttggcagtggaagaaacttgctaattatgattatttgattattggcattggtaaattttaaatcacatagaaatgaatttagacattttttcaaaaatagaattgagaatttctggccatatttatagcaatttcatgctactttggtggaaaatttttggttaattttaaaatttcggcaaaaatattttaaaattcgtgtttggttgggtctttgggggtacttaccagtgatggcattccgaggtccgaaaaattttcggaaatcggaattccgggggcaaaaaagaaacgagctaattaattgattattgatataaatgaagttgtttaattttcatgaagtaacaagcaaactttaatgttgacattttttatccaaaattgagtttcatgcttagatttaaaaatattttttttagtttttagccaaattaaacacagtggtggcgccaggggggggggcggcattgcgaatttctggtattttaagcgttttcgtgtatggaggggtcttgggatggagggtacggtacatgcccctctccaccttctttagaccgtccccgggtcggacccccctaaaaacacggaatgccggattttccatgcaaatttgcgtttttgtttatttttctttatttctaaacagttctctatgcgacgacgtcctgttcgacaccttcaaatgcatgtacatcgacgaactcggcttctgcatggcgttggtctgcgaccggttcgacgtgttggtggacattcatctgagccgacgcaaatggatgcttaacacattcacaatctgcgggggcccaccaccatcggtggcggggggaggcgaagcggaaggagaagaaggtgagcagcagaagtgccatgccatgcccagggggccgttacgcaataccccctccggctggctacatacaatccgacaaaaattagtttttaaatgcaaaatttctcggtctctagtcgtaggaccaagaaagcccatttcagacatttatgacaggagtctcgcgggcaatccgtaaatggacattgtatttgtggcgaaggagacaatccgtcatagaaagacaattagtctaagatggacaaagccaatccattaatgaaagacaaataaaattttctgacggattgtctccatttctaaatgattgtccactgaccgattgtccggatataggacaatggataaaaatttgaaaaattacataaataaaattgaataattttaacaaatttgatccgtcttttaattttcacaaatttattaattcatttcgacaacgaatacccaatttgaacttgttgaaggctacttgcttaaagaagcaagcgtgccatgccacatcacaattaaataagtctaaagtcaatttataatcgtagcgcggtttctgatcacttcccatgcttggtaatttgggcacttttattgcttcatcattaagaaattgtgcagctggttgaatcattcagcaagtcaaattagatattcgttgtcaaaatgaaaaaataaatttgtaaagaataaattaaaattattcaagtgatttttttttgaataatgatttttcatttaaaaatttcgtactttcgtaagtaatctcatatttttaggatgttcgtgtgtccgtgtctcataattattttttgtttcattatttcgtatttttattgttattttttaattacgcaatatccctggctacataaaaaccaacaaaaaaaaaaaaaaattcctatgaaacaggcggtggtgccatggtggcacaaattgtcgtctacaaatggcgcactgtttggcgccaaatgccggcggcaactttggtggatggaggagaacaacgacaacttcaacaagttagcaagagaacggaccgaacactgcctattccgcaggggccgctgcccgaccaagtggtcggctttaagggcatttgcattcagtgagtgtgcatggcgccggcatgccatcatgtcgactggccctttgtactcgggccggggccagcctttggcattttgaccgggcatgcttaacggcacacacacaaaaaagaagccgttttccggcaattattaaactagaaaccaaataccaatgagcattttcgtgccaaattagcaaattttttatggctctaattagtagggcgtgtaattaaaagtagagttgagcgggaccgggaattttgggcaaaaccgggaccgggacttgccgggacctgagaagccgggacctcgatttttttcgggaccgggaaccgggaccaatcgggactttttaaaaattcaaaaaaattcaaaaaatttttaaaattcaaattttaattcatttcaattgaaaataatacaaaaataaatttttattttgttttttatttataaaatccaaattaaaagctaaataaattaataaaaactttcaaatcaaattttcagtcttattttgtactgattttcttaaaaaaatgataaaaatgtgtcaattaaacaaaactatgaggaattatattttgtcgataagaaacccatgagtagacaataagcaaattcaaaatattttaatttctgtagagggattgaaccaggggaaagaagaagggaaagtcaagggactagcactaggccatttgcaaatttaatttttttttcctttcactctaatttttatcactaatttttcactcagacccccattcttaccagtgcttgtttttcccggttcccggtcccgctcaactctaattttgacaaatgaatgacttaaaaaacttcttatttttcttagaaagaccaaaaatcgtaaaatttaacaaacttttacaattaaattagttaaatttttgaatttttaataatcctttgcattcaaaactataatttttaattcatcaggaattttcataatgcaaatgtttcagacgcagcgaaaaataaa

SEQ ID NO: 1976 - DNA, 841 bp, Heterodera glycines
  unsure (1)..(841): unsure at all n locations
aagcattaattaagttagcgtaaaattgtatccatcctttacaaaatgtacgcataagaattggtattcattggatgggatttgttttgtcgaaatttaattcccgccattgtttaaattgtgatcatttgaattttaattaccaatgtcaatgtaaacacacttttgcttaattaaattattgactcacaataaatacaaatctttcgcaaatcaacaagttacagtcttatcaaattcccttttgccttaacgatctcggaatgtccttttcccttttctcgataggcaattaattaattaattcattcattgaccattctcacccatttgcttgaccaccatctccgatttgtcattaagccctttctatcggtcccccaattaaaagcttaaacaaaccactgatgttttgtgcttctttcccaatggacgctaattggcttcactcagtgaactatttcgcctttcttacaccaccctgctgcgtgtgaattcgaccaatcaatatttattgttttcatgccgaaataatgatgaccttttttggtactatcaagacagctcagcaaaacacacaaatgttgttttgagcttgtgacgtgttatagcttttgaacaattttcattcattactcacgaaagtcatccgattttagaattttcaggagagccttccaacccctccggacaaagaatccctctttttgtttttanagacataatcccatttaaggtatagcatcaaaattccaaaatttttcagttgactccctattgttacctttcatcatcattagggcatagaataatatgcatttgcatatttttttcctggact

SEQ ID NO: 1977 - DNA, 3987 bp, Heterodera glycines
  unsure (1)..(3987): unsure at all n locations
taaaattgttnttctttcttgaccaaattttggtttttgaaatatatttatttatagaaaaatgtattcaaaaatttcgaatatatttaattattttcaactgtaatcaatgaaaaagaaattatttccatataaaagcaatttgaaaaattatacccctaaatttggaatttttcatgcttattttcgcacttatttcgcgatattttcgtacttatttaaggccttattttggactttttcgcgcttaaaaatcctcactctaccaatcaatgaacattttccatttcttaggccatacatttttaaaattaaataaagatatgtatgtatcaacgatttttgacttattgtaacgtatataatttgttttgacgggctcctacagtataatattaccgtatttttccgattaatagaccgttcgattataagaccccttttgcgaggggctgaacaatagaagagaccccggtccgataatcgaaaaaatacggtacgacaaattgaaggttaagatctattcggctttacgaaacttttattaaaaatgtttaggagcaatattctttatttgctcagctttatccgattgttgtgtacaccaaatgtaagattgttcacctgcttagtgaatgtatgttctattccagtcgttgctatacgccttcccccccccccttttttataaattgaaacaatcttattaatagggaatagaattatatgcacatgcatatttttttcctggactgtgggaggcctgaaacgcatgaaaaacatgtttctagcttggtttgacgcttctaggccgtacttccatatgcatatttgtgcatatttcgcgatttatgtgcatattttggcatttcatgcatattttacgtgcatatttgggcattttttcaaaatacctctattagaacggccctatcaggtaaattggcctttttgacccctatagaccgaaaaaatttacgaaaaagtcattttttagcaaaattttgtcgaaaatattgctaaattaaaatttcttaaaaattgatcgttttatgtccaaaataagcaaaaaagctaaattttgcttttcaggttgatttttctaaattttaagctgtattgggtttttttcttctaaaatgatttttagtaccatattttatccatttttgtaagtcttactttgcgtttagcgaataaagaaattttgagaaattacaacatcaatttggaaaattttatgtgcatattttcactttttatgtgcatattttgccattttcggtgcatattttgcgattttatatgcatataattctatgcctgccctaatcatcattaatcaaagatgtctgtctctctcttctctctcttgattggaaacggcaacactaaaatgccttcctactcctttttttcatattgattcgaatggcacttttggttcttattttttcaccttctcttcttccccttcttcatcattcttttctgggtcagccaaagctccattaattaatttgtaaaatgcattcgatgtgattttcgttttctattcataaatttctaatgtttttattacttatttctctgaaaaatgcttttttaaaacataaaacccgggtaattcaaattaaaattcaacataattccgtttcaaattaatcggccccaatttgtttaattggttttcgttttggccattcattcttttacatacagtagtagtatcttttctcactctctctctctgtcactccatttttatttttaattttttaaatttaaataaatattagcggtcattgtgcctcacgacattcaaatcgttcaaaatgttcacaattgtacaacgtcacagcaagtatattttttgcagtttcaagaccgataataaaattaattttaaaaattggtcggtgtcacttagagagacaaagaaaaaatatttttttggatatttttgtgtttatttcttcttcttaatcaaaaaagagcatgctctcgactagaatcgggtgttgatctaatatattcacaggatgccaaatccgttgctgttgctgatcatcgttgtccaactgtttcaagcaattcatgcacaaccagcccgactccgtgtgccaagtgccgatttcttcggcggcattggccaccgcctttcaggcgatgagaacgttgcgatggtgttcatgctgttgatgatcaccattttggcaacgaatacggccattctgatcatgcaaattgtcatgttttggacagttatctcacggccaagggcagcagcaggtgaacagcagacggagaagaaaaagacggacaactacaagaaaatgatgagcaacaccaatggaaaaggtgagagaattggttaaaaggataaactaatgagatagagtgggaacgagagagaatgagcgcgagagagagataaaaagcgagagaaagcgagagagagctaaagagagagggagaaaatgccaatggagggctaaaataggagagaaagatttacagcctttatttatccctcttaaattaaaaattttataattattttgttgaaaaatgtttttcattactccctttccttttaaaacagtccatttggtgtcatcgcctcgtaattcggccgaattgctattgtttgaccgcaaagggaatgccgtcgtctgaacgctgtgcctttcggcaatttgctagaaaattgcaaaaaaaataataattcatttttttgttttcctaaatttccccattttacagtaacctcacccgtttttttgtactgctattatcagtaatttcattaattgacaagaaaaataaaagaatgaccatttgttaaaatataaatcaaaatttatttggtcaaactgttgtggtcgcagagaagcacaaaaagaaaaaataatttgttaggtttttcgtcattaagctaaaactgatgttagacggtcagctgtattagtaacactttttactcgtgaagactgaaatttaaaaaactcaatttctggaaattgagaatattaaagaaatttcaaaaattgtattacttagccattttcattagcttaaattaaggattagagaaatgtttccctcaatttgggaaaataatatgcatgtttttacgcttccatgtgacatattttgcaatttgggataccacaaatggattaatttggtcgtgacatgtccattcgagtgttaacgcctgagaaggcgaagaacagaagtggaaaactattgcattgattctgatcactcattttagcatcagagctgggccaatccatctttgatttttttgccgatcagtagggtgctatcatgttactcaaaaaccatcaaaattggcgttagtcaaaaaaccatcaaaagaaaacattttttccgggccaggacgctttcgtaccggagaccttttcgtaccaccgttttcgtaccggggacgtttgcaaaaaaaaattgcattcaaataatttttttaatctttaagtaattacttttaatgttttgagaatttatgcttttattaactacaaaatgaaccagtagcaagtaattaaaacaaaacgaaataatgataaattggtgcatgatggtgcactctactctatgtgttccacaaattcagtaaagatggacttaacaatattgtccctcaaaatgatcataattatgccaatgccaatgtcagtcccgaaaaccttaacaattttcttcgtgtgtatttcccgaaactatgagatgcgaccttattgtcccggattttgttatttttgttaaagttatgaattttctacaaaattttatgaatgggaaacaaaaaatgataaattttggttctattagttcttaagtttttctaatcgaatctgacgcttgtacaagaactcgtacgaaaatgtccccggtacgaaaattgcggtacgaaaacggcggtacgaaaacggcggtacgaaaacgaccctgaccgca

SEQ ID NO: 1978 - DNA, 2967 bp, Heterodera glycines
  unsure (1)..(2967): unsure at all n locations
attaatccatacgatgccaaactcattcatttcaatttccgaatattacttaattatgctttagtttaactttaaatatcttctgccaaaagcacaactcataacaattgttcattttatagatgtatttaaatcgatgcattttaaaaatcattcaccaagaaaaatataaataaaaaaattaaaattatttcacattttccggttttcgttgtgcttgaataaaaaaaccgagtgaggctaatacattaaaaaagagaaggtatttagggataattcgataattagtacagcactcgagagtctcggattcgaaccaacaaatggcacataaatgaaataatagagataattgcaatttagtataagtaggtatatgaatagaaaaaattatatgtgactaagtaaaatcagattttcggcgctatttaaagagtaaacttttgaaatttttttcacttttttttggtcaatttttttgtttatttttaatgcagaatttgcttttttaccagatggtacgcatttcacgctatttaataattgattacgacaaaaaaaaagagaaaaaacagtttaaaaattagtttaggaggccagacgttttgcacagctgtgaaagtcgaaaaaagaaaacgttgtacaaattgataaagaaatggattcgtccaggctcagtgatcatcagcgatgaatggccggcgtacctgaaactggctctgcacttgccacaacagtacgaacacgtgctcatcagacacaaaaaatcgactggtggtggcttctaaaaaattgtcatgctcccggacggcaatgaatttaacgtcaacactaataaatgtgaaggactctgggctcaattgaaacaaaagacgaaaagaattcatggaaccagtacaaatctaacgaattcatacatgtgtgaataaatttttcgaattaatgctagggcaaaaggaaaaactattattaatgctttctgtgatcttcttagccataattatacttttattcgccataattgttctgttaatatttaatattcattattatgtgtaaaaaattaaaaaaaaattcaaccaaaaaaaagtgcaaaaaaatttcaaaaaggactgcttttaaactagcgccgtgttttctattatccttcaaaatttcaaaaagtttagttaagtttacagaaagttatgactagggctgccaattttatgtaaatacatatttttttcctggcttctccttgctctaaatagcaggaaaacactttcttttttgtgtttgcgaacaaaaaccgggacttttatttacatattttacatatttcggggtttttatacatatttacatatttcggcatatttgacatattttggatttttttcatatatattttcatttttttacatattttgagtattttttacggaaatttttggaaatcctcaaaaaaaatccgaantttcggcaaatatttttgtacatattttcattttttttacatatntgaaattnnataagaaaaaaataagttgaaaaatgttgcctaaaatacccaaaaaaagtaatttttatgtcattttgtggctgtttcatattttacggggatttttttcccaaaaaataccattaaaaaaattttatttacatatttggggttttttgtacatatttggaccacttttagtacatatttttggcagccctagttatgaccaaaaaatgttaaagaaaacttgcttttttgagtttctcaggtcataaatttttgaaacttaatgattttttgaaattttgcaggataatagaaaacccttagggctatcgaaaaataacaagattttaaaattcggtttaaaagtaaaatagacaagaaaccaacaaaaaaaaaattagtaaaaattttcaaaatttttgatgatcctactagctcagtgaaacacaaaattgagcaaactttatagtataaatttgcagaagtaatttttaaatatatgatttttaattttttaagaatttttaaaaaacaaggtcacatgctagggtaaccttaccagttaagctgagggtggtcaacccttacctcgatcttttggtacgggcccagggtgctaagtcgttataaaaaaaccagcaaaaagggcgttataaaaaaccatcaaatgaaaattttcaacaaaaaactgccaataactttttgtcaatgtcaaccaaattaaacattcttggtatcatacgatagccctaagattcctctattagcacacctaagattcaaaaaatatggccaagtttcaaaattttacgtatttaaattctcaagtcatataaatatattatttcaattgtgatccatctgcctgcaatcattgatctcagatggaattcattttttgacaaatatattgtcaaattattctgtatgcttatagtcacattaaaaatattttattattatttgtttttaaaaaactttattttattttttatcttttctttagaattagttaaaataatgataataccttttgctttgttttaactgctaatgattattaaattaattaattgtttatcagcagcacgggttcgtgttttggctttcttcaacttctgctgctgctgatcgatcggcggctgcagttaatccgctttgtcgttgccgtacaaaggcacaccattattattctttatttagtaaaccttgtattgcctcataaaataattggtcaactataaatatttaaatttaggcctttaaatttcgttaatttaaaataattacataattttactacatatatatatattgtgtcaatagtgtttaatccattatctaattcaaataacatattatgactaaaaaattctgcagccatgagctcgataaaagaattctccttctatcgtagactaactcacttaatccaagacctatttatttgtatttttataataaaatatttatac

SEQ ID NO: 1979 - DNA, 5421 bp, Heterodera glycines
ttgagtaagcttttgcctgtatttgaagctgatcaaaaggatgccaatgttcatgaaaatggcggggacggcgttcgaattgactaacttaattgatcaattaaacaaacttcatctgataataggaataattttcattgagtccttcaatttgttgggcattcatttgcgattttttgggaattaagaaagcaataaaaaatgttaaaataaattttctgttgcaccaaataattcctttcatcagcttaaatggaatttaaaataaatacaattagtattaatgagataagcacattaaagtactattcatcagatgttttattctttcaaattactttttgtatccgtttacgctcgctggttttaaaagtcaatggcaatttaataggctattaaatttaatggatgggttttttgtccttttggtttatttaattatttccacagcataaaattttgaatgaattatgaaatgaatgtgtaatgaattgcaaaaattgaaaatgttttataattatttttaaaaaattaaatgatcaaataactttccagatagaaattaaagaaacttaatttaattgatttaatttgacttttaaaaatcacgtggaaaggaaaaagaatgtagtggcatttgaagtttaaatctttaattattttcaaaagtaatttttaaatacatttttcaactaattttccaatttggcgatttatttttgaataaaaaaatgacaattcggatggactagcgtaactaacaataagccgggcagagaatgaaataattctgcataaattcaattcaattcatttttcatatgcactttatgattttcctgctggccaatttctttttcaatttctttcattgcgtcaacgattgtttttgccacattcttttggcgaaatgccgcacttatggctttgaatttggtcaaattgaaatgcgccgcggccgaatcattgctaattgtttttaaaattcatttttattttcaatttttgtcactttttcccctgctgccgtcccaatgcctctgataatgcgttgatcagatcattttgcactgtttgctggtcattttccctgtcaactgccagcccaatgtgccgaaatgccatcaattccgcgttgtaatattggtccccgatgaacggcacacaaatgattggcactccgtggaaaacgctctccaaaagactgttcatcccgcaatgggacacaaatgcctttgttttgggatgggctgaactttgattggtgtttgcctttgtgccgatcactcattttgggtgttaaaaagcggagttttggtcttttttttttactggtcccggcttctgttcttgcccattttaattcgcttatataattgaatctactttcgtcctattttgacaactcataaattgtgggccgattgatcggcagagtttgctgatcaatcatttgttggccattgaaaagtgagtgagtgcccttccttttcgtcgcctacccaacagctccttttggttgatccaactctgcgtgatcacattgtcccatttgaattgtaattggccttcgattccctgggtcaacttccaaatgaacaaaatgtttgggaatttgtccattgtgccagccaatgctttgacgaattgcgcatcgccgggcccagtaaaagcatcgtttgtgccaaaactgaccagaacaacgccctcttttgtgcccaaacttcgactgatcagtgaatttgtctgtcggattaagttttgaattagaatttgtcgccaaaagcgacacaaatttctttgaaatttcatttatttttgatccttttcatcgatcaattttcccattcgctcgctcctcttttttatgactcatctctttttctctcttcatttttattatgagtcatcatttttgagggaatttttccctttgcttgtgcacatttttcacgtgcctggccccgcccccattgatttgtgagggtataaaagcccggcccattctccattttcttcactgatcaatttttgattaagtcagccggacagttttctgtccaaacaatttgcattaaattgtaattgtgtaaattgaataaagattaagaaaagagtcttaatcttttccctgtctgtaaaagggacatcaggagccctttaatacagaccattaagccattgacccccttgggtcagaaaaggcttaccaaaggaaaggagaagaatttctccttccaaatgtccttccccctttaatttgtccctttggactctgtgagtttctgtcttttggacagaaattcgctttgcttaaaagactcccccccttctgccgggaagtgcaaatttttgtggccttttgcccacagaatttcatctcactgctgaatgaaagaagccgacagaaggcggttaaaagtcataagcaaatgtttcgaagccaaaaattagtctcgagacggaaagtaatgaaaaattgaaaaattattgagtcaagaacaaatgagtttgaccaataagcaaggaactcgtgacttttaatcatcatcttttttatttatatatattttttaaattttacattttccattgctttttcgtcaatttccgacggacggttaaaatttaagccgccaataaatttgacgcgcttatcgctcttcaaaattttggactgggcaaaatcgatttcgggcagcgaattgatgaaaaaaaagcggctcttggcgaacagtgcgtcccaacccgggaaattcaaatggaatttttcctccgccattttttggtaatcagtgtccttaatttaattatatttattataaatatttaaattattattatttccaccatatttatgtgttctttgattttggccaatgtttgctccacgcaattcttccaaacttcgtctcttctccacttcaattcctcgtccatttgttcttttgtgcgcatatttagcagtttcatacgctccccaccatttcgaaaaaaattcattgtagaaattccgataaattctgaaaattttcaaaagtaagacgaaaaatgaaaagacccgttaaaatttctgttttttttttgctcagaagcaacaaaaaacggacaaaattaaaataattttaatttcttttggcacatattaaaaaaaagtcatgagtcataaatttaggcgctagctaataataaatattttttaattttatccaaaaacaatgtgcgaagagtttttggtttgcataatttttgtgattttcacgtggttttcgtggcccctgatcacgaactctctctctctaactatttctcttctccccccccccccttctctcactcttttctctctctctatttcgctctctctctctctctctttccctctatctactctctctctttcgctctctccctctctctttttaattcatttaagctttttggcactttttacccgtcggcattccctccgaatggttcattttgctcaaatggcccatcaaatacagctgaaacggagacatcggctgactttgggtagagattgtgaccgcaatttgcagaaagtggaaaagtgccaacgaatactccgtgaaacagaatgcctctgccattcccacgtcgaatttctcggcacgtaattcgtccatcagttcaaagtcatcggcaatttctaattagggagttaaaaaaagtatatttgaattatttttgtcacaataaaattattgataggaaaagcaccaaaaagccccatggattgaacgggcgtaagaaaggcggctaacactttccatgctttgtttatctaaactttcccgccaggaaagagaaaatttttagatagttttttctaatttttaaaaaaaagttgagaagctactgctcatttaaatccttagagcgctgtcttttttttgcattaatttaccatggtaaattctgtcattcattttgcttaagtctccctccatgataaactcgtgcaacggtttcgtctttttctgcacaaaataccgcacattcagttggacttcatcatttttgttggttaatttataagttgcatctgttattgggaccaacatatgctaaaagtgcgttttaattttatttattcgtaaaatttggaaattttggcgaaattaaccataaaatgtaaattaaaaccctaattaattacaatttggtggccttcttctgccaaatatttggccaagtttaaaccgaatccaaaatgacttcgaaggaacatgtaatttggttggacgactaatattttcaaagtgtttgccatttccgcaacaaatgaactcattagtaaaaaggttatcgtaattaaagcagccatttggattaattattttctgatgtgccaaagaaatatcgaaatagaaaacaaataaatcaagccatttaaatattaaaaatcattcgtaatttaaatttaattttagccaacaatttccgaatatttgccaattttatgaaaaccaaatccgcctcatttccactttaatgttccacaattttcctttcctttccatcatttgccacacttttgcttcacttacaacaaattccccccccccggaaaaataaaaagaaatttgtattggattcaaatttaaaaaattatcatttaatggaataaaaatatttttaaatttgggatttttttaataatttgatttttggacaaatttttttttactttttcgaaaaagtcattttagaggtgtattctgctgaaaaattttctttcgttcgtagatttttttcgttttcaaattggtttaatatgaaattttctcaaatatgtattcaaaaaatattgaaaaaacataaaaacatccactttatcaccgaaattcgagacccaccaacttaggttaggcctaggcttaggcctaagctttcggctaggcctatgcttgctttgaaacatttttaaaatttatattattgttatttcgcaataggtacataatatcctaaatttctttataatattaataaagcattggattaatattaataaaatgtaattttgcaagacgtattattaagcttatttgcgtcataattggctttcataaacagaaatattaaaatttttgtcattctaagggaaagcaaaatatattgccataattttattgggaagggaatgccaaaaatttagagtttcattttagtcaaggttttagatagcagaaagaaacataaaattttatttatatttaaaagttaattatatgtttgaattttgtaatattttggctttttatgactattcacattggttttacaatgttcattttaatataatattttcaaataaaaatttaattttagagaatgaatgtcattatgctatatttatgtctatttgtggcattcccatttacttttggcatg

SEQ ID NO: 1980 - DNA, 3587 bp, Heterodera glycines
  unsure (1)..(3587): unsure at all n locations
gatcagaaaaangaaggataaaatgggnaaaatgctaagatgtgnnatgaatntaggaatgggttgtattatgataaattgtntattcaacagactttatttattctttgttttcagtttttcttttttttgtntaaacaaaattttgggcatatttaaacggactttaatttgttgtacttagaaagagaatagcttactattttgagcttgtctgctgatgggtttaatttattgagctttgaatatatcaaaatattcgccattactgccaacgaatggattatgaaaaaaacgaaaaaatgtcattatctttttttcgaccggttatttgtaagcatgacattgaattaatcgtccagagaaggattttccaaatcctttggcattattttgctgaaattataaaaatttgccgcgtccaaccccaaaataaaattgaaatattatttattttatgtatttttgaataaaaaaatatcaaaattaagctgaatttcatattattggataattcattattagggactccatttttaggcaaatgcctaaaatttctgcgcatttaatacgcatagataagcacaaaaaacgcattttccgcttggtttgaggtgtctacgatgactcttataatgcctatttttgcctatttcggggtttttgtgcctaatgtgcgtattttagggtttttgaaaaaatccttaacaaaaatgcaataaaaacgaaaaacacacccctaagaaatgaaccgaaaaaattttttcagaaaatacactcctaagaattgaaaatttctcaaaaattgatcgacaaaaatttaatatttttttcttaataaaaatttttgtttaaattttgttcttttcgaaaaaaactttaaaatatttaataatttcatttacaaattaaaatttttatctgttttgctacctaaaaagcgttaataaaaaatttatttgcctatttttgcctatttgaggatttttgtgcctatttagtgcctatttctcgattttttgtgcctaaaaatggagtccctattcattagtgttcacctgcatttgtccagcaatgttcgtcgtttgtcctcctttttggcacatgcttcgggacaattccgtgccatccaatgcaggttccgttggcattcgctgatcgttgcgttagtgcccaacaaatgctcgggaaaggaggcccatcgtttgcactgcaagagcagatcctttggtactaatttaaaaaatcttgttagttttatattacctattatttgttttgtttacctgtcgatcgtttcgggtcggcgaaggaatggcacccgtcgaaacggcacgtgccggcgcaccacacattcataaattgtggtgccgttttgcacgtttggttggcgccggcccaatacgcgcaacactcgtggttgtcgtagcagacgcgttctgttggaaacccgagctaagaagcaatttaaaagttaattttaacagtgagaaagaacgatagagcgcggattagcataaatttccattttttcatattaatggtgctttatgaaattcttattgactgaattttctgaaatctcaattcatattttgatattttcctattttattcttttcccatttttatccgtattttaatccgtgttttggtttttccatataacccgagcatgctcaatactttgaattatattaaataataaataacatttataaataaataagcttattgggtgctcaccaattcagaggaaatgtgtgcagtagttggaactatctaaaagtgagaatgcatttcattggcaatgagaaatttggatggcactaagaaagccgaaggcaattccgaattcgattctgaataaaacccaaaaataagggaacactctgatggcctcgaatttatcattcggaaaaaaacaaaaaggcggaaaaaagaaatattccatttttgaaaattcattaaaagacttaaaagctcacgcactcccaattttaaagaatctgacaatataaccccaaaaagaaacaataatagtttttaccactttagtggaccgctgacaaatgccatcgacgcaggccgagccgtagcacgattcctcacctgaagttttctcacatttttggtcattaatagaaaaaaacttcaagtttctttgcaaaaaatgtcaaccactcttttcaaattctctttttttattaaattaatccattgaaaatgggctaccgtttccgctaaatttggaacaatttccaccgagctttatcttggaataacagttgggactttttccattggttgtgtcgcagaaaagatacctttattaatggttggaaaattgaaaaaaatataaaaaataatttttttttcaatattttattgagtaaattacggtgatccacagccaccagtggaactgcaagttggcctcattttgtagttatacaaatacgaagtgtaggcattgctcagtccaactgaaaattaatttatttaaatttaaaaataataaaattgtaaaatcataaaaaagagagaaccgcgattttgaagcggagggtcaatgaatgggaccattggagtatcgagaaagaaactcacgccagcagaacacttaaaaagcattaccacacaaattttcaaatttactaaaatggaaaaattgtatcatttttatttttttaatttggaataaaaatgatggccattgttatttaattgctaaacaccgctttaatttgatggtggggcgggaaaacagtttcacgctcagaaaaactgtgctgtgtgcgcaaacgccactgctcccaaatctgtaaaaattaaataaatcggaaacaattaatttaaaataaaattgttttttgttttcatttatgattatgtaaaataataaaaaaccaacgtaatcaataaaagtgtggtgcaaaaagaaaattggatcatagggagcagtgccgacatgttcctaatgggaaaacttatcaaattcaatccaatcagcagacggtctttcatttaaacgatataaatgccaatcccattggaagtagtttcgatgattaaataaaaaatgccaatccgatcgttctctctctctctctcccctctctaaatctctctctctctctaaatctctctctctctctaaatctctctctctctctcccctctctctctctctcaaatctctatctctctctaaatctctctctctctctaaatctccctctctctctaaatctctctctctctctcccctctctctctctctcaaatctctatctctctctaaatctctctctctctctctctaaatctcactctctctaaatctctttctctctctaaatctctctctctctctcccctctctctctctctctctctctctctcaaatctctatctctctctaaatctctctctctctctaaatctctctctctctctctaaatctctctctctctctctaaatctcactctctctaaatctctctctctctaaatctctctctctctctcccctctctctctctctcaaatctctatctctctcaaaatctctctctctctctc

SEQ ID NO: 1981 - DNA, 8259 bp, Heterodera glycines
  unsure (1)..(8259): unsure at all n locations
aaaagaaacatcaattaaagtaaaatgggtcatttgccgaattgcccacttttcccaatgcttggaactgccgtaataatccacgcatttatcaacaatcactttaattgtagagataatgaccagcactttgaaaactaaatactttccgctcatattgtacctgaaaatgcgataaatatcgacattttttctgtgccaaaatttgaccgctgtaaaattaccaaattggaaatgaaacggccattaatcgttccactccgatgcacaattgcaatattatggccatcacacaagctgagcggctgatgaattgtatccaaaagcatgtcccgagagttataaaatttatgccaaaaatgaaaatgacaattttgacacaaaatccgatgtggagaaaaatggcaaagaaagcgtacaaagcgatcagaatattgcattgggagtgaatcgatctgtcaaataaaaattagttattatacatgaaatacaggggaggggggttgcaggaagagaaaagagtgaaatttctgaaaaatttgactaatttattaataaaattcattgaaaacgctttaaaaaatttttcccggcggtgccgccgcaaaaagcgggtgaaaactaaaaataagcggccgcaaattggctcaaaattgcaaaaatagtcttttttgtgaaattccgttaacaaattgaaatttaattgccaaaattttccccggcggcgcctatcggcgtttaaaaaatgatttttttgaaaactaataaaaaatataattataatcgtcgaaaaattctgcaaatatctaaagaagatttttaaaaataataatatttgaaacctttataaaaaacgtactttgatttgacggtcacgtagacaagtgacgcatttagcgcaattccgaaaaagcaaatcagcgtaattatcccactaattgcaacttcgaccgacacaaaaccagcctcatcctttgaataaatgaatagtgaatgaaaagattataattttggcacagcttttattattattgttacctgttgatcagttacatttgatgacataaataattattaatttaatccctcaaaaaataagtgattcattaaaaataatgttactggttgtataaatgtgagaaaaaaaattcgaaacttttcctcataatttttcaatggcatttcattataggaaggatttatttctntgatatatgtgaaaanggangnattagnttnattnataaatttttattgaattntagntttttattaattaggtaattaaaatggttnattaggaaagatntggtgnanattttaatttgttttnaaaaggnattaaaagngnagtaangttaaaaaagtaanatanagaataaanaaatattnaaaatttgtgttatagagnaaaatgagaaaaataaaaatatttatagatataataaagtcataaattttttctgttttattttatttaattttttttttttgatattgtaataaattagcgccatgaacagtcggttctgtacttgggttaaagcgcttcgcgcttttggagcttcgctacctagatccattaggtcgaattgtctaaaatttaaaatgtaatacagacccatcacggcatcagacgggcgcttcgcgccccgtttcttaaatttttcataaaattttaaaagcctttggcaaaaattttaatttattttttttaattaaaaatcgttaaaaatatatatgaaatatacccaatttaaacacattataatttggtaaggtgtcagttgtagaggctaaccaacagttgccagtggagaacactcactggatgcatggtgccaaattattatatttattttgcaaaaaatctttaattttagggaccattttgcataccaaaaaatgtttagtttttttattgtcaaattactgtttttcctctcaacttttccttccttccaattcccaaaaaaataattttttcttggtcctaccccattcttacgagtgcttaaaaatctcgtttctcgtgataagtatttttatttaattttttctattttatcaaaacttagcatatattcattaaattaagttaaaaattcgaatttcattcaagtttcccagctaaatgctttatttaccttaatttccttttttatctttgataaatttgatgaaattacattgatttattgggaagtaattaattgggtgaaagcaaaatattaaaaaatagccaaaaaacttatgcgacttttaactggcctttctagcaccgcgcgccataagtgtttaaatttaattcacattgagaaaaaagataaaaccaaaaatgacgaagccgaatgcggatcttcttgggagcaaaaatatttaaaaaacataaaaaacttttacctccacttccatcatttacaaatcgtcttaataagtatgaaagttgctctatgaaagggatttacatttggatactggataccgcatcgataacagaatgaatctgatttttttttcgacacggtagcgattgctcccgatcatccctaatgcaattgtttttctttcagttgcattcgaaattgaattttattattacggtaaaaatttaatttaatttaactgctattagttcagcccagcaaaagttgttatttatttaaaagtaaatcaaaccaaaaatcaaatgggtaatttctgaaaaataaattaaattaatcattgattacaccctaaagaacgagttttttaagaaaataaaagaaaatgataaaatttcaatattatatggtcttacaattagctaattgctaactgtggctctcttttcggtttttgatttgttgtgattagagaccggaaatttcaaatttgcggatcccgctgcgggattggaactcaaaattcaattacttttatggctttttggaatatatatatttttacattttattttggtcatttgcatattataccatgatgcaaaaaagaattcattttaaatgacctatttaccaaactcacgcttaattaattagtaaaaggaaaaacatttaccgtaatggacagccaaaccaccgtaaatgcctaactattgcatctcacgtaaatgtctacgtaaacagtcgcacatatgccctccacaatcagcacatggccaacaatgttgatgaatgcaggatagaaattgtcggaatgagtgtgccaagttccaaaatgccatggcataagcaacgaaaatgaaagtgccgctgatttcggtgccgtttgaagatgtttcaaccattttcatgaaaattttgtttaaaggaaaattcaaacactaacaaaagctaaatataaaataaaataaaattattgccattcggacgaatatttggttgcaaactgtcaattaagctaattttgttagctttttcgtcgcaaacgcaaataaaattataattaaatttttgttatctcattaataaatgtcagatttaatagatgagcacagaatgagaattgttaaaatcaaatgatttgtggtacttaaattatttatgtcattttaaaatgatatttgaaattagaccatgttttaaaaaatcggtgcaacaatttttttttattataatttttttagaagtttaaaatacttttaaagtaattttttgctcttaatttaataataagaattttatttaaagccaaactgtcaattatactaattttatttcttgtttattcataaacaataaaaaagtcatcagaagggcgagaaccacttactctgacgactgttcagataatgtgtcgtagagtaagtgataaaataaagttgatcacaggaattaaaaaagacaaatatgtgaaaataaattgaggtcaaagtcaaatgaggtcgaaataccaaatcacttagaaatttgttacattctagctttcccggtcttacatattaccctagtgaactttaagttttattttaaattgatttaaagaatttgttttgattagttctttatcgagttgattccacttaccctcccagcaaagggaatgaattttttgcccagtttgtattttgtgttaaatctataaaaggggatgttaaagcgtgctgatggattaaaaatagaaaatagtttcagatctgttcggccataaacaattttatgcgccataaacagattaaacagctttcgcctattctcaagtgttggcagttgcaggtattctaatcgattttggtatggaattggcggaaggctgcagtgatcagcaatttgaaaactttctcccctattttgggattttttgcccctacaaagcctcggcttaattatgagattaaatcgtagtggcctttatcacttaacacacatattcattcaattgcattttccaattatagaggattcgtatgattgcgtccattgtttatcataattggttgaagctgcaagttctgtacaggtgtcacgtggttataatttggccaaagcacggattggtatgcttgtcggtacacagaactgtaggcaattaaattagctaatttatttgccaaactaaaatttaaataaatttttaaatacaatttggacctggtaatgaaaagaaccggcgcactgctgcaatggcctaacacaaaaaaggcataagcaacgggacgagcaatgtgcgaaagagtaaatgcactcaaattgaaccacccaaagacaaattggaagcaaaaacttgtcttaaaaacaatgaaataattaaaaatattataatcaggtaacggatttatatgtgctgaaaaactccaaaatatgtgctaaaaagccccaaaaaggccaaaatatgtgctaaaaattgaataaaaaaatgctcaaaaataagtgatttctcagataagtctcaatttttttattatttcgctagcataaatgcaaacaaaatcatttcaatgcttttggtgaaaacttcttttcgctttctaagattgacttattttcccagattttcgagaaaattcaaattttgccataaaagtgaaaaaaaatcgccaaaatatatgataaaaactatcaaaaacccaaaattgtttttatgagcaaaaagcccaaaatatgtttagctaacttgattgctatgaaaacaggtaaaaatgctatttttgagcttttcatgcgatgacatatgcgcaaaaaatatgtaaaaacatataaatccgttccctgcttataatattgaggaaattcaaataaacaaactccgatatgaaagatgagattgatggacataattaaactgactgaacgaagcaaccgtttgctttgtacgtccgttaaagctaaatgtcaatttggtaaatgaatttgtcataattattctgggactttttatatattaataatgcagaggtttttgagaaattccattaaaaatttatataaaattttagatttttttgtatttttgggtaagattttgccaaagaatcaacaaaaatcattttttgttaaaatttctaaacggtaattttccaagcggctttattttttgtgcctatgaattaatatgatcattcactgacactgattccaccaactgatcagccaaagcattgcgtagcacaaaacttcagcaacctcaataatcagtatgttataaactgtgtaaccaatgatttcggattgatttgccgggtcggaaagttcgcatctgactaatctgtgaaaaaagaaacatcaattaaagtaaaatgggtcatttgccgaattgcccaacttttcccaatgcttggaactgccgtaataatccacgcatttatcaacaatcactttggtcaaacagatagtgatcagcactttgaaaactaaatactttccgctcatattgtacctgaaaatgcgataaatatcgacattttttctgtgccaaaatttgaccgctgtaaaattaccaaattggaaatgaaacggccattaatcgttccactccgatgcacaattgcaatattatggccatcacacaagctgatcgactgatgaattgtatccaaaagcatgtcccgagagttataaaatttatgccaaaaatcaaaatgacaattttgacacaaaatccgatgtggagaaaaatggcaaaaaaagcgtacaaagcgatcagaatattgcattgggagtgaatcgatctgccaaataaaaaatattatcatttggaacgaagcgatctgccaaataaaaaatattatatgtatttaaatttaagaaactgaaaatttggcattattccacggaaaatgtccacacccgtggaagttttacccaaagatgagatgcaataatcagaatttttctcgaatcactactaaatatttggtaggaaatgccaatatgattgctaattaatgttttctagaaaataatatgatcattttacgaaaaaggcgcacttagatttgacggtgatgtaaacaagtgacgtatttagcgcaattccaaaaaagcaaaccaccgtaatgatcccactaattgcaatttcgatgaacacaaaaccagcctcatcctttgactaaacaaacaatgaatgattgatttcaaaaagcttatattaattttggcacctctttaattattattattattttatattaattttggcacctcattaattattattattattttacctgttgatcagttacatttgatgacataattattattcaaattggaaaatttaaacacgaaagaaatgtaaagaaatataaactgaatgaaattattgccagtcgggcgcattctttttctgaaagaaaaagagaagtaatttgataattataaatttgatttaaagtcaaactgtcaattaagctccaacctgccaattaagctaattttatttttccttcacaaatgaatgaaaataaaaatatttgtatttatttcccaactaaaataatttaataaactcaaacttaataaaataaataaagtagttaattgattatgggcaaaattaaattatttatattattcaaattattattgtgaagttaaaatgaattaaattttttggtgccacaaatgacgaaaatctatatttgtttttattgaatacatttttgggaagcattttttattactttgtttctaaggtaaattattaatttcttaaaattggtgctccaattttttttgcaatttcttttagaagctatcaatgcattaggctaaacaaattagagaaaaagtttagttaataaaaaaaataaatttaaatgtaaaattcattaagtaaatttaagcataatttgaagccaaatttgggtatttctgagaaatttccaaaaatacccatataacaaaagttgcatacattaggatttaaaatttttgaaaatctttcaaaaaatttcttttttctcgaccaaaatttttaaattcgaaacaattttaaattgaattcaaattaacaaggattgttctgcacaaaatatgacaatcaaataaagagaaaattatagaacagcattttttctgctaaatcaaattgaagaatcatcagatggaacttttaggcccattaggccacgctggccgacactttcgccggccaaaaaagtggctttgatcagcgcttggcgaagcccatcgccggcattcaaaaaatgtacagtgccggcaacaaaacaatcgccggccgccaatgtgtccaccacacggccattggacggaaaatgggctgacaattcgatgacagtgccatcattctcagtgcatgggaatggcacggaagtgccaattttggcggcaactccctgaaaccaaacccggaatattattttctgccgaaatggctggcattttccaattttttgaggcctagaccttaattttaaggtctatgagaattttttcgttcgttgtaccttcccgtcttttggccattttttgcgaacattaattatttctcgcttggaatggcgtgtatttaaactcctaggattttcttaattcttttttaaatttccaccttctcaccccaagggcaaattacggcggaatggtgggcgccatatttttcttggaacattgtcacacattcatgcattgttgtccaagcttaaaaaattgagaattttgagaatttagggagtgaatcgatctgtcaaataaaaattagttattatacatgaaatacaggggaggggggttgcaggaagcagaaaagagtgaaatttctgaaaaatttgactaatttattaataaaattcattga

SEQ ID NO: 1982 - DNA, 2972 bp, Heterodera glycines
cccgagggggggggggggggggaggaccagactgacggtacaaaaacgaggaagaaacaaaaatatatatttggtgtgctgctaattatgagcgaaaattacggaacatggaaaagtggcttcatctccgctcccccgccccctccaaaaaatgaaatgccatttttggtaactactgacccccctcccctggcaaccctttcctcctgtttttgttggcacgaattgggtcgccggcgaaaggtgccaatgctttgctgctggactgattggagtttttggcacaaaatttgcatcccacgacccccactttttcatcaattccgtcgaacacccccaccccccggggaacggaccccgttatgcatttcattcattttcgactaaatccctaaagcccttgccgaggagggagtggacccattcgccgcgcttttttatcgcatctggcacaatatattaatatgctaataaatgaaatgaggaactccaacaccatttctatttaaggcatcatcaaatctccccagatccattctttgagcagcgagttaatcgttcattttggcacactttgcgtcgttgtcggcacaccaaaataattcaacttcaagaaaaatttattgatcggcacatcaccaaccaccaccaccaccaccaccaccaccactaccaccattagccatatcgctcgcgcacatctattaactaatgagttcaacaaaaacattggcaaaacaaatgccattagctgctgctgcttctgctgcacggggaggaggaaaagcggctttatgtggtgccaaacaggacgaaaattgtcgtttccggaatagcggtggtgccagcattgacagccgccgcctccgcttagctgggggcctgaaagcttttggcttcattggctgtgcgacgacgacgacgacggcattggcatttactgaaacagtggaggatgaggcggatgagggggaagaggaaaagacgattcatcgccaaagaagctgcataacagattcaacaacaagacaaaaaatagcagcaacggcacaactgctggccgatcaccacggggatgaagttgcttcatcttcggcaccactattttcctcttccggttcggcatcattatcctccaccgctgcttcgttattttgcccctcttcatccggcgggtacaacatttttagagttggctccccggcttcgtcttcggcttcatcttttttggcacatcccgtgccgttgtcgtgcttctccgcctgtttttctcccgtgcttcctgctactaatactgctgctgctgctgtttctgtcccatctcacttcagtttcacgcttctcttccttttattgtgcacatctcagttgttcatctgcaggtatttcttgggaaagttgtgtgccaaaatcctttgccggatatacttttaaccgtgattaaaatgcgactaaaaagcatgccgctagaaaaggttccgactgaatttcaggattccaatttttgaaaaacccaggtctagtctaagcccaaacctaataatggcgaaattctgtagttccatgatcccacaacctactccgatcagtgctttactttgatcagagtctcatccaactgattaatttgtgatgcctctgttgaccattctcgactcggtgctttatcaggatttccgataatgatttgcccatttgtccccctcgatctgagggtttccgaccaaaatgcctatctccacactccccccccccacccaaacagtgctgtccctgctcggcatggttcatcctcgtccgatcagtcgtcctcgctgatcaccactgatcaagcgtttacgatgcgcgaagaatgttaccatcgctacgcaaactctgatcaccattcgtcgttgctgcattggctgcaccggaagaatgcttcacactattcaccaatttcaccatcctaccagcaagcattgcttaagctgagggtgagtcatctctttttttttgtttttggcatttttgtgccataatttcaggcccaggaattggcccacggcctccaagtgacttccggtgcgtccagttgcaactcgcgcaaaatgaaggtaaacagtgggaggggcactttttgttattgtagttaccatgacatggcacggtattaccggtgaaatttttggcgctttgttttgtgtcaaaatattacgcatttgggtactgtattttttaccataaaacgattataagggacaaatcgtcattaaaagttgaccactgcactttatcgaaatggccgtagatttatacggtatttataccaaattaagtggcaattactccatgaaaatttttttctttccataaatccgttttttgttttgttgcaaatttaccttttgtacggaatacggtattatttggcaaaatactatttttgtagtcaatcaaaaataaacattcaattttaaagaatgtgcacattggcactcaaaaataattcataaaacgtttttacggatcagaaaacatctaccgtaatccaaattttttggagataaagtcatcaatcactgacttacaccgcttaccgtaatccagatttttttgaaggtaagtgatcactcactgccttacacagtgctaatctctttcactgatcgcttgccgtaaccaaaattttcgggtcaatgcccacatttctgcaaacctgatcactgatcattgacacacagtaatacccacattccgtttttgaaggtgatcagtgccagcactccgctcagggaacgggcattgtgccaatttgagtacgtcctcaactacaagcccaatgtttgttgtgcagcgtgcatttttggcacataaatatcccatatgatccgttcagagaatcccgtccacattcaccgaagtcaaatgttcatgtccacggccctccattaggatggtgggcaaccgtatgttcgagtgcgagccgttac

SEQ ID NO: 1983 - DNA, 1582 bp, Heterodera glycines
  unsure (1)..(1582): unsure at all n locations
tcgaaaacttcgcggtttttgggcttcgaacttccagcttttgcttcgggtaatttacccgaagnttcgagaaaaatacacctttaacaatcgagttttcaaagtgaaaaatacacccctaatgattagcttatagtgaatttaaatttaaatctcattacatgtttttctcttggatccgttcctgatttttgcgttagatcagttccctccaagtaattgtttttctttcaatttttcacaaattaagactttaaaaatatgatgtaagtgtagatttttatcatataagttgaaaattcgcaccttttcacccgtctggcgacgcctaccccgcccccaatttttcttaaaaaataggctcaaacatcgcaaaatttttacattttttgcttaaatttgttaacaagatacgctcaaatttcaaaatttttcccgacggcgcctaccggcgccgttggcccgttcccaaaaagttttttggaaaaagcgcgccgcaaaaaacgttttattgagttttttaaacttggaataaaatttacaaaatgctgattttttaccggccaaatgctgattttgaaaattttcagttggtagccctgatcaaaatcaaaaaaggaaaaatttattaggaaaaacattagttattagtttttttttaatttattgaaagctttaattaatttttagtgaatacgaaaattttttgaaaaaaaaagtttttgttaggataaaattattttttcaaaaacttcgagcttcgtgcttcgagcttcgaaaacttcgcggtttttgggcttcgaacttcgaacttcgtgcttcgaaaaaaattgggcttcgccttcggcttcggcttcgagtgctaagccgagcttcgcccagtccctgatcccgacacttaccgtaaccatttttatgcccaaacacataccgtaatcatttttgttggttgttcttgtcccagcccaaatacataccgttgttcttaccccagcccaacactttgcgtaattattcgtaggcccaaacatgtaccgtaccatttttattgtaccgtacgcccaaaactataaaaaacgatctgttcttgttatcagaaccctaaatgcatgtgtttttgttgtttaatttcggcagaatttgatcagaattgcaattgtagtggcctaggtagaatatagattgaagccaagtggagacaaattgtcgaaccgacaaaatgccaaaaaaaaatgaaaaatttaatttaaaaacagcgacttttcccacttccaatcagtgatcacattaaaaacaaatccttttggccatactgtgctgtgtaatgtccgaaaattcattgtgggtgcatgaaaatgtgttgatggcataaaatttttgttttgttttttttttgctaatttgctgtttgcccattccattggattaaaatttaaaaaaaaatacagaaaagtccgaagcccccaaaaatttcagattatcggattcatttctatcccatacagaatcgcaattcgggaaaggttgttgggtggcatccctggaaacagagaaaattttcaaaaattaatggtttcaattt

SEQ ID NO: 1984 - DNA, 2541 bp, Heterodera glycines
tatgtgtatactgtgatatttttatcaaatgctttaagtgcacatttttgccaaccgcgccacaaattttcttatgccatttatcgaaaacaaatagaaactagaaacatctggtgctgttttgacgcggttgttgatctttttggcacggcacaaatttggtcggacgaatggcactaatctctcccgcaaggcaaaaaaaaaatgcgtatgccaaaaaagggcggcgccttcaaagggcaaagagagagagagagcatagaaaatagatagagagagagcgagagaaagagaaagcgagagagggagagaaaagagagtaagagagagagagagagagaagagagaacattgagagagagagagagagcgagtgaggagaaagaaaagagtgagacagatttagatttaattggtttcaaatctatccaagaaatcatccgcggattatcggattatatacccaaacgcgtatttgacgggtattaagactcaaaaaagactatctcttttttgcggcttttatcaaaccgataattgcataccaacaattgccttctgttgtctggctcaataaagcattcatagggtttttgaaacgctaccaaaaaggttcttatccaaaaaatcgctatctctttttttttggaattttaccggacctcagagtgtggggaataggattttcatacctgatttgctgataaaaattccaaacgcgtatttgccgggtattaagcccgcaaatcccgcattatccaaaaaatgcgggattgcggactgggatcccgcaaaatcccgcgcgggatcccgtcccgcgccggtctctaattctatggtcatttttatggcattttatgcctttgtttcactttttacgaagaatttttatccaaaaaagtacaactgagtaccaaggttccggttttgaccggtactggtactagtaccggttttttaccggttttcccagccaaaaagtaccggtttttcaacccgaaaattaccggtaccggtttttttacaattaccggttaccgctcaaccctagtaaatggtattcaaaaaataataattttagaacaaaagatacaaataaaaaaaattataaatttattatttaaattataaaccgaaatttttatttttattttgtgcaaattttttcccccataaaaatttacccaatttttctgaggttgagcattttccattaatttattttattcatttttaaatgaaataaatgtgttgtatgtgtacatccaattagcagatgcatcagtgaataaatgtgctttttgttgctcgttaattttgatgatttccaaaaaatgggaagcgaaaatgccgttgccagcgactgtgccgagaaattttttttttttgaatttttaatttaattttatcggaaaaattggcatgaacggtggtgatatcattgtgccagggattgattttatttgttgtaaaatttatttttaaaaaattacactaaaaatgaggtctggaatttatttaggaaaacaaatttttaggtttttacctatttttcttttctaagcccactatggtctaaaatgcacgaaaagcatgtttttttgaggggttgttaagctacttttcgagtttttagaaccaattttctaggttttcaaaatttttgaaaaaacttattttcactcattctggcgttttgcccaaaatttgttaacaaaaatgctataaaaaggaaaaatacacccctaagaatctatctaaaatttttttttcaaaaatacaaccctaagaatcgacctgaaaattttcaaaaaatgcacccctaagaaattaaaaatttcttaaaaattcatttccaaaattttttatttattttatcaagaatttttgattttaaaaatatttatctcaatactggtttggcctaatttaaaataaattttgtcattttacactcctaattttgaaactttttggcacctattttcccatttttagcacctattttgggggttttttagaacctaaaacctaactattttagcagtttttagtaaaaattggagccctaatgataacaaatgattcacaaaaaaaaatttggcactagtgaaaaagtcaccacttttgaaaattttttcaaacttttttttcatgcaattttttttttgtttatttacacataatgatgttgtatattaagcattaccatcacaattatggtgaataaaaagtatattcacgattttttatctcaaaaaaattttgcaaaacaaaagggtccctccccccttttgtttttgataaaattaaaaatctgtcactttataactggcgccaaatttgcttaataggcccaaataattgtcatattcatgatcagcgacctctaagccccccggggtacttaatttcatgactttttaaacaaaaaaaaagggcgccggacttttcgacagcaaaggacatttgacagaaatattataaatttgaggaggggacttttcgacagaaaaagtaattaaattcagattagggggg

SEQ ID NO: 1985 - DNA, 1243 bp, Heterodera glycines
gcaaaaaaaaaaaagttgaaatatttccgtatttgttacggaatccataatttttgacaaaaacattttaaataaaatttggagtaaacacattttcagcccttttcaccttaactttttaaaccaaatgaaattttttaaatttcatcaccgcttaactgaaaccctgcagtatgtatcttcaaaaaacaaaaactatttttcctaaaaatattatataaaaaacaaattttggcacaaaattcggcggcatttgtcgagatcgggtttttctccatttttcaagcatttttatttccttatctttgtgttgattgtgcttcctgtcaacaaatccgttttagctttagcgggcgggggggggggggggtaaaaaattccaaaatttcgcattttcttctttctgtgtacgatgagtgaaaaaaaaaagtgagcgtaccaaaaaaggaaataacggcacggcaccaaattttcatgccattgttctcggatctcgctgaaaaaaagttattttacattagcaagcagagcagcaacaaaaatttttttgttgttggtgggtcattagccgctaatttgggtggcaaacgcaaagggccgatttatcacttccattcactcattggtcgcccattgttccgttctgccgcggcacagccaagcaacacaaacaaatttttttggcattcgcctttttggccaaatttttcaacatccacagggattcgaagcttgctcttggccagcaggcttgccatttttttcagggccaaattggcatggccccgagagtttgagaattaagactctcttgaaatacccaacttaaatttcttgaaattcgcaatacgtccgagtgttgagagaatacgagggtctagaaatgccagagaaatttcattggccgacattttaggacagatctattggcacgcagtggcatcttgccagattggcacttagtgccggcacactcggaaaccctctgaattgtgtgccctgtaacccatgagattgatcattcgaagcgaaatttgacactgtgcccttctaaattggccctgataccgccctgaaattggcaatttgatgcggaatcaacgcttggcttttggcccaacctgaattggcactgatctccataaattgttgcgaaattggcatcccaactccgatttcttccctgaggcgaggggacgtatgacaatttttttttgaggaaaggtggggggggggggggggg

SEQ ID NO: 1986 - DNA, 3477 bp, Heterodera glycines
  unsure (1)..(3477): unsure at all n locations
gctccattgcccncattttgttgaaagaacaatcatttctcatccaaaaagatcgcgctcctcccactcccccgtttttttggcttttaaccaacggcgacggccatggcactctcaaaaagaaattgccaaaaaagcggccacggcactctcaaaagaaattgccaaaaatttaaattcctttttttaagaaatttcattttaaaatggcactccaaatttcaaacaccgtcttcatgctgattgtgttggccacttcgcttctgctgttgatgccgtccagcagcaatgccaaagtgatgccccaacttggtacggttgttttttggcgctcccaaattcaaaatgccagcaaatcaattttatttcaaaatgccaaaactatcccgttcaaaaatcgaggttttaatgccgtgagcaatcctatgacatcatcatatgtcctaataaaattttgccaaatcaaagaaatgccgccgtgccctattttcaaaatgcctaactttcccattcaaaaattgagaaatgccgtggataagccaatttccaaagtttcggtggcccatccgtcataataaatcttcctggaccactccattttcccactaatgactcccgcgagtgccataaaatcccattttttggggcaatttcaggcttcgcgaatgcagaacaactgatgaatgacaacagcagtccaatgggcgccggagttgagggtgaagtcatggacaaagtggaggcccgacttttgggtaaaacaatttaaaattggcattcattttggcaaattgttgcgtcacagagagtgccaaaatttaattgcaaaataatttgaaaaaatgccatttttgaaaatcatggaccaacatcattcattcatacaggtgcactggaacttcttcaaagctataaagaaggtgaggagaacaatgggatgactttatttaattggtgggatttcatattatgccacaggacaaaacgccaaaagaaaaaaaatgcaaattaattacgttaactgatcagtagggcttcgatttttaggtgctaaaaactgccaaaataagtaggttttaggttctaaaaaacccccaaaataggtgctaaaaatgggaaaataggtgccaaaaagttccgaatttaggggtgtaaaatcgaaaattttcatcaaaaagcaaaaatattttgccaagtcattaaggatatacataattttcaaaatcaaaaattatcgtcaagaaaataaaataaataaattttggagataaatttttgagaaatttttcatttcttaggggcgcatttttgaaaattttctggtcgattcttagggatgtattttttgaaaaaatttttgggtcggttcttaggggtgtatttttcttttttttgcatatttttaacaaattttgggcaaaacgccaaaataggtgaaaataagtttttttaaatttttttaggttttttaggtgctaaaaataaaaacctagaaaataggtgctaataactcgaaaagtagcttaacaacagcccaaaaaaacatgtttttcgtgcgtttcaggccacggggagctcaggaaaaaaatatgtaaaaacctaaaaatcgaagccctactgatcagtagggctggcaaaaataaatacaaaaagtggtaaaatatgtacataaatatgtaaaaaaaaaaaaaaaattttggtcatttttggaaaaaagttcttagtaaagggtgaaataggacctaaatagtcttagaatcacatttttgtatatttaaatattaatttttggtatctccttttttgaaaaaaaaacaatttttaggggtacatattcaaaaaaattttatttttttcacaagaaatttttataaattttaaaaatttctcaaaaaaatttagaaaaaaatgctaaaaagtccaaaatatgtaaaaaaaaaaagcccgaaatatgtaaaaatatgtaaataaaagtcccaacttttgttcacaaacacaaaaaagaaagtgtttttcctactatttagagcatggttggaaaatccaggaaaaaatatgtatttacataaaattgacattacaaaaaagcaaatttaaattccattaactgatcagctgatcattttgccataattaccgtatttgtttcttttctcttttttatgatactgtcctgtttccgttataacaaattagtgaaactaattaattatatgagctctaaatgtaattgactgaccataataccaaattcggccgtccctcattcattttgtaagtggacaatcaaccattggtttcggttttccttattggtaccccctcgaagacatctctcacccaaattttccaaaaaatttcgctaaatttttccaaaaatgccacaatattagcgcagttttttgtgaaaatctgataaagaattgagggaaaaccaacaaaaaaaaattcccggaaatccgaaattctcattttaaatccaaaatctttgtgtcagctttttaagaaatttttttttttggcaggctttcaaatatcataaatgaaactggtttttttcagtcccaattgtgcccaaattcacggaaaagcggaagaacaaattcgagttcatccgattcgggaagagaagacgatgatcaacaagagagagagagagtggaaggacagacagtcagacaaaaccatttgagtgatcagagagcggtgatcaatgatacatttttaacaaatacacgtacaattttggtaatattatcgctggcaatgggacattttttgcttttttgatgggcattgaataaagagaaacactgtgatcaaaaattgatgatgaatgtgtgaaaattcacaattctcggggtgtcaaaaatgtcttctgttaaccaccgagtctcggaaattctcagtctcgagtttcactaattggcggatctcagatatctgcaaaggataacaatttgaatatttaaaattagatctcgagctggattctaggccaggattttttctttgcttttttccaagaaatgcacaggtccaggtttttcaaaatgtcgagctctaattttaacagattgtgtgtcttattagtagggtcgcgacttttagtgacgaaaactctcgaaatagttaactaaaataatgagtaaaaatgccaaaatagtgacaaaatagtggcaaaaagtccgaaatagtgacataattttttgccaaaatatataccaaaaaaataatttttaaaattaaaattcttgccaaaaaaatgcatttttgagaaaatgttttcatttcttaggagtgtatagaaaaatttcgcgtcgatttttaggggtaaatttttcgtttttatcgcatttttattgagaaatttccaaaaaatgccgaaatagtgaaaaaatagtgacaaagcgccaaaatagtgatttctagtgacggataatgacggcagaagcgaaaatttttaatgcagaaaat

SEQ ID NO: 1987 - DNA, 1412 bp, Heterodera glycines
ggttaatgtttgtgaaaaatttgcactacatcttttctttttgacgcgaaaataataaaaattggcaaaacccctacaaattactgctttttcgcttcggtgctgaaatttaaaaaaaaaaaaactgtaaaaattttttggccagaaacccaatcaaacggtcttcagattcctccatcccctccgaaattttttgtttttggctacgggtctgaatgaggcacaattcaattcaattcaattcgagagcatttccaatccgtccgtccgtccggtgtccgtttgattattcattcatttttgcccttttctttttcctcctcctcattgttgtcgtcgtcgttgttgttctcctcttcctcatcctcttcttcttcctcttccacttcttccgtctctgctgctgctgctgttgccgcacttttcttatgcattattgtcaactcatttttggacgcgttgaacccgttgcacttgtagcagaaaaaggacagacttttgaactcctccagcagtgccatgccgttgtgggtgtgacaatgggcacagatcagcgcgtaactgtacaagaaaacaatcaaatgggcaaaaaattgggttagaaattcacaaaaattcaaaaaataaaataaaattttttccccagcggcacacatcagcaccgatggaagaccacagaaatgtttctgataaatgttttgtcagggctatgaattctaatggggcaaaaaataaatgaataaaatgggagaagttcgtttcccccgtaccgttcttccgccctccctcgaatttttttttaatttaatattttttcggaaaaaatttcctttttttgttttgctataataaatcagtgaaaaaaaatgttaaaaaccgaccgactgttgatactttcacccatcaaaaagtccaaaacgcgatctgaaaaatgtatagaattaaataatgatgtaaaaaaaaacaaatttaaaatggcagtcccaaaaaagtgtcgccgaacggtgcaaattttttgaaaaaattcagcgaaaaatccgatagaaaaaaaatactcggcccaacggtcaacccaccgggagcaattcgtttcctacccccgcaagaaaattttgaaaaaattgctgcaaaattaaaaaaaaatttttttttttttgaaatttcttaagaaaaaacattctaatcaagggcgtacccagacccgtaagtaagtccatcggaaaaacctttgaattttgaccgatttaaacagattttccaaaaaattgaaattttggaaaattaaaaaaaaaactcgggggcggggagaggaaccatttttatgtttcatgattttttttttttttgttttttgcttacccactggcgtccgacaatgctcaatgaacggacgaattggcgtcctctgctgc

SEQ ID NO: 1988 - DNA, 1199 bp, Heterodera glycines
tatccatattttatgtgttatttggccatttttttcaacaaacctctattagaacggctcccttctgctaaattgacctttttgtccccttaaagacagaaaaattttcaaagaaaacttttttaggtaatttttgtggataattttgtttaaatttatcattctaaaatttgtttattttatgtcaaaataagcttaaaaaggaatttctatttatatataatttttcactaaaattaataaaataccgtttttagccatttgaagaattttaaatttattgaatttatagaaattttgagttaacccctcattctgataaaatttatgccaatattttctctagccattgttgtgatgttgtttctttattattattttttttaatttgtattttttaacttttaggcacttccgtttgtgttgatcgacaccgattgtgctctttctgggcttcgcttaaggaatgcgagacaaatgcagtttggatggtggttaactgtgctcggtcttgcaaaatgtgtaaaggtgaaaattaaaaataaattattattattattatttatttaaaattaaaattgcaggtaaagctgcggttcgggctgcgaatggtgaatttgaggaaacggattgtaagttttggttgcttaaataattaaaaatttaacatgattttaataaaaatccgaatcgctttgagaccatcgaattattttaatttaaaaaaaaatttttttttaattaaagcattaattttccaggcacatttgtctcaacgcatgaaggtaaatttaaaaaaaaacatttaaaaattaaaatataaaattctaataaaaaatatataattttaagacatttccattcgtcgaacgatttcaacaaccgatgttcgcatcagcaacggcgcgtttggttgtgtgccaacacagacggcgacaaactgcaagaaaaatttgtgctaccatttgaaattccgcagctttgacggtgatataaaaaataaataaatttcaatttttgtttttaataatgcctataggaacgtgcaacaatttggaaaagccgttgcgcggagctgcatttatgccattcgcaaggtccttttttgttgagaaatttggataaaaaaattttctttttaattttaattaattttacatttaagattaaaatcttctatttatgatgacaatcttgga

SEQ ID NO: 1989 - DNA, 1651 bp, Heterodera glycines
  unsure (1)..(1651): unsure at all n locations
taaaatacattaattttttaaaaacgactnggatacgaattnaatagacttatttgaatgctttttttattagctacttgccaaaaagggggtcatttttatgaaacgacttagtaaatgatactaattttgaaaaatataaattgttaaattattacctaatttaaattgttatttttactcagatgctgagttcagcctcggaaattccggtgcgttggaatgcgttgttcatgcaatggggccaattcattgcgcatgacgtggccaagacgacaatgcttaacaaccaagtaaaaacatcattatcatttcaatattgactatttcagctcgagaattaacatcaaaattacatacaaaaataattttgaaccaaaaattattttaaaaagtttaaattcctataaaattacatatgtatgaaaaaaacccttttgtccaattaagatagaattttattgattttttaataaatatgttgttgttttttaagatttgcgccagttgtaagccggaaggtggtcaatgtttttcagtgatgttgagtcgaatggacccaacgtaacttttttttttagctaaattatttttttttaattatttaaaaaaaaattataaaattttgttaatttagttttggacgatttttgtgcttaccagtcgccagatcagcaccggtaggtttttttttgaatttgcattagcttttttatgcattttcttattcaaggtttgtggaacgggcagcgatcaaacgcgagaacagtacaatgagaacaccgcattcattgacggttcaatggtatagttttaaacaaatttaatttttatttatttgatttccaattaataaatcccaaaaatgatgaaaatttcaaacccattttatggcaaaattcggcggtgctgctgatttgtagagaataaatagaatatagaatattattttaataattttgtaaataattttaaacaaaaatttaattaaattttaaattatttccagatttacgggagcagcacgcgtgatcaattcctgttccgtcaaggaggcttcatgaagacgaacattctgcgcggtcgaattttcccgcccgttgacaacaatcaaaatttgattgcgggcgatgaccgagcaaacatttttgtcggcctcgccgcactgcacacactgtttgttcgagaacacaacaggtgaattgatgtgaaatcactgaccttggtagagttggacaaaatcattcaaagtttatagatttttgtaccatttgaattggtcactgattaaacagataagcgtttgttattaaacaccataaaattgtgtattcaattcggaatatcaaatcagaacgctgacccgtagcatgtgatccagggacggtcggtctattgacgaaccttttttgctagccaaccgacaaaactttttcccgcactatttattttttttccattttcccttaaaatttggagccaccgggtcttggagggtggtactaaaataaaaccgaaaattaaaaaaataataaattgattattaaaaaatttgaatgtagatgtgtggggggaagggtatcccgcatccatgagttctaaggagagaagagttctcgataggcattatgtgtaaagaaaatagaaaaat

SEQ ID NO: 1990 - DNA, 2953 bp, Heterodera glycines
  unsure (1)..(2953): unsure at all n locations
cattaaaaaatcattttatttnntttaaggaatantctgccacagttgtgttgggcaaaaaattcaatgaactaattgggccatacagaggatacaacccaaaggttgacccttctgttttggtgagttattttttaaataaaattaaattttatgatatttttaaaatatcatttttgtagaatgaattcactggctgcgcattccgatttggacatggcatgatacaggtcagaaaatttttagtgagctgataaattattaagaaaagaaattcgtaaaatttgaactttaaatacaaaaatttatgaaaaacaattgttattgtttgtgcttaaagttacaataattaattaattgcaaatacaaaaattaatttaattaatttatgttaaggaattttatccattcttcaatgagaaatttcaacaaattggtatgtttattgtttatttgtatgtcgatcagaaaaaataaataaatataattaaggtggaatcccattcaacgatggaatgttcaggagtattcatataatcaacaacggcattgatccattgatcaggggtaaactgattagttggcgggcactgatcagctttagcacaatcaacattttgaaaattttaaggccttatgacactgccagcaaaaatgccgcaacgcttaacaattgcagtaacggagaaaatttttgggaattccgatcttgggtgagtttttttcatgttgcggcataaaattcaatttaaaaatttcggatttattttaacaattataataaatttatttattttttcatcaatctttgcttaagttcaatcaacattcaacgtggtcgtgaccatggcatccctggttacactgcttggcgcgaagtgtgcaatttgccgccagtgcgcgactttaacgacttgaacagcacaattacgaatccggttgtgcgcgaaaatttgcgtattctttacaaaagagttggtgcgtgagtgttattaacatttttagggggtgggggattttatgtattttataaatttttacctagagaacggtgtacaataccaccacaccctgcaatttataaatttgggaatctgaaaatcacaaaacaaaaaaaaattcaaaaaatttgttaggaaataaaaactttcgggcttgtccttatcttgaaccaaaatgttcaaaaccctataagctccttagctttgcacgaattaaattaaaaattaaatattaaaactaaattttttctctaattaactatctatccaaattaaacaattatttttaactattattaaaaaatctttaaagaactcattgacatgtatgttggaagcattttggaagaccccgttgaaggaggaatgattggtgagcaatttttaaagaatattttgctcagaatttccaaaatgatttaggtccaacgcttgcctgcattattggaaagcaattcagggcactcagagatggagatcggtaaaaatttcagcgttttccaacttcaaaaaacaaaataaaaaaatccagatttttctatgaaaaccgaaaagtgatgtccgaggagcacatacgacaaataaaacgtgcctcattagcacgaatgctgtgtgattctggggacggaatgaaattggtgcttagttttattcagttggaaatttcaattatttttaaagatttaaaatttaatttaattattattcaaaaattattattaaatttataggattgtttcgagacaaataacaaaaaaatactaatttaaaaaaccaattcttatttgatcattgcttttgaatttaaaaatgacaaatgatctacagtatgatcattattaagtattgaaactttaaaattcaaattttaggtgccaaagcacgcattcaatcaaatccaaggacagaatgagctgttcacatgtgaccaaatagactcaccaaattacttcaaatggaaagacacctcatttttctcataaatttcattttctaaaatatttaatttttttcatctacccaaaatattgctcaatatgattttgacgaatttgtctatttgaatattcctcaaccataccatatatattttttcctaataattacacatatatatatctctattaattgtaataaatatgttaacttcggcataaagatgtgtttgaattacggttttggatattttgtctggcatttaaattcttgctaaattggtttaaaaaaaaaattaaataatgattaaatttcacattttttcctttattgcgcagaggttcaaccaaccacgacacattcataatataaataacatgggcgaggggatggggtgatgttggccaaaaaggttgtgtgtgtgtttgtgtgtgatccgatcagtttggccagaggattgaaccatgttgctcagtcagcagggcaaaaggggggaattggccaagaaatcaaacaaacaaaacattgtcgccagaagagttagcttaaaacagatgcgaaaagctcattcttcctcttcctcctcttcaccgccctcatccccctcggcatcttcgtcatcatcatcgccttcttcatcatcatcgtcaccctctgcacctgttaaaaaatatattttaaatttaaaaaatttatttgaaaaagtagttgatcagttttatggtggcattaagttaatctaaacccagagaatatatgtttaagaattaagtttgccatttaaggaccatcagaatgcgcttggttacgtccttgaaagtcactcctttttgaattgtatttacttgaaattcagtacattataaaattttccatcatcgtaatatttgcgaattttaaagccatgagattgtcgtagtccaaggacatattttctcaaggacaacgcaattcaaaataataaaattcatccccccccccctctctctctctccctaccctcttcatcgtcttcc

SEQ ID NO: 1991 - DNA, 2098 bp, Heterodera glycines
gaccccctcatgtctctctgttccttcctctctcacgtgtgcccccccccccactattttgtccgtcttcgccttctctctgtgttatgctgctctctctctctcttttctttatgattgcccgtgccgttgttcgtctccatggattgtcgtgccccttttgtgcgtgttcgtccgtcgtcgtcgtcgtctctgccgtggtgtcccacaaatcgccgtcatatccttgggccaacgagtgaaaagtttacggagcaattaaccccaaagaagtgccataatcagtcgcttttccttccatttcattcatttatttttttgtaatcacaaaatttgcacacgaagagagagaaaataaacaaatgaaatattttggggagggaatgaaaatattcaaagcaaaagaaaaggatacaatttgaggatggattctgaatcctacgcaatttaagtgaggcgaatgcaaaatcattgtcagtccgtgccattccaaaacaaaagtcgcggagattcggtggaccaaatgctacgccctccgccggtcgttgcggtcacttgcgacgcgtcagcaatcgactgatcttcgcgcgtttgccgtttccttctcgcgcgattaaaattgcccgattgtttaccttaagaaaggggtgccgacaaatgaacataaggccatgagaatgactgactccaaaaagcatgtaactgggcgaccttcggacaattgtataagcggcatcgaagtcaatgtcctgaggggggggggggggaaagttggcatttgcttatttgttagggtaattagtaaaaagccatttcgaaaggccaattcccctttagcataacgcataaaacaaacagaacactcacaaatattcccaccatccatcgaccgccaaactgcttctccattatctgtaattgcatttaaacttctttaaatcacttagacattggaagagcaaagagtgagaagcatcataaacaaagaaaatattcaattcaattatgtttagaatctcaccaataattcaaatttatttcgtggattttttgagaaaaaaaatagagttgagtgggaccgggacctgaatacggaaaactgagtacaactgagtaccgaagtcccggttttaaccgggaccgggactagtcccggttttcccagcaaaaaattcccggtttttcaacccgaaaaggtcccggttaagcccaaaattcccggtcccgctcaactctatttaaaaatgaagagaagagaagagtgaggaacagaggaataattcttttaacaccattctctcatttctcaagagtggggcgagagaagcaaaaaagcgacgcagaaaaaaaacgttttaaggaagtaaaaaaaagagtgatataaaagttaaataataaaaaataataaaagtaacaaatttaaattgacaaatttctttgtgcttatccaaaaaattcaaaagcatgtaaatggaacaaaaaaaaatttttttttattattattatgaaaataaggaaaaattgttatgaaaaatgccaagttttcactgctgaaggcaaaacggtcggcagaaatgagaataacagcacacacacatacacacagcaaagaaggaacacccctcgctgagaatggcacacagcccacaaataaatggggagaaaaaaataatttttttttgagagagagaaatgagagattgccgcccccgccccctccgcccgcccctcgtcttcgacgtcgtagtcgtcgctgtcgctgctgtgtggtgtgagtgatgtgcggcggcggcggcgacgacgccgctcggtcggcaattcgccctgggcgaatggagcggagggcgggcgggggacggatggtactcaactggtgagagaatagatggatttttatgtggcaatatgagcgggcaaatagaagatgtaaagaggggactcatttttgttggcgtttaaatggacttatttggctgattaaaatggagatttttgtagggtacatggaatagagtagccaccaagggcgtcatttaatcaacactcaaaaaagggagtagcaatttgaatgatggatgtagaccagagaaactctaga

SEQ ID NO: 1992 - DNA, 2837 bp, Heterodera glycines
aagtcacgactttttgaaaaaactcctgaaaaattaggcgaaagttaaaaaatcacatttttaataatttatagaataacattttgatcgtatttttaggcacttaattttataaatagtatctaaaataggcataaaaaagagattcttccacaattaagaaaaaattcatccacattgcctttttatcgatcgaaattttatttcggaattttcttgtatttttcggcattttcttctctaaaattcaaattttgcctaaaaaagtcaaaaaaaaaatcatgaaaaaagtcgcaaaacgtcaaaaaaagccataaaaatccaaaaagtgtaaaaaaatcaaaaaagtcacaaaaatgcatgttagaagattcaaacagaatttagaacacactttttaagtcattttatgaaaccatttagagtcaacaaaaaaagccatttgacttaaattcccagtcctatttaacaccaaacataaattgcccacccatacggtttaacaaaattgtttcttaaacataattcatcgtttcaaatggttccaggcttttccccaaaaaagttgacaaatatgtgttaccgacgggcggaggatgtttaggactgggcaatcaaatggtaatttttgtgaacaagccgggatgggattaccgttcacaatatttcaaacaaaacaattagggaataaatgattttagggactggtccaaaagttttaaaattcaccccccaggggcaaggaaatttgagttttacgtgttttattaatttggtttttgtttttagttccgttttgccgcattgtacggaattggaaaaccttatggacggaagccgatttacaaggacagtcaaaaatgcaaaaagtcaagcgtaaatgcggtagaaaaaggcgagaagaaagagcatcttttcccgatctttgccagccaagaaaaatattttgtaattttaatttaattaataatttaatattatttcatttattttaattagttttataaattatacttaaaatttattcagaacccggaagaaaagaagaatgaaactgtttgtgtacagaatttattcattcgatgtttttcatatgtaaacccacaaaagtttgcctccttttttgattaatttcaattcattttgcttaagttttgctttttcgaggatcaagcagaaatatttggaattggatgtatttattaataaacaaaaaataaataaatttaaaatttaagggcgacggttgttttcaatcttataaattctttgaaagccgaagaatggaaatacgtcaaatatttcagtttgggcatcaactttgtttaaatgtgacggcattcaaaaatgaattatttgggtaagtatttgaaaaaataaataatattattattaatatacaatatatatacaaataaataattaaatttttttattaaaattaatatataataattgcaatcatttcagaaatgatcagtcacacaaattttgtgtgcacacccgcaggggagattttgttaaaagaggttgggactcgaagaaggaacctacggagaaaggaattgatttgggatttgaatatttaaaggcgactcataagttgtcgatacaagacactttgagatgaaagtatgaaaagttaaaatgggctaagtacgaaaagctgttcgaattgcctcattaagtctgtcggcaaattcacactctttcgtctgcttgtaaattgagaaagcttgtctcgctattgagcgcatattttggttttcttttttttttattcaaaaataaaaataaccaaaagaagggcaaagctgccgcttacatttgaggtggaaatacgagaggtcaaatgggtagaagtgaaagaagacaatttacatttggtaatgaaatgaggtcaatgggtagttgtgacatgattgttgaaattttaatttaagaagcggaagagtcagacctccagcaaagggaaattggtttttatagcaaattgagaaaaaatttttaggaaattgagtagagatattttttttttcgatttgttggaggtctgcagaactatttatcgaagcactggggaattgtttttgaaatgattccagttggaggagaaatttgtcaatatttgagagtggatttggattttcgttttgtgtgattgttttgtcaacctgcgatgattttgaagtgtcttcactggcctccttcggttctggtccattttctttggcaagagtcggaacatatagagaattgagattaattgctcaaacttgggtaattaaaccgttttcaatttcaaatttgggttttaattggtttaacggtagtttaattttgggtggttgattcaatgcttctaattccgctataaagtaatattttattttcttcgacttaatgaaaagcataatttcaggcttcacaattttgttcttcgaccagtgctgcaacatttgtttgtaccctcaacattacgcatttttggtggttttttttaccacccaaatttttcatttcatttttgccaaaaaattctttcgaattcgtatgcccaaaaatattaacaaatgcaataaaaaaaccgaaaaaacacccctaagaattgacccgaacattttaaaaatgcatcctagggaatgaaaaatatctcaaaaactcatccctagggctaatatttttagtttttttttttacttttttttcctgaactcctcgtggcctgaaacgcacgaaaaaatatttttttaggttattgttaagctagttttcgagttattagcaactattttctagttttttatttttagcacctaaaaaccttaaaaaattta

SEQ ID NO: 1993 - DNA, 3931 bp, Heterodera glycines
aaaaaggaaatagccatttttccaaatttttccaaacaaacgcgcagagaacaaaatccagaacaattagtatcggcgtaattatttgagaatgcggtggaaattcctattactgtggagcagaaaaagagatagccaattttccaaatttttcccaaacaaacgcgccgagaaacaaattccagaacaattagtatcgcgtaattattctgagaatgcggttggaattcctattactgttgagcagaaaaagagatatccaattttccaaatttttcccaaacaaacgcgccgagaaacaaattccagaacaattagtatcggcgtaattattctgagaacccagcccccccccctccccctctgaaaggaaaataaaattttaaaagaaacatagggacccattttttagaataaaaaacaattttctttttttttgtttttgaaataatcctaaaaataaaaatgctcttttgttagaaagtaccatttttatagcatctacaatgttggaaaattacacagtaaataatttctagggaccaaaaagcaaaaaattctcgaacctcccaacagttccgaattttttcaggttacgggcctgcttacaaagggaggtggccaagtgtccgtgggatttcgaaatgagattttttgggtagatagagcacccccgggttcataagaaaaatgtgcgtaaaattttaggcatttgcctaaaaaacaagtccctactgattaggaatttgatcaaaccaaaagatttgttttctctgaaatattccttgagttcttctagccataactgaaatgttgctgaattgtgacgccgtacgccgagacaaaaacaattaattgactataattaagccaaaaataaatgtccttggacttgatttctaaaattgataaatttgacacaaatcgattaagagtgaaaggaattgttcaaaagtcatttaacactccgccataaacgccggagagattcaagacagatattctcgaatagcattaataattggcataattttatttccattttatccggctaattgtaagcaaaatatttaaatctgtaatgatatttaaatatcagatttttacaactatccaaccaggaaactttaaatttcccaaaaattactatttacagggttttgtcggactaatcgtgcgcccatgaaaattttaaaacccaatcattaacagaactcggaaattcaaaattactgtttaattttgagttattaaattcataaatgtttttttctttttacgatttatttaattgtgtttttctttttgtttttgattagagcacgacgggaccgggactcccgcgggatttttacgagattcccggtcccgctttttttcggtgaacgggattttaacgggagcgggatttttacgggatcctgttcggactcccgtcccggaaatcgagtaaatacggtataggagcattaattctgccgtttgaatattgatgattttttttaatcacttcttgaaaacttgaaaaaaaaacatcggtcactagaaaataaattcgaaaattttgtccaggaaatccaggttttttcgtctttggtccggacctgaatttccttgacaaaaatccaggaaaatccgggtctaggaaaaatccaggttgccgaaaaatgacctggagctggatccaggaaaaatgcaagcttgaatccaggtcctggtcggccctaattttttaaatttatttctcaattattttgtgcttaaaagaaatatttatgactggccgaaaatgtgacggaattggcctttaaatggtaaggaaaaacagaatcagcagtacaaatttaatttctcaagggatatgcattttctgtgattgttcatgagtttttgtataattttagcctatttaaatcataaattaactttttttaaaacaaataaatatttattcggagtttcaaatccatttttgcaaaagcataaattttttcaaaaatattaaaacaataaaagcattttttgagaacactccgtttggatttaatcgcgagtcattgagccattgatcagttttatcggaatccattcaggcaaaaaatggtcacgtgtatgaaggcctaaaacagaattactcattattttaaaattcaacgaaattaaattaaaaaaactgacccggaagaaaatctgaattgtacaaaatggtagcatcgtcgggcatcaaataagcaatccaccaagcaaaagttgatgtctgtgccgacaaaaacaaagaatcgcatcccaacacggcaaaagccaaatcattagcccttggcattggtttcgacaaataaacattggcaaaaagcaaaaaaaaaaaaaaaaagaatttattttattaattatagtaataaaatatgttaatttatttgcctgccgattgaatgataaattcgccaaaaattgtttgtcttctccaagcaaaacaacagaaatggaaatgttgtcaaatttttcctaaatttttaattaaaaattaaaaaatgaccattcgccatatgaatcacctttaaatattcaaatccaaaatcaattcctttctccgtaggttccttcttcgagtcccaacctcttttaacaaaatctcccctgcggatatgcacacaaaatttgtgagactgatcatttctaaaagattggaattattatatattaattttaattaaaaaaatttatttgtatatatattgtatattaataataatattatttattttttcaaatacttacccaaataattcatttttgaatgccgtcacattcaaacaaagttgatgcccaaactgaaatatttgacgtatttccatccttcgactttcaaagaatttgtaagattggaaacaaccgtcgcccttaaattttaaatttatttattttttgtttattaataaatacatccaattccaaatatttctgcttgatcctcgaaaaagcaaaacttaagcaaaattaattgaaattaatcaaaaaagaaggcaaacttttgtgggtttacatatgaaaaacatcgaatgaataaattctgtacacaaacagtttcattcttcttttcttccgggttctgaataaattttaagtataatttataaaactaattaaaataaatgaaataatattaaattattaattaaattaaaattacaaaatatttttcttggctggcaaagatcgggaaaagctgctccttcttctcgcctttttctaccgcatttacgtgtgactttttgcatttgtcactgtccttgtaaatcggtttccgtccataaggttttccaattccgtacaatgcggcaaaacggaactaaaaacataagccaaatttaataaagcgcgttaaaatcgaatttccttgccccggggggggggggggggggtggattttaaattttttgaccagtccataaaatcatttaactctgattgtttttttaaaggttctgatcggtaatcccgacttgttcaccaaaattaccatttgattgcccagtcctgaacatcctccgcccgtcggtaacacatatttgtcaacttttttggggaaaagcctggaaccatttgaaacgatgaattatgtttaagaaacaaatttttgttataccggctagttttattttactctttttttctctgttccccctatggtctgaaacgcatgaaaaccatgttttttttggttgttgttaagcctagttttctagttattagagcctactttctagtttttttattttacaaaaatacaataaaaacgaaaaatgcacccctaagaatcgacctaaaatttttctcaaaaatacacccctaagaatcgaacaaaaaaaatttttcaaaaaatacacccctaataaacggacaaaaaatttttttcaaaaatcacctctaagaa

SEQ ID NO: 1994 - DNA, 3476 bp, Heterodera glycines
gggggcacacgacggtaccaactgggagacatacggtatgccaaaagttaccaaagaggagggcatacggtagaaagtgcttaccaaaaggtatcaaaggcgagaggcatacggtagaaagtgctgccaatgggacaattcggtcagaatggcaacagaaaagcattttcccattcgtttgctcagctgtcgaaggggtccaccgaattcaacgtgttcgggcagatgctcatcgtcagttctcctttcattgcttctcctctgttgcccaatttcggtcggtgtcccttttaagtcgtggaatgactcgcggttgggttgggacaccaaagaatggcatttggacgagttggagctgaaggacacgcagacgcaggaagtgtggacgcccagtttcacagatgagacgtaaattggcactttaagcatgcaaaaactgtgaatttgaaatcattttcagtaattgcggtgcgatggacggatgtttatccaaggtaaagcgaataaaagtgacaaacggaaaaggcgcgctccttttgaggtgggcgattttacgctgactccgtccggtcgcgtgacggcacggctcgtcttccgttatccgtccttttgccgaatcgattatcgcaggcatttcatataaaatacacctaattagattaatctcaggatttcttccattgcttaacccgctttttctttccccatttttgctctgttccgttctctttttcggcttttccttttcaccgctcctttttcttttctcagttaccccgaggagcgcaacgactgctgtttgtatatcagtgcagcggacattggcaggacggtgaagttcgtcgtgcagatggaccagcggagggcgcttctgtcctccaagtcggtgccggtcagccgagtggcgcagggactgtccgccattgtggtcacaaatatggagacctccgtttgggctgtgcaggtggccaatgccaatttggcaaagttggcgaattgcgcctccaaattcagcgccaatcgttggaaagcattcgcatcgaaggcaatcgcggcgaacatttgcagctttgcgtgcaggcaaagaaggaaatgagcactttgcgaattgcgctgcgtatccccgtcacaattgccactttgtgagtgaatggagtgttggcattggcaccgttttggcattggcaaattccaaatttgtcggacggatgccctcccctcctcccacttttgcttgtcagtttttccttgctgctgctttaggcttatgttggtctctccgctgttcggcgatttgcgtgcccaggccctggtcaaactgttgaccctcctcctgcagaccatctgctttttgttcctctgctcaatcgcacccgccaatggcttcggggggtcaaagcccaaactctgtgagtggggcccattcattggcacatttgccattcctacggtttgcccccccccccccccaatgttttaattttccgcaattgcccctccccctcagacaccttctatgagttcatgttctcgatgacttttctgagcattttgatcactaccttttgtctggcattgtgccgaatgaaacggacagtgccggcatcgcacggactttttttggcggcaaaagtaagcgaatttgggggggggggcaataaaagaggtggattattacttcagatgctcaaccatttcctttgctgtgttgagcccgacccatcaacaaattatcagcgtcaatttggcaagcgaatgtttttgaataattaaaatttaaaaatggagagacaattaggaaaagctgggacagggctaaaaagaaccaattcaatttgcctaaaaattcagacgatggcttcgattcggtcagcgcccgcggcggaattccgcaggcgccgaatagcggcccggcacttcaaaatgagtgagttaaacggacagaaaaaggcatgacgagacagcaacaaatccatactcccctccccctcttcccttcagttactccacagaatggcgccacatttacatcgcgggaaataaccttttctccgggatttgcttctctctgttttgtttcgtcacggttttcgaaattatgtgacccaataaggaacacgaaaaaggacaaatataatacaattattagaattttgttgtttatttaattcgttaaaaaaattaaaaacaaaaaatgcatcaaatcgattaaaaacctgcgttgccgagagaacgtgaaaattagggaacaattaaagttgaaaacaagaaaaaaagtttaaaagcaaagtttgataatgagagagagagtggtaaaaaaggcatatgaagttgaataaaactgagaaaattaacaacaaattaagattatggcgaatgtgaaatggaaagaaagataatcttattaaaataaaaaagtaattgtataaattagtgcgtgtcaatttcgctttgctttgcctttccctaggcgttcacgcgttggtcgcgcagttgcgtgtgcgcgtagcaaagtcgttcagagatggcctggtaatcgagctgaccgtcatcccttcgttcttggatggtctcgcgacttaaaggatccatcaaaaatggacacattaatgatcacagaagcacactcacttcactttgtaaatgtctcggccacgtttggcgtacatcagagcgatgtaaacctaaaaagttaaaagttttaccaaacaaaatgcattaaattcgtggaaaatgtactggagctggcaaagaagtgggcgtattgatgatcttgtgacaataggcaagcgaattgcacatctgaaaatggaaacaatgtgtaatttttaaattaaaatgcgttgaactccccccccccccggggattatttgcctgttgaatatggtccatgggcatatgcgactcgtcaatgagcacagaatagcgaggagttcgagtggttccctgtgataaatggccaatattttgaacgttaaactttctattgttagcacctgaacagccgcgtgcgtggccaaataaaattcgctgtgttccggatgagtcacctgcataaaacataaaacattgcgaagaaatgcctggtaaacgtacttgggtgtcaacaacggtgcccggtttaatgttccaattggggcctttcattcccggcaaatacactgcagctttggccgattcgggaatctaaaatagcagaaaggggattaaaatgaaacaaaataaaggaacggaatgtgtcccgtgtgtatttattcccctttccccggaacctcctcaaaaagacgaatgttgtgcgtcttctgcgacaccaacacagtcagtttgcagtcatgcgcaccgcacctgcaaaagggagagtaaagtgatgcgcacctttacaacaccaaaaccaagcaaaggaaggcgactgattgtgaatgactcactctttgagcgcgtggttgatcagtgggatttcgtactgcagtgacat

SEQ ID NO: 1995 - DNA, 1576 bp, Heterodera glycines
cggaagtgccgtttctgaacatgaccagccgcttcgtctcccttcgcggtgctcggcgtatcgtgtgatgcattgcgaatcgatggccgccaacgtggaaaacttttcgtccctgcggggctcgtcgaaaacgtagtcgccgacgaaatcgaaggggttctttttcatgttggccgcgtacttaaagcgaataccaatcatggagtagtctatgaagattgatcggttacaccacctctcccccccccccccccctcctttaatttcgaaactcactccaatcactgaagggtccctcggagtggcaccgcgtgccctttcgtaacttcccatggcgccggggtgcgacacgccaaggccaatgaacagagtgccctcctcaagcattcgttgcacactaaaagcatgcaatttattattaggaacgaaaattaattgattgttccatgcgacaaagcgtttcttactcagggtttgtgacacggacctaaagaacaaaatatcatggattccttcaatttcgtaaacccttaccgaataattaatgccgcccaatttttcattcgatttggccacaatattctcaaccgtttcgggttttcctctgcgcgaaatttcacaggcatttgaaagtttgaggtcctgtgtgacaatttcgtacttctgttcgcatgcttttatgacttctaaaagtggaattgcttttacaaaagtttaattttcaaaaagtttaccatggagagctttgaccgcgtcgctggtgatgaaaaagacgaagttgcaatggtaccgtttgcactccacgattgtgttttccacctttaaatattccgatcacaacgatgtgcccatttttggcacttacatcgcccggggtcgcgtcaatcatttgttggtcagcagggttagagatgatcatgccatgcttacggcacatttgcagataacacgcgacgaaattactttagaaaggggaaaatggtaaaaatgatggagaaaaaaggggatgattgatcggaatgggaagcgatcatcagcaatagtaatcagataacccctatttgtaagtgacaattctacttcaacaaaaggcactcactccatgtcggtagacgagaaattgtatttttcgtcacgcgaaccgccggaaatcaaataaatctggcaattgctccaattaaaaataaatttgtttgatttgtgacataccgcccacgttttcacttcggcgggcaacaagaagaaattgttcatgttccatttggcatcatcgcggtcggccctcacctccttgtctaaataaacgacgaggggcaacggcaaacgacgcgcgtcgacagtcagtggcttctcagttactggaggaaaagcattaattaatataagcaaaattgccgtaaaaaaaggtcacttgagatgcatgccgacttcaaatattcactcccatgcaaattcaacgcgtcgacgctgcacctaaaggaggacagaaattgtgcattttgttgggacaggggcgtatctagaaacatttttcgggggggggggggaagacccgacctgaagacctttttttttt

SEQ ID NO: 1996 - DNA, 1561 bp, Heterodera glycines
  unsure (1)..(1561): unsure at all n locations
cccccccctggaatacgcccttgtgttgggacgacgctgacaaaaaccttgcgtgtacaagacttactcgatttggcgcttcaatcgttccggtggcactgcggaagcctaaaagggataaaggggttttgtttgttggaaaagccaaccgtcgctcggcactcactttgatcatatcggcgacttcgcgctgactgagctgattgagttgagctcgctgattgtcgcgaagacagcacagttccatcgggtaataattcgtctgtcctttttccaaagcggtggccaacggagcatttgggaatctatgaacgaaatgtttggggaagtgcatttaaaaagaattcttcatccaactgactcgagttcgtattcgtatttgcgcttgaaatattccgaaaccggcactttctctccctgcacgtcgattatgtgatttgatgcggttgccgtcgacactccgctgagtcggacatcgcgagtacggccctttgggtaattcacattgacatgcagtcctgaacaacatcacttgggtcattcattcatgggttcattcaactttcgaacaattcgttgcacctttgagttgggcgttcaaactgccaatcaaattgggcctgacttggccgtcccctttgatgttattggggccaacaattgaagaaactttatcaagcaaagtgccgtctatgttgtggaacggagtctaaacgaattcaaaaattataatgagtcttgaatcagaaattgggctgacttttttactctcgacaatcagtccgacttttttatttccgcgccctcgtggcccctgcaaatgaaaaggaatggtcactcaatttttggccataaattgcaccaacctccacgtagcgaatgcttttatgaattccaattgccaaatatttgttgtgctgactcaacacgggcccatcctccgccacaaagccgtgattggacgcgttgattaggtaagtgttacccccgccaatgatcacgtgctcctctctatgattacaattggaatttcaaatgggaaagaattggaaaaaagggattaataatacggcgtttggagagggtgctgagaagtggccaactccaaaaaggacgaaagactgtgctaaaagaagcaaaagtcttaaaggagaggcgagttctggtcactgacgtcctgctgggtcatgtcattggtcagtctcgacaggtcggccaattcgaccactttgttcacctttctgaccagcatctaaacaattgtaaggcaatgacaaaaaactttaaaaagtcaattccaaacaaacttttcaatttgtaagaaaatggggatgaactcaatgggtttcagcaagtggtggctatttgctgacctgcactttaaagaatttgttcagctgttcgacttcgctgcagtattggcggtcgaggacgaacacgcgttccttctcatgccccggcccanagtccaactcgcgtagcgtgtacaaactanattttattctttttgttttgccagaaaaaatgaaatgccaaaaaaccaaatgcactcacatgcact

SEQ ID NO: 1997 - DNA, 1154 bp, Heterodera glycines
atcgtaacggtacaccgtcctggaaaatgacttcgctataagagaatgtccaggaatgaaccgaactcactttggttccattttcacaccgtaaatgttggtcactattttgcatcgctggccctcgtgtccgggttcgaccagtgactccaagcgtgggtcgccaacttcaatctgtcagtgtttgcgtttctggtcagttttctgatttgccctcgtcccaactcaccccgaggtgctcaaattccttctttatgtcctccaacaattgagttttgcggcgcttttccactgccgatgaactcgttgtcggtgatctaatgtatatttttattcatttcgattttttctgtctaaccctccgcgcctcgaaccgccgcgacctccgcccctccgtcctccacgccctctgccacgtcctcgcccaccacctcctcttccaccaccacctcttccacggcttgtctgtactggcccgtctcctcgctgtccaagcggcatcatattagcaccagtcccagcactcattttttgttttcttaaatgcaaaaatggtagtttaaatacagtagcttattattttagaactgaatggtatttgcaagttcccttatcccactcccacacacagacaactttttacccgcttaataaatatggtttaaagaacacaatactttaagagatgaattgaataataactttaagagatgaaatgaataaagatgggtgggtggaaagggggagggaaggaaagggaagagaggaatgggtgggggttttttcctcttcccaggggaagtgagcgaaagaacgggctgttgggttgggctctacccgtttgcacattctttctctgtgtatgcaaatgttatttgatttttcttttttcttcgcgttcgatttttctttcattctttccttcaggcaaaaaaaggaatcgcttcatttttgctttttctttatatcccattgaatgaggcggtcagaggccaaaggccgcccatagacagaagactgactgtcagcaccataagccagaatgttatttcacagtggttatataaaataaaagataatgcttaagctcagatttaagtccaaagtttgtcggacattctaaaggaataatttgttttaaattaaattcctaa

SEQ ID NO: 1998 - DNA, 6258 bp, Heterodera glycines
  unsure (1)..(6258): unsure at all n locations
ttaattttgttgcacaacaaattaatattacaataacatagaaatttttagtcgaactttaatacgtaaataaacaaacacccatcttgtctacattttagtcgaagtcacaaaaaactttatttttcaaaaaatcaaaaaaataatttttaagaaataacattaatcaatgaatctataaaaagaatcaataaaatcattagttaatcacatatatatttatctatctatcaagtaaacaagagagaaaaaattgaagaatttttatatagaaatattttaaatgcacataaatatttttgttccatttttatttctatttgttatttttaatggttgtcaggcaaaagaactgaaaatttgtgtcaaatatgagaaacgtggtgcgacttttggggatttgtaacttggggacccgacatttggggacccgacttttggggatcccgacatttggggacccgacttttggggatccgacacttagggatcccgacatttggggatcccgacatttggggacccgacttttggggatccgacatttggggatcccgacatttggggacccgacatttggggaccgaacgacatttgagcaaaagacacttaagaaaaccacggacatttggcaacccgacatttagggacccgacatttggggatttcaataaaacaaaaaaaaattaaaaaatttaattctaagccacaaaattagacaaaattacgtctgctttagccagagttaattccattgcaaaaaaaattaattaatattttaaaaattaactctgtttccggactcaccgcgaggaggcgcagaattttgagcccatactaaccacaacacaatagacaaaccacaatacattttttaactacagtagacctttttctaatttttatttaaagtgcctttcccaagggccaacgggatgtgaaaacagacttaatcaccatttgggtcgtcccaattctcaaaatcattgcgcataagtctgtattgcaacgatctgagatgagcaagaatctcatcttcgtttcagaatacaacatttcacgattttttgtggtttgaggacattggacgggcaatgagagtgcaatgaagaagtaaatagctcgcattgaaaaaatggaaattatcagaatgaatcgctccactctctttcgttcggcggcttctcaaaaacaattttcaattagctgacgcgacggctggcacaaataattcccttccccccccccgctctcgttcgttcgttcggcggcttctcaaaaacaattttcaattagctgacgcgacggctggcacaaataattcccttcccccccgctctcgttcgttcgttcggcggcttctcaaaaacaattttcaattagctgacgcgacggctggcacaaataattcccttcccccccccccccgctctcgttcgttcgttcggcggcttctcaaaaacaattttcaattagctgacgcgacggctggcacaattctcttctcccgtttttgtcatttctttacgaattatgaatatattttctagaaaatgaaaaaatttctttttttgacaattataattctgttgctatcaaatactcatagttcgaacaaacagagcatcggaaacaaagggcagtttcggctttagctcgtttgacagtggctttatcacgtataggcacctacattaaagcccacccgtacattaccgcctcgacaattttgatggaaatgggctcagtttccctcaacatttatttgctaatacaagaaataaaaggttaaaaatctttattttttgaaaagatataattattttagcttgcgaagagaaacagatcttaaaggactttttcccatttgtgctcactctgaattcttatgaattcagtgtgaatgttgatgactacaaccctggatatatttttggaaaaataaataccgaaatagggcgaccagtggaagagatttgttttgcaggtcagccacaaaaaattaattcgttaaaaaattcatttaaagcaccgaacaaagtcacccgaaagataagaaaccgaaaagatgacctcggcattttgttgttagacagcaaagtcggctggaactttttgaatgtccttgacggatttctgttcccgttggcccttgggaaaggcactttaaataaaaattggaaaaaggtctactgtagttaaaaaatgtattgtggtttgtctattgtgttgtggttagtatgggctcaaaattctgcgcctcctcgcggtgagtccggaaacagagttaattttttaaatattaattaattttgtggcttattgttagaattaaatttttaaatttttttttgttttattgaaatccccaaatgtcgggtccctaaatgtcgggttgccaaatgtccgtggttttcttaattgtcttttgctcaaatgtcgttcggtccccaaatgtcgggatccccaaatgtcggatccccaaaagtcgggtccccaaatgtcgggatccccaaatgtcgggtccccaaatgtcgggtccccaaaagtcgggtccccaaatgtcgggatccctaagtgtcggatccccaaaagtcgggtccccaagttgcaaatccccaaaagtcgcaccacggttatataaaataaaagataatgctttaagctcagatttaagtccaaagtttgtcggacattctaaaggaataatttgttttaaattaaattcctaatttggcattttgtctgtttacaacacaccggtcgggatctgtcgttttcggcgccggcccaagttttcggactagaacttttttattgttatccaaatccaactatcttgttatcattcgaaagcttaacatgtttagaagatgtttttaagctattgcttcgtgattaaacaattacctgaaaagttataatatgaaaattgcagtcgaaatttttgaaattgtttcttattaacttttgcagattagaaaatcttggtgttttttgtaagtctgacagagcatgcaaagggctttcaaatgatgctaagattgtttgatttgacgacaaagaaaaaagttagaacccaaaaattcgggccggcacgaaaataccctggtctgaacacatacatatgcctgcagtaaagttctagtacactttaataaagaccgaaccgagcccggtttttagagggcacggcggaagaatctggtcttcgggagaccggccttttgtgtggcatttagcccggaattcagtttaaatatttctgtagactttgtttttttgacaccaataatgtaggcattgaccaaaaaattgagaaagcctaaaagtcgatggtaggcctaaaatgcaatagtctgcgtgtttaacatatgcaaatcttattcaacaataaaagagaaaaggggtttttatctaaggatagaaatcattccactatggaagcatcggttcttttctttccttccttcacatttttgatcagttcgtcaattgtttttgccctttctttgtcgccacagcctttttccagctgagcaaatcgcataagaatagtcaaatctaagaatggcaaaattgcaaaatagaacaataaacgtaattaaatcatttcgttaaaagggagtgagaattaaggatttagggccggtgaaatttaaagggaagagcataatataaagctaaatttacgtcttttcttctccgaacattgaagagaacgcttaagcaagttttgaaatgcgtcggcatcgttttgctgtaaaggtgcctcccgtactcaaaccatggtccaagttcgaggtgccgaaactttttatcattgattcgtataattctctgatctcctgcaaacgatgctttaatgtttggttgatgtttctttttgcctgcctcttctcttccttttgcgtttgtttgcttcttcaacagtccaatcaaataccgatgcatttgtatggaattggacgcggcacacgcccttttgaacacttcctgcagcgattcttccgtccctaatgcaacttccaaattcaaataagcatgccaaacattggccaattcggtgtcatttctggtcaaatttgtcatatgaattcctaacaaaagggtatcatttacttactgaaatgtaatggtcttgagggccctttcagcaacagctcttccgcgttcgtaccttcggcacacttttagcccttcgtgggtcagataaaagcgaacaaagccaatccacgcggaggacaagttggaatcggcaatgagaagcttctcatattcctcggcagatgctagggaatgctcatccggaagaccgaaacaaaaggttggcttaaaatggggaattggtgaggagagggaaaacgaagtgcaaccaagggatgatatgactataaagggtttaaatcattccttatgaaagtttgactttcgctccccactcttttttcccgtttgattttcgcccctacttctttgtgctctccgtttgtttgcgcctcctctccatctctgccctcttcctccgtcttttccattgtgctatttccttcccctctctcctcattctctttttcgtcttcctctgattcctctttttcgttgttctttcctccttcttcttcttcaacgttctcttcagcagagtttacactctcttttgtccttttttgagtatttatctaaaattgggtaattaattaattcccatattattttctttttgtatctcacattttgtttcaactcgttgaaatcgtattcgtcgcttctcaccaagctcagacaaacaacgcgtcccttcttcgttttatttacgccaatcactcggccaaagcgcaattccccagagtcgaacatttgggcggtgttttcagactgatcagtgtccgtcccgtcctttttggctgccggttttgccgattgagtgatttgaattattgcacggaattcgggattgatctaaacaaaaacaaattcatttcattacattttaaagtgaaaaaaagaaagtttaactgacctccccggtaaagtgtgtctgatcagtgccctctttttttgccgtgtcgacgatgaacacggggacgacatttccaaagtcaaactgttctcggtatctgataagagagagcttctttcgcggttcttgaaccttctcggagatggcagtgcattcgacgattctgaacaatcaaattagaaattgagtaaacacactaactttcggggcccatattttgggctaaattacctgtcactctgacgcctttccatgagtaactcccgtccccgggcactgatcgatttggaacggctcacgcaaatcactttcactgttattgttttgcccgagctccgtgccataaagttttgcattgggaaagttccttcgctccattcgcttttagaatgagtgagttcgcttgcatgaagacgaccttaaacaataaagcagtttgaaaaccaaaatgtaaataatgcgaggggctggagtcgatgcccaccctttttttttgcatgaatcaaagcgtgaaaatgtccgccctcaccaatgcttccgcccgggagaaggagttccgccgtagttgacggagaagtgccgccgtaaggccattggccgaggacgcgggcggtgtacacgcggaaaggcttggcaggacgcacagttttggagggggcaatgcttggagctgtcgcattttgtagtgattctccggtggatttctcgttgtcttcggaggatggcaaatccaacagcattttgccctgtgcgacgtcgacgctttttaccaatacttttaagggcattccaatcgcaacagcactagcggccaacaaagcaactttactaaaaaagcaaaactnttaaaacgcatttattgtaaagcgtagtaacctggatggtaaaaagccgatagttcggtcgtaaaaagcgaccaaaactgatccaccgtccaaatgtttgatgactgtccccgttgagacaactcccaccacgtcgttagaaattgcaacaatttgtttctctgtctttgattgtttgacgagcgaatgtttcgcagttaaaaagagtttattcaaattgtggtcgaggtacaaaacacggcacgacactttttgacctgaaatttaataaataattaatagacaatgcaattactaggtcgttgcataaaaaagggcgctttttcaaaatgactttttttaagacttgattaacgtttgttatgtcttttttgtgtgtaattcttttat

SEQ ID NO: 1999 - DNA, 2473 bp, Heterodera glycines
  unsure (1)..(2473): unsure at all n locations
cacagttttggagggggcaatgcttgagctgttgcatttgtagggattttcggtggatttctcgttgtctcggaggatggcaattccaacagcattttgccttgtgcgacgtcgacgctttntanccatacttttaagggcattccaatcgcancagcactagcggccaacaaagcaactttactaaaaaagcaaaactntaaaacgcatttattgtaaagcgtagtaacctggatggtaaaaagccgatagttcggtcgtaaaaagcgaccaaaactgatccaccgtccaaatgtttgatgactgtccccgttgagacaactcccaccacgtcgttagaaattgcaacaatttgtttctctgtctttgattgtttgacgagcgaatgtttcgcagttaaaaagagtttattcaaattgtggtcgaggtacaaaacacggcacgacactttttgacctgaaatttaataaataattaatagacaatgcaattactaggtcataaaaaacaaagctgttccaagtgaaaattaacgttattaagcttccctaaatacctttctgaaaccgtttttgccagtgtttgttggggttgtccaatgcgtgaattgctgacacatatccagaaatatcccgtccaaatgtcacttttatgccgttagcattcactgagttgatccgcccgctgattttcatccccggaagtgcttcttccgcacagacaacgctttgttggaggtcagccgatcgcgtagtgacgaacagttgtcgttcagacattgaaaatccgatgacgcgacattcgtggacggaaccaattgcgaatttggacactaaaacataaagaaacatgaagccataaatgatggacagtttacggttcgtctccacatcgtcaatgtgaattcggagtgctttcgcggtgagtaaatgcttctcactgtcatcgtccaatttgaaatagacatttcgctgtttgtccacaaaaaagacacatccattgatccgtgaaccaactcgaaattcctgaaccaattcattttctggtttctgcaagcagtgcaataattaccggaggcagcaaccgtttttcgcactttgacaacgcgagaatgtccgggtgagcagtgagcatcagcaccgaagtgttcggctgacagccaacacaacaagctcggaatttcttggcaattcggttggtgtcaaagcgcagccgaggaggcaaatggacctttcggatgaaagcctttggacctgaagagaaaagtatcaaagatacattcttatgagctaaattattaccgctattaatcccacaaaaaggccatcagtcacaattttctccggctcaacttcaacgattgaaccgggagtcaaatgcttgaattctaaaacatcttggccttcttcgccgatgagacagcccatttcggtaaagccggaaagtttgatcacacgggtggacggagtcggactctctttcactcggaaaagtgccacttggccaacatgtaatttgtccagtgaaagatggggcgggagatcatcgctatgaacgaaaccattgacagaacttgttgaaaagcccaaatcgattacggcacctaaaaaacaacaaataaaactaaatgtaggcacaaattttttcgcacctttctcttcagtgctaataacggctccatttaagacggaattggcaattagcaaagaagggatcaaatgactgttgacctcgtttggacagacagtgacagtcggcaccgattttctgcctaaattttgcatattttaacaaatcgctcctcttcgaatgtgcaactccctccgaccccgttcttttgttccaagagggcgaaaagccaatgcttggcccatggtgaacagctcgtccaatgttgcctcggtattcgccaaattcttcgaaaaaattctgctgatctgagtagcaggcaattttaagagaattccttcggcacattcaagagtaagctcaacttcaccgacctaaatagcaaaaaaaaacaatacaagaaaatgagatttattagttacaaatttaatgacggccaatccacgcaaattttgtgtgaggatttcacgtgtgaatttttggcgaaaaaccccagcataaggaacgatgtcatctccctcaatcttcgtttttttctaaagctatgaaaatttgtgaatggcgacgccaacggaccttagctgttgcgctgctaaaaggagaaattctcttcgctccttttctaaaaattgcataattaaggaattatttgttgaaagatccaattcattacctattatgcaatccgagttgtaaaacttttgaggttcctcctcgtggaaaatctatttctgtactcatttatatttgatgaatagggatgcaatttgtagttgctaaaaactaccaaaaaagttgttttaaattgtcaagaaaataaatacaaatttgagatgaatttttt

SEQ ID NO: 2000 - DNA, 3010 bp, Heterodera glycines
aaggtcctcccgctcgacgagttcgacgcgtacatggcgggcacagttcgcaacggactgctcgccttggatttgccttcgatggccgatcacgctgccgatgcgcctgcacaaatgaagaaaatgtggaaaatgttgtcggacggcgtgtggacgcacgtctcactcaatgagcacgtggacacattgcggtggcgcaaatcagagacggaaaaggcgatgatgcgacggacatgcgcagtgggaggggaggcactgaacgcgatggtccggtgagaacggacggaccgaacaccttgctgacgaaatgctttaaaattgacggaaatttcaaattaaatagttgccgttaggggtaaattattgcagagcacggctaaggattgtggggatattggagaggagaggatctcctccccattggaacgcgtatcccgggaccaccttataataaacatggcttttccatccatcggggtcagtcatcattcccatagctaacccttttcataaagtggccgataagacaagctcaaaatttcaccgccataaatctaaaaaaacttatttgttaaaaaattttcaagagaaaattatttaaatattaaatgaataatttgcattttcctgtttttctttgaaccatatatttcccatcttttagggaatgtcgtaaagcaacaaatgaatctcatgtaatgcaaaagttgcccaccaaacagtgctattcctgccaccctttcctcagattgtcggcttcctcgagttcgagtgccgtcgacgtggtgccaacttcctcgcctatccccccgtcgttgccggtggttcaaatgcgaataccatccattacattgactcgaacatggtctcatttgcagcaatgtgtgtccctttttataatgtttttgtgtgtttaaagccgatcagacccaacgattgcgtgttggtcgatgccggatgcgactttggcgggtacgtatcggacatcacgcgctgttttcccgtctctggcactttttcggccacacagaaaacactgtacgacgctctctgtcatgtgcagcaacaattgctccattttgtgcagaacactcgtccactacgactgaatgaagcaagttttgtaatatttgctgacacttggaagccaaagcccatttatctcgtaaattgagcctggattctcattctcttgattgagtctttttttatttgtccttttcgatttcgttttccttttttgtgtccatacatttcgcgctgttcattttagctttacgcgttcatgttggcaaggatggccaatgcgttgagttcgattgtgttcttcaaaagggacggactcagtgaggacgaactcatcgccgttggttggggaagggggggaggccaaaaggccacaatgaaaagaatctgtgccattccaaaggaatgtgacaaactgtgcccccatcacgtgtcccattggctcggattggatgtgcacgacacgtcgtaagtaattgaggggatttatttttaatcgaatattttttgacaggacagtcccacggaacatcgaatgtcagccgggcgtggtgatcacggtggagccgggcatttatgtacgacatgacaacgaaatggtgcgggacgagttcaaaggtggacaaggaatggttttggattgggtcatcaacatttgcggcgctcaaaaaacaattgtcgcttttttttgttcgaattcgggcttgggtttcgaaatttgtcgaaattgatgccggattcattataagtagggttataaattgtatgattttgcatattttttctgcgcatatgctatgaagaaaggggctaaaaaatagcatttctacgttaaaattttttgatttggtgaaggtttttagtgcgtataaaagcatattttgggggttttcgagaataaatgcatattttgccatttttgcatttttagagcatatttcggccatttttggaaattttcgtaagaaaaatggaaaaaagcgaaaaatacacccaccccctaaggatggactttttgagaatttttataaaaaaatacctttaaaaatcgaaaatttttgaaaaaaatttcttaatataaaaaatgtaattttgttttagcacaaaataaaaattttataaattctaaatttcatatataaagttttaaaattaaaatgttttgtaattgtctgaaaacgctccttagtcattgttttggtgttttaaagtcatttcttaacttatacacaatttttggcattttttgagggttaaaaaccatttttggcagtttttaagacatgttttagtgcatatttaggcatttttcgaatttttagggcattttttagtgcatataatttataaccctaattataagcgatgaaatcaaaaaatatggggctatgtataagaggcaatagtttaacaacatgcttttaaacatgcaatgcttttgaatggtaacaatttaaattttttttccccctccgttggtttcagttttctttttgccacacataaaaatgttttttccttccattttacctttcaaatggtttttgcaaatcctttgtgattgtatttatttctccaaataggcattggctttcgcattgaggacgacgttctgatcactgaaacgggcgccgaagtgctaacggcggactgtgtgagagagtccgacgaaattgagtacagtatgcgcatttgactgacacaaaccgacgctgaacaacggacgacagctgctcaattcgtttttcgctttaatgatgttcttttttttgtcattttgttgaaatggaataaaattctgctcttcgatttccatggctaattaattaaatggttggacaaacataaactaacaaattgctcaattaccaagtccatattcgtcatgttataatttgtaaacggatggatttgtttggtggtagaatgactggtgaatgcgttgagaattggattgtgtgttggttgggtgtgtgtgactccc

SEQ ID NO: 2001 - DNA, 3243 bp, Heterodera glycines
  unsure (1)..(3243): unsure at all n locations
cccccccccattcctcaaattgtatttatatttctatttactccccgatnntaattgctgtcttttcttnacatcatttttgatagtttgctccctttttcccactcttttccttttgctgtggtgaaaagagtgcagcactttgcatttgctaattgtcaattactcaaattgtctttaattcttgtgaattttaattgtttttatttcataattccatagaatttcgtcatagtctaatagtcgcatttttcttcatagcctgaatctcctctctctcctcatcattcattctttctctcttttctctctcttttctcaattcgtcgttcattttgcccatccctcattattactgcgtttgtgttacaggcaaaatccttttgtttattcccttcctttccttgtgaggcccaaaataatttgggtaatactaccaccgaacgatggttacactcccccttttcgaaaaaaataattcaaaatctttttatttttaaataaagttttaatcggttttttggtcgaaaaatccgttccgacatccatttctaactctggacctgtgatttgaacaaaattcaattttcaactaattcaaagagtatgcaattacctaattttgactggattgatttcgtttattttccggttttttttatttgttataaatttagctttgtccaaacttgtggaattattttcctaatgtgttctggaataccggaaggcacttatgaattgaaaattggcgctagttttctctgctcaaacaaatcgcgcccacccgaatttaacacattgcgttgtgagttgggtgaaacgcatttactttccgtttttatatgttaattataattaatgcaaggtgcaaaatcgttgatttgcccccatctccccctaaattttttgttgtaaaagttttttaaaaggtcatggcgggtttaattgataaacagctcagttttactgggtgtcttttcccaaaagccgagtcattcccgacgaaccctccctaacgtcccttttccgtccgttttctatcattcctttatttaagttgacttcaaaccagcttcaatttcctccgaggcctcggaagcgtacgtcgttcagtcgcagaatcaaaatgagaacaatttccaggtttttcaacggaattcatcccattaaatgcttttccattttctcaggtcgttgtgtttggagaggcgcagaaaaagaccattttcaaaggggcgaagaaggaaatcaaaggggacaaggagtgtttgttggtgtacaacagaaagagcaaggagttgtgcttggagagagtgtcggccaacataaatgtgaagaagacgaggtgacaaagcacgagggaaatggaccgaaattggggaaaatagcgacgatttgagtaaaatttaaaaaacgagtcacgattatacaaaagttgactccaactgggggaaagaaaaacaaaacaaaaaaaaaaataataagaattacgtttctgcgttttctcacaactatcagtgcatttttcgttttgtgatccctcttttccagaaatttaacataaatgaaaaaatgacattttcagggacaccgatttggaccaaaaggcaatcagcgaaatcgaacggctgcaaaagcgtaggaggccaaagcaatctccgccatcgccaaaggctcccgtcgaaaatgccacggcagtcgaaccgccggcggagcagcgcaaagagcgcacattttccacttcttcggcaggggacgaaattgacgaggacgacgaagagaatgtgtcggcattggaacagctaatggtgggaaaaaggcgaaggaaaagcatttttattggaattggaaaagcaaaattaagtcatttgaaagttttagaaaaagcgagttaatgcactttctaaagatgttgtttaatacgtttccaccggaaaatttctaaatctcgaaacttttcaagacaaattagaagatttctttatatatatgaaaaatttatttattttttcgataaatacaaaccttaacaattcatcatagaatttgaaaaattattaaaaagttttgttttttcttcaagaaattatatgtttaattaattttttccgtgagaaaatggcgggcgaggggaaacaaactgcttccttctaaagcaactggaaaatcattttctaaattttaaaaattgaattcgaagccgtcgttcaatgattcaaaaaaaatttttttttttttgttaaggcgccaacgaaagtcgaacgatcggaggcggaggaggacatctttcacccagcacaacaacggccaaaaatggagctgaaaacggaggaacaccaaaatcaaatggaggaaagtgccaacggaacgacggaaagggaggagaaacaatcgccacaacagaaacatccgatggcggtgaagaagacgtcgtcattcgtacggaaaagcattttggcggaagatttgcagctgagcgagagcagttcggaggatgaggaggaaggagggagggacagcgaagacacggactgatcggaggagagaatgatcactgactgaccggagccttttaaatgtccataaaactgcactcacgggatgctcttaaacacttataattgatgctgctgttataagccaaaatggatgcttaaattatatacggtataaatgatgaagatgcattattttccatttattttttcagtgcttttttcactttcaacaaaatgagtccattataaccaatccaatgaatggaatggcacgcaactgacaaaagggaggaaaaggaaatggtggcacgaaaaagaaaagaaaacaattcgcccgaatcgattcccttccttactttttatgggatttttgttgctcattttcattttgtaaaatgaatgtgctgctgcctttcccttcctttgttcgtgaccgaaattttttcgcatttttgggccggcgatgggcgcccccaaaccggaattgttgggagtgccttgccttttttggcccttttctttaaaaatggcatctaatttttggtggctgtcgtttctctccccctcgccaatcattcctttccccagcacatctgtccctccccccccttctctcctttttgcatctttactttccgcccaagttttgacccctcccccccccccccctaagtttctcttctcccgcccattgacacattccctcgtttgccgccgcgaggggcgggggtaggacattttg

SEQ ID NO: 2002 - DNA, 2006 bp, Heterodera glycines
acccctcaatttgttcctcacatctcttcgccgaccactcccccgccgggggtgaaaatcgataggacgaaccaaaaaggggggaatgagagggagggagggagcggaagaccccccccccccccgcaccctccgtcccattttaaatcattcgttcaccgcactaaaacagtaaaagctgaatttaatgtaataaatggaacgcacaattggaacggaccacacacacaccacagctaaatatggggatcagcagcagatcagctgcattttcgcttacagtcactccttccgccccctcccccttttttggttccgatttgagcgtccatcgggtgcaggaattggggctgtaaattgcgacgcggtcggcaaatgtgtcttcggcgggtcttcgcttaatttctcacttacattttttgtgtcgttgtcgacggcggagtgcaagcgaaggccaacgctatccgcccaattggagcccaaaaaaaaacagaaatattttgtgcaagggcgtagccaggactttcgtttcggggggggggggccaactcaaaaagtcggttcttttacgttttcacttttttattttttgctggccattatttactttattttttgtatttgctcaattttcgctccattttcttcaaaatttggccatttctttcgtcttccgccaattcccttttttggtttgcatttccaattttcttcattttccttttccattttttttggtcagctcttttctccgtccgttcgttgctttaatgccagcaacaaaacttcatcagtccattgatggcattttcattttccattgtttgagccgaatccaccgaagaatttgaggtatgattaagaatttaaattgcaatttattttgaattaacccctcaaattccattttaaatgatttgcgcttgaataactcatcaattcctaattggcttaattacccaaaattctaacaattacttttttctaatttacccttttattattggcttcgattaattctgcgcttttcctttctcccaattgctttttacacttttttttaattcgttagttttcgtcttttcccttcccttcgttcgcacttcgctcccatcattctcttctcgtacaaagagcgcaacaacgagttcaggtcggtcggtcggtttgcatgcatttggcggccctttttgcaatggcaccgcttttgatgactaactccaacaaaaaataaataaagccggaaagtaccgacacttttcaaaatgcatttccatccatcagcttgataatctaacaaattggtttttagtacataaatagcatttaatggaatttgtttgatcagtgattgggagcggcaagcagcagtctttgcttttcacccttaagctatgccaacttgagacgacagaatcgcgtcgccgggggcggcgggggccgacagtttctgttcagcaggcgtttgtacgacgtcaacaaaggggtgcttgctaaacatcgcatggataacaaacactaacaaaccaaaaatctaaaaaaatataatccgattttgaattttataaaacaattaaaattgaaattgacacaccgtccttttcaattggaatcactaattatgccactgctccgctattgcatttcgctttttgctttttactaactccgttcctttttcattttccatttgcttccccactttttcaggaagagtcgtctttgtgtgacctcctcttggacagtgaacgcgactcgggcgccggcacttcgctttgcggtagcagcacaggtggagggaaagaacaaattgaaaggggaaataaaaggggaggggggcaattagccatggttaaagtacaagaatcaaattattcaaaacttttgaatttcctcccttatacaagacgccgactcagtccccgtaaccagacgtcattccctcaaaattgcacgggatttcctcccctggcaacggaacaccaaataaataccaaatctgctta

SEQ ID NO: 2003 - DNA, 1663 bp, Heterodera glycines
attttgtagaaattcatttaaaaaataatttttactaaatcctttttcattgtgtataggccgcacagccatcagattggaatagcggcgacaagcggaggaattgggccaatccgacgcaatccgaagaacgaaccgacaaaaagtcagcgaatgggcgacttatggggaggttcaatttcccattaaaaatttgttggactttttttctgcggatttctcctcctcccaatttctggccattatttcgtcttaatttaccccatttttagccgccactttgccttttggtcagtccaaacgtcgcgctgtgctgctcgaagttcgcaaaggggcggacatggcgacgccatcagcagcagaaaatggcacggcccattgtcagtcgccgcacaaagagaaagtgatcatcggcaacagaacgacgccggacggagcggcggagggggaaaaagcaacgcaaagagcaggtgaagcagggaaatggcacaaatggggagccaaaacacggggcaacggggcaaaagggttggcccggggtaattattgaggaaatcggaacttaaccccccccccccccccctcacgtgtataattcggtggcaaataaaacacttcccccggggcattctccgttcattccttcctcccctccgtattttttggttttcccctgtcctttttggctgcctcttcccccttcccaccgttttcacatttatttccatgaactcaattccatcattcagtttacgaccagcatttcctcctgtctcaaactcagccgagcacttccggcactgtcattccgttggcgccgtccgcggacactgaacatcctccaaacatccacctcaaacagcagcaaccacattttgctgcttccgtttggcatccgtcgcatggccaagaggctgggcccggctcgccctctgtgtctgtgttcatcgccttggccaaagagggacggcgcagatggtggcactgctggcgcagcggctgcgaagagcggcggagacagcgacggcacgagggaaatggcattggcaccgctgctgctgatcagtcagtcgctgcacactttgccaaattcggcgattgcttttgaatcactttgtccctgcagtcggacggcgccttccgtttttgtgttgggcgacgacgacgacaaaatcacgggcaaagttcggcgggaagaaggacacacgcggaaatggagggcacactcgggacggaacagattcttttgcgatgggcggtgagtggcaaaaaaaaaaaatagtaattaaagagcaaacggggcgaagtccggctcatttccgatggctattcattatcccgtcattatggcacattaattggccatttatcgcttttcctctttgaatacgttccttaaacccaacttgtcataaattggtccgattaaacttgaccttcattagggccgccatttgactccctttgccattgccttttcagttttatgttggcccgccaaagttcggtgtttctgctcacgttgtttctcatccttttcacaatggcacttttctgcgtttatgagtaagcattcgtaaattgggaaatggcatagtttttcgattattttcttctagtcggtcgggactcttttccaacttagtattggcattttcgccca

SEQ ID NO: 2004 - DNA, 2414 bp, Heterodera glycines
  unsure (1)..(2414): unsure at all n locations
aattttggcattttctcccaatttgtccgataaaagtgagtgttttcgccccctctcttttcagtcttccctttctgagtgaactcgtgtcgttgctcatcccagccgcaggcnnnggggggttcctcttcgtcatggccacccttttcaagacggccttcgtccgacccgggcattgttccgcgcgcctccccccgcgaagtgctcgagtgggaaaggcagtgccaagagacgggtgaattcgatggcacccaatttccccccccccccccgattttcgggttttcttttccctaattaattaattgcccatttcatttgtctcccccttttttcgattccccctttttcgggttttccttcatttattcccctctccctcctgttagatccctatttcaacgcggacgaatgggcccagccgcgcacccgcgtagtgaacatccgcggccagccggtcaagctcaagtactgcttcacctgctgcattttccgaccgcctcgctcatcgtaattttattttcaacattttattgactcatttagagaattaacaaatctgaaaattcaatggaaatgcgtagtttttgttaaatgccaaaacgttgtctcaaaatggtcaaaaggcattcattcttttaccattttaacaaataaatacaatggctttttccccaggcattgctccatctgtgacaattgtgtgctcaactttgaccaccattggttggcactttcgctttttcggattccaattccttttactttcccccattagtccctgggttggcaattgcattgggctgcgcaattaccgtcactttttcctcttcattttctctctgtccgttctcgacgcttttctcggcgtttccgttggcattcatctttatttatgtgagtgatcaattaatcaattttaatgttaattagcatataaattttcctgttttcagtaagtctcgaaaagggttctttcgtcgaagcggtgaaactttcgccggcttccattttgacaggtcaatcaatggaagggacagattcatttgtttatttgttattatttgcatttccactaataataaacaattaagccttcctccaatttaatgatggacttgcagttctatggccagttaattgaacgggttcccgtcctcattttttacttcgagttttaaattgatcttaataccgattgtgaaaatgcaaccgcaaaaatcaaatgatatgacccttttgaatccaatatttcccggactgttttggcacaatcctctccctccatccattttttgccttttctgtttattatacccccccccccccccctccttttgggggacgggacaaaatctcgccgcagaaatttcaaaaatttttttttcaaacataaatttttcaaggaaaaaattcttagaagtttttaataaggaaaaatttaaagaaaaaatttttttaagaatttttaggcaatttttttgaaatttaatgataaattactgttttttcaaaaaaaaacttctttgcaggtctgatcaacatcatctccatntggtccgtgctcggcctgtccggcttccacacttatctgatcgcacttggccaaaccaccaacngaggacatcaaagggacattcaatcgcaaattgcacccgcaggtgaagaatccgtacagcagcggaaattgcgtcaaaaatctcatcgccacactttgcgcgccggagaggccgaggtgagagagaattacaatcgcattaaactcacaattaaagttgaatttcaaaaattcactttttcctttccttttcagtttgctcgaccgtcgcggttggcttccccccgaaaatttgggcccgacaatttacgtggatggtgccgttttggacggattggccctgacggcaaagcggcggttggcgccaacgtacggcacaaccaatgccatcgccacagccaacgacggcaacaaatcgctgctggcggtggctaacggtcgggcgaaagggaacgacgagggacggaggagagggggagggggaggaggacaaaccgcggggggagccgagtcgccgtccgtcgtgtcaatcgcagtgtcgtcggcgtcgtgcccacgtaataaattcgatttaaaaccaattttggacattaacacggtcgcgactttgccaagtatggcgattaatttaccaaaatcgccaagaaaagtgtgattggtttttaaattcacaaatttaatagtctcataagaaataaaccaatttttaaaataaagacaaagttttgtatttggtatcattcggcccagtattgttttccaaaatcacataacaaatgtgatggcagattcggaaataacacttctgctggttaaagaaagtcaaatttggatttaaaattattttggtaaatct

SEQ ID NO: 2005 - DNA, 1116 bp, Heterodera glycines
  unsure (1)..(1116): unsure at all n locations
taccaatggagaaaagcctttcggcggaacattgctaatggagaggagaagaagcatttgattggttggacaattattgccgggttcaaccggcggatatttcaattaattatttaaccaaaaattaatgcataaattaaaacaaatattttaaacctgtaatcaaaaagcaaattctctcttggaaaatttcgaaagtcactttctaacataatactttggaatttactttaaaaaacttcggagaattgaaagtttgacggcgcgacaaacgcggccggggaaaatttgtaaattttgaaccaaaaatagatttatgatttcgctcccactaggtgccggaaaccggcttatatttgtcctcccaaaacggcataatctgaacctggctaagtctggttttttcccaaaaaaatgcccgacccaacctacgcgtgaccggcaccggcccaaccctaattcatgaattactgcaacaaataagttttttgaaaaatttcatctgccaattgtatgtccctttaccgttaaactgctcagtgacccttttaaaaagctcctgaatggctgttgaattgccgatgaaagtggcagacattcgaagacccctcgggggaatgtcgcagacggccgtcttcacattgtggggaatccattcgacgaaaaaggatttgttgcgcttttgaacagccaacatttcctcgtcgacatccttaacaaatacaaatatcaattgtccattgctttttctgcccattttcagctccttggcgcactttcatgctcattcgccctctaaaaatgactgccgctgtcaaataacggccgtgccgcgggtcacaggcggccatcatatttttggcatcgaaaatttgttgggttaggtcggcgacagagagggcgcggaactgctgagaatctgaaaaaggcgggctttgctaatggccgacggagtttggcactcactccgcgaagtgagcggggcgaagccgggcatgaaaaagtgaagacgcgggaaagggaccatattcactgccaatttgcgcaggtcggcgtttagttggccgngaaagcgcaggcaagtggtgacgccggacatntgtgcgcttatctaat

SEQ ID NO: 2006 - DNA, 4063 bp, Heterodera glycines
ttgagaaacattccttggccttagctcgggttttcacctatttccacgacagtgtccgaaacttttggcgatgggaccacggaataagtgctgattattctgcagggattgtcgccttggtattcagctcggaaggcatcgcccacctgtccgggtactcctcgcgaagtttgctcaacaaaagcgtgccgagccccgacccggtgccgccccccaacgaatgagtcatttgaaagccctcaaaggatgggatgggttgacatctgtcatccatcaattacctgaagacattcacaatcctccgcctccttgcgaattacatccaaaatcgcatccgaaagttccccgccctctgtgtaatgtccgcgtgcccaattgttccccgccccactttggccatggatgaaattgtcaggacgaaacaaattgccgtaaggaccattccgaacctaatttgccaaaaatacagttaaaaccaccaaataatgggaaacagaacggcgtccattgtgaccggctcgaggtccgccaaaacggcacttaatgcgagaaattgcgaaagaagcgccggttttctgcgaaccgtgggacaaatttgaactcagctgcttccttataataaacattgacacgctccaattgcaagtccgagtcgccccggtaaaagccatccggggaaatgccatgctcgtcggagatgacttcccaaaactaaacgagacacagcaaatttgttggcctgacggggaatgcgactttggcaccgatctgattgccacattgcccggtttggatatgcacaatctcacgcatttggatggacagaattgagtggcatctaagaaaacgtaaagtgggcaaatggcaaaaaaggcaatttgtgacactctctccaaaaattgggcgccttggaaaaactccaacagcgaaaaatgtcgacaattttatcgtaaaaaaggaatggtaaatagaagtggtgaaaagcgataaagccaacaaagtcagtgctgagaagaaagaagctcttcgatgggttggctgagctcgtctcccatccgccgcttctttgcttattctttcgagtccgtgccacgtaccacgggatgtgtgacggtgtcaccgaactttctgaacttggtcatgctcagctttcgtggcgatgatgaccgcctattctttagggtggctcgcggggaaggcggacgaaggacatgcggactgatggaagcgcgagactttgccggaaaatttggatatgccatttccggtggagaagtaggacagtgagtggaaggaggagagggaccgtccggagaagaggggtccgccattgaacagtcgctgctggcaaagtgagaagaggtggaaggggccaacgacggacgcggaacggcggcaccgcgacggcggaccggagaacgagaggcggaagagggtccgagcacagcggaacccaccgcaccatccaaagacgcgtcccggccccgcgtggccgaagagcctccggcagcagcaccacccaaagtattcaaagcaagcacctgctgagcggaaaaacaaatgcccaaagagggagaggaaggggggggggcgaaaggcaaggcgaaggagcggaaaacccaccgatttcctccgcgggcccagctttttgtcggacagcttctccaatctgtcccattcctcctgatacgtctcgtacaacttcttcggattccttccgtacttctccttcttttctttgaacttcttgggttccaagtcgatcattcgatgggtcgtgtcgtctactatcacttggggcggtgtttgcgccaccaattgggcgggggaggcaatgtcggggttcggctccaccaggttttgctggggacggacattcactttgggcggatccgtccagctcaatgcctgctcttcaggcagaacttctacggcatttggcaattcgtccatgtcaatggcaatgaatttgcacaattccaaattcttaacaattctcctttaattcacttttttattgcattgtccaccaattgtttttctcttttgtggtgcgattcgtccaacggaaatgtccgctcctccggcggtcctccgaagaagcgttggtccgccagtgccattggaggcggactcggatgtggcggcttcttcgggggaagcggcaaccgctgctgcaacagcggcttttgttcctcgggcgatggtggcctcggctccttcggcggcggcggatcatcatttgtgtcggggggaggctctctgccttcctgagagtttgaggaggggtgaaaagaaaagccaaagaaaaagccaaaatctaaggaaaagcaaaaagtgaatggaaatgccaaaagaaagggaaaggccaaaggcaaagagagcagcgacccacgttcagtgcaatttgcctttgcacaatgttctccaagtcgattttgtcgatctctgaagggtcaatgccgcactttcgacccaccgcatgcaaaaggtccttcactcgcaatctgaagcggttttagcgaattcttaattaattaattattcccattgttttcattttccttcctttttcgaattttcaaaagcgtgagaaatattcagtgatttggcaataaaagaaagaaaaatggagaaaaaggaaataaagacaaagaaattacaattgggaaaaggaaaagaaaaaggaacggagttcagtttctttcttcctttttctactttcttttgtctctttttctcttccaattttcttttcattccctttttctctatgctttactttttccttttttctttttttcacttccttttatccctttttctgcttccaatttattttctttcttttttctctaatccttcttttccttttttgctccttttctctctctctctctctctctcttgctctctctcctctctttttccttactatcctctcacttgttcccttttcttcttctcttcggctgattttcaatttccataaactcttcctcttttcctttgttctctcgcactctcttccgcaaaagctttctctgtttgttttgcatttcttactccaaaatccttttgccattcattcactctaaccaatgcccttctcttctcggcacaattcttcgaaaaccattttctcccgttagtgcggggttgtgcctttctgttggcggaatgccccgtccgtccctttggccatgcaaaagcggcgcctcccccctccccccccccgcctcctccaaccgttccgccgaacattttatttttgttaatcgttttcgcaatattccttcttgggcctctcccatgactctctttttaaatttgctgcatttccgtgccaatttatccttcaaaatttatttccgtgggatggatttcgaccggcgtttatcatttattccctcgctctctgttttaagctttgtccggcggtgtctttcctcgtccattggcccaatgttggaatatccctcggccacggctccgtccgtcccttcccttccccaaattggcgccaattatggcgagcagctgccaacaaatttcggcgaagcggatcgcttctcaccgcttattagcgcagtgaatggcggcagagtcggcggctgcccaatcgcgcgcgattccaccgtctcctccgatcagccgcaaatgcagcatccgcttgatatgttcacggattttacccgtcccgatggacaaaggacgcgccctctgttggtagacggcaaaaggctttatgtggacgaacattacatttcggtgggtcgcatgcgctgtcagacagctgagcagtgctaaccgaaggtgtggtcccccgtgcttcgttcttggtgcattgagtgcccagacagagagttgatcctggccaatgtgcagtacgaccacgtgttggagctgttgttggccatccaccccacgtacaaagaggtggacgagcagacagtgcacatcctgctgccactcggtttcgattaccaagtccgtccctccctttgcttcttccccatcctttcgcttctccaccacagatggatgggctgcttcatcgctg

SEQ ID NO: 2007 - DNA, 2605 bp, Heterodera glycines
cagagaattgcgtccaagtgtccacaaattgggacctttctggccccgatacactggactgtcggacagagtcaaagtgctgtgttggaacgcatgcacgggtcaccggccccggaggtcgtccattcgatttgcgtaaattatttatttgttaggcttaaggaattgccagagccccccgtggacatggagcatctgctgagtgcaagcgacctcaattttgccacggtgaaggcgaagacggggcgagcgtaccatgtgaacccatgtgggtccgttgtggacaatgcttagcttaaagccttcccctcagattacgtggccgcttggtcctctctctttcaggagagactatgcaatggcatttccagcgacggagtgccaaatgacgacgatttgatttactgtccgtgttccagcgaagaactgaagtactttctgatggccatttatccgccacagctgcgcatcacaggtggctggttgacgtcgcccggcccttttctcatctcatcccaatttcttctcagaatgtaatatcgcccccgtgctaatggccgcctgcaaattggagtcccacggtctgctgcggaagtgcgcctcccttctgctcagcccgcacactcagctcagtgtgtttgtgcgtctctctctgctggaccggtgccgacttcagcagttgttggcccaatgtttgctgatggtgcacagggcggagaacattgtggagatgagtcagcagcagacgtgtcagtgacttggccttttgagggaaaaagccttccttccgtcccttccgttcagacgaatgtttgtcggtgcgcgcaaaatcggagatggtaagcgaagagaatgtccctttataagacaccgaaatgagcgcagatggaccgcttcgctcagttggtccaacagcagggcggcccgaattggccactacaacccgtggcagttcacctctgttcgcggtattccgaactttctattagctctgtttatacccgcgcatttggcaggtgcaaaacgcagtcgaactgcgcggaagtgacttggcaatgtgtccaatgcaaaacgtacacatcgccgcagactatcgaacattcggcaggcggacggcattcatcgataagcagccaacagcagaaacagacgcaattgggcaatggcatcggaagcagcggaggaggcggacgagtggcacaccgatgagcggcgattgaaaagagggggggggcacttttccacaaggggggacgcactgttaaccctgatttgtgagcgaaactttggaatattcgcatttttgggcttcggaacaagagcttcgttaaaatatatccaaaaagccacaaaattggcaatttttgattaaatcttttaagaaacaagacccaaattgccttttttcggcggcacttatcggcacccccggagcccctaaaatcccttgagttttataaattgactcaaaaagtgaaagcactaagatttacaattttttggatttcaagtaaaattcactgtttattgcaagtggttacatatatctctcgcattcccttttattgaatatgccatgatcatgttttttgttacaagtgttttaatttaccacccactaaatttacaaggttttctgaaaaatttcgtgcttcgaaaatgggcttgctaagctccttccccactctcatcgcttattaaccattaatttcacttgccattcattcatttttcaatttgtcccttttcttttccattatcatttataaatattccgtttaacttacgtctttccaccgaaccaaatttttgtgctggctacatttttcatcttctttccgaaatgatgcaatttcttcatgtattcagaaccaatgtcaattgcgattgtggtgatggccaatccgatgcaaacgtaaagaaacgtaattggaaggaaagcccaacggaaagggaagagacagaaattggggagagggggggggggggggggggggagggactgaccgggacggaaccaattggccaaagtcgatggcagtcagacaaaggaaattgaagtaaatgccattgtaaaaatcgaactgaaacaaaagggaaaatccattaagaaggataaagcattgactaaaatggcaaaatgacctttccgttcaaaaggggcaaaaggacggcaccgaagcacacgtaaagcagaaaggcgaccaaaaggccgacggacatcacctcaagcagttcagtggcaaaagacgacgccatcgatcacctcaatggacgaatcgccgatttcttcgccgttgagcgaaacgcgcgaacggcgccgtcgctcgcgaaacgcttcgatctgttggagaaaaaagggggggggggcggcgagtgaagaaaaggcgatcataaaaagtgcaaatttgcaaacacaaaaactatgatttattattttgtttatttacattttttcgcgtggcgccagcaaattgattgagaaattggccaatgttagcaatgatctgtgatcagcagaaggaatgtcggaaatgttttaactgcttatcttacgatcattgtcatcggaatgccttaaatggtaaatacaaaagatttgttt

SEQ ID NO: 2008 - DNA, 2449 bp, Heterodera glycines
tgattggcgcgattcggttgtagccttaagcaatgttccccccaaaagtatcgaatcgggtcatgccatttcatcaaccgtttatgtacagtaaactacgattggaacgatataaaatattttttctcagcgattggctgtatcaaccgaaagtacagaattcaagtcaagtctctattttgtttggactcttattatgatcatcttactaccaacctaaagtggtgacaatgccgaagccgtacagagtggcggtcacaagccctgcaaagaacggaaggtaagggagagatggaagagaaggaaagaaaaggaagagaaaaaggaagaaaagaaggaaggaaagggaggggaaaagggaaggaaagggaggggaaaagggaaggaaagggaggggaaaagggaaggaaagggaggggaaaagggaaggaaagggaggggaaaagggaaggaaagggaggggaaaagggaaggaaagggaggggaaaagggaaggaaagggaggggaaaagggaaggaaagggaggggaggggaaaggaaagggagggaggggaaaggagtcgcctcccccacccaccccattgtgaacgagcatcgggctccgtcttgaagcattgcagaattagctgtgccgttttgttcagaggccaacttgggccttccaaaagcagcgatcggtcggctttttcgagtgcctgcgatggattttctctcttttaaaacagtaaaatgaaatgttttatcagagaaaagaaaaaaaatgtaatacttcttcaattagtaaaatactacatagtataattaaattaatgaaaaaacgataattaaaaggataaatggcaacgtttgcccattgcctcgggaattgccatcccatgggcttaaataggaaaacattggccaccgccgaacgaacctcgtccacacactcgcgcttcctttcccattcctcccgttgctgctctatcgttgcgtccgcttccaacttgttgaagataagacctccgatgagagcgtatccgaacacgaccagcagcaaagaacaatggagagtgaacggcttcaccttctgaagacgatggaaaagtgcgagaaagcgaaaattattggggggggggggaggacaattggcaatgagacaaatcatccgccggggggaggacagttggacaattggcaacgcgacaaatcatcccttggggttgcgccggagggaatatttaattggcccttccaatgccgcattttttgtcctttggggtccattaacgaaccttcacccgcggggaacgaatgagccgataaagcgcctgaatcagaaagaccatcgcaaatcggagaaaagtgccaaaaatgcactttcagcgtgctcaatttgcaaataatgctaaacaaaggctgtaggaaggacggaaataaaaaggaattgaaaagagatggggggggcgacgggtaatgaatgcggcgccagctgagacacagtggcggagggggcaaatggggaacggcgcaataaatggaagcgaattgccaattcacgagtaattagggagggagcgattgagaggaagctaattgagtgggggatgaagcagcggaagtgatcgcttctccgctcccccggcgccttcactcaattctactcattattgacagctgacttgaacaaaggcgaaaatgatgttttttttcgaacagattttgccagtcacacttattaaaaattatctccaaatgacttttccctcttttttggtccttttatttttctttggacgggtcaattcacgcgtttcctcctccttttaactcatattggattgcatcttttcgttttaatctttagacctcattgtcagaataaacactgccataagataaaggaggggcaaatgtgccgccccaacaccgacggaaggacgggggcaaatggtgttttggaggaacgaacgaaccattctttgtctgtctctatccttgccaatttaaaaaaagaagagagccaattgttcaatgggcgtgtggaaaagaattaaacccttcaattttcataatggacagaataattaacaacatattagcgtagtgaaaattcgacaaaataagcacattttcatgatactcaaaaagaagtgtttgtcggtcaatggtcagtggggaatttggtgttgttcgataaagaaattctgctgacggacttcgtcgggattttgagcggacggacacggcttggcgtacccatcgttggaccaaacagaggctagaaattgagcacactcaaaatcatttttgaaaatacaatcaatggttgttgacccaaccataaatgaactgacatagccaaatagaagcaaattcacaaatgatcacccggttggctccctccgctcgtttccgcgtcattttgagttttataaatcggctgctgtgctgagaatcgagagtctg

SEQ ID NO: 2009 - DNA, 1128 bp, Heterodera glycines
ggccaattttgcaaggctggcccagcagttgtgtctctctgaattcggccagcttttcaaggtattaaaaattccaactattttaaattttaaatttaaattatttaaaattaaaaaattaaggagtaggttggagcatggcaatggtttctttgcttgttggcatttattataatgtgattgtggcctggtcactcatctacatttttactgttagattcatttttaaagcatcatattttacttgcatttttaattagttaattagttcatttatttttttaattgctgaaataatatttaataaaagaattattttaatatttttttaaacaacttttattttgtttatttagattattactggtaaccatcacgatatatcatcatgcaacagcactttcaatacgatttgtgagttatgcatcggaaaatttataagtcaaatccctaggaaaattcgttcaaattataattttggattattttctaccatttattccttcaaaaaaattttaattcgtaaccaattgataattaaagaacctacaagaaaaattttaaaaaaatggtatgcgattttttaatttgaatgaatatttcatcaaatttgcttttttaatttaaaaatttttgagatttattgaaaactttgtactatctataagctcatttaattttaattactttgtctaattacttttttttttttattccatttttgattttttaatttataaatttttgtcaattttattaaaatatgcgacattcatatatatgtttatttaaaatttgtttaattaccttttactctaattactgattttgtttattccattgtttatttattttccttaatttaaagattgtgcttcttcgctggaagatgctcgttgtgctcatcaactgaatgccactggggcatttttcttcaacaaatcatgccatttgttgactgatcggctggcagcaacgctcagaaatgaaacatacaataagctgccagctgttagtccggcagaggaattttttgagtgcctatttaacataataaactaattatttagcataattatgcccagaattaattattatattttactataggaattatgtattgggaaa

SEQ ID NO: 2010 - DNA, 3607 bp, Heterodera glycines
tttaatttttttttaaacaacttttatttttgttatttagattattactggtatcatcacgatatatcatcatgcaacagcactttcaatactatttgtgagttatgcatcggaaaattataagtcaaatccttaggaaaattcgttcaaattataattttggtttattttctaccattatttccttcaaaaaaattttaattcgtaaccaattgataattaaagaacctacaagaaaaattttaaaaaaatggtatgcgattttttaatttgaatgaatatttcatcaaatttgcttttttaatttaaaaatttttgagatttattgaaaactttgtactatctataagctcatttaattttaattactttgtctaattactttttttattccatttttgattttttaatttataaatttttgtcaattttattaaaatattcgacagccatatatatgtttatttaaaatttgtttaattaccttttactctaattactaattttgtttattccattgtttatttattttccttaatttaaagattgtgcttcttcgctggaagatgctcgttgtgctcatcaactgaatgccactggggcatttttcttcaacaaatcatgccatttgttgactgatcggctggcagcaacgctcagaaatgaaacatacaataagctgccagctgttagtccggcagaggaattttttgagtgcctatttaaacataataaactaattaatttagcataattatgcccagaattaattaattatattttactataggaattatgtattggaaaaagcgccaacaatggacagttttggtggacttaatttgaaaatggtgattgccttgggctttgcttggctaatcactgttcttgtgctgatcagaggggtcgaagtgatgggaaaggtggcaaattataaatattatatttaaattttatttccaaaatcttttttaaatataatgactgttagcacatttttcattaatttttttatatttttataattgtcaaacgcaaaaaaaacatgagcttattttgacagattgcatggctaactggcacaaccccatacataattattgtcattctcttcatacggtaccaattaaaataatacattaactagttgaataaaaaaaatcaattaattcattaatgtttttagtgccgttacattggatggcgcaaaaattggattagacttttatttgcttaaaccggatgtcagtgcgatctttttggcaaaggttggcaccctttttaatattaaaatatattgaaataaaaaagatttcgattcagttgtcccgttaaatataaggaaaaagtcctgagacgtttttgaggcctcttattaaatttaaatacaaatcctttacactgggaaaattttccgggtttccggttaaatccaagaaaatgcgtccttgaaaattttatggcctacagttacgcattatatatacagtgtaacttgatatatttggtcgcctcctgttaggcctaggtgcatgtccttgaaaattaatcaggcccatcgccagaaaaaaatttcggagggtgaatccgaacgaagacctattttttcttcgggtcaaaattttgtaaccagcgtaattcaaaatttttagcggctgccgtgcaaaaaatcagatccatgaattatggccttcagttacgtccttgaaaattttatgtcctttatttcctctctgttaattgtccatgggagtttttagagcctccaattcaattctccaaacactcttgtccattaagacatggcgtacagctgcaacccaagtgtgctacagtttagcggttggcatgggtggactgctttcactatccagcttcaacacctttcacaacgattgcttcaaggacgcgttcatcatcacggcagccgacgcaatttcaagcatttttggtggcactgctgtgttcaggtatggaataaaaagtgccgagatttaaatgtgatgcaaaagcccttcttaaatatgtgcaaatcataaaaaaatgccaaaatatttaagttgctaaaatgaggacaaaaaagaaaacaagttgaacaaaacaggccatgctccaaaatttctcctacttataattacaaaaccacaaaaaaaaatttttttttttatttttaaataatttttaaatcaaatatttgtcaattgagcggagaaaatatgtttttcgtgcctctctcgtaaaaggttatctgcaaacatataaatccacaggcccacattcgcccctgtttctctctttaactctctgcccataattgggcaaataacttttttcattttctataaataaattctattacttttctaaaacaatttaaaaacaaatcataaacaaaaatgtgcataaaaagaaatataaaaatttttcttattcttatgtaaacaattttttgggaaatattattgataaaaaaaaaatttttaaaaatgttaccattaaatttaataattctaacagcacactcggcttcatggccaagcagttgaacgtgtccattgaagctgtggtgcagagtggcaccgggttggcattcattgcttacccggaggcaatgagccgaatgccgggctggacatggctttggcaactgttgttctttctgatgatttttatccttggcgttgcgtcccattttgggttggctgaagtgtgtgtttgttcatctgttcctttaaaaaaaactttatttgccacaaatggggtttcccctgtgaaaattatttttgatttttgaaaatagtccattttatgcgaaaaataggtactaattagggagtttgctactataccctcggggagagaaaattcgggatccgggtggaattacccagcaaaatttgtcctgaaatggctagaaaaattgtaaaaaaaaacatctaaagacaatgcaaaaaacaagcacaaactcctaaaaataattttgtctctaaaaatatctcatgttttttaggtctcgattggcactatttccttaaccataacaattcaaaataatatatgattaaaaaatgaaaaggctcctcctataagataaatgaataagaaatttataaaaattacaatttttttagtataatttagcaattaatttaaattaaattactttttgtacacattcttaaaaacatttaggtaatgtgtactgcattgtatgatcagtttccagccttacgacgttataaaagtggtcttgtgatcggagtttgtctttcatgttatttggcaggcttaacaatttgctcaagagtaatttaaattttttaattaattatatttaatttcaatttaaattgatcaggcgggcattttttattttaacattttcgacgattatgccgcgtctttctcaatgatgcttcttgtttttcttgaactcattttagtagcgcatatttacggtaaaaattattgaatctttaaaataattattcaaattcatttacattttttatgttaatttttaggattatttttttctaaaaagtaacaatgatttcaggggcgtagccaggaccttcgtttcgggggggggggggggggggggggg

SEQ ID NO: 2011 - DNA, 5236 bp, Heterodera glycines
ccccccccccttctatcccccccctgatgattgcttataaaagtttttgataaaatttctctgtttttgtagcttattttaaatacccataaattacaacatttttcatgttttttttttaatttttaaaataaatttattagtattttatgtatttttaaatttaaatagaatctttttaaaaaaagttatcttaaattacttaattaattttattgatacgattatttaaatcatttaaattcaaaactattcagggtggaataattataaagctgacatccaggcaatgttaggcactccaaggaatttgttgtccaaattctatgggccatccgggctgtgcatcaaatacatttacagttatattgctcctatccttttgattgtgagtgacaattttattcatttttatatatatttatatttaattatacaaataaatttttggtttattaatcaatttaaattttttagatttattttatcctttatgttcattgaatatttttgattctatttaatttagccaaaataaaaataagcatgatatatttagcattatttatacaaaaaaaagaagaagattgtttatgtgttaaaaagatcaaatttaaattatttaaaatttcatattttttttttcaattattaataattttttatttaaatataggtcgttttggtttttgcatttatgcaacaagtatttacaactcgggtcacctacgggcgcgacaaacgactttacgtgttcccggcttggtccatcgttttcgggtggtttttgtcgctgatctcgtggatatttttgccgggtctaattgtggcaaacactgtcaaatttatacgtcagggaaaggtccgaaaatcaaatttattaaaatgataattgaaaatcatttctaatatataatttttcgtgacctattttttttaaattaggcatagggtgtatttttgaaaaaaaaattttcagcaattcttaggtgtttattttttgttattgcattaattttgggcaaaatgccaaaataggtttttcaaaaaattaaaaacctaaaaaataggcactaataaacttgaaaagtagcataataaccacctaaaaaaaattttcgtgggtttcagaccaattgaacttcggaaaaaaatagaaaaaaaacacctaaaaatcgtacacattgttatcaaacatcaatttgactttttcggttttttcattaactataaatttaaaaaaaaaattcatttaaaaaatattattaatttcagccacttaatgagttgctaaagatgcagcctaaatggccttcctatgagcgtgtcacacgaggtgtgggcaagtctaagacttcaaatattatgagtgccaacagaaaccaaccaccacttaacataacaatgaatgaatttgcgaatggatcgtcttaaaaaaagaaattataaaaataattaaattgttataattaatgtaatttaaaatttaatttttttttattttaaaagaaagcaacacattttcttgtatcttcttgagtgaataaatttgtatttttgacaattttgttttaaatatttatgtattgtttccaagtgtacttttttctatcatttatccttggtttgaggcgtcccttaaattttgggatttcttaaatttagttaaaatccaaattttagtgacgaaagaattgtcaatatactttttttttaatttttgcaaataattttcggatagagaatatctggtgatattgactttttatacatattaaaaacatgcgatattctgaaaaattattggttaggtctcgagaaaagtttctaaattatgaaaatttgttaaaaaaagaacattgacataatgcaatattaaatatatattttttatatttttaatttctttaattgtttatttatttaaatcagtattttcttttaatttaaacaaaatcgcatctaaaaacataaaatttttaacgttgatagctatcaaatttcaaatatgccatcagtgtctggaaaaaattgttatttttcccatcatttttgtcaatccacctacattgaaacaatacactcgtttatttttaacaagaaattgtcgcaaaaataagtgcagaatgaatttgaaaataaaatttataatattaaattatattatcatttttaaaaataaatttaaaaaaatattttattctaaaaaatttagccaaattaagcaaaaaatgcagcctcttctaatgctatttttgactataatgagttataacttggtcccaatgatttgtgatggaaactatttgggccaaataggtacaggtaaaaatttaattactaaaaataaaagaattttgcaaaataaattttaaggaaataggcaacaacaataacctattaagagagtatttgtcgcgtggaatgtacagctgtggcgctgaatatgccgcagcactgcaaaaactgaacaaattaatcatggtaattaaaaaataatttgacaacttttgaaaatgccatttttcaaataccgaaaacattctaatctgtgaatattcattataattaggagacatacaaagaatattcggagtgtaagaaactgcttgaacaagttgaggacggaagacacaaatcactcgcaaatttggccgctgagttgggcatgttcgaccaacttgttgattgattgaattttggacaaaaaatgcttaaagtttgttgtaacgaaattgttcaatttattcaatatcttaccaatacgctgacgattgtaaaaaataattgataaatttaatcattttgaaaagccactttttgaactccgaaaatattcaaatccgtgaaccttcaaaatatttaggagacctcaaattttaccgctgagttggccgtgttcgacccaacttgtgaactaaatcttgacataaatatttcgttagtttgttgtaaaaaattaaataaaacctgaaattaaaaaatatttgccagtatagaacgcgcttgattggcggtactgaatttgcccttctttactattttttgaaactgaaatttgttgtttaacattacaacaatgacccactggaattcgtagaaaggaatggcatggtaaaagtttaagtgcaacaggatcaagcaatatccgccactttattggtcgccaaaaccgacctttttgcctatttacgtgtaatcgctcatagaatgcctgaataaattaatttgttcaaacatatttttaggaaatattctgtttatatgccaaaaaaattatttttcaaaattttagtttattgtcggaccgttcacttttatcggattgtcctcactgttggattgtccaactgtcggattgtccgtgagcctcgaaagcgtgctgagccgaatctaattctttttatgcctaacttttttggaacttaataaaaaaaattaactaagtaatagagaaatctttggtctgcttaatttaagtttgaatatttttcatggtattaagcgttcttttatttttatgttaaacaaaaaataagcggcatttaatccatcctatttttttcaaatacaatcaaattttgtttttctttatatatttcgacagcttgcagcttgcagaagtccaaaagacttcattaggtttccatagaagttagttacaatattattgagtttaaatttttcgaaattttttgggtttcgccccttggcgccttttttaggttcaacttagaacccatcaaaagatatcaagttcgcaaaattttgttgctcataaaaatgttaaagcatttctcaagccacattaccttaacctgtttaattgtaaaattaccgaaaattttaaaataatttttattttataaattttattaaaaataatcaataaacgtaaaattgttgcccacctttaagcgttggcacttacgaaacgaatactcaaaatcatattattattttagtgttggaatttttgccaacatgagcaggcagcgtgaatggaaatagttagacagcatagaaaaaaagacaaattcaatttctatgtgcattatgtatgcaagggttaatatttccatagctaatatatacaatacatgtattcgtgtgttgctatgtatgctttaatgcatagaaaattttatggccctctataagagttggcatattcctccacgtcattcttatgcccatcagcagcaggcaaactgagtggtagacagcgagaaaaaaagacaaattcagtttcaatgtatataagggttaataattaccatggctaatattcaatgcttatgcacatgaatatgcagtcctttctatcggcgatatcaatattacatagtcatacaaaaagaaacagaaatagagagagagaaaaaaagaaacagagcatgttttagcatataataatggaaatgcatgcattatagaaaatttatttctatgtatgtatgtgcccatgtattcgtgcgtttctatgtatgctttaatgcatagaaattttatggcctctataagagtaggcatattcctccacgtcattcttatgcccatcagcaggcaaactgagtggaaatagttagacagcgagaaaaaaagacaaattcaatttcaatgtatattatgtatgcaacggttaataattaccatggctaataatcaatgcttatgtacatgaataggcagtcctttctatcgacgatatcaaaattatatagtcatacaaaatgaaagagaaatagagagtaggaaaaaagaaacagagcatgttttagcatataatataagagttgcatattcctccacgtcattcttatgcccatcagcaggcaaagtgagtggaaatagttagacagcgagaaaaaaagacaaattcaatttctatgtatattatgcatgcaagggttaatatttaccatggctaatatatgcaaaagcagagagaagagagagaggagatagagagaaatagagagatagagagataatagaaatgtgtccatcatagaaatagaaaaaaaattcccatatctatgtatgtgtgtgctcatgtattcgtgcgtttctatttatgggttgtatgcggaaaattttattatcctccatgagagttggcatattgatccacgtcattcttatgcccgttggcaaagactggtggactaactgcataaatagagactgggccgaagcaaaattcatcacttttttaattgtggccaaacattta

SEQ ID NO: 2012 - DNA, 1551 bp, Heterodera glycines
atcataatgggtcagaggaagttccgactgcgagagtctttttgcctgttcaaaagcttttgttgttttggcccccattcgcaaggagtttccttctttaatagcaaatccaaaggagcgcggatggttctcatctttttaatgaaacgaccataataattaattgatcccaaaaatgagcgtaatgtgcaaaggtcatgcggaggcggcatttcaagaatttctgctgacctactcgggtccattgaaattcatttaatgttggaaaaagggaaagggcccttcggtggtgccgaaaggcgatgaccatgaaaaatggaaattttggtcatatgtatttttagccgaagttaaaacaacgaattttgaattttcgtgctgaaaaatttcctaataaaattaaagaaaactgcttttttgcaacaaaaaaaagataaaattttgttatgcttacttttcaccagccaaaaaaggggttttttacaacagcaaatacaacagacacaccagcaaatgatgcttaaccagcctggcagcggcaattacggcatgatgacgtcccagcagcaaatgatgcttaaccagcccggcagcggcaattccggcatgatgacgccccagcagcagcaaatgatggttcagtttcaaaaggcggtctgggaagacattgtcggggatatcctggagaaatattttaaaaattgttgtggacatttttcattaaatgaaaaaatcatttaatttataaaaaaagggatggtgggcccgccggtgccgatatgcgccgccttgggaaaaatagaaattttattaatgtttaaacagaatgttcgtgcttattcgctaaacgatagccgctgaataaattaagaaattataaaaaataaaaattaacgactcattcataacagtgataaattaggcattaaatttatatgtttcatttaattgaacaaaattttcccataaaataaaataaaattgtttggtttttctccaaaaaacttaaattatgttttcttcaaaattattcacctgctaaaagatttttttaaatttttttgataactcttatccaatccgaaccaataagacttcatccaatcacagataaataatttgataatgcaaatgcaacagctacaacaacagtatcaagcaacaaatgatcaaatgattcaatataatttgttacaacagtatacccaatgccaactatccttgcaaatgctgcagcaaccgcaaatgatgccgcaacatcaaatcatacagccacagcaaacgacgccgcaacaaggacaaattacaccagcattggtctgtctgtttgtttgttatatgcagcagggaccggatttttagggttttcacatattctttttgaggatagcatatggtgagataaaggcaaaaaaaaaaacattttcttcaatccatttttttagagcgacttttaaaccaacatttttcaactatttttcgcttatgaaacttttttaaccgactatttttggctttgggaacttttttttaaaaaccttactatttttt

SEQ ID NO: 2013 - DNA, 2024 bp, Heterodera glycines
  unsure (1)..(2024): unsure at all n locations
agtaaaatttttttncacncagtattttttgaagactaaaaaaatctcgtaaaattctttcccgttttaaaaaggtgtgaaaggggcacctaaccggccggcagaaagtgcaatttattatttgaatgatcaaaaatttgcaaattaattaataataacgtaaaaaacattgtattttttaataaaagaaaacaattgaataatacatttttgatttgaaagcttttgactttttttgctgatctgaaatggacctaaaatgatttaaataatattttatactttttttagctgcttttaacatgcattaataaacgaaaaaagttacataagtatcggttttttgactctttttttagttttgtgacttttttgcgttgtttatggcctgtgacttaaattccatccctactaatgagttaatgtgattttgattgccaaaacattatttaaaacattattattttacttatttttagtttattttctaatccgaataacaattatttaaatttatattattattggcaatttggttcgattgtaagcatagataaaaaatctcgatgtttttttccaagtattatgaaactaatatgtcttaatcaattgattcaaattcactggtaagtaaatgtgatttgaattaaacaattttaacattatttttgaggggtcaattgatttttaagtctatttttcctggtgactcgaatagccttaaaatgatttaagttattttttaacattttctcgtaatctttgagcatacatttttctttggcttttttgaccatttcctaccattttggttttttatgactagagtgctcattttgcagcatatgctgttttttttttaacttggggcgtgataataagcatgtaaaaggcatttctaacttggtttgaggcttctaagtcaacttttttcttgctgatttctgattttttgatttttgtgctgagttggcattttggtgctttttttgtgctgtttcgtcattttgaggaattttttaaaatattttcagcaattttcaaaaaattaataacaaaaatgcaataaaacctaaaaatacaccactaataatcgatccgaaaaatttcagaaaaataaacccctaagaaatgaaaaattttgccaaaaataattcatctccaaaatttatttaatttatttttttacaaaattttgattttttaaaattatgtatctcattaccatttttagcacctattttggaggttttttataatcagggagcaaataaacgtctttttgacgacttttttcaatttttaatgcctttaatctcttaatttttatgcttttttccaattttttgtgctgattttgccttttttgttattttttcatgcttattttggaaaaatttggtgctgtttacagtgcttaaacggtgattttttgtgctgaaaactgagcactctatttatgacttttgctcttcataatttttaatgcatttttcattttttggcaatatgtcaaaaaacgaaaggcgcaattaattaaaacagggagcccaacgaaaattttccaaagtcagcatttagcgacaaaaaatcactttgctgtcaaaaaggagcattttgatttttttttgattttttattccaaatggacaaaaatgtcccttgataaacaacaaggcaattaaattccgaaggattcaaatgtcacaaacagaaaactcaacatatcgccataaatttgaaaatatggataaatgatatatctgatgagactttttgataaaaaaataaaagtttttattaaaaaatcagaattccaattttataataaaattcacgatctttgctaacaaagactgggtggacaaccggacagtgggcaatccgacagtaaattacactaaaagataagaaaatgccgtcccgaaggggaccgattgtgccgatctcaagaaaatagtaaagaaattatgagttttgggaataaccctaaaaatcaaacgaggtgaaagaatgataagtga

SEQ ID NO: 2014 - DNA, 3054 bp, Heterodera glycines
attctgatcaggtggcttagccaaatgaagccgataaaagagaggaagatgagggaatattcgctggcgaagggttcaaaaattctcgcaattaaaatatttttatgcagttcaataattattcgaaaactctagtccagaatttttaaatcctaaaatcgtcacagctaatttcactccaactcgcggatcacttccgacccattgtaaaacagcgcaaaattttgttggttagcaccaaatagaagggtccgagtgcaattgaatgtctaatgagaaaagttgtgaaaaattttttttttgaaaatcggcgaatgaacgaaccgccactgaccactgaccaaccaacgtcgccaaaatggagacggaaactgcaaaatgccgggttggacaatgctttgattggcgaaatgtaaatgactctaaaaattttgggaagtagggaggacgaaggatttggccaatttttaatagaccgatgcgattttgttattgtatttatgtaagagtacagatacactaaatcacctcgtccggtgcagtttgaacaagccaccgcatattccgccaccaccgttttgcccgcgatgctctgctccatacggacgatcgcctgctgctggaacgggtccaactcgaaggaatacagtaaaggaaaaataaataaaaatgacctttttatttaaaaattaatttctttgtaaaatttggtcgattttgaaaaaagttcggcgatggaggcatcctataaacaaattttcataaaaatttcaaaaaaatggagaagataaccttaagcttttggaccgtctcgtccaatgtgctcagagcagcggcagaacacgcaggttatctgctgatacgaaaatgtggaaagagtgggaaaattttaaacttttatttgaaaatttttgtgaaaaaaacaccccaaaaaacctttaacataaaaagtctgattttgtgctattttaataggcctatatgtcttctacaaattgcattaaaagattttgatcagtttttcaaattgatcagaaaaaaagtcttgaaccggtttgcatcgaaattgacaaaacagaaaatttatcgaaatttccaaaattagaacacttctcgttgtttaaaattcagaattagatggactaaaaatacaccgttggtaacgaacaccgaacttcactttaaacctgtttaaacccgaaaaaccgttttggacaatttcgacccaaacccttttaagtagtttttttctgaccagtttgaaaagctggtcaaaaccttttagtgcaattttgcagagaatagatggggctaaaaattagcacaaaagcagctttttctcacaacaatctttagagatttttcacccaaaataacagggggttatttttattcaacgacctagtaaaaataatttccctataattttttccacccagtatttttttgaagactaaaaaaatctcgtaaaattctttcccgttttaaaaaggtgtgaaaggggcacctaaccggccggcagaaagggcacattgggggacttgccgagcaaatggctgaacgcgcgcgggtcgggcgccctaaaaaggagcaaaatttaaaaaaatgtataaaaaatattctaagaaaatttgctaatttatacaaaatggaaactttaaaaaaaccaaccttttttaaatttgacagaatttttaaaaattagatatatttttagaattttgcgaaattttaaaacaaaaaaaaacaaaaactttccctgctgtggcgacagagtttaattactagggatgatatttttaggtgctaaaaactggcaaaataggtaggttttaggttctaaaaaacctcaaaataggtgctaaaaatgggaaaataggtgacaaaaagttccgaatttaggggtctaaaatcgaaaattttcttttaaaagcaaaaatattttgtcaagtcattaaggatatacataattttcaaaatcaaaaactatcgacaagaaaataaaataaataaattttggagataaatttttgagaaatttttcatttcttaggggcgcatttttgaaaattttctggtcgattcttagggatgtattttttgaaaaaaattttctggtcgattcttagggatgtattttttgaaaaaaatttttgggtcggttcttaggggtgtatttttcttttttattgcatttttgttaacaaattttgggcaaaacaccaaaataggtgaaaataagttttttaaaatttttttaggttttttaggtgctaaaaataaaaacctagaaaataggtgctaataactcgaaaagtagcttaacaacagcccaaaaaaaacatgtttttcgtgcgtttcaggccacggggagctcaggaaaaaaatatgtaaaaatctaaaaatcgcatccctatttattaccaaatttatccaaaatgcctcaaaataaaattaattcagcgactcgcaaatttgaagtagaaaaattaacctccgcccctctcgcgccttttatttgaaaaagttcaacattttcaagcaaatttcgtttatttctaaaaaattggacaacaaaaatccctaattttccttaaaaattttgctcaaaacaaaaaaattgggttttttagataaaatctgttacaaaatgaactcaaatttccaaacgattttccggcagtgcctatcgatcagggctggacgtaattacggattacggattacggaaattacgacctttttggagttacggattacgggttacggatttttgggatttttccgtaattttgatccgtaactgactttttagattatttttcgagacgatttcttgcaagattattttttataaaatgaatttttttttctatttttattaaaaggctacccatatttcgatttaatctgacttattcttggtaatttgtagtattataacatacataaaggggggggaggctagcaaaggggaaaagaggaaatgctaaaaatttggctattttttaacaaaattcgttaaaattctgaaaaaaaaattatcctcggcgg

SEQ ID NO: 2015 - DNA, 4895 bp, Heterodera glycines
tatttttttattaatttgaatttgcaattttcaatgccttccattttttcgaattcaattttagcgaaaatccaaatttgagtgaccaaagttcaaaaattcattgaaaatccgtttttagaccatttttgtggtgagttaacggaaaatggacatccaaatccgatttcttcgcaaaaaccttataattaaattttgagatggtagtggtacccgtagctttggcttaagccaaactctggaatgttccgcgttgcaaaatccaccgacaattttcagccaagtcgccgccaaatgacctgagtcactgcgttgtttttttggcgcaatcaatttgctgcggacattagtcaatcaggcattggcgtaaccatcagctgggatccttatcgtaccatttccttccttttcaagaggataacggtattgcagttggttcgcgtgccgatggacgactcttccgagagccggaacgtggacacgatatgtgggagacttttccaatctttcgatcatggtcccattaagccaaaatcgttttctacggttgaagtttagaagcaaaacgggatcctttggcaaaaactcaaccgattttgctctgtggttctgatgaaattgacgtgccatttttcgggcaaaatcagcttgcgatttgcgaattttggctgggtcgatgatttcggcgtgttcttcctttgggtggacgagagacaactgagttcgaagtcttcgaccgaagaacaattgatcaggcaaaaatccgtgagtgccgaatatgggtcgtcctgtaggcgagaaacatcttttctgcccaaaattttccatctttggcgcatttcttcattgcctttttgaacgtatcgacgaatcgctccgcttggccattcgactacgggtgatacggtgaagtgaaggtattcttgatgccaaattcactgaaaattccttaaattctgcggcatgaaattgagtcccattgtctgaaacgatttcttctggaaatccgagtcggtaggcaattaatgagtcgatcaaaatcaaataggagtgaccatctgaacagggaccggcgaaatcgatgtgaatgcatttgaatggtcgtgagcaagatgtccatagggctaacggtgcttgggtggactcttttgggcgctctggcaatctgaaaatacggtgacagattattgtcagtgcatttttgtggccagtcggattttgtgtgttaagaaaatttccgaagtatttcgtctattggtgtcatttctgaaatctctgctttgtgatcggcaattgatcggtagcagtttggcggatggcgttgatatagcaatctgtctccgtacagatatttgctatcaaaattcgccagcaatggcttgtggtccatgaaaagcgtgaatttcctaccaaatagcattcggtggaatttttgacaaccaattgttccttttcgatttggctgtaattctctgtgcgtcgttgagggtgcatgacgcatgctcaattactttttccgatttgtccggaaaaatatggctgattgtggtgccaattccgtcttttgatgcgtctgcaaagttggtccagttgttcgcgatttcgagcacggacttaataaatcttccataataattcaatgcgccgagaaatgaacgaaggttgctcaaatcatgcggtggcggcatttggcgaattgcttctgatcgtccggggtcggggcgagttcctttcacggagatgaaatgggccgagaaaaagcaacccggttggatgaatttgcacctttccaattggattttgaggcaaaattcctgaatttgtttgaagagcttgtagagcaaagaaatgtgctcttcaagcttttatgaggcgattatgccgtcgtctaggtaggcaaacgcgcctgggatgccagtgacgatttgtacgcgtctcagaggtcgagattggagaaatagacatagcagctgatggccgtgtaaatgtcttcaggccggggcaagaggtgattcaactcgagcaaattgttgaggccggtggaaaaaccgatgctaactcgtgtttttccattctttttcataacggccaaaatcggtgctgcccaatggctgaactcaattggtttgatcgctccaatctgcaaaagccggtctaactcttcgttgacggcattaaagggcaccgtgtgggacgggtcgtgccttgcagatgttgggtgagcatcgggtttaagaatcaaatgggccttggctttgtgcaacggcctaatccggggccaaaaacatccgaaaaatcagcctggagtgcctttgttagcgataccaaatccgaaattttgtgcgtcggctggggaatggccatggcgttgatttctgctggggctggttgagattttgggtggatgtcggggtacatgattttacgtgagatgacttccaaagcttcaatcaatggccgtccgaaaaggtcgtaattaatttctgagctgccataagccacaagctctttgggtgcttgattgggttggcaaacggtgcagagaaattttccttcgatgttgaacgggacttcattgcagttccgtgtttcaatgtcgggtttgtcaagttttggagagccagctttttccacgttttgattgcaacaggaggattgaaccaccttgccgcattccgaatcgtaatggaatttggcgatccgatttttccaatgagcttgctaaggtcgcgtttgccagtgaggatgaggccgcgtttgcaggtgccgcatttccggcaaatcgtgcaaaaactgcgtcaagcacttctgcagttgcgtggcgtccattggctttgcctcgtccgacgatcagcaataaccacacatagtggctcctcacaccacagaggtgctattggatgtcgcgaaattgaaaaaaccgcgtcttgcggaacctcacccgccgagggtctattggtttttgtctaatttaaccactaaaatttagcggacctcatccgtattgggtctattggtttttcgaggtttgctggcagtccgatgtcttcgctttggttgaagaacggctgctgactgcgccaatgttgtgtctcaattgtttgaacacacaaataaataataaacacaatttattggtcgacggacaattcgagaacaaaatataaaataagcaaatgaatggaggagacaatgtggggaaggagggagtgcttaaataaacaaatgaattagggggtgggattgacacgtcaccaaattaatcaataatcgaagtgcgccaaattcaaattctgtaatatgtaacactccaacattatttatttgaattggcgccaatactttaacagtaatgttgatgcttgtttctgttcgtcacaagcttctacaatttcgtctaattcattgttattttttatttttgaaaaatttagactgatcaattttgggtgcttgttcagactttttattaagaattctaatagttgtaaataaaatttacctaagtaatatttgagaaacgccttcagctgctttttggtgtaaaatggacgtgtttcgatttgggtttcgcctcttggacctttttcagtgggtcgctcaatgcttatctaaatgtctatttttattggacagcgcaaatgtcggacaccaaattacatacactgatgaccctcgtgcaatgctcatcgagggcgcaagcgagggcatgaccactttcatgtttcgcagccctttgctccccttgcagaatttcattgtacaacatgaaagcgcttgcgactttcaccttaattttattgcactaataattaaatagacaatctctaatatctacccgaggttcggaattactttttttgacctttcacatggggaaaatacatttgatgcgcccaaatttagcgacccatcgtctgtgaactaacattggtgactaataaataaggaacatttgaaatttttaccaaaccattcccatagattttatgaactattaaaaaataaattatagaagaaaagattttgtgaattttttaataaataaaatcaataattaaatcggcaaaaagttcaagtttaaatcattatccaacaagtattattggaaaaaatttcatcttgataaggccccagggataggttaaatgacaaaaatttttaacttaaactttttaaatgactatgttaaaatgagttttggtaattaaattactttgcatattaaaaaataaattaaaaaataccaaataaataataaaaaaatcgacagcgtatttgaaattaacttttttaatataaattaaaattcataataatttttatcagagattaattccttaaattttttgtcaaataattcccaacataaaaatgagaataaaaaatgatatacaaaatggcatcgattaacagtctcaaaaattcggcttggagggttttaaaaaattttgtccgatttattgcctagctttttcaggaaaaaataatcggaaatttatataagaaaattccaaaaaaaatattttaaaaaaattttcagcgatttttttgaaaaacttcgaatagttttatcggttgcataaaattgattaaacacaatatggaataaattcattaatcagaaaactgagccaaacgagctccatttttaactacgaaaaggggggaaggtctaaagaagcaccaatcgaaattttaagaataaaatcaaaattgcccggccaaacgcaccaccatgcctagccgtggcgaattgtgatggtggtgttcatcaccggctgaggacgagggcggtaagaaaacgtccgcggaagaggcgaaagcgtcgccaccgtagccaccaaccaacagcaacaggacgtcatcgtcactcgcgccgccgggtaacgatc

SEQ ID NO: 2016 - DNA, 2005 bp, Heterodera glycines
cctcatcccgtattgggtctattggttttcgagggttggctggcagtccgatgtcttcgctttggttgaagaacggctgctgactgcgtcaatgttgtgtctcaattgtttgaacacacaaataaataataaacacaatttattggtcgacggacaattcgagaacaaaatataaaataagcaaatgaatggaggagacaatgtggggaaggagggagtgcttaaataaacaaatgaattagggggtgggattgacacgtcaacaaattaatcaataatcgaagtgcgccaaattcaaattctgtaatatgtaacactccaacattatttatttgaattggcgccaatactttaacagtaatgttgatgcttgtttctgttcgtcacaagcttctacaatttcgtctaattcattgttattttttatttttgaaaaatttagactgatcaattttgggtgcttgttcagactttttattaagaattctaatagttgtaaataaaatttacctaagtaatatttgagaaacgccttcagctgctttttggtgtaaaatggacgtgtttcgatttgggtttcgcctcttggacctttttcagtgggtcgctcaatgcttatctaaatgtctatttttattggacagcgcaaatgtcggacaccaaattacatacactgatgaccctcgtgcaatgctcatcgagggcgcaagcgagggcatgaccactttcatgtttcgcagccctttgctccccttgcagaatttcattgtacaacatgaaagcgcttgcgactttcaccttaatttattgcactaataattaaatagacaatccaaaatatctacccgaggttcggaattactttttttgacctttcatatggggaaatatatttggtgcgccccaaatttagcgacccatcgtctgtgaactaacattggtgactaattaataaggatcatttgaaatttttatcaaaccattcccatagattttatgaactattaaaaaataaattatagaaaaaaagatgtgaattttttccaaaatttccaaacgtgctatttaattataggttcaaaactggatatcagtgctacaataatgacggacttaagcacaaaattactatataatgcccttagggtggtgcctcaacgaatcttctcagacaatgagaaaggtaaccctaaaaatcgactatcccaaaaatgatcaatgatccctcggaatactatttggtactcccgatcacctgaaggattgatctggtcagagttacgcattttttgatcattatcaaaagctgtgttatgccgctaatgtccgaaaagtgtaaataaatatttattaagaagaaaagggcaaagcacacaaaacatggattgggtcacagcaaagggaaatcatgtaaaaagtgaatgtaatgaatggaagagacaaagaagggaggaacggaaggatatttataacaaatgaaatcggtaaggggatgacgtggcaaagggcagtagaatgcaaatatatttagatatgattctttcctaacacctcgcccttcaaaaagaatcattttcttcatcctcctgaaaagcgctgaggaagccatcgatttcttttttggtcgttcttcgtgagttcttggctttggccaagcgtgtggaagagtattaaacggaagctttgcttcttcagcacaagcttgacatgatcgaacgaaatcttcgatttcctggaccatcccaagcaaataaaataaatatgttgtcaaatcgtcaataaaaaatacaaattcggcaaataacgatggttcaaacattggcagaaatccttcaacagctgaccaatgtcatcaaacaacagcagcagcaacattcaccaccactcaaccaagtcaaatttgcactttccggacattcatcaattttcggcagacatttcggaagaatttgaagagtggatggagcgttttcaatttgcgctggaatgcgatgcgccaaatatg

SEQ ID NO: 2017 - DNA, 1178 bp, Heterodera glycines
aaaaatttcctcaaatgcatcggcgttacgtcgcttagtcctcgcgcctaagaaactcacataaatacgagtccaacatttttttaaattggggtgtgccttcaaaacaggaaagtaccgacattttcgttgccctcgcccctcacacacacacacacatattttaaaaattcacttaaatgttgctattaggcccaaatggcgatcacttttagtcccaaatgccgatcacttttagtcccaaatgctgatcactttatgcccaaatgctgatcattttaggcccaaatgccgatcacttttggcccaaatgctgatcacttttaggcacaaatgccgatcacttttacattcgttgacattgaattacaattcattgacacctttttacaattcattgataaagaattatattcattggaattaatttttttaagggtaaaatgaaaattttcattattttaaggcacttattgatacggaactctgaaatactttggaaccatatgaacgtttgctgcagaataacaaagaagaagtgagtcattcctctgataattttcattatctgcaaagtgaatttgaattaatacaaatgctaataatctttaaattcctattagcaatacaaaatcaatcgccaaatgatgcctgaatttaatggcacaaaaaatgtggcaaaatttgcattggatagcatccaaaattcacatggccggaacagatgaacaattggaaataatggacaaattagcacaaaatgtaaaaaataattaaaatgattttctcctgactcacttaattaaagtgccgaactttgaacgttcaaacaaagcaaaaaattaaaattttcatcaaaccattaaaatatggctttgttatttttaggcaattaccgtattcttctcagtttttttcggataaaattgcgaaggggttccggccatgtaattttggcttgttttttcacagattttcatcaaaaattgccaatttttttaaacttacctaaattcttttgataagacaatcggtcaataaattttgaagacatttttacctaaaaagccgcggataatatacggtcttttaaattcaagggtcacgaatcgtggatcgcgcgaaaaaaacgataaaaaaggtcgcgtcccatctctgtttcgactaggactctgtaa

SEQ ID NO: 2018 - DNA, 6742 bp, Heterodera glycines
  unsure (1)..(6742): unsure at all n locations
agaggcttcgtaaaatttgacaaaaaattattcgtaggaatttttctcaaattttatttccaaaacttaatatatttggtctaaaatgatttttaacaaacatattcagccattttagatagcaattattatattgcttcttcaccttgacagttgtcatggaaaattatgaaatttaacattgatttggatttaaagttaaatttttttgttatgtattcggaaaacataaaaatattgtcattttaaattacaaatttttcttttaccgtaatttcctcctcttcaatttgactgattttgtttatcttatctatacgatttaatgtgcttgaatctgatcgcacacttaatgaacgatacagaggattcaggcctgctggattcgttgaactcgaagcgccaaaagattgccgtccctgctcgaagtgtaatcccgaattgttttttaaatcctgtctcttcattaagcaaattaagtttattacagaaattattttgtaataaataaacaatgattaaaattcaagacaggatatgacccattccatttttaaaggttttcagcagaataattcatatttgctttgttttcaaaaatatttaaggtacccaaatttatttcaaatttgtttttaaaattttctaaatggtaaatgatatttaggcaatttttagcctatatttcgtttattttgccatttttaggatattggtccaaattttgtggggttttaataaattttgggttttaaatccatattcttaaattcgttatcatatatcaccttatgttcaaaatggaaagggatactgtttgggttactgtctctcctttgggttagcaaccgttgcaatactggctcatttagagagttgctttgttcatcatcaatccctggttcggttccagctttactactgctggctttgtactgtacttgtacagattttggacgaccaaagaaggtactgtcaaggttaatgccactttttggagtcattggagaatgaagatccaatgaacgacgagcctatttattaaattaaaaaatcccgtttattgttgtttttaaattaaatatggtttataaattattaaattcaaaaattcgaacatctttgcaaaaagtcttctctcctcttattgtacaccttttgattttctaaatttttgttttcgctatttcatgcgttgaatacaaatcacgaaattataattcaaatcaaacgtaattttatgaaagtactatgaactaaggttaagccccgaaccggtgcgggcaattgcgaatgtagtctgttatgtcccaaattatatgagagggtttaaatgagtttctaagattttttgctttagaaagttttttctatttttagatgaaaatttacttcccggaggggttgttccgagtcattttttaaatttatccagccatccacgacaaatttgtcagattttccccaccctcctcccaacctcctatgaccgcttttgtctccctgagggccagggtttaccaaatgtgaacttaacgtgaaaactgcttgaataattttgatcattaaattaaataagctaattgtaaaaaattatttaattgttaatgataattagttgagaacctcaaccaagtgtttaatgtgttcacgcggcactgacttctcatgcctttggacaaattcgttaaaatgagtaccttttttattttttgacaattttaatgatgacattaagcgacgcaaacttccctttttctttggtttttctttaacttctcgaggagtactctaaatattacaattctatggcttttatgatatcttcaaattctgcagggaagcagtttttgcccttatataaggaatttgctcctattttttagggttgatcttattttaagaaatttaactctaaattaagcaatttctgtcaaaattttttatttatctattgcattagacaatcttaaattgattggcattggctgttatcctacatccaataaaatggaatgtgaaatataaaaaggttgtttaaaaaatcataagatcgcattcctgggtcatagatttcaaaatgatttgtaaaaatccgaaaatcccaaaggggttcaaaagaatttaaatgctaaacattgttaaattttacaaaaggatttaaaaattttttttagagttttgcgcctgataatttataaatatttattaaaataattacaattttttagaattcctttgaataaatttaaaaatttccattaattgtttagttgttggtttcattaatcatatatatttcaatttcaatttccaaaatttccatgtttttaccaaaaaatttacctcgttcgaccaataaaatggagttgtgccagtgctgtcgacaccatcaaataaatcggtctctgaagaatttttaaacgcactggagatggaatccttcaactccgtccaacttgtcaactggtccaaaatttcttttacctacaaattttcggtacattttaccaaaaatttaatttcctttttcaatatattttaattttacgcgggactacaatttcgatatttttaaaaactcattatttgatgtcacagcgtatgatataacccaagtagaggaatatttggtctagattttttctacatttgtttttttaagaaacgacaaaagataatgacgaaggtataacattatataaattaataaaagcattcaaaattttttttaactttcttattctatcaaatgtctcagcacagaataaaaaattttgcgattgatcaattgttgcaatttgggcaaatgtgtaccttttgtcttaattcatggtcattgtacagtttgctagttttagggtcgcagattggcataattttttcgcatgggctctccatggccccattgtccaacgtcttataaatgtgttctttcattactttggggttttcagctttcttttcgtgctcaaaaagcttgacgaaccaatttggacgtcgaatgtttttcaaaatctgtgccaaatttttgttcagctcttgcaagagtttgttgaacaattccaactgtttgttattcaatctattgactgacgacgatgatggagacggagtcgtgttgttaaacttaaattttaaggaataaaatttcgtcacatggcaaacatacacataaacttatgaaaattgagggcaaaatttctccaaaatttcttcaaattcgttaaaattaagctaaaagtctctaaaattgctaaattttgaatgataagtcatttaagaagaaaaaaaaaacaaaataaagttgaaatttattaattttaatgaaaatagagaaaaaaatcaaaataatttccaattttatatttattttggaaaaaataccgaaaaaataatttcttgtgaattttttcgtccttcaaagtcattctttaaattatttttctttcttttttaaaacagcataaaaacccacaaattaacctaagacttcgacattttattttcatttgaaaaataattagtctaataatatcaaaaaaccttctactaaaaaatctcactttcttttgaatttttgattaaaaatcttaaaaaactaaaaaaaattttttccatttcccggcggggttcccgttaaaatttacgggatttttaagggattattttaatttcttttaagaaacgcacatgcgtttttgtgatgccatacatttcttggcgactttccttggtcaattccgcgctgaagcggtgagttttcctcggcattgttctgcttcttaaccttggcgggtcatcaacgacaggttgagcttttgaaaaatcaatttttgtcaggtccattccattggcggcaaatgtaacaaaacaaaaaatgatgagtggaaaaaggaagttcatggtaaaattttattggcacaaacttaaaaaatcaaaaattaaaagctatagacaaagtaatatatttgaatatacaaataaatgaatataataaaataatgcatattctcatgtgttcttataaaaatatattaatcttacacatttaaaatcaatatgctaatccatatatctattggtattgcatattttcattgagtcgaataattattaaaaaggattgtttttgtgttttgtagtaagtaagaattaattttttaattttacaaaataaaatgaatgaaaaattttcggcacattgagttgctttaaaattgagacatttttgaaaatgagcaaaatctcaaaacttttttcaatattaaaatgataaaatgaaaataaaaaaacaaaataactgtttttttaattctgttggttttgcagactgaaataaatcttttaatgggatttctattgtttttctaaattttttttttgaagattcttggccccacgagtttaaatcccctcaaacaaaaataaatccaaacttttgagttttgtattaaaattttgcattctttttaaatacctaatcaaaatatgcaattatggccaacaaaataattgagtaatattactgtcacagaaattggacgaacgccgctccgtttccacgccccccgccccgcccgctccctctcgctcaatcaaaattcacacttactataataaatacataattggcgaaccgcactgtaaaaatttaaaaaaaaatttttataattgggctggcatttttatcaattccataacttttttgattttttcccatttttaaaactctcctaaaatataaatttaatttttatttaacatttttactatatttgctattttcattttttcttctctttaagcgcgcaaaatttggttatttttacaatttctgctgcatgtgacactcatttttgaacataatcacaaaattttatgctttttgctatatagatttaacttttttgttgctcattttaaagcattattgcgttactttttcagttttttttgttttataattttatagaaaaaatttattgtttttaaattttatattcaagtttggaaaacttaatttaattttgtataaatccttttttttgacttgaagacattaaagattttatttattttttttgggtaaaattattttacataaacttcactgtttcgattatttaatttctttttaattgatgttccttcttatcattataaatttgggtttttatcaaaattacattcccttcctatatattcaatttatcaaaggcaagtaagtcgaacaattcagtccacatgttgaagattcatttttattgagttaataatgttcgccaatgcccgatccaattaattagttttcaattataattaattcctntaattttacgaatttagcaaaataaaaccttaattggatgatgaataatgttttaatttgcgaatgaattcaaaagaaattcgtcaattccttttaacacaaaaaaaagaaactattttcacatcattgttaaaaaatgaaaaaatgttgctttacaaatcacttaaaatttcatttcaaacctgaaatgttttaaaattaaattcttcatttttttctaaaacctaattcgctcattataaaaccaaaatttttaatgtatgtttcaatttttgaaaaacccctgccaattttaaatttttaaattcaaataaattttaaaattgtgccgagtcgtttcaaaaaacaccagatattttttataataacatttttgtaattagaccatcgataaattttccatataagcaagtgacgtattttttgctgaaaaaacgccaaaatgacgccaattaaagaagaattaaaattaacattgccgacaatgactagggatgcaatttttaggctctaaaaactgcaaaaataggtaggctttaggctctaaaaaaccccaaaaataggcactaaaaaatgaaaaataggcactaaaaatcctcaaatttaggggtaaaatgacaaaatgtattaaaaaaaataaaaaaattaggccaaatcagtattgagataaataatttttaaatcacaaattcttgtcaataaaataaataaataaattttggagatgaatttttgaaaaaaattttcatttcttagggatgtatttttgaaaattttcgggtcggttgttaggggatattttttgaaaaaaattttacgttgattcttaggggtgtatttttcgtttttattgcatttttgttaataattttgggcaaaacgccaaaataggcaaaaataggctctttcaaaaatttttaggctttttaggcgctaaaaataaaagcctagaaaataggcactaataactcgaaaagtagcttaacaacagccgaaaaaaaacatgtttttcgtgcgtttcaagccacggggagctcaggaaaaaaataggcttttgcctaaaaattgcatccctaacaatgactttcaactttttttttcctaatgtttttctgacgtcaaatcactcttcatttaatcaatatcacggctcccaactgtgatgatttttcatcattttgtggctttaaggtgcgaaatgagttttgaaaattaggatgaaaaatttttttgaggtttctcgctagaaatttttttaaaatgctgatttanaaaaatactaaatgccaaaaaggacagtgaaaaaatattgataattatttttggaatttgaggnctttaaaatcagttgngaaccctgaccnaatacattttccacagaaagtnataatgccaacaggtccctttttt

SEQ ID NO: 2019 - DNA, 7593 bp, Heterodera glycines
ctaattcgctcattataaaaccaaaatttttaatgtatgtttcaatttttgaaaaacccctgccaattttaaatttttaaattcaaataaattttaaaattgtgccgagtcgtttcgtaaaaacaccagatattttttataataacatttttgtaattagtgtccggaatgggactgggtcccggccggtattttccggcttctgatccggaattcggctgggcctaaattaaattttcaaggtgcccgattttccagattactcgaaaagaccatcgataaattttccatataagcaagtgacgtattttttgctgaaaaaacgccaaaatgacgccaattaaagaagaattaaaattaacattgccgacaatgactttcaactttttttttcctaatgtttttctgacgtcaaatcactcttcatttaatcaatatcacggctcccaactgtgatgatttttcatcattttgtggctttaaggtgcgaaatgagttttgaaaattaggatgaaaaatttttttgaggtttctcgctagaaatttttttaaaatgctgatttaaaaaaatactaaatgccaaaaaggacagtgaaagaatattgataattatttttggaatttgaggcttttaaaatcagttgggaaccctgaccaatacaattttccacagaaagtataaatgccaacaggtcccttttttgtttcgtattttaagaattggtcatcagaagattaaagaaaaatttaaatgttagaatttaagggaaatttattgaaatagaataatttctttttaaattgaatttatatttaaattttaggaagcgtatttattaagaaatgcaagcagattcagcaataataaattctgaattatgcgacgaagaatatgccaaaataaatctgctgctgtcaagcaaaacccccgaccaaattttgtcaatttttggtaaattaaaataaattaaaaaattcataaaatattatctataaattagaattcctcctaaatctttaaaggtgtaagaaacccatttattctttacatttggctttcaatggcaatggtttgggccctcgctgcaatgccaatgatgagcggagcctttttgattgacgatggatgcccagcagcagtgatgtcatcaaatcggacaagaattaacgcaaaatgcacaccaaaaaatgggtcaatccgagcggaggtcaaattttaggacataaatttgatttctaatgcataaataatattattttgcgctaaaactattgaaaacattacaaattaataatttaaaaattactttttaagttgggtttaaatgagaatcaaggctatttggtggatttatcaacctcagcgtttatgggagggatggccgttggcagcgcagtaacacctatttttacagatttgttcgttttattaaaaagataaatttaattttataatttcgtaaaattcaggttgggccgtcgctccgtattggtggcaattttactgatcgccggtggcagtggttgtctgtcggcactttccaccagcatcaatctgcttattgcgttacgatttgtccaggggttatcattttcggtttgttttttaattgattcgtaggcattctgaacaggcggccattttacgatttttatttatttttttaattctttaagcaaatccgttaaaaatttcgatcatggtggagactcccaatttaatttaaattttaaaccaaaattatcatcataatgagaataaatgttaaaaaactttaaatttttaggatttcccttcggtggcgcctgtcggcaccggcggaccaataatttcttttagaattttataaaaaatggttcagtgtcgcaaattttggtcctaacattagacaaaaaaaaaatttagcttaaaaatactcattaaaaaaatgaaaaggcatgcaaaaaattaattctgatgaaaaaaatatataaacattcgaataattaaatatgcctaatcgcatttgagggagtttcattgaccaattgggtgcttgcctacgagtgcattccgatggaacttcgcgcactgtctccgctggtgtttggccttgcctgggtatttggatattgcttaattgctccgatggcatattttacatcaaattggcgccttctcattgtgttggtttcggcaccatcgcttctttttgtcgtgattttctatttgtaagtaataaataaattatttgaaaatataattgagctcattctatctttagtcttattttttaattagatgaccgtccgctgaaaaacttgtaaattttccaaaatatttctaataaattggcgcaattttttagagcttatatattttttcgtgataaatctttttcctaaagtctacaaaatcctaaccccaaaagcagatgaaaaaaaacttgaaaatagaaaaaactcattaaaaaggagtataaaaatggcaaataaatattatagtatcttttaagcacaattcctgaaagcttccattatttggcaataaaaggacggattgatttgatcattcaatgggtccaaacggcgaacagttttgcctatattgcacagacagacaaagttgagcagaacgatgttgatcagctgattgagcatttggagcagcaaaaactgctgatggacaacactgatcaacccgtgatggtcaccaaatcaatcaatgaaaatggagtaaaaatggtgataatgtgagttaaattaagtcggcatctcacgacaagtcagaccattaatttatagttttctgtaataatgaaaaatcttgggctgcaattggttgacataggcaaaaacgcaatttttcttcggagagccctaaattgataacagacctatctccacttttttggcctatttttcattttagttattgtcaaataaataaataagcaaatttagacatttaataattaaattaagtttatttgtttaggtcatcaccatttattgagaagatcaaaacaaatgaaaagctgatcaaacacatttccattttcatcttattatggtacggagcaacatttttgttcattattttaatattattattattcaattaaatttattgtttaaagtaattaattaaaaattttatttatcaaaaaaattcctttaagggtatgcgacgcattcatttattacggggtcagcttattcagtacaaaacttgccggcaatcgctacatcaatttcacactcattgctttggttgaagtgccttcgtacgttttttcaccatggctaattgacaggtatcatgtttttaaataatcagaaccggcctttttaaattctcgatttccaagactctcatttttcgtgattttttaaaaaatgccttgacctattatgaatatgacccaaaaattacttgcaactttttggaaaacttgaaatttggattttattattggcacagcgaccggtaattcaattttgctggtctttctgcggggctggtaaaattatcatgaatttttgtttaaattatttaagaaaattttttggcataatgcattttccactacgggattgggattcaaattattgcgggagggttctcgattcaaatcccgcattttccaaaaatgcggggttgctgactgggatcccgcaaaatcacgcgcgggatccctcctgtgcagtttctatcagggatggaacggaattccgatttccgacatttttggggtcggaattccgatttcagacttccgaaaaatttttgggcctagggacttccgaaaaatttttgacccccggaattccgatttcctaaaatttttttggtcctcggaatggcatccctggtttctatgatttcatgttcattccggctataaatacttcattcaaacggcgtgttatagctaatttttactctttctgttcgtatttttgtttttttagaaaaatttttctattcccctaggaatttttcccgaatttacctaaaaagtccggcctctataaaacggtatgctgctaatgccaaattctttccatagaatgggccgtcgcctgttcactgcgtttacccacctgttggccgcgttggcattcttttctggcacgtccattctttggctgccgaatgtgccaccatttgtccaactgtgcctttggctgatcgccaaatttgccattgcttcctcgttcactggcctttttgtgtacgccagcgaagtgttcccgacatcgaagcgtggaatttgtatgggcatttgcacgaccgtctcgcaattgtgttgcatcattttgccgccaatgatccgagtgatggtgaatttatgcattttataattaaataaaaattaatttaataattgaatttaattaaatattatcttgttcaaattatattattttacggaaattttaattaataaattattttacgcatataataaaagtatagttaaacaagatttcaaattttattggcacttttatagcaaagggtacccactagaaaaacaaaaaaaaagtgtgaaacgctttacttttacttatttatttttggtttcttggtttagattagaacttcacgaaaattcattctttttttagcccctctaaactctgcaatttagcgtctctattacaactttcgccatttttccatcattttgacctttttttttgatttcgtccctactcatttgtaatttaatataagtaaatttccaacatatcgtttattgcttatctagtgcatttttaattaatgtttgtaattttgcactttatagctgtccttttcgcctatgatgccaatgtttttctttggcggttacgcattcatcgcaacatttttaacatttttgttgccagaaacgcggggaagagaattgccggattgaattgcacacgcaactcgtgtacaaattggccttaatttaattaattcatgcttttgtatattctcgttttaatatatttgagtatttttggctttttttataaatttattatttaaaggacaactagcagatgatttctttgaaaggacatgtagtaaaatcatgtacacaagggtgctatgccaaaatgataaaagtatgggtgtggagacatggccgagtatgcaattatttcagtcctaaaaaataaaaatcttgcgaaaatgattgttaaaattaataatataattttttttatagattcttaacatttctagttctttatacttcaattaatctttatttttaaaaaaatgattatttcataattttataaaagaatacaaattattaatcaacatttttagcgacttaaattaattttcagatgtttttaaataaatctgggtgattaaaaaaattgcttatgaattagttactgactgattgtccactgacggattgtccacttaccgacggattgtccactgacggattgaccactgacggattgccactgacggattgtccgggagcctaaataaggttttaataaaattattattttaattgataatttatttttccaccagtctataattaactattttaaatatatttattttttaatatttatccgaaacaattattagaattgtaataaattacaaaccacaattttatccatttaaccctgaccaattggtgcatcgacagttgctgatcaagttgcgcgagctggtcgccgttgttgtacacccatggcgaggctggctgttctttgccgaatcagaacggcttgtaattggcgctgcaatttggatgccaccggctgcacagtgatccgcgaccaaacactgggccgaccgtccgggttggtcatcgactttgcggacagtcgcctgtgcatgggtgactcgttgctgaagctgttcgcctgcatggactttgacggattgaattggcaacaaatccctgtggacgatccaatccctgtcgcaattacactgctgcaacgggtaaaaaaaattaatttaattgcaatttaaatggttaaatgttacttaattattatattaatgtatgactacttaattaatgtgtgtttaaccattattaagtgattggttaatgtttaattaccattgacaagtggctaattaacagttaattaccataacaatatttccctactaccactctgttaagtaccctaattaacaataactactatgcttaattacctttgattagtactaaattggtgataaatttcagctttaatgactgtggtgaacacgacttctccgatgaacatctatgtaagttccaaaatttaatcgacttttcaagaaaaaaggaatttcatttgtatatttaaaaaaattaatttaaattattttttccttaatttagcaatgtgttcatccttttctgagtatggagattgctctacggacgaattcaaatgctccaatggcaaatgcatcaatgccacacttgcttgtgatcggaaagatggtgagatgagcagtgatcagaatttttgatttttgaaatttcggagaaaattttgtccatcaaaaccaattctttctaaattcactcatactctcccctcttccgtgccaaaaagctttttttttttaaatttccgtttaaaagcaattttgtttttttgatttcctcattcaaactcgtgagtcaaattttctgatcacagattgcggcgatgccaccgatgagattggctgcgcgaaaaacaacggcaaaagttgccattccaagggggacaacggtgggtgcaagcactcgtgcactgatgtgcaggacggttactattgccattgtcgggacgggttcagaccagacccggccaacccgttcgactgtgtggtaaaaaaaattggaaaatttgattactgctcaagaccgaaatttcccgtgattcgagatcaagaaaaaaagagacttttctcggctcagggctcgagaaatcaaaaaaaaaacacaaaatcaattcaaaaaataattatttttttattaaatttccaaaactggtctctgtttattgaaatatatgttcatttttgaatacatacgtcgtaccaaaataaaaaaaaaatttttgcgaaaaacggacaattattgagctaatagccgatgcctaaggacgtcctttgtgaacccaaggacgaatggaaatttggataaaaattcacaaaatatttttttcaaggaaaatgcctgtactttaattctgcgttggatttttgctccccataattgtttgagtacacttgaaaaaatcgattttttttgttttcgggcagtccccccgaaccgatgcgcccagatttatggggagaccgaatccttcgggaatagcttccctatagcctgtactttaattctgcgttggatttttgctaacccataattgtttgagtaccccaaacggacaagttaagcctaaactttttggcctgttaaaaaaggaattaaaaatttttaaaaattttaatcatcttcctttttgatagaaaaagcatcagagagccttattaacatgtaaataaaatttatcagattcagatcgccatggaggagtaatctgatcatgttggccaaaagatttatttgttca

SEQ ID NO: 2020 - DNA, 1807 bp, Heterodera glycines
ggaatgttaaagcgttcagaaggtttgaatatttcattgggattcagatctgttcggccataaattattttatgagccatgaacagatcagacagctttcgcctgctttcaagtgtcggcagttgaaggtattctaatctttgttggtatggaatgggtggaaggctgcatttgaaaagaactcttttggtgaaatatttttgacatttttcaatttttttaatattttttagaagagatggattccaaacctcaggagcatattccaataacggtctaacataagttttgtacaaaataatccaaatcctagaagattttgatttaataacccgaaataaagaacgcatacgtaaatatgcattctttattatttgtgcgacatgattggaaaattgcaatttattatcaatatttatgcctaaatccctaattgtatccacaacatttattatatttccatcaattttatatatttctttggggtttttgttccctaaatgaagtacaaaagtttttttaattgagattctgatttgccatttatttgcccattctgataaattatgcaatgctttatgcataatttctgtgtcagctctcgctttataacaaatatacaatttaacatcatcagcatataatttaattctcactcctgatggcaaagcatcaggaagatcgttaatatagatcaaaaataataaagggcccaggacagagccctgggggacgccagagcaaacttttttattcgagaatgagatcctaaacaagtcagtaataacagttgacagagaagaatggcaaatttttaaaattttatagctaatattatctggagaagtgccatttttgttcggaagttttttcataagattttgggtctcgatgatgttaaaatttatatccgatataaagcattgatcattttctataatattacccaagtatgtattgcttgggtctgtttccttattattaaatgaattggcaaataagttggcaaatatttcacatttctcagcactgttatgatagcatttatcttcataaatcagattaggtatttcaaagggattgacattaaagttttgtatatatttataaatagaatttcttccctttgaaatagcctttttctcaatttggttatggtatttatttgtttgtatttttatatgtaaagaaatgctatcgtatagtgcttttttagatgggtcagttttagcttgcctgaataatttagccttttctttaatggatgctaataaatgtttgggtatttaggagtcaaatctttctttgttaaacgctttattggaatacactcatttaaaatttctaacaacatactgttaaaggcggaatatttttgatttatgctaaaccattcatatgacaaggcatttagccttgatgctatgactatattaaaatgtaacacattcgatggacaaaaccaacgaaagtttacgatctttgttttcggttttgttttaggagtaattaatgtgaaaaattgtgttaaatgatccgatgaaaatatgcctcctttaacagtacaatcagtaataattttttcattggccgaaaaaatcaaatctagccaggagttaatccttgttggctcattcgtggccaaaaataagaaaatctattgaaaagtcacaaaatatttcaccatatttactcattgaatagggatgcccatttttccctaccaaatccttattcggtaaattaaaatctcctaaaagcactgaatttttcttttaaaatttttgcaaaattttgaacaattttt

SEQ ID NO: 2021 - DNA, 1179 bp, Heterodera glycines
tttttcggtttctaaaataagtgctatttcatcgattttattcattattgacctaatgtttattaggcagcatttaacattccctttattttttgtaaaaaagtttggatgggtaattttttggtataaattttttaccgaccggaaaaatttttgtacttttctataataattatgggtaatttgtagtgatttggttggataatttaaaaaatttttcgaatatggtcaatgtcctgcctcagcacaacctgattggcataaatcacccaatcaccgctgtccgtctgccttttcttcgcacaatcctcaatcaattttcgccgctccgacagttgttccttggtcatgctctcgcggacattatggagaccattcaatgcctgcacctttccgcgcatgcggatgacgtgtcgcgctgcatgtttggtcgggaattccattttgagcgggcgcggtcgtccatccattcgtttgccgacgcggaagacaattggtgcctggtcgacgtccgtggcattcaaaatttcgtccacaacggcacggtcctcccgggctctctccgccgctttgtccgatttgctttcgggcacatttgtcacaacgacagttctcagtcgtcgttcctcctcgaccgcgtcgacagccgcagcctgtgaatgaattaggacggaggcggtgcttaaaagggaatgaagctgcttaataagcaacttggcgtagtcgggaatggagttgtctgagtcgatttctttggggatttgtagttggtcaaggtcggacagaaattttttggggcagtgttgtcagaaggaggagaaaaattcgccattctctttgccatcgactaaacatatagggctttagaatgatgccaaatttataaaatttggcccgctgagaaaaaagttatgatactttaaacttggctcagactataacggccagactatagtgtcccccaccccgaaccaacagttcgcatggtccatcattttttcagggcgacactaataaaaagggtacttttccgttttggggccaaagtttcagtttttttaaaatcaacagctggcgagctgatttgtaatattcttcattcccatagcatagtgaaaatccgtagcgcagacccattcgaagagatcttagctcaaattgtggcatttatgcctccga

SEQ ID NO: 2022 - DNA, 2602 bp, Heterodera glycines
tgctttttccgtcaaactcggcgcttgcccccacgcccaacggcactgtcagtgccagtctgatggcggcgttcacgaacggaggcgccagcggcggaattacgcaatatttcatacgacaggtttttatgaagatttccttcataagaaattttaatggcatttttattacgggtgggtaggattatcatttgttctttaaattatacctcatgtcatttccctttgaaattcatattccttctcttcatatctgttctctttgtcggaccatcatcagttcattcccttgattgtgtcgcaggagcagattgtgtcatcaactatgcagcagatagtcgaattgtgcatatgcttccgagctaattccgttgcatgtatagaatcgatcatgatgggcttctacttctagcgcaatcaatttcacattattttggagtttcttcgagtcatttcccacaattaccaaatgaacccttgaaaattgttgtttttgttaccatttaattgtttttttgttatttaataaagggttttttattttattttttggttttaccaagtatttgaatttaaaaaattttcgcttggtgcccaaacgagcgcgcccaacaggggtgcgattttgccctggaaacccggcatttgccgggttttgggggtccttgccgggtttttgaagttgccgggtttttgggtttttccgggtttcctattttcaattcatttatttgaattttattaaacattttgccaaaattaagagccaaatatagttttcgttaattgttcagatttattttattaatttttgatcctcattttctagtctgcagaatgtcccaaaaaactatttctgatttcatttccaaagttacatttcaacaaccggttcaacaggaaaaacgtggatgaaaaatgggcggctattttcaaaaaccccaattttgtcctgctaaaatcactagtctctgcaattctgtcaattttcccttctaatgcgttttctgaatcagtcttttctgttctgaagaacatcaaaacggacgagaggaatagtattggctagagtgccacgggaccgggaatttttgccaaaaccgggaccgggacttgccgggacctgagaagccgggaccgggacctcgatttttttcgggaccgggaccgggaccgcaagaaaaaccgggaaccgggaccaaccgggaaattttaaaaattcaaaaaaattttaaaaattaaaaaaaaaaattcaaattttaatttatatcaagtgaaaataatacaaaataatttggttttttatttaataaattattaatgaaaattttcaaacaaattttcttcaattatttcaaacaattaatcatttttggactaaataatcgaatattaatagaaattcagatttgattttcacatcactttttttcggagcgctttttcaaaaaacttttgggaaagaaggggtccggcggtgccgataggcgccgccgggggaaattttaaaaatttgggtgcaatttgttaacagattttcaacaaaaaaaggttggtttttgcgattattaagctcaattggtaggattttcatttaaaaaatgataaaatatgtatcaatttaaaaaaaactatttcatattttctttataggaaacccacgagtatacaaaaaaaaaaaattgaaaataatctaatttctgtagagggattgaaccagaggaaagaagaagggaaagtcaaggagactagccattaggccatttgcacacttgggcagtgttacttttaaagaatatattaattattattttttatttttccctttgactccaattttcttcactaatttttcactcagacccccattcttaccagtgcttgtttttcccggttcccggttgccctaccgagaccgggaccgggacctgagcttttcaaaacccgggaccgggaaccgggaccgggacctcggatgaccggcaatttccggtcccgttcccgtggcactctaatttaaagttttcatttgacgaatggcactgacggagtaaagcttatacaggttcgtgccacaaatgaaacgtgatgaagcaataaaaaagccctatggcattgaattttggattgcacatgacgagggaatttgcgacgaaaggtgagagaaaatatttgaactgatattgaattaatatgctatataatactatacattgttgattttataccgtattgcgacatttgctgattatgtttggaaattcaactgaaaatgaaatgttctgaatgagtgcacttgaaagaaccaatcgtgcaagtcaggatgcgagatatagtatatacatagaaaataccaacatgtataggacatggtttgaggagtgattcaataatttttttatggtgtaaaaaattgttcggcgaagtcttgtcttgattcattctccattgttgaaaaaccgcaacaatagattacaattaaaattattgttgtttctatctgaaattaggaagtgcgcaattaatgcgggacacttttccattcattttttcttgaaattgtctgcaaatgtcccaatgcaattttttagataactgatct

SEQ ID NO: 2023 - DNA, 1538 bp, Heterodera glycines
gaatggggatggcacatgtcagcctttaggtgggtgccgattgccgcccttttcaagcaaatgggagggacttagtgcgggcacattaactctctctcactcccatataaaaaaagatattttcatttaaaaaccatcagttcccctttaatacaataaattttatcattttctcctacataaaaatattgttctatttacatacatacatacaagatttattagctatgtattcattaaaaaaaagaaaattgccgcccgaacttctctcggagttggccagcgccttaccctttgactttcgctgggccacaacccgagtttcttcttcttttgattattttgtcaaaaagagacagaaaaaatggatttggaccgaattcattcgtgtaaataaacatttgatgggtttttttagggctcagattggtgaaaagtggaagtaatataatgatcagcggccgctatgaaattttcggggatttaaagttattttaaccatttccgacttccttatcattaaatttgaacaaaaaaaacgaggaattttagttttgacttttttcaagttcgggttagggatagaaattggtcaaaataaatgtcattcgtgttaatctaaaatatattttattaacagatgaaccaacgtaatgtatactacatgtggacggtgagttgtattttgatttttaattatataaatgaatttatgaattggaaattgtaaatgatagattcccctttttttagattggcaacttttcccttcgtcccgagcaaatgggcgaatttatgaagagttcgacgttcaggtttttctttttaatgttttttgaattatgaaattggtccatttttggtacttccttgttttgctaccccctccccctcgaaaatttttaaaatttcaaaaaatcatagatattttattaaatcgatgactagcattgcccgtgggacttgaattttggatttttgtcacatttccgccttcttacgccgtaaaatttgtccattggttcagtgccggcccgaacgacaagctgaagtggtgcctgcacatcaacccgaaaggcctcgacgaagaatccaaggactacttgtccctgcatttgctgctcgtccaatgcgacgacgaggaagtgcacgccaaattcaagttcgccatacagaatgccattggcgaggagacaaaagcgctgggtgagtgaattaagtggagggaattgggacgaaatgaatggtgggagatggaaacatccatcgccacggtgtcctgcctccaacgactgacacagcacaccgtgacttcccaactctttcagtagccgatagttgagataaccatttctcctgcagattcgcagcgcgcctgccgatttgtgcagggcacagactggtgctttaagaagttcatccgccgcgactttttgctggacgaacagaacggactgctgcccaacgacgggctgaccatctcttgcgaagtgtccatcctttatgatagtgtaagcaattcatttatgtcttctttt

SEQ ID NO: 2024 - DNA, 1001 bp, Heterodera glycines
  unsure (1)..(1001): unsure at all n locations
tttgatttttaattatataaatgaatttatgaattggaaattgtaaatgatagattcccctttttttagattgccaacttttccctttgtcccgagcaaatgggcgaatttatgaagagttcgacgttcaggtttttctttttaatgttttttgaattatgaaattggtccatttttggtacttccttgttttgctaccccctccccctcgaaaatttttaaaatttcaaaaaatcagatattttattaaatcgatgactagatgtcatatatatataaacaaacacattttcatagtcagagtgacgtgaccttgaaaactccaagatatgattttttttaatttttcgaggggggggggggtagcaaaacacggaagtaccccatttttttggttgagtcgattcactcattgcccgtgggacttgaattttggatttttgtcacatttccgccttcttacgccgtaaaatttgtccattggttcagtgccggcccgaacgacaagctgaagtggtgcctgcacatcaatccgaaaggcctcgacgaagaatccaaggactacttgtccctgcatttgctgctcgtccaatgcgacgacgaggaagtgcacgccaaattcaagttcgccatacagaatgccattggcgaggagacaaaagcgctgggtgagtgaattaagtggagggaattgggacgaaatgaatggtgggagatggaaacatccatcgccacggtgtcctgcctccaacgactgacacagcacaccgtgacttcccaactctttcagtagccgatagttgagataaccatttctcctgcagattcgcagcgcgcctgccgatttgtgcagggcacagactggtgctttaagaagttcatccgccgcgactttttgctggacgaacagatcggactgctgcccaacgaccggctgaccatctcttngcgaagtgatcatcctttctgatagtgtaagcaattcatttatgtcttctttt

SEQ ID NO: 2025 - DNA, 4502 bp, Heterodera glycines
atcagcagcaacaaattggcgccgccgatgcctttcatcaatcgatgggacagccgccgccggcgatgtcttccgcgccgtccatggccatggcggcgtccggcacgaccgccgcagccgtaatggcaggcgcaacgtcacatgccggcaccgtcgtcgacgcgaaggatgttgcgggtgtaattagcagcagcaacttccaaccagcgcaccagcagcaacagtacccatgtaacttttggcgtacttttctaggacatgttcatacatgaaaaagatgcgggggtaggagaggggtcaacagccaattttagaaagtgggtacaaacgccgattttataatctttttttggggaagtaggtgtcgataggcgccgccggagaaactatagtattttttgagaaaattcgcgcccccccccccttccttcgctgcaaacctccccccccccctcccccgctagccccttttgcgagcgggggggggggggggggtcatggacaaatattgtgaagggagcggagcgatttcccactttgcccgttaacttttaaaactttcatttttagacagcacagggccgtccattggtcagccgatcacaatggcgacaagcagtgcgagtgcagccgcttacccggtcgccacgcctcaactgatgatgggcacggcgggtgtcggcggtggtggcaaaatgccgaacgccgtcctcaccgcgcaacaaatgcagcagcaagagcaaatgccggtgaggaaggagtcaacacgattcacttttgccactggttcatcgagtttttaagaaactgatttttatgtgtgaaattttggggcactgatgacaaagttgggccttgaaatttaacaaaaatcggttaggttatttgaaattggccaaattttgtcaaacttatgcaaagtccccgtggaaaacttattttcgacaatcattttcaaaaatttacaagccaaaagggttagcaaaacgtccttagagtaagagttttttcttactagtagttagaaaaatgttacatccaaacaaaaaattatattttttcaagaaaaaatttcaaaatttttttaaaaaccgcccagcagtacaccggcgccgccgcggggttcgactacccggcaacgttggcacccttaattgtgcaactgctgaaggaacttggggaggaggaacgaccctactacgagaaggtgtgccaactgcagcaattcatcggcttcatagacaattcgcggaacaaatacgcggccgacgagacgatggttggtcatttttgaacagaatttaaaatgggagatttgccagaaatgatcctccccccccccccaaatgatgggacagataaatccagaaatatatcaaaaaagggacggcacaaaatctcgctgaacgaaatttaaaaaagttgcaaaatacttaatttagcatccttttgcactgcattttttcagctctacactatcaccataatgctttcggtgttgcgcttcgaatggtaaaataaaaaatgctgaaattttgttttgtccaatccgtagtcttctttttaataattccaattctgccaacacaatttatgtatatgatattttttccacagtattgtgggactcaaggtactgttcgaaattgaagttgtgctccaatcgatgatgtcctcacatcaccaccaacaacaaatgccattctccgccgcgtcgatgatgttcaccacgtcacccgccgtacaccccccgcaaccgtcgtccatggcacaaccgcagcaacagcaaatgatgattgcgcaaaatgtatggagggggagaaacagcggataaaggcgcgggggggggggtcaaattcggcaggatttagacggacgaatcccaaacttgaaataggccaactcgtactgtgtttcgacaaataacgttgtaaatttaaccaaattaacatttttgatgtcataactgccctaaacttaatttattattgaaaaaagttatggacacaaaatttttttttactatttttggtcaactttttcgtgtaaacaataaaactttcttaagttttgcttgtagattaaaaagcttaagggtctattgaagggtaccaagaatgtttaattcggtcgattttgacagaagttatgacgatttttttgtttttttaaagcagtgcgagttggttttttgccaattcttacccttccaatcagatccagaaattgtcaaacaaaagataggatttctgcaataggtacggtatcaaaaaacgtatttgcacagatgccgccatatggtccggctcacaaccaacagcaacaaatgatgccaccgtcggcgctggtcggcgttccaccgggcgcagctgcaacgaacacttggatggattggaattcgtcagcggcgatgccaccacgcggcacttacccgatggcgccgacgaacgccatgaaggcgggcacacagacgggcacgtacattccgccgcagagtggcggaatgatgccaccgcctgctgggcaggtgccgtactacgccgttgggatgcccacgtcgaccactgctgtgcacggtcaaccgatggaaccggctgcataccatcagcaacaacagcagcaacattaccaagccgttcagcagcagtacacaaattaccaccagcagcagcagccgaacatgatatacaactcacagcaacagcaacaaatgctcttccatcagcagcaacaacaacagctcaatcaacaaatgatgatgcagcagaggcagcaacagcagcctaaaaaaacgctggggccgaatcgtgccggggacgaactgaggtagaccggttatttacatattatttcacgattgttcttacataaaaaaggaatccgtatttgagtatcatttaaaaaaaaacttgagccaaattatttcattaagtgattattaattaattacaaattaattaattacattggtgcagcatttaaactcgtagtgctcagcacagcaatcagttgacggttggccaagatttttaatgcaattgtaccatccgcagccgcaggtctccgctgcctttttgcactcgtcaatttgagcaatttgttttggcggtatctttttgaagaaagaaagtgtaaaacaatggcgcataccatagtagtggaaaaaatatggtacaaaaatttcaatcagtcatactgtagacgtaccggtggagccttaacagaaaacaaaaaaatttttatataaatatatatatatatatgatatcaagttccttgcgttttcgaggtcctgaccacgaattcggtatccatttcggccaattccgaccccggacccaaactcgaacaaaaagtcgaaagtccaaattttcgaatttagcatttttggttcaaaaatggcataaaagattccttattgaaggattgatggctttcagtttgtttccgggttttaaccttatttttaagaaaatactctaattcctaaaattttgacttttcgactgacgcattttctggtcacgccgtgggaacttgttggcacttttaaatttcccggtcgctaaaagcacgcggattgccttcacgcagcaagtgaagttgtaatgctccgcgcagcatgggctcgcccgttcgcccgctttcggaatgcattcggcccacccgcatgggcaagtctcccgcgcggctttgcactccaaatcgtgctcgatttgaggcttaatttttaaacgggggaccaattagcaaaacatcatttagagaattgtctaaaaagttgagtttttcattcgttcaattcggtgctttccgccgaccaaaacaaataataaatgtgtccataccggcggtggaggtttcaccttaaaaaggcaataaaattggcagccaatttaatttattagatgggccgcccccgaggggtcaaccgcttccttttactgggccatccgtttaagcaattctcttaactaattacatgagttccaaaaaattttcacggcggcgcctatcggcaccgccggaccccccaatttaccataaaatggactccacaagacctccgaattcgggatttcaaaaaaaaagggaaatacacccccctaaaaattgatttttgaattcagcccctcctccccgcctccgaagccatggatggatgtgtgtgcctatgccctttcaaatattttaagtgccagaaaatcttgcttccgtgcaacatgagaagttgaagtgttcggcgcagcatggagtggcgggagcgccctcctgtttgacgcatgcgaaccagccgcacttgcaaagctgattcgcagccgctttacatccgtcaatttgtttgacttgctccggggttggctaattaattacacagagaacaaagttttgaattgataggcatggaaaatgcacttacgggcggcggctaaattattgaataattggcatatttataaaatgcttgttcaatcgagaatgaacacattttttgtttgttt

SEQ ID NO: 2026 - DNA, 5174 bp, Heterodera glycines
ttcgctgattcttttggtaagagacgcagattcctcactatattctttgttctctctctgtcttaaatctcttcccttaacactctcttttttctttttttttcttcacaaaaaatgcttttgtatgactgggactgaatttaacactctctcacttttctgttatctctctccccattttatttttccgctaaaagtcatttgaaaaaaattgcttttaaaatttcaaaaattatcgtaattttaaaaatagcgttgatattatgttgatggcataatgtatgttgatattaaataaatatcaacgtcaatgatgatatttattaaaacaatgttcgctatgagaaaaatgttgatttgcctttctctatcgtcagctaattagcaaaacattataatggagaatgccaaagtactagaacaaaaaatcaattaaataaaacaaaattagccacctccgctgcccgacgatttgcttattttattgttcaatttatggctgggacgaatcggcacccgtagaagcgccttcataagaaaacaaacccagaaaacattttccttaacaaaatgccaaaacttttccggtgctgacccaaatgttgacaacggacggtgcaccgcgtgttccacgcgtgcaccgttgcgcggtacaattgaggaattggtgagggagttggaccgaatgaatgcgcggcttggctcattcttactgtgaaacatcgatggatcacttgatcactgggaaaaacgatcaaacaaatttattgttgggaatggatatttattacatttgccgatcaaattgcaattaaacgtgttattagtgattaaaaaaaattggcttataaataatgccgaatgtatgtagcaccattttggcaaaaaattactcattaatgtcatgaaatccgattgcatttttttccatcaaaaattatgaacaataattttatttatttttttcaatgccaagtgataattttctgctgctttcttgaaaatttgttaaatttttatgaaaggaatttttgtccgttaatttaatcggtgctgggacgttagtcaaaacccatcaaaatgtgcgttagtcaaaaaaccatcaaatgaataatttttgacagaaaattattcattatttcgtcttaaatggatcaaattttataatattgatatttttcgacagccctacgtgttttctattatcatgcaaaattaaaaaaaaattcttttagtttaaaaaagttatgacctgtgaagctcaaaaaaccaagtttttttgaacatttttagtcataactttcttgaaacttaacgaaactttgtggaattttgtaggctaatagaaaacacttagtgctatttaatgatatcaagaattaaaaatttagatgcttttgaacaaagttatatcgttatatcaaaaaatattttcatttgatggtttttgactaacgtcatagcaccatttaatcatctgtcattttttgaaaaaaataatcaattctatggaaaatgccgatggctgtatttatgtgcccaagggcagtttcaaaaatgccgttgtccaggaaagtgcgtctcatgtcttttgggctttttaggtggataaaaggataataatattcaacattttagtcagagctgagctgaagtgcgcaacagatgaacaacaaatgtacatatgtgtattgtatattgacgtgatcatgtattcgatcgtattgtattattgtatgtaataactgtccttgttctgatcatgactatgtgtatatattgtattgttcggttcgcgatcggataaatattcaaatggaaaattatttttgttaacccaaaaacagcttagttaatgagatggataccattcgctagattagtgctaatttagtgtgcccaagttttgcagatcccatacggattccgtgatttttgaaatttcggaaaagtagacggatttttcaatatgtctcccagggtgggatcgacccatttccatactgccgtttccataccgccatttccataccgccgtttccgtaccagccatttccataccggccgtttccatgccaccgtttccataccgccatttccatactaaggtatttaggccatttccataccaaaaatttttcgaaaattttcaggtaaaattcaataaatatgttgtgtccttacccaaaggaacgacaacaaatatagacaataaagtttattgaagaaacaaataaaaataataaattggtgacggagagaggcgaatatcgattggctttatgccacaataaaattggtgaatgaatgaaggaagtccaaatgtggggaagagagccagcaataaatagacagaaatggaggagggaagaagggacaaataaaggggcagagatcacaaatgtcaatggtcactatctctaacacctcccttcttaaattctgatcacttcctgatcagtggcggcggcgcttcttgatcgggctgggcgagtaaaattgccgcggcttgacgatccgttttgatctgcgcactgccaattggggaacatcatcggcgggctgctcgggttgttgctgttgctcatcattttgtccacgatcaatgtgaattggttgatttccgatccctttttggtcatcttcgaagatgagacgtcggcgcagctggtttgtgtgccggtggacagttcttcctcccaagatcggtacattgactcgaaaagttggggaattcttaaccctttccaaaattgtgccctgtagccagtgggatttgttgttccggtaattgaggagtaaaacggggtcacccggaccaaattccgtgtgttttgctccatgcttcttgtcaaattgatcagacatctttgaagcatattctctttttgcctgtttgatctgttcatgatcaatgtgttcaattggctctcccctcgggtgaacaagcgacattttggtacggagcttccgtccaaagaataattgatcaggcgagtagccgttggatgtcgcattgggagtcgtccgataagaaaggagcgctttctcggcccaatctttgtcatttatcgaacacttcttcattgcccgcttgaacgtgtcgacgaatctttctgcctgtccgttcgattgtggatggtatggcggggtgaaagtgtgtttgatgccgaattctgtgcaaaatttggcaaaatcggcggatctaaattatgttccattgtctgacacaatttcttccgggactcccagtctgtaaatgatcgatcggaggaaaccaaccgtggcctgagaatttatgctcttcatttggcagacttcgggccattttgagtaggagtccaccataataaaatacataaatccgtcgtcgcatggaccagcaaaatcaatgtgaactctttctaagactttgcttgttggcgtccattgaccgagtgtgttttttgtcggatttttctgtgcgttttggcattcttcacaggatttgacggttttctcaatttccgaatccaatcctggccaataaatgtgacggcgtccgagcgctttcattcgcacaattcctggatgtgacaaatgtaaagccttcaatgctcgatcccgtagaattcctgggatgatgacgcgctgttggtacagcaaacaaccttccacttccacgatttcgtctcgtttcggaatgaatggagcgatgttcgggttgctgcatttgtttggccaaccattctttgacagtctcgaaatttctgagagaatttcgtctttagctgttgcatccgcaatctcagccgctgtcaatggcaattgatcaatttggacttggaatacactattgatgaagcattccgtttctgtgcaaatgtttgcaatcaaaatgtcttcttctggccttgggtaatttgcaattagccgggaaaggacgtcggcttggccaaatgcttctgtgttgacatatttgatgtcgaactcgtaatttgacaaaattaaggcccatctttgcagtcggctcgcggcataaattggtatgcccttcttggaaccaaagatggccagcagcggtttgtgatcggtgagcagagtgaattttctgccaaacaccattttgtgaaatttttgcactgcaaaaacgagtgccaaagcctctttctcgatttggctgtaattgcgttgtgcgctcgacagtgtgcacgatgcgtgttcgatcactttttctcttttgttggggaaaatgtggctaattgtcgcgccgattccatctttggaagcgtctgctgcgacgacaattggcaatgacgggtcgtaatgcgtgagtagcaattccgacgtcataatctcctttgccttttcgaaggctttctgttgttctgcctcccatttccaattttcatcctttttgagcagttggtccaatggcgcacgaatttggcatatttccttgatgaaacgaccataataatttaatgctccaaggaatgatcggagggtcgtcttctcatgcggtggcggcattttgcaaatggcttctgatcgttttgggtcagggcgaattccttctgaagaaatgatgtggcccaagaaaagcaattccttttgaagaaatttgcatttttccagttgaatgtggaggccatattcattgaatcgcgcgaaaagttggtaaagcgctgacacatgttcctccattgtctttgatgcaatgagcccatcatcaagataagcaaaaacgcctggaatgccactgcatatttggtccatcaaatgttgaaaaatcgatggtgccgatttgactccgaatggaatacgttgacattggaacaatcctcgatgcgtgttcagagcgcagagctgttttgattgttcgtcaagttccatttgtaaataagcgtcgcttaaatccaaatttgaaaagtatgctgctccgttgagtgccgcataaatgtcatcaggttttggcctttggcattgcttccttttggatgattgtcggcttagtgttaacttcttggaacattatttccctgggaataacttccagcgcgacaatccatggcattcccaataagtcatgtttgatggcatcactgacgtatgctgtgagcatttttggttcgtcgttgcccatgcttacaatgccgcaaaatttgcctttgatcggtactgcttctccgttg

SEQ ID NO: 2027 - DNA, 2147 bp, Heterodera glycines
atttgtaaataagcgtcgtttaaatccaaatttgaaaagtatgctgctccgttgagtgccgcataaatgtcatcaagtcgaggcaatggatggcgattgagttcgagtgcattatttaatcctgtagaaaaatcaatgcaaactcggggtttagccatttttctttttctctgccaagattggtgcagcccaatggctgaatttgattggcttaatcgcgccaagttgatgaagtcggtccaattcggcatctacggcttcgatggcgccgtgcgggattggcctcgctttgcaaaacacggattttgcatccgatttcaaaatcaaatgtgcctttgcctttttgcaatggtccaattcgttgctgaaaacatcagaaaaatctttctgaagtgccgaaatcagtgatttttcgtcttggatcactttggcctttggcattgcttccttttggatgattgtcggcttagtgttcacttcttgtaacattatttccctgggaataacttccagcgcgacaatccatggcattcccaataagtcatgtttgatggcatcactgacgtatgctgtgagcatttttggttcgtcgttgcccatgcttacgatgccgaaaaatttgccttttatcggtactgcttctccattgcagttccttgcttcaatgtcggcaggcgacaatttcggtttgccaattttgcaccacgttttgctggtgatgatggtggcttgagcaccagtgtcgacattaatccgtatttaacgccgttgactgcgatcaaaattcgccaataccagtgatcagcagttccaacctctgtgcaggttgtgttcacttcaattgtgagaactgatcggccttttctgatgaatggctggctgttctttagtgggcaaactttgtcgatgtgtcatttcttctgacacttgtggcaaattgcatcattgaatttgcattccgatcgccaatggcctaaaaacccacatgctggacatgggtcagtcggctgtcggtgtttgcctttgtccacatttttagaacaattctgttggttgtgactccgttgttcagttttgacaaaaggttttgactttccttttgagtccttccactgttgaggacgtgtgtgaattgcgtttgttgcggcgggttgtgccattagcgagagtgcgctttcttttaccatttggatggtccgcaactcttcttcaatttgcttcagtgtgatgtcggtgccgtttttctggccatcctccaacattttcaagcacttttgccgcaggtcgtgatgctcatctcgaagagcaatgaccaaaataatgcatttgagttgctcctttgtgaggctcaaattcgcattttcacaggacgcattgatttgtgcgatcaatgaagtgatgtcctgatttggctgttgtctgattttgaagcactcatagcgtctgacaaatagcgatcgtgtttcggcgtacaaacttttcaatttgtcgagagtgtccgcccatgaaatttgatcgggttgggtcggacttacgctgtctcggtatttgttgtagtcctcgtccgataatttccccaatagaagacggacttttgtcgcttcaggtaagtcttttccatcgtcctcgattagtgtgcgaaaacgtttgaaccattgttcaaatgtgtttccgctctccgcgtcgtaataaaatttcgaaattcgggcgtcaattgaactcgccaaattggcattgttgaggttgttgttcgctggcactgcatttccaagcagttgctgcatccttgtttcggattgcgtaagcacagcgttcaaaatttgttccaattgtgccgcgttcatgtcgaatttttgtcgaaaatttgttgaattttcaaaaccgcacccagcggaaacttacaccccccaggtgatcagtttttttaaatgtccgatgaaaaccgcacccagcggaaacttacaccccccaggtgatcagttttttaaaatgtccgatgaaagccgcttaggcttttgttgctgactgcgccaaattcgttgtgtccttacccaaaggaacgacaacaaatatagacaataaagtttattgaagaaacaaataaaaataataaattggtgacggagagaggcgaatatcgattggct

SEQ ID NO: 2028 - DNA, 3599 bp, Heterodera glycines
  unsure (1)..(3599): unsure at all n locations
ctgtgctcttacntctgctcaatcacaattatttcgtcatcgtcagtctcttcctcctcctcttccctccctttttgctccttctctctctgttcttcctcctccatttgcaattcgtccgttccgctgtcccttctttgcgtgatgttcagtccgttcgcaaataagctttcgcttgtcggttggtgctgcgtttctttttgcctttccttaacgacttgtccggcaggttcaaccaaattgctgtcttcactgtcctccggctcggaagattgattcagaaaatcgctttaattagggaaaaaaggttttcaggttccctttaacaaattgcactgactttttgtcggttagagtgtcctccctcgcctccttcctttccgtcgccctctcttcctcctcttctctgatgtgttcagtttcgctcttttcgttggacggaatcggcgactgcagcaagccgagcatttcagcgataagttcgctgcaacattcacagttaaaaatgccgtaataaaatgggtataatgctaattgaagttccaatgctttcaccgtgaactttggttggtgccagatcggtccaacacttcagcacatttatcggcagtcattggagggacacaagaatggacgatatttcggacatgagctgcctcttcttgtcagaattcgtcgatatgttttttcttaattggaattattgagttattttattttaaaactcaataaaaaacgttctaaccgattgttttcctcgccctctccgtttgatgggcccgccatttgttcgtcttcgttgccttccaaatagtcagccgatggttgcatttgctcactgtcatcaaattctaaagcaatgaaaatttagtaaggaataaatctgtagaccaaccaagtggaatttccattggcaattctttgtcaacggactcgatattttccttctcttcgagaagctccaactcattgtcatggacagaagtgctgaaatgcgaaacatttgtggactgaacaaagcccaacaaatcattttacccgctcggacccgcttcagtggaacaacgcttctctttcagtttgctaattcggtcttcttcaataattttggctgtgctgtttccgcccgcctgttgaacacgctgaaaagcgtcgtcgacagtgtaaaggaaccactttaaatcaaaattcaacaattgattcatataaattttctgaccttctctcccttggggtaactttcgcgtcgcatttcctcggcatgaaaaaattcgccactgataaggttcggttgtgattcaacttgaacttaaatttaacatcaaattggatatgtattactttaacaataccatcaaatgctgtccattcctctgggtttcggatataaacttccatttgcaatatgtcattaaatttaactctttttgctggcccataatttgacactgatggagaacgcttaagacaacttggcggcattgccattcttacattaataaccaaaaagcctaaattaattttttttgtttttttaacaggactccgggtgctgttgagcgaagcaggacaaaactcggtaatactatggcacccccacaaagtgtccaagccacgaaatgtccaaaagagtaaaaacccacgaaatgtccaaaatttttcaaaatttataaaaacaaaatgagtctaatttaggatttttaaggttttcggggtcgctgaatacgaatataccctttatattaccccttgcctaaccttaggcccatctgaataataaaaaactcaaattcgagacttggacatttcgtgggctggacattttgtgggtcagcgaatactataagatgggatcgacccatttccatactgccgtttccataccgccatttacataccgccgtttccgtaccagccatttccataccggccgttccatgccaccgtttccataccgccatttccatactaaggtatttaggccatttccataccaaaaatttttcgaaaattttcaggtaaaattcaataaatagataggtttcaactgtttgatgcttaatatgaattataaattcaatggattctcttttcaacgttatagattggaaaatggaagcaattctaacaaaaaagaaccgtaccaagcttcaacacaacggtcattcatacatttttcacaagccgagtgccgatggtgaagttcacttttgggcctgtgaacaccatcacgcaaaagacatcactttcaaagggcgccttcacactaacctcaacaacaacgttttgcgtgaagttggaaaccaccagtgtgaaccaagtgcagctcgaatggaagcacaacgagtgatcactggaatcaaacgccgtgcggaacaaacaatggaaccaccagcgacaattcgctcattggcactgcagaatgtggccacgccagtccttgcgcaactccctaccaagaatgcgatcaaaagtttttttttgttatgatatttttatgcttaggtaatcaagcgtgtacgtcatgaaataaacgcaccaccgccaattccaaacacgctcacagacttaatcatcccagacgcatacaaaatgtattcgcgtacggacgaacagagcgagcaatcatggctcttcccgacgaacttcctcccgtccttgactggtaaattgacaatctcagaaattgtttactatttattgttctttaattatttattaggttcatcatgaactacacgggtcgtcttaagcatgatgtaagcctaacacgcccgcgatttgacgcaaacatttggagtgtttacactcgaacaatgcaaggcgatgaccggacgaataaccattcagaagccgcgaacagacgcctgcaatgcgcatttgcctgttcacatccatcgatttggcatttcattgaccttttgcgaaaggatcaaaagttatccgatgatgacttcgcgaagtgttcaactggacaagaaccaccgcaaaaggcaaagaaatatcgcgaagcagaccgccgaattctcacgatggttcaaaattatttaccacttaacaacgtagacaccaacattttcccaattcatcagccttttaatcattagggcagcaacttttagtgacgaaaaatcccgaaatagttaactaaaatagtgacgaaaaagtgccaaaatagtgaaaaaagtccaaaatagtgacgaatagtgacataattttcagccaaaaattgagcaaaaataatttttattcactatttgcagttgcaaatgagtaggactgggatttttaagaccaaaaaacccaaaatagttacctaaaaaaatttttgccaagaaagtaaatttttgagaaaattttttttcatttcataggagtatattttgaaaaatttttgctcgattcttaggggtgtattttttttgaaaattttttaggtcgattctttggggtgtattttttggttttattgcatttttgttaaggaattttccaaaaaatgtcgaaatagtgaaaaaatagtgacaaaacgccaaaatagtgaaatgcgttttttgagctcctttcttcaaaacaattgagctaaaaaaacgtttttt

SEQ ID NO: 2029 - DNA, 1789 bp, Heterodera glycines
gtatttgcgcctaaaaatttatgtttgagtacttttagacataggcgcaaatctcggaggcgaaaagtctggatacggtagcgtcaagggataaggcccggtcaaaatagagagaaagtaccaaaaaaagatggaaattcattgctaaggtggcaaaatttgatttatttagcaaaatagttgttttttttcacaaatacaaattatagttttttttgtttttttttctgttactatttgtttcttttcttttttcggatctccttttttatctcttctgctatttaatgatactctgtaataattgcgatttaattatcttttgtcactttgtttttgcggcacatttttagatttggagccaatcttttaggaaaaaataggaattttatgggggtggatgagagaaaattggagaaatttaataaaattttttttttaaatatggtatttgactgtctctctctctctctctctctctcgagtacccttccgaatatataaaattgaaaacgtattagaaaaactccaaaattaagacaaagctttaaaaaaacattttttatttcaaaggatccgtccaaataaggacaaatctttaaaaataaggacattcccttcgcccattttaatttggtattttatcaatagattcgtgacgttatttttttttttgttaaattttgaaatttatttgaagcaatttatttctctttcagtttccttttttttttttcttttaaccgtaaaaataatgaattgattaattatacactaaattgatcattaaagtttcttttaaatattactattgaaatattccatttgtttaaaatgaaaaataggacacaataatgaaggagtttcctaaaaaacagagtcacttccaacaattaatattttattaatttacaatatttacataattttcttcttataaatttttaattaatattgttgctttaatttgtcagttaatttaaaaaaaattttcattatttaataataatgaaaattaaagaacaattaattgattttgcttgtataatccgacccaatattttgtaaaatgtaattaaatatttgggaccatcgtgtttgctaaataaaatactttaaaatgcaaaaattaaaatggaaaaataatccatttaataaagagagaaataaaaatattatatatttaaaacatatttatgtaaacttttattggctttgtccagattctagaaagttatttttcggactcgaaatttcatttccaataaatttgccggaacatttttcggcagatacggaaaaatatggatatagataaattttatgtttctttaatgaaacgcagtgttttctcatgagaaaaaaatggtttttgagcatttttatattaattttattttttaaaaaatgaaatgctttttgatgtcctcatttatacataagtaccattattagaaatactcaacataatttaatcattatatttttaaaagaatatttgtttacattttgtcgaattattattttttgtttattcatctttttctgtactttctgtatctctcgatattcatgtgaacttttttgctttgtccataaaataaaaattaaacgaataatttttaacaattattatttatttattttactttaattgcttattttgtaattaaaagcaataatttttacaaatttaatatcgttgttatattatacttttgaatttttcataaaattgctccgttaagaaacttaatttattttttcatcatttataattgaatatttc

SEQ ID NO: 2030 - DNA, 2044 bp, Heterodera glycines
aaaagctcaaaataaacgatagaaagggatcgtatccaatattttaatcgtcagcaaattttgaaaaataaataaatttttaaaacaacaggattattgttttcaataatcaagtgttttttccttaactttaaggtgtttaagctatctggcttgaaaaaaaaaattaaagtttgatccgattttggacatagcgcaaatgtctggacacggcggagagcaacccaaattcaggtgtttaaattttgaagatttgcttacaattcgtataaaaggcaactaatataattgcttaggttaagccaaggctttttacgcttcggcccaagcttaggctaggcctagacttaggcttggttggcttaagcttaggctttttttgtaatgtgtgaatccttttgtacgagttgccgccgccggaggggtctattgatttgtcagggagaggctttagccccctctaaagggaggctttatttttaaatccccctgaagccatcggtcaattgaaaattgggagaaatgtgaaaaacatttacttttgcaaattatcttgtgtccgttcattgcaaaaatggggcggagaagagaaaggacgaaaagaagtcattgaaaaaggcataaaaagcaaagcccaatgagcaggtgttcctacgtttatccgttggcccacccctcgggggaaaagcgcggcaaaaattcaaattgaaaattaaatttgaaaagtcaaaatgcagaaagtcagtcaccgcatttgttaatgaaaggtaaaaacttggatactttaaaaatgtcaaatgaaatttggtaaaagataaattgcaaatggaatttgatgtcaattcattgcatttgaaattagaaaaatggggcggagaatgaggggagggggaaacaaagcaaactcagaaaataaatttgcaaaattattgcattgactcgtcagcttttgaatgaattgaacacaaatcaggcgaggaggttggacaattttgtgtctatagggggtgggggttaattattcagaaaaattaaaaggattcgccccccacatccattaattagcaattttcgtgttattttttatcgaactaaaaggaaaaatttgttgtgtttcatctttagtcaatttataataaggaacacacacacacagacatatatcaatgctttatcttcttagtccaattcgtccacatccgaaatcaccgggccccacttggacgggtcgatctgcttccgacaaattgggcaagtctggaaaatgggaaatttcaaaaaaaaaggaactcatccgaaactcacgttgttacgcgccagccacggcttcaagcagtcggggtggaagatatgatcacagtccagcttcgccacagtctcatccagcacaaagtattccatgcaggtcgtacattgggttgcattttctatgtgtttgggcccgacctttgtagaaggcaatttgtcgatgtctgaaaaagtaaattttaaaaaacctttatgaaaggttgaccggaattggattcaaatcaaatgtaataattttattgttgtaaatccaccattttgtaccttcagggcgaagtgcccgcgtttgctgctgcgtcccgtcaaaagtgttgagaagagcagttagaacattgtcttacaatttgaaaataattaaaaaaggcatgggtgttttttacccaatccatgctcgccccaagcgtagtcctgcaaattgccatggatactaaaagatattatttacaattagtgtgggtcataagatatttggaatcgaaaatataaggttttcaaattctcctttcctttttttctggtaacgaggcctgcccgtgcatagaaggaatctcactgctccgactaaaccgggggggggggggaaggggggcgtaaagaggtgggggaggaggttcgcagcgaagtgggggtcgcaaattttggaaattttcttaacaaattcattaaaaatccaaaaaaaattcccggcggcgcctatcggcaccgccggaccccaaaaatgccaattttaaaaaaa

SEQ ID NO: 2031 - DNA, 2767 bp, Heterodera glycines
  unsure (1)..(2767): unsure at all n locations
ggaaatgcgccgaatgggttctcgtgcncctgcaaaacaaagcggcggcggcgtttgctgcggtgaatcggacgcggaacgctgagaatggtcttcctgaatatcgtcgatttcctggaaatttaattgttaaattaaaaaacacgattccctcctttaaaccacaaaacaacctcaatgatccctcgtggcaacgcccacaactgaaaagttgaattacacaaattaagtaatacagaaaaatgtcaagcatatatgaaaaaagaggggggggggggtcatagctcggtagcgccggaccatctttcattacaagcccaaaattgcaatttggtgattctaaataacacaattttccgatggctaaacccacttggcaaaaattcggattgaccctttccccctccttttttcatgtatgatgtcaactcgtaagttgatttgcctatcgaaactcaccgcactccgtcctcatagcgctccaatgctatgcatcggctgcgacatttgtgactggaattttggtaaaaaattataacgaaaattgacaattttaactgtttattttagctaaaacccctcttcaaaacaaaaagcaacaattttttttttgaacccgaaaggcccgcggttaagttattcaacagccaagccaaaaacaatgccccaaaaacaatcaactttttcaaaaaccttttagtccccatcgccctttcgcattgtccgacttaccaccaaaatgcaggcatcgagtgtgcttgtgattttgcgcgacaagtaatttgagtcaaaaacgctaaaaatgcattgaaatgagcttttgtgacaaatcaaaaatatcaaataaattgttgatcaacaattgtctcaccatacactcattccccattcagtgtattcggctctctcccgtcatttaaaagtcacacacaaatcaatcaataaaaatcaaatcaaatttttgcatttcttttcctctaattttttgctggggcattgaaatgatggcaagtcgttcgcgcccgtccctccgtccgccgcgtttggtcacatttttgtcgctgtcactcgcattcgcttttgccgccgccgacgatgtccccgccgttggtggttgcggtggcggacgcagcaacagtgccgccctccccatcagtggcggcgtcgttgtccatcattggcacgggcgacacagcgccggagtcgacggcaatcgcaaaaatgttgcaaacagctaaattgttggacttatttggtacaaaaaagcgaaaattttttgatttggaattattccgacaatacgaaaagtcaaatgaaatctgcccctccctaccggtcacggctttgctctcccaacggacaacgaaggaattgtcacaccgtcggtcccaaaagcacatggacgcaacgctaagacccgcacccgaaccctgaaggagaaggaaatgttcaattgtgccgtaaattcgtggtccccaaagtctgcgaaaccgatttccatttccatttgctcatttaaatccctccctttttaatttgtgttgcctcacgcagaaatcattagaaaaatggaatttgtttttaagacacattgtttttcgaattcagtggtcgctttttattggcattaacagatttttggttcttcatttaaaacaaaacaaaccgtttgcatcaaaattacacacacctaaacgaaaatggatgaatatcaaaatttgaaaacagttaaaagccaaaaaactcacgcaatatttatagggtttttgaagctggaccaatctggcggtgattttctaaatttgcgtccgttaagttcagttcctccccccgagaaaacacaaactcgcctcaacgacactttggttccattttacctgaaataacagggacttttatgactttacacccattatttggcacattctcattgccagactcacaatcagcctttgcgagttttatcattgctagtaaatgaaaacgctcaaatcgaaatcttttcagaaaatttagcatcgaaaactcaaaagaattgccaatctattctttttcctgtccaataattgacgaactttgatgagggggatttcacccaaatgaggggaaatagcaaaaaggacaacataaataaacctgtgaaagtaagcgacgcaaaattttcatggcaaaaacaaaaagcccaaatggcaattcatttttgtgtacacctcgcaaaggctgtgcccgaccaccaatcacaaaacaattttaagcgcaaaacgtactgcttcggtatgctgataggttgaggcaccgatcagatctaaaagggagagtgaggagttaaaaaacgaaattattggtgcctttagaatttgagtgcccaatttttcatacataaaaaatcaaagtttggcacaacactcactttcgaggacgtctttgcaaattgtgttcacttcttcctgtgttaggcactgcaaggacatgcttcaactacatcaaactgcttaaatatggtcgcaatttcaattgttcagaaagcaaataaattaacggaaatgcactaaaaatcatgaatgaaaaaaggcaatgacttattcttgctgtataaagtctactttcttgatatcactcgagcgcgtaaatgtctagagaatttagatgcttaggtctggaaaaagtacaattcttttttgtgttgccttaatgctttacaagagattcttcgatcgaatttatggcctaagaaaccgagagtggtcagttgattggattcataatt

SEQ ID NO: 2032 - DNA, 2062 bp, Heterodera glycines
tgaagccgtggctggcgcttaacaacgtgagtttcggatgaattcctccattttcttgaatttccatttttcagacatgcccaaattgtcggaagcagatcgacccgtccaagtggggcccgtgatttcggatgtggacgaattggactaagataaattggatgtctgtgtgttcataacataatattaatatcttttattcaaaattgtcatttattcaaaattgtcatatttattttcattttattacgcttataaaaaaatacgaaggggcaaactgttaatcgcctgaagaaagtaaaaccgaaaaaagaacattaaaataaatgattaggcatttctgaacgagacatgaaactttggcaccgggaagtttgagcaccagagggaggaatttcaaaaaattaaaataattaagtctgtaaatgttataaaatacttaaaatttaattaattttaacacccctatgcttaatattttttcttgaaaattgaaaaaattaagtatgggaacctggcaatcatatattttgtttattcttttaaacgtagggttagacgtgtactagtttctgttttgacttagacctgaatgcccggttattggcatagtatgaattgtaatgagtttagaaaaaataagcctggttaaaattgagtggatatccattaaaaacttttgattcctaacttaattaaatttactatgcttttaaattagatagttgcaatttctagacaagtaaaaacatttttattttttgaatccttaattggtgcccaaacttcccccgcgtcctgaacagattcggttattttaatttgccataattaaattggaaatttttggagattttcgaatttaaaataaaaaattctgttgtaatcgatgtttgttacaaataaaaaattcaaattgacatgcttaaaagaaatggaattaaaaattattcgattggcaatgcgacgatttgtcgggcactccgagagaattggaaactgaatggcgtttacgcattttaaagccccgatttaaatgtgttgaagggacacagagttaccgctgccattggcgaataaatttaaaaatgccgatttaaattcgaatatgtccaaatggatatcatattcgtgagcaacgaccccgaaaacctcataaaattgttctaaacaactttttaaataaatgttttttaaatatgggaccgacattcatgattgccaaatttttgcttatatttaacatgcaatgaggcaatcaacagtctcagcaaaaaaacaatgtctccagggtgcgtatggtaagtatgtttattgtcagttttaaaatatattaatattgttatgaacacacagacatgtcaatgctttatcttagtccaattcgtccacatccgaaatcacgggcgccacttggacgggtcgatatgcttctgacaatttgggcatgtctgaaaaagggaaattcaagaaaatggaggaattcatccgaaactcacgttgcgaagtggccgtgtctgctgctgcgtcccgtttaaagtgttgagaggagcagtgggaacatgccctcgcgtgcgaggaggattttgcatcggcggcgcaccaaacggttgctgctgctgtggtccataggcgccaaattgctgttggcgaggcgactgaggtggctgcggccacagcgtctgttgctgaaagaaaatacgcaataaaaaatagacgggaatgagttaaggaaaatcctcggcccatgcaaccgacacgtccaacattgaccacctgatgttcggtggcgtcatcgccgtcgccgttcagcgccacagcgtggtggcggcgtggcgattgaagtttgcagatacaaacatagagaaaaagggtgtctttttgtttttaaatcgtcaaatttgaaaaagccgaaaattcccacctcggaagttcaccgtttttggtttttttaaacgaacaaaataagacaatcatcacgaattgttgtccaggcgaaaaaaatgttaaaaatttggaaggcaaaaaatgcgctgaacccgaatgcgaactttggtcttgc

SEQ ID NO: 2033 - DNA, 1919 bp, Heterodera glycines
  unsure (1)..(1919): unsure at all n locations
gaaaacggccntggcccttttttaaaagctcaaattagcaggagggttagtcaattaaaaaggtcaatgatcaaatgtttatttttcactatccatgttcgcttcagcctctttttgtaagaaacaaacaatttgtataattttgagtagcagaaatcgtagtttcttttggcttcaattagtggtttgtgcggttcttacgcaatgagaacaaatgaacacaatggcaagtgaatgcggcgccgataaagacaatagtttttagttaaacggtattgacttcgtttatgaaatacggtatttcattgtatttttaattactgtgtttgggtaatatttcaatgcagtattttgattggtactttgcttgtatttcatggaaaatggtgtttttgttgtgtttataaatactgtattttgatgtgaaatacggtattttgagttttttaagggaagtttccccggcagtgcctatctaaagacagcaaaatccctttatttttttaaattgacccaaaagtgcttaaaaatggtcatttttggcaaaaataattgctattttttgccccacagtgcatatgaaaaaaattgggacttttatttattttatatacctatttggagtttttatacatatttacatatttcggaatctaatacatacatatttggtacatattttggactttttagcatttttttctaaattgagaatttttgataatttataaaaatttcatgtgaaaaattaaaaatgttaaaaatatgttcaaatttttttgatcgaataaagggaataatttacccttaaaatggcaaaaacacctcagattttcttggggcagattattccctttgtgccatcaaaaaaaccaatgcattaatttttaaaaaccgtactaattgtaatagagacccgggaggctctatttttcaacccacctcaaaagggggactttatttcagggggagggggctctaattcagtggggggctttatttttcaaccctaattttttcaaaagtccaacaaaaaatggcgattttttgaaaactttttactaaaaacaaaaaatttctacgggtttccgggttaattccaaaattcttgttcgttttggatgaaaatgatttttttgttggcagattcttgggacatgggagcacagcaacaggatgtaaatttcacaaaaatgctgatttttttattcacttcggagttgaaagggcctaaaaacccaaaatttgcccattctcgacagatgtaactaattaaacattggtttttgggccaagggttcagattcgattgcctgtaaattttttaaaaattatttttgggtttttttgagttcgggtcagggttcggaattgggcgaagtgaatgtcaaattcttgatcagtggtcccaaaaccctcgagaaacaattttaaaaatatttgcaggcaagtggattctaactcttggcccaaaaaaactgaaaattgcggattttgtgtatatttcttttcctatactttttcagaacagtgatattatccccatccaaaagaggctaaaatgtagaattgaagaagcgtatcgcccgaaatgaggcttccatttggaggttacacattttttagccaaacatttgaacgtgagtaaatttctttatgctaaaattaagaaaaaaaactaaagtaaaataaataaaacggaaaatgattaaaaaaaagtcatcaaatcttttctccacagtttcagcattaataacggcctctgaataattgggaaagcacgataaatattccacaaaataaaagtatagcagcagcaatcccaactgatcgctttcgacgtcgactccccattttcagtcctgaacagggctgggcaaagctcggctttgcactcgaagccaaagccgaaggcgaag

SEQ ID NO: 2034 - DNA, 631 bp, Heterodera glycines
aaaatggtgcgcaaccgatgcaatgtccctttgtttggccttctattgggtgcacttggccggtggacttgtcttttttgtccaaatacagtttctgaagtggggaaagatgatgacaattaacaaaaattcgggggttgatgatttaaaaagatgagaatggcggataaagtcgaggacaaatgggattgagtcctaccgtacattaataaatttgcaatattaataattagtgttatttgagtctcgactcatttgggtccaatttctgcctggaatttcgggtgtgccgggctcggaggcggcgcaattactgcggacattcgatcggttagcaccgagtcgacctcgtccaattcggcaaacagctcgaaagtttgggccgatcggtcactttgaggcagttcagtctcaaaaaaattcttccaaacagactgaacaacggcgccggagggcaccaaaccggtggcgaacaaaagcaaaatgggataatttggaaaaaaggggcgggggaaaagagggaaaagtgccatcgtgagagaaaaaaaagaggaattaaaactgaattaggaatatacaatacagcaaaagcaattattatatgaatattttaaataaaattatattataa

SEQ ID NO: 2035 - DNA, 10976 bp, Heterodera glycines
  unsure (1)..(10976): unsure at all n locations
atggtcgctgttaccggcgctcgtcaccccaacagatgctaggtgcggaccagcaaggttatattgggggtggtgagccaaatccaaaccaggctgttgaaggcgtagccagcgtacggcggtgaagaagcagaagagaaaaatgggcactacaacggtgtagtggagtgcgaggatcagtgcttgagcggcacgttgtaacgtgtcgctgtcgggccatgcgtactcgtcgggctggtacacggttagaagagcatcggcggccgctggctgaagcggctcggccgtctgaattccaccgtggaagtagtcagcgaccggtggtgttccgttgctgatcatttatgttttttttttgagagggagggtattggtatgctaatttagtttcttgcttctacaaatgaaaagtgatgctggagggtctattttctcatctttttatgcaatttttgaatcggtcacaatatgacggttgtaatcaatcatgattagttgatcgaattcgccaagacaaatcatttcaacgccgccctgcggtatctctctgttgaactgaaggcgtacacttgtggtgcccgagcggagcagttcaaagccacagctgtcgtccagcgtcgaggtcatcggtacgacaaagaaggtccatccgtctcggaactgctccagcgtgatgtccatggagcgttccgagtttgccatgcccaacgcctcgtacatgtcgacaaacgggcgtacgtaggcagctccgacgaagttcatacggtgagggatggcgggatacgtgtttccaccagcatgtacactgattgcacgtatgtcgtatggacggaagttgaacggtgtgtgggcgtaggcgccgttgaaggctcggttcgccacaagggcgatggtgagtcggcgtgggatggctgccgagaatatgttgtggtccatttccgtgcggccagcggtcagaaagcaggatttgacctccgtgcgtcgtacagcataggtggccggctgtttttcgagggtcttgtagatggagatgttgagcgacggctgcacctcgatgaccttcacgtacagtttgatgtcgtgcactcggagtgcgtacgaagtgccggcagccccggcgcccagactgtggaccaggaatgcgtccttggaacggtagatggtgaacaggacgtccatgttgttgagcaggtacagttcttggttgcccaagtcaaagtcgaggcgcgagataaactccgccttacaaccgcccgaaaatcgtgcacaccgtttcttgaacccatcatcatttgcgtcatcgtgtgtccggcttacgtagtagccgttggaagccatgaaatggctctttgcatttgcgggaaatgacagctcgttggagatgtacgctttgaacgggtacagtgtcccgctgtcgtacagctccatgttttgcacttcaacctgaatactgatgggtgcgtctgcgagggcttctgctgttacccacctttagttgttgtacaaatgtttgcccgatgctctggcatacgccgacttccttgtccaccacactgtcaattggctccatgatgccctgcgcatttgccttctcaacggacagttcgaggtacaggtacacacgggacaggtcggcccacaggctatcattgtacatgcggaataggtacggtccctcttggctgatcgttgacaatggaaggagttcgcgaaaaaaggagcgcgccaccgacacgttggtgggtggtaccgcaaaaatgttgagcgcactgttgaacgctagcgcactctgctgactgatgcgcttcgcacaagtcattgtgtgcgcgtatgttttttgtggctctcagtaggcgccgagtgtgtcaaagcggggcacacgtcgcggtcccttcttgtcgtcgctgttggcgggcgttttcacggtgcgggagcgcttgcggggtgttgagcccggttgttgtcggcggagtatgcgttccagagtttgaagctcctttttgtgttgcttagcaggtgccgttggcggacccattgtggaaaagaggcctttctttccactttttatgccctctttgggttcggctgcattctgtctgtatcgtttgaagtcgaagttgccgccaccgttctgtcgactcttggccacggtgtccgccgctttgtctagcagatttttgaggccgacgcggccctcgctgaccagcgactccttcaagttctgtccgtcgagcatgttggagagaacgcgtgcgccggactcgagcccttggcgcccaattgcggcgccagcctgtcgaccaattggcaacaggaagcggaagaagcttctgaacatggagccaagcccggcgccgcgctggtacggtaggccggagaaaacggggtaggtagtatggccaccaccaatcataagatagttgtgtgctgctgctgcggcctcggcggttcccataggtgtcgggatgctgttgagtccgtggcccgcgtcggcggggcccgagtgcacgattgcgtcgttttgggcgcatgtgaacatgggggtccagtcgactccgagcggatcaaagtctacgtgcatgttcgccaccgcttatcagacgatgtgttttttccgtcaaagagtgtactggtgttgctgttttatatagtctcggcagcgtcagcatcgttaaaaatgaattggcgtgtgaacgcagccaccagacggtccggtggcgttttgcagtttgtcaaatgcccaacaatttgggcaagggtccagccctggcagcgacggtacaagaagtagataacatgttttccgcacgcgctcgaccggtccgactgaacactcatggggcagcggttgacatgtgcaaaacggtgtaagaaggtgcgaatgccttcacttgtcggtggccagtccgcgaacgagtcaaagtagtcaacagtggtggacgacataatgtagacggccacccaatgtgtgcctggctccagcgccgtgtccgtgttcaacaccatgcaatagggatacgatgagcggngggctgggatttggtcggccggaaacagccgaggaagtgctcgcgggtcaaggcacagcgcctcaatatcttatttatttgtaggctattcatttgtctctctctctctcacacaatgttgggaaatggaacttttatgcgcgtaagtgtctataaacggaatacaaattcagaagtagggagtctttttgaaatgtaaagtcagtgtacaggttccatactggaatggcatcaatgcaccggacggggtccgtatctcgatctgaatatccgaaatctccttcaccatcagcttctggtattgggcagcggtgtagcattcttcaacaatctcatccggcatcccacggatgttgacaacgcgaagcacgggcgccacaacgtcgccgatgatcaacggctcgatgagtcccggagcgtagacgtagaaggtggagacgccgcccttcatgtccggcgggtacgctgacacgttgactgggtcggacagcgtggaggtgccgaagccgagtatgtaggccaattgggcggacaactccaccaggcgtatgcgccgcttgtccagcttcaggcgaaagcgttgcagatgttcgtcaaaattgaattggcaggccatgcgagtcctccggtaggaatgggtccacagctccaggccgacgggcaaatgtgcgttcagcattgcgcggtcgcgttccgtcaatgcttgcgccaggctttcctccaacatagtggcaaatagttgtttgtacaattcctgatgtcgttgcgtagcgtgcggctgtacgctcgttccgccagggaccgcggggatggtggtatggggggtttgcgccccaccacttattggcgtttttgttgttgtgggcgggggtggcacggtgacgttgcgggggcccgttctgttttgtctctcgcgctcggccgcctcctctgtagcccgctgacggtccgcttccttggaggcgcgttgttctgcccccttcacacagcgctggtactcggagtgaatggtgcgcagctggtccgccaactgttcactgccttcgcccaacgcgtggtgaaggctgtccaggagctgagctgggttccgaatgttggccgccggcaccgggatgcgaatgtgctcgccggtctgccactcgacgcgtacaaactggggctcgctggtgcccagggagggccacgagtgggggtagacgagcacggccaggccgacgctccactgcgcgttgaactgcagtttgcgtggtaaatggacacggaatgagttggtccggttcccgtccaccggcgtgtttgacggcagcaccacgtagaaggaggaggaggtgaatgcggcagttgacatttcctttgatgatgaaaggcatgtgtttgctgttgacccattttatatgattgtgtgggccggaatccagctgttgtgacgcgtgctgtagcctttccatttgacgaggcagcactcggtgccgtccttccggtaccgtcgctccagaatgcgttcaatggcgtacaccttgttgttgttgttgttgtcgatgccatcaggtagacgcttccgcgttttacgcttatcaatgctgcctctgcttctgatgctgctgtcgtccagcgagggtggaacaaccagtaccagacacatgtcgttggcgtagaacaagccggtgatgggttcaccgttcatgtcccgtagcttgtaggtgatgggtcgtctgcctgtgcacacccgatccacggtgaacacctcgtcagtgaaccgaggcaggtagcctttgcgaaaggcgcccctcgcacgctcaatacgcacatggtcaccggggcggaaccgcgcatgttgagaggcacgtccaccgcgctccgcctccgcacggtcggcgatccgctggcgcagcgactccgcattgtcgaagcacacttcattagggcgcatgccaaagatgctgctgttcggcgacgcgttcagggagctgacaatgcgttggatcacccgcgtccagcattgggtgccacggtgcgtgaagtaacggtacaggcgctctttgatgctgcggtttgcacgctccgccatcccagcgtgccacagtggcgatgtttccatgcagtggtgacgcacctccgcttcgtcgcgcaagtagcgttggacagcggaggcggtgaactcacggcccttgtccgtcaacagacgccacggcgtgtagccacagcgggcaaaggtgcgcttgagcgctgcgatcatgtcgtccgagcgcttgctcttgaccggctgcacatacacttgcctgctcagcgtgtctatgcacaccaacaggtaggcgtacccgcggttttgcgcgcggagacgttggaaatcggccaggtcggcctgccagtcggtgtgtagaccggaggccagagtcggcagacggcggaagcgtcgtcgcacttgtcggtgcagggtgtagacacgttggcccgccaagtagcggctgatctcagcgcgcgtaagacgggcgtccgggtgccggcgcttcgcctcccgcagcaggggctctacgctggtgaagcaagctggcgaccgttcgtccttgtaaatcgggtccaaaagactttccaccgtcagtgagcggacggcgttgcttccaatcaccataattgaggcttaaaacgtttggcagtggaatgctccacagtgttgggcttcctcttgctcgtcgcacttttttgaaccgatttatgtgcatgatgattaggctgtagtaggcggctcagggaaaagcggcccgcgccagttttcttttgtccgcgcagaggttggtggcgccgaggttgtccgcccactgttgacgctgaatcactgcccgccgccgccgccctttcatccggaaacagcagacgccacatttgaagatcgtcacgcgcattgttgacgaaggttttgtagcccggtggtgccttagcgacactggcggtgggggtggtagtggaggaccgcggctgctgctgctgctgatgacgacccacaaagtggtagcggagcagcgtgtcaaggttgctgccccggatggggcgataagcgccctgggcaaggtgcaaaatttgcttaccgtcttcaccgccgacgccaagcaagcctgggttctgttgcgcgtacgccatcgcggcatgtatacgcggctcagcttgcttaggcagatcgccaattttttgtggagcagcagtctgctgggggagcggttgttgttgctcgttactgctgctgctgctactttttgttggccttgtcgaagaagaggaagacgcgctcggcgcttggttttgatgctgtaagccccgtcgtctggacagaggtgtggtccgttgggggcgagctggcggcggcgtcgctgttgccggcgaagccttctgcagcacagtgtcacgcagtgcgtttgttgtccgttgcgatagctgtacgttgagcggtcgttccgcctcctcttccagcaatttctggtagcgtttgaactcctgttggtagtggatgaggcgttcgtcgtcgttcgtgtgcttgctcgatgccgccaccattttgcgtgccgtgtgctcaatgggagttgcgggcgtgggcaacttgttcatgcacgtggtagaagacgtcgccgccgctgcactggggttgtccatcagacgtcgataaacatcctcggggatgagtagcatgcgtacagtgtgcttcaacgtcattgtttcttcgtgggcaagcgtgcgtgtgggtgcctttcagctactattgctggttgtctcgaatacgcgttggacgagcacgggcaccagcacgctggcgagcaacccgaccagaggcggtatgccacgaccagtttgcgctgttgacggtgcgtgggcgttgagcagaaggcgacgggcggagcgtgtgctacgcaccctgctcagtgtgcggacgtcgctcgcacgctgtctgaggcgggccagatgacgccgttggatgggcacacgcgcgcgtaaaatgttcagtgcactctccacaaggcagagaagctgctcgctgctggctccggcgaccagcgcttggcaacggggaggcgatccgcgtgctgcctttagttgtcggaagaaatcaatgtggcgcctcacgtgttcgctaagcactggggggcgagacggggcgagcttgcggctgctggtcgtctttcctcgccagacccttcggtcctcttcttcaatgtgttgttgttgttggctccgcccctttcaattttttttcggtgtcgactgctgtttgctaattgctctaagcgtttgcattaaaattcgcgcgcgctcgtggcatgtacaccacgcacatttcccccgggtatatatgcgttttcaggcgcaactgttgctccgtggttgggttcatgtcgaccaacaggtagccaaacggttcggccgttgcgtcctcgtacgcttccaagaagtagcgtagcgccccgcccggaaacagttgtgcgccgaggttgcggatctgaagtgcgccggccgggttgcgcatcaacaccatgtagtgacagttgttgcgcgctatccgaagctcacgagtgaacagatgctgcgtgatgagcaccacgctgacgccccagttgtgggagccacgggtgaacaccgtgtccagaaagctgcagcgtagaccgcctgacatcaggtcgtccaacaccaacaggagccgtccgcccgcgtgcttcccgctccacatccctctcctcgggcgctccatggcacattctgatcgaatgttttccctccgtggtgttgctgtcacttgaagtggtggcggtgttctccatacgttgtagccggagcacattgtcgttcacttccccataacagtagagcacgccagtgatagggccttcactgaccatcaggtcaatgtgagaaagaaggcggtccacccactgcgatttcccgctaccggtgcatccggcgacgcacatggtgaacgggtgcttgaagaacattttcccttcttcggttttttgcgtccctctgtatttgcacacacacacatatatatataaatatgtagataaaaaatttcttcctccattctactaaacccccacccccaaaatggattcattcggaactgtcgcctggattctgcgaccaacggctcagacgacaggcactgctgtgggctcaatggagtacgaagaggaggaaaacgggacaggaaagttggtccacagtgtcacagctactgtcaccacacctaccaccgccgagtttagactggaaaaagaagccccctcctccgagaaggacggtgctgaagagggcagcggcggccacggcacactgctgttcatcgaatccgatgatggggaggaggaggaggaggatgaggacattgaagacacccccgtcgccacagactccccctcggctgcgacggcaaccgttgtggatgactcctccgacactgttaaaggggtggagcagcagcgctccagtgagcacagcgacgtgacggacggagcgggcggtggcggtggaagcgaaggcgcaaaactgctcggcggaggagaggaagaggaggtaggtggaggccagctaattttctacctcccccccccccctactgtttgtagcctgttcgaatgccgctgctcaactacctgtgcgcgttcaacgactgttcaatgaaggagcttcaactcctcttccacagtgtccacgcgcgacagcgtatggtgtcgcacctgcaacaacactgccgacttcatactgcgcatctgaaaccggcggagcgtaacattgcgctccactgtcacgacctcagcgtgcaaaacgcgaaccggacgttcgcctgcggtggctatctggagcttaccgtaattcgatgactgtgtagaccaataatggtgcggccttctgtccaggttcgacaatacttcttcgccaaacacgggctaaagctgaagcacccgtacatgccgtgcatgatcgagttcgggggcggcacgcacgcctcctactatccgtaagcggggggtacgcaaaaatgggggaagtgagcgtaaacgccttcagcctggagctcgtccatgtcgtgctggagcgtacgaagcgcgccaaacaggagacggtgaagcaagaagagccataccgtcgtgaatccggcgacgtggctccgacaaagtcgatggcaatgccggaacgacattgttgccgctgttgctgtcgatgcgctaacaactagctttttgagagacatggtcattgtagatttgcgcgcgtgatcacgtgacttattgtgctgttatagtgtttgtgcacttttttttaaataaatttgcaagcccatggatttgtagatgttgaatactatccgaaacagtacggtcacatttacattttgccaaaacaatcggccaactgctttttcgcccacagaattccgtgcgatggcaacgcatggcatctgtacggagtacgcgctgcgacgcttccctgccatcgtgttacgcattagaggctacaacagcggtgacgacgccgttcagcccaatggagtggccacagctctgctgtttcgcagcggacgtgtcgtcatgacaggtgtgcgcgctcccgcgtgtggtatttgctcgacagtcaacgtgatggcccatcgggtgcgccaccgggttggggcggcgctccgtggggctggactctcagccgctgcacgagccttacgcataggggaagtgagagtgcggaatctggtgagcagcgtacgcttgcccttccgagtgcacattgaacgtttgtacaactcgttgatgagccgacactcggcaattgaccaaaaccacgacgacaatgttctcgctgacacccaatttgtcggcgtacgcagctgccgtctggacttctgtgccttcccagcgctacgttgcacgctcagcatggcactttcagagtcacgtttgcgaggacaacaacaacaaccgcagatcgtggctccgccgatcgccgtcacttttctgctgtttgtcaacggccagctgattgtgaccggtgtacggagagtggagcacatcgacgaggccttacagaacatcgagacgatggtcaacagaagcacttacaggcgatagtcgaaactcccccacccccctcccccataaagtgcgaccacactttcacttatatttttgcgcataaatttaaaaaattatccaagtaccaaaaaatcaacatcatcatcatcatcatcatcagtgtcgctttcgtccgagagttccccatcttcggcttcctcctcctcagcatcgtcacggtcagcgtcgtcgtcgtcgtcgtcgtcgtcgtaccagccaaacggtctggtgaagtaggcatttccggcgccgccgccagcctcccgggcgtcaagcgcaacgaccagccctttggtgtacacgggctggtacagcttggtgccgcggcgcgtgaacacctcggcacgcttcgtacgcacgaagcgggtgcaggggacggccactcgctgctccgcgtcaggcatcctgttcgggggtagcatacacacacacacacacacacattccattgttatcccacccaccccctcgtgctcaccggccgaagaagttgagcactgacgcatgcgctcgaacgggagcagttggctggcggtgcaggtgagctccagcccgcgcaccttgcgctccgcacgttcgtccccgccgctcgcggcgcaccggtgccggaaaccgtagttcttagggccggcgctgaagaattggacaatgcgccggccgggccactcgcgcatcagctgcccgaacgcgtcgccctcggagcgtaggaattgttgctgttgcgggccgggtggtcgccgcgcgcgtacaaagtacacggagtcggtgtcgcagtacagcatgcggccgcccgccaaccgcacctcctccagccgcccgtgcagatggaggcgggcgtgcg

SEQ ID NO: 2036 - DNA, 1048 bp, Heterodera glycines
tgtggtaattagagggatttgtttcataatgcaattttcttatcacgtaaatttattgatccgttgtaaaaatgactatcttctgcgtattggtgacttaccttcgtcctttcctcatctcgatccttggcctgacattggaacagaataatgcgatatgcacctgaatgagcggtgattgtacccacaagtttcgagagggctcaaaggcggacgacgagtgccagtttttcctccatgagaggtcggcaccctctctctccctctctcgttacctatccctctctccttatgtccatccttcgtttatccctcttcccctttatccatccctcttcccatttctctctcttccatctcctcctctgtctctctcttccctctccctcccctgtcccactattcctcccaactctctccccctccctctctatctctgcccaccgattattgcgtttcgggcgccctttccctgcgcgtttcttatcatttgctcgttgatcccataactgtccaacagtgtccacacttgcttctccaactcgctgtgcttcagttcgccttcgtccgggttcagcgacagttgcaaatacgactcggggaatttgcagtcgctgagccaataaatgcgctgaaagaacggcgaaggaaggcatttaaaaaagggcaaaggacgcgacaaactctgagctcggaaatgttcgcgcgacgggagacgtccatttccaacatgcgactgatggaatgttgagcaaaagtggacactgacaatgagagagaaagtgcaaacgaaaagcatggctacggtaagtcgaaccgtaccgtattcagggatgtagaaagacccgtccaaaatgttacgcttcaaatcggacacagtttcgcctcgaaaaggggtcacgccgaccagcataaagtagaggagaatgcccttaagggggggggggggggggagggggaaatatttcgtttccccggagggatgagaaacgttcacatgccctccgctccctcccttttctgcactatgttatcttttctaattttg

SEQ ID NO: 2037 - DNA, 5557 bp, Heterodera glycines
cccccccccccccaccttttatgtccctgtggcaaatgccctttccgtgcaaatgggccaccgcagaaacaatttgtgctgcaatggccgaatgaatgaatgccttcccaaaatgtgcacccaaccgaccgaatatcggcttggccacctcctccgtcagctttcccgtctcgtgcacataagtgtacagttcgccccctccggcgtattccatcaccaaatacgtcttcaaaagtgtcctttcattccattcttgtgtattccctcccctgatcactttggacagtgtcgtgaccacttcgaagagtcgaattatgttcgggtggtgccttcaaaagtgtttttttattcgcttttccgccgatttcctcacattaattccatgttttccatttcgcgtgtcagcagtctctgaattatttattcctccgcttttcctttggcttttcctcccccttttccctttttaccaatgccttttggtccaatttgcttttctccatcacttttatggccactttttctgaatttgctttctcttctcagttcgtttgattggccttcccttcgtccgtacctttggtcaaaacgtgtacgcccaacttcacttttgagaagtttcccgcgcccaattctttgcccaatcggtaaaatccgattcgtttgcccagggcgatttccttcaaaatcctttcattaattaatcgctcgctgtgtttcatttgccaatggcactttttggaagtgcgggtcattggtcagctgatacagcgtccgttcgtacagcgactgcgattggtccgttgtgggggcgggcagcgattgggcactcgtcgtacgggagaacagcggcgagtcggtgccctcctcggaggaagtgcactggagagtgggagcctgaaaggacataaagtgaggcgaacgagcggggtgaaattaggcgaagaaagcgcggatttgggacgaattcgcaaagggacccaaccgaaggacctttgtgaatttggaacggaggaatgccagcggagaaggctcaaagtcggcacaattcgccttcgggtggtcccggcagagaagtgacggttccgctcccggaaacataaccatttccgatttcattcagtttggcaaaaaatagtgacttaaaatgattgggttggcaccgggagtaatgttttatagtccaaaatgaaagcctctttatttaagtggtccttgtgccgactgtgggggtgggaatgattggaatttgaaaggactgccgctgagggggtgggggataaaccgcgcgacccaaatgccaaattccacacaaatccaatcactaagcccaaatggaaagcgaaggctggagagattagcggtccaattcagaagctaatccgaaaagcgctaattgaatggaacaaacagcagcaacagaaaggaccgtcccccgctcggctccttctcctaaatcagcttaatcctttggcccggggcggaactttcagcggacaataaattggcacaataacaaatcaaaaatcactttgccgggagtctcgaggttcagcggaccttccgttggataagattaaaatttaatggggacgaaaaaaacagaactaaaatttacgagggattagcatccattggattaataaagggattgtataaacagaaactgctaaattgttaataagataatgttaattcatttttcgacctttcgcgtcgtccgccggggacaaaaagtgccggaatttcctttggccggcgaatcggtgccattttccgcactgtttgaggaaagagaggcgaaagacgaagtgagggaggacaattggcgagagggcggaggcacctgaacaaaaatcggaaaatgaaatggaaaaaggaaaaaacattaggctgtgggttttcggcaactgtggcggccaattccaaagcatttgcgatggttgtcgcagtgtttccgctgctgaacgcggccgaggccgccgcacttatggtggcctacagaaaaggacggaattactactgcagaggtcgaggaaaagtgccaaatagaaagagggaaaaagttgcccccggggggtggggaagaagcgcggtgtaggcaccgatcagagagagagagagaggggaaaaagccatgcaaatcaatgaacgatcggcagggcatttagaggccgataaggagtgatcattcagcttgtgtccttcccaatttggcctctctcaaccccttttgcttttgcgcttttcggtcgacctgtctgagcagactcggcatggcactgtgctgccgcatgtgccggtatcgctgctgctgctgcgaatgcctttgttccgtcgaattgtcttcgtcccctctctctccccctccctcttgcccttcccctctctctcggcctctctgctcttcttccgctctctccgtccctcccactctttctcctccctccctctcttcctcctcttcgtctcgcactttctctgccagagagtgtggctccgaatggactccgacaagtcgcaccttaaactcccccattcttttctgctgttttcctctttttggctacctgccctcgagttgcgtttttcgtgtttatttgtctctgaattcttcttcgcgttgcgccgcccggcggacgattcgtcggactgccgcaaagcgaagggcgcaggggcagcagagggacagctaaacaaagcaactcgacgtttttcccctcctcaaattgtccgtcccaaaaatgccttttttgttttcaccgtttgaatcgttcggcggaattgcgcccgaggcaaacgatggggacgaagtgccgtcggaagggggcgaggccattcgctacgttttcttacggggcacgctgaaacccttcacaatgattttgtcggttttagggatttgtttgcccccttaacccttttcacatccgccgttgggacaaatggggccaccactgtccccctgaggggataatctctcaaacggtgaggaagccccaggggattttgcggacagacacaattagccatattacacattacgcggcggcaaaaattcgatgaacggtgggggagggaaataatgggaggaaaaagagggagttgggagggggacaaaaagaaagtgcaaatcgatggtcggtgccttcttcgcatattcccctttttgtcgtcccatcaaaagcatttaattggccattttgcaagtgcttctcaatttttggccctccctttgtgatgctccaattttggcatccaaacgcgcaacggaaaagtccatgaataataaaaaaaagaagtttaattccaacattttattgtataatcataattagtacataattaagcgtccgatttcaaatgaataaattaaaaaaagaaacccctgaagagaagcaaaagtaaagacaacaataacaacgatgatatgcatttgtataaaaatttaaaatttttccatatcgaatcacagaatctgttcgttttttggcattttcatgccgacctttccgccggttgtaccaatcgttttggctcgtaaccataaagaaaagtggacaaaatgacaatggaagcacccaaagtgaaagtgagcgaaggaacgaagtctgccagaaacgcccacgagacgaaactgctcaaaagaatggacagagagacggcgaaaccctggagaaatcggaaaggaagtgcaaatgaaaggcaacagaaatggggagggacaccttcagaatgttgtccgcgtatttgacgacaagcgcaatcacaagcccaccgtaagcctacaaaagcaaaggcaaacaccgtaaccaaacccaccgtatacctgcagtgcaataaccgtccaaattatctgaatgtttggcaaaattacgaaaacacgaaaaacataagtcatgcccaattgtatccgtggaaaaagccccactgctgaagctgagcccagtcgtaaagcaaagtcattgcaaaggcaccaaaaatgctgaagaacgctgaaattggaaagtgaaaagggaaattgggaagaggacggaccaagctgcaaattgcgaacccaaagttggacttgcgaagtctttaggattttctccaaataaacgccggcaaatccgcttgagcaacaggcggccaaaatggcgaaaagtccgacgaatccatcgccggtcgatttttgcggcggattgtcagccccaaatgccttttcatcgacagcgagggacggactttcggcactttttgggagctttaatttcaaatgaaatttagcaatgatcgactcaaataaataaaaataaagagttggcatttccgttagcgaaatgcccgtgaacattccgactcacctggacaagcgcaacgccaaaagtaagcaaaatgagagacatccatttgattaggtccaactttttgtttaacatcgtaacggagaaaaaggccgtggtcagaattttcaattggtaagtgacctaaataaatgggagaacggttcgccaaacgcatcacttttgacttggtaagtggcggcgtccaatttggaaagggccaaaaacagcaaattgttttggacaacctgaaaaggagggaacggctgacaatggacgaaaggcgcaaccgttcacataaagtaacgctggcacgccgactttcagcgaatctctcccgtcaaaatcgtgcaacaaacggccaaaattccatttgttctgataccctaagacggagacacatgtgaaaaacttgactatttcggccatcaaaacggcagtcgacgacaaatatttgggcccgtcggagggatgcgatttttgggtctgcgaataacgcaaagtcagcacgagcgctgtcgtttgaccaatgagcacaatcagtgaaacccatttgagggcggaggaagatttagcagaggaaacggcagccataagtcaaaaggtgccgaaataaacactggaaatggtccacaaaattaattgttattctgtaaatttcaaaaggtatttcgaaattggaaatgacaccaattatttttggggtccataatttcatattaaatgcataattaatacactaaaacaaaaaaaaattgtgtaccaattgtcataaatcttcccgtaacatcacaaaatcaaaaatagtcaagtgttttttgtttgcttcgtcgtttttccgacgtctctgtcggccctttctctgaccatttcttcgttcttctcgttgatcatccgactgacttccgtatttaccttcgcttgtttgacagccgatgccttttttggtggagcaattgatttaaagccctaaattaaatcaaattttcatgttttcccaatgtaaggtgcctttttgggtcctcttgtcggtgcccccttttgcgcccgcttcattgatttttgttttgcccccgcaggtaaagtcgtcttctttttcattccgtgctgtgccatttgcgctgctttaactttgagaaatattttacagaatatcatatgttaaaatattttgtaaagaacatatgtaggtacttttcccattatgctgccacacccccaaaattttaaaa

SEQ ID NO: 2038 - DNA, 2543 bp, Heterodera glycines
ccctctttttttaaaattttggggtgtgagcgcataatggaaaagtacccccatagtaaattaaaaaagtgtatgctaatgctttaattgtacaataaaacaaaaacaaaaaactgctcaaatacacaaaaaaatgagagtctattcatctgctggcctccattttttcccgtaaaatcacttcctcctcaaattcgatcatataagcggtgcccatgtgccaatgggcagtgactttgcacgggaaattgctctcctaaaaagtaaaatacgaaggttcatttttaaattttttgtttcttttacagtcaaaaatgcttcaataattccagcaatgaaagcagcgcaattcaaagagcctttgtccttgggcagtgaaatgaatgtgttcacaatcggttctttttcgatcagaaaatctgcaaaataagttgcaattgtgttgttgttcccatatcattttcacaacatttcttcgggtcctcgttgctcctctccaatttgtccgcctcctgcccgaaaaggttcttccagacagggcctttcaagaacatcaaaatgtgcagcagtttaacatctcttttgtaccctttctgtaacaaatgtatttacataatccgtttgttttgctctttgcctctctgattgcgataagatccaaaagtcggacaccgacaaactttccgtatccagtcaatctatgaaagttaacggataaaattaaagtgcaaaagattatttttatttaacctttcctggagtccttgaattgtggtcactttattctgagcgtagcgaaccatttcgacaaaaagcaaagcgaatgtggaaagatttatctgacaattacaaaaaatgagtacgcattgaatttgttttattggtggtaaatcaaacactaaaaatcaacagggcgcagccaaacttttgtaacaattaaagcgttattgtttttgttcaatcgcaaatatgcgtcgccaaattgccccttccgaatccaatgtccctaattccaacttttccgagtcacccgcacagagtgacacggcatcgcaacgaccaacccacctcatgtttccctttgctcaatgatttgtccaaaatgccaactgttcgcacggcactgcttctcatcatgcgtttaaaacactaaaattacattagctgcttatgtataataatatacaaaaagtaatgcgacaaaacccattgttacgcttacatgaacaggtgtgaattaaataaaaaattatttacacggaagaaatgagcaaaatacaaacattaattattttgagttaataaagaatgagtatcataagaagggatcaaatgattaaagcacaaagatttttagcgcaaggcaacggaacatacgaaaattaaatttaggagctaagtttcgataaacgcaaaatcggattaccgcagttttttggtttttgaaaggcgaagtttaaaaacacggcgagcaaacgcgtagagctccaaatccaataaattcctttgccgaatttgtcccaattgtcggtcggtgggaattacatgggcggatttgcttctgttccacaaggccaggtcactgtcaaaactgaagaagacataaatgaatcgcaatttgttcttctcacgttagtccgaaagttttctcaaagagaaattgactttccgtcatattttccttaagaccgaagaaagcaaaatgacgcaaattgaacttggcactctcgagcataatgcgatcccgaacagtcgaatccatcgaagatgaattgtagcaatttatgagattcaagtcagataacattcgtgtttgcctaagaatcatcgaattacccgaataagaaaaaggaaagcaccgattaaacgccaaattatatgggcatgagaggaacctttaaaagaaatatcagaattattaatttaacaaattcaaactcgtccagtgaaatgtttctccatccgactttcgggtcaaaacacgccggcaattcctccggcgtcggtgaccgaccccgacagaaaagccgagctcgtccccaagtcgcaccccgctcggacacgtgagtaaattcagaaatgaaacggtcgatcggattgcgcaaaaaagtggtcagaaaaaaacgacgtttatggcgacttcctaaaaaacgcatgtcgttgtgctgcagtgcatttgcttaccttctatcgcactcagtttgttgctgacacaattcgaagcgaccaattcggtgtaatcggcgtgcaaattgcacgcccaaccggtcgaatagcgcgaaaacagccaaatgcgcccaatcagttgccgacattgacaattcttctttttcatctcaacacatcttaaaaacagtaaaagatcattcaaaggcaaagaaattgggagagaataatttaaaaacagaggcggaagaaataaagcccaaacactccaattaattgaatagctagctttaagcttacaaagttaaatgacatttacatcactggtattagtcacgtcaaattttcctaattaaatgcgttctctatccctaata

SEQ ID NO: 2039 - DNA, 1417 bp, Heterodera glycines
tcatccataccacctaatccatacccaactcatccatatacccaactcatccatacccaactcatccatagcacgatacgagtcgtcgccgtggcatttaatgccacgaccgagaccgcataatcaaaaatgtccacggccaagaccggcataatcaaaaatgtccacggccaagaccggcataatcaaaaatgtccacggccaagaccggcataatcaaaaatgtccacggccaagaccggcataatcaaaaatgtccacggccaagaccacataagcagaaaatgccatgacgatgactcgcagcattatggatgagttgggtctatggatgagttgggtttggatgagttgggggtgactcccaaaaatctgatcaaaatgttattctataattgttaaaaatgggattttttaattttcgcctaatttttcaggacttttttgcattttttcgtgcttttttggatttttttttgtgacttttttgcctttttatgactttttttgtgactttttggcgattttttatgactttaagtcgactttttgaaggttttaatgacttaaattcccagccctagtgatgatgatatcgaataagatgtttcaatttctataaatgcacaattattattaagtaaataatataggaaatttgtttaattctcttcgatatgttgcttcggtcgcttcccttcggccgctcctttcccccgtgtcttctgcgacggagtgcctcttcattcacgtgggctttcaatccatcgatgtttacaaacattgactacttgtgagtttcgctttagaggcctcacttcggaacagttcatgaagagcccaaccaatgagccggtgctcgaatatcgcaagggaagcgcggaaagcgacgctttggagaaggaactgcagaaactgtgggcagagcccatggaagtgccgttggccattggcggggagaagacatttcgcaaggaaaaagcaattagcgttagctcagcttcgaaatggactaaaacaatgggcgaatacggagaaaatcaccaaaaattcacacctaaaaatattcaatcggtctcacgttgtctgcacaaacatttgtttggagaaaagaatctcgattgtctcaatttttctgccgatgaggtgcctatcaaatgcttttttacctgtatcatttaatatggtgaatgattgcaacttccctcaaggaccgtgttgaggcttgtctcgagttgcctcgtctccacgacaatggcaatttaatggaacatttccgagctgaggcatcccaacaactctctaggtttttttcatttttaaaattcttcatttaacaatgtttattaaaatttttagttacgaaaaactattgaatgaagcgacttggatggttcagtacaacaaaattcccaga

SEQ ID NO: 2040 - DNA, 2013 bp, Heterodera glycines
acctggatcatttaatatggggaatgatggccacttccctcaaggaccgatgttttcgattgtctcgaggtgccactcctccactaatatggaaatttaatgcaacatttaatagctgtacggagtctcactacaaatctcaatgcttattgattttttatcactcttcatttaacaatgtctattaaaatttttagccacgaaaaactattgaatgaatttatttggagtgctcatgacaaactaattcccaaaagaccgaagaaatgcacagctgatccaaagtgcacggtttacgatgtcttttattgaaatagttagaataacctaaattttctctaatgcgatgcatgcctactgctgcaccgacatctgagcctttccctgatgaggaattgctcttttttgatgtcgaagtgtgcatgaaagacccacgactgaccaccctgacggttgcactttccactaccaaatggtagatctaataatatcccgttttgtacaagcaatcccctcaatatttaaaagctttcgtggaatgtttatgtggggagatggacgagtctcacttttcttttttgctaaggtattcttggtgcagtgaacggctagctgatccttcgactgaacttcctggacttgttctgcctgaacatctgatcccgatgggcgacctcggccagaaaagtcgattggtcatcggacacaacgtcgcttttgaccgtactttcatacgggagcagtactatcttcaagtgtgtttttccacctaacaattcggttttacattttttatttggttaggaaactgcgatgcgtttttgggacacaatgtccatgcacatcgcaatcggaggcatggccgaccaccagcgcgacctcttcaacaaaagcgacaatgtgcaaactttggccaaattgtgtttttcgaggcctggacaacctgaaggaggacccgaaattgcattggaagctctgacgaaacggcaattaagtcgcttgaaggaatttagagtttgtgtcttttgtaaaatttacatttctaaaagtattgaaaatttcaaaaattttagaaaattgtgcgggagtggaaaaaacgaacatgcaaaaattcacttgaagcaatttatacgaaatactgcagcagagaaaaggcgttgattcaagtgaaaaacaacaaaaaagaagaggaaaacgaagagaacgaagcggagaaagcgacggaatgcgaaacggagagcaaaaaacagagcgaatgggacaaacggatgcaaagtttcttcaaaacggccacaattgatcaaatccggtcgaatgtgcaggtgtgtccatcaccaatcttaatttcatgcttttcttctcaattaactacgacacgcctttaaaattttgaaggttcttttcgattattgcgcttccgatgtccaagcaactcaggcggtgtttcgcaagctttaccctatcttcaaaaacaggtattttctgtctcttttgcattttatctgtcccttagattcccccacccggtcactttctgtggaatgttggaaatgggcaatccatacttgccaataacaagtgatggtccattctttttttgctttttatctttgaatttaggtaattggcgtcattttttcgagaaatgtgagaaggaatcctccaatatgaaagacaaaacggcaaaagatttcgttggctgtgcccgaagtttaattgagcaattggacgaggaaattgaaaatggaattcggaagtaaaaaaaatagaaaaattggttcttcagctaattagccattaattaaccccaattaacaaaactgtcccctgcttcttctgaaaatggcccccaaatgccttccgcctgaactttcgttagaattcgtgcttttcatccctgttgaagatgccattccgaatgtgctctcgtcctgttgcctgctttacaatattttgcggccacgtgtcatcaaatgggaaaaggtatgccatgccagttttggccaaggaatt

SEQ ID NO: 2041 - DNA, 3900 bp, Heterodera glycines
tttttgaaaaaatattcaaaataattaaccttattttttccgtttaaaattttagtaaaaatttaattccaagtaatttttggaaaagcgatcagaaccccaccaatttttgcagacatatctccccagtacaggactcaattctcttgaaaatattccaatgctaatttataagggcgattttttgaaaaaatattcaaaataattaaccttattttttaggcttataattttagtaaaaatttaattccaagtaatttttggaaaagcgatcagaaccccaccaatttttgcagggatactccccagtacaggactaaattgtcttgaaaatatccaatgcaatttataagggcgattttttgaaaaactatttaaaataattagacaaattttttaggcttaatttaaaaaaaattttcgaacagtcagacagtttcgggaggatgaatccttcgggaatagatttgatattccctatactttatatctccccgttaggtctgtcccgcccaaacttggcatagtgccggaaatgggcgatttattgaaaaaatattcaaaataattaaccttgcttataattttagtaaaaatttaattccaagtaatttttggaaaagcgatcagaaccctaccaatttttgcagggatactccccagtacaggactcaattctcttgaaaatattccaatgctaatttataagggcgattttttgaaaaaatattcaaaataattaaccttattttttaggcttataattttagtaaaaatttaattccaagtaatttttggaaaagcgatcagaaccccaccaatttttgcagggatactccccagtacaggactcaattgtcttgaaaatattccaatgcaatttataagggcgattttttgaaaaaatatttaaaataattagacaaattttttaggcttaatttaaaaaaaattttcgaacagtcagacagtttcgggaggatgaatccttcgggaatagatttgatattccctatactttatatctccccgttaggtctgtcccgcccaaacttggcatagtgccggaaatgggcgatttattgaaaaaatattcaaaataattaaccttattttttaggcttataattttagtaaaaatttaattccaagtaatttttggaaaagcgatcagaaccccaccaatttttgcagggatactccccagtacaggactcaattctcttgaaaatattccaatgctaatttataagggcgattttttgaaaaaatattcaaaataattaaccttattttttaggcttataattttagtaaaaatttaattccaagtaatttttggaaaagcgatcagaaccccaccaatttttgcagggatactccccagtacaggactcaattctcttgaaaatattccaatgctaatttataagggcgattttttgaaaaaatattcaaaataattaaccttattttttaggcttataattttagtaaaaatttaattccaagtaatttttggaaaagcgatcagaaccccaccaatttttgcagggatactccccagtacaggactaaattgtcttgaaaatatccaatgcaatttataagggcgattttttgaaaaactatttaaaataattagacaaattttttaggcttaatttaaaaaaaattttcgaacagtcagacagtttcgggaggatgaatccttcgggaatagatttgatattccctatactttatatctccccgttaggtctgtcccgcccaaacttggcatagtgccggaaatgggcgatttattgaaaaaatattcaaaataattaaccttgcttataattttagtaaaaatttaattccaagtaatttttggaaaagcgatcagaaccccaccaatttttgcagggatactccccagtacaggactaaattgtcttgaaaatatccaatgcaatttataagggcgattttttgaaaaaatatttaaaataattagacaaattttttaggcttaatttaaaaaaaattttcgaacagtcagacagtttcgggaggatgaatccttcgggaatagatttgatattccctatactttatatctccccgttaggtctgtcccgcccaaacttggcatagtgccggaaatgggcgatttattgaaaaaatattcaaaataattaaccttattttttaggcttataattttagtaaaaatttaattccaagtaatttttggaaaagcgatcagaaccccaccaatttttgcagggatactccccagtacaggactcaattctcttgaaaatattccaatgctaatttataagggcgattttttgaaaaaatattcaaaataattaaccttattttttaggcttataattttagtaaaaatttaattccaagtaatttttggaaaagcgatcagaaccccaccaatttttgcagggatactccccagtacaggactaaattgtcttgaaaatatccaatgcaatttataagggcgattttttgaaaaactatttaaaataattagacaaattttttaggcttaatttaaaaaaaattttcgaacagtcagacagtttcgggaggatgaatccttcgggaatagatttgatattccctatactttatatctccccgttaggtctgtcccgcccaaacttggcatagtgccggaaatgggcgattttttgaaaaaatattcaaaataattaaccttattttttaggcttataattttagtaaaaatttaattccaagtaatttttggaaaagcgatcagaaccccaccaatttttgcagggatactccccagtacaggactaaattgtcttgaaaatatccaatgcaatttataagggcgattttttgaaaaaatatttaaaataattagacaaattttttaggcttaatttaaaaaaaattttcgaacagtcagacagtttcgggaggatgaatccttcgggaatagatttgatattccctatactttatatctccccgttaggtctgtcccgcccaaaattggcatagtgccggaaatgggcgattttttgaaaaaatatttaaaataattaaccttattttttaggcttataattttagtaaaaatttaattccaagtaatttttggaaaagcgatcagaaccccaccaatttttgcagggatactccccagtacaggactaaattgtcttgaaaatatccaatgcaatttataagggcgattttttgaaaaaatatttaaaataatcagacaaattttttaggcttaaattaaaaaattttttcgaacagtcagacagtttcgggaggatgaatccttcgggaatagatttgatattccctatactttatatctccccgttaggtctgtcccgcccaaacttggcatagtgccggaaatgggcgatttattgaaaaaatattcaaaataattaaccttattttttaggcttataattttaataaaaatttaattccaagtaatttttggaaaagcgatcagaaccccaccaatttttgcagggatactccccagtacaggactaaattgtcttgaaaatatccaatgcaatttataagggcgattttttgaaaaaatatttaaaataatcagacaaattttttaggcttaaattaaaaaattttttagaacagtcagacagtttcgggaggatgaatccttcgggaatagatttgatattccctatactttatatctccccgttaggtctgtcccgcccaaaattggcatagtgccggaaatgggcgattttttgaaaaaatatttaaaataattaaccttattttttaggcttataattttagtaaaaatttaattccaagtaatttttggaaaagcgatcagaaccccaccaatttttg

SEQ ID NO: 2042 - DNA, 2323 bp, Heterodera glycines
  unsure (1)..(2323): unsure at all n locations
ttttccattttacaaaaacaaaatcaaactatcatatttgttaagaaaagatatttatgcttaaatcgccaattactgggctcgtattttctttttgccagataaaacaataaaaaaatataaagtggggagtntaattttatctgtactgcttggtcttattgtattagtttttgttaaaataaaaaataatttgtttgctcacaatttgcaaccggcaaaaaagaaaaaaaagacctgatcaaaataaatggtcaattttgaagtaattataaaagcattttatgtaataaaatgattaaaaaaactataaaattaaaataattttacaattcccacttctttctccagcactttcactgttttttgtcattgtcaactttgacactactgaattattgaatttttacgccactttaactcttaggcaattaaatcttgccttttttgatgttttgtttaataaatgataactttggtttttgtaaaatcatcagtaggactgctaattttatgtaaatactttaaatactattcagaaaaattttttcataaatattccattaaataaatctctaaaaaatcctcccgtcttcatttattatcggaaaaatcaaaatttaatttccccattagtaaatttgcttcgactaattcccatttttttttgcaatttttaaatttaactctggcttttgacgaatatttccacattttacccgccagcgaaaaacgaacggagcggcaaaaccctcgccccgtcaaaccaatgccccagggaaaaagtgaaaggggcagcgaaccgccgccccgccagcgcaaaaagaaaaatcacgaaaaaatgttataatattttaaaaactgggttttatgatattaaatattaaatcattgcatcgcccaatgcactgaaacagcaaatttagtagcaaatgcataaaaaattacaaaattcaaccattaaaatttggattgatgggggtattcaatttaagttaaaaatttattttctgtaaattcttggaaaagcaaaaaagtttttgagaacttggggggaggaggtccagcggttccgataggcgccgccgtagaaaattttgaatatttaagggtgatttgttaacagattttcaccaaaaaatgacaaattttttgcgattttttgtcaatttgttaagaaaaaatgtgagttattttttggaagggcgatgggcggtgccattggcgctaaaattttaaacagattttcactgaaaattttcgatttttcggttaaatttagcaaaaattaatgattgttatgacaaaatgctaaaaatttgatttttttacataaaatgtacattttttacactcatacgcaaaaataccggtttccaattacatggaaatgaatacagttaaaattttctaagcacaaagccgaaatccgagtacgtacttggcatccaagtacgaatccgagccctgttataacacgtggtgagtcgaagtgcaaaaagtccgaatgagtgatgatcagaagaggcgggtcatttcagtaccgaataatattttaattaattaataacctgttttcgaaatccctagggggctggaaaattttttctagagaaaatggacaagctcactggaaagagcacaaaattctctactgatttgacttttgaataatggggctacgacttcttcataaaaagatatacttggttgaaaatttgatcaccataaaaatgatcaatttttgatcagcgtcataattttttctagaagcattcaaattaagcattcttggtatcatttgatagccctaagtgtcctctccaggaccccggcacatgcgacaaaaacattggggtgcttttaaatggtacatatatgaattttatcctttttctgtcaacactatccttggcctgttggttgtgctctggatttggctcttgggttcgggtcccccttatatgttgccgaaaattgaattaaaacaaaaaccctgggggtgttttaaataacaaatatataacatttgtcctttttctgacaacactatccttggtctgttggttgtactctgggtttggctcttgggttcggatcccctaacttgtgggtgaattaatcggattacatcctctcatgggtttggacccccgccatttattttttggataaaagggtttgcttaatttcttattatcggatatgaaataataaagttcaagaagtcttggtcttgtaccaaattttttggccttgactatgagggtgaaaggtttcccaaaaaattagctcataactaattttgcactatgggttttat

SEQ ID NO: 2043 - DNA, 3592 bp, Heterodera glycines
cattaataattttgataataacataactgggaccaatcaaaaatagaataaaaacttttttgagtattagagcttttgcttaatttcttattatcggatatgaataataaagttcagagagtcttggtcttgtaccaaatttttggccttgactatgagggtgaaggttttcgaaaaaatcagctcataactaaatttgcactattggttttattcactgcgggcgatgaacaacgaatgaaaaagttcgcgagggtagaattaggaacccaacccttgcgcatctttgtcatttccttccttgatcggtcagcggcgcacattttgctttcggcttcttaaccatatgttcataatgaaaaaagaatgtggaaacttttaccggtcaccgaagatgcgcaaaaatccggataaatttcgggtaatgcccattacaagggtcgtcgcaacaaaaatgtgttcttccgttgaaatttcgtatttttttccacccataatcacctaataaaatataatttgccacccaaattcaatgaaaacatgcctgaatgtagatggtcaagtaaaatataaagagcaaagccacgacagatgagtaaaaaatgtgccggaaaagggtggcaatgatcggtttgagaaaaacgggaaaaacatacaacggttgaccgtagccgaaggaagaccaaaggataagcagaaggccgagtatcattaacaccatagtgatgataaacacaaagccgatcaaactgaaagaacggtccacccattaaatgtaaaatccacgaaatgacgaggtttttgagtaaaggaaattgatgaaatggataattgacttaaatgaatatgccttacacctccctcctcccgataaaattgtcctcaatttttgattgagttcaaaatgaaggagagagtaaaataattaatagatagaaaaatgatttagatatttatgtagaaaataaaataaattttattaaaatttgaaaagaattaagcgaggaagcaattggtgtgccggtaatgtgattgtttttagcgctcgccgacgaatcgattggggcagtttcgcacagtgtggcctttcttttgacatcggaagcaaacgccttgtatttgttgggcattggcacctcgcgcgtaaaatgttcgtccgctgtttcggccggctgctgaagcatatgtgttctgtgctggaaatgcttgaaaatgggagggagagggggattgatttggctgattaatgggtcccgaagttttttgagtgaagtatggcaacttatttcccatataaaatccaaatgccgtgagcggctgcccatttggtccaacgagaatgttgttgtcacaattgtcaaatcggcctcgtatccctgtgtagagtcggcagtggtgacgatcacttcctcaatgctttcctcgttgcaccgctgagcaatgtcagcgtttgtccggcgtacaaacacaccacgcgaattgtgccttgtaaatttggaaccaaaatgtgtaaaagagcaattgtggcatcagtctgtcgtggattcgttgacgagaatgatgtttcctcctgctccatctgatcagtgatgtgcatgaacagcagcggcgaattttttacgggcaatttgaagttgctgttcttggttaaaagggtcatttcgtcctccgttcgtcctgcagcgattttttcccctttatcggcatatgtcccggcctcaatgcattttgtgatgaatgggtgcgatctgaatgaagttgtgagggttgttgagtcaaccgggagcgaattgtcaaagttgatgatggcggtgtcaagtccgaatccgtggtgcactgctggtggcaattccatcatgtttacgtgcaattggtacttgtcgccggtgaccaggacctttttgattgatctaaataaggagaggaaagacaaaagttgggaatagggcgctgtccggcttcatctaaaattatgtggctgacattttcaaaaatgggcgcaatttgttcgccaagtgaaagggtgcaaaagagtgcacgcctttttcaattccaagaaaaattttggcaaccgttccttcgtcagtctgtcggggatttgcggcacattgctccaaataccgtgacactttcttcttttcgagcccatctttaagagcttcttgaagatctgggccactcactgcggttgccaacaaatgctttgaaattttttggaggtgcacagcataccgatattttccgtttccgctgaaaagtgccaaaaggggaatttcagaacctgccttttgcaatgctttttgcatttcttcgcagagacgagcagttgcgatgttcaagggcgcaacacacagaactgtggcgtccggatcctcagaaagtatggccgccgcaattgtagctgaacaatacgtttttccggtccctggcggcgcctgcatgaagaccaatcgtcggatggggtccatcataaacagtgcggtttgttgttgtccttcgcatagagatgagagcgccgggtgccgttgcgtcaagctgtcccaagtgagtccttgaacaggcagtttttcgccaaggccgagcagtgcttgtccaattcgggcatcgtccatgtcgcctgaggcccaatctgaaaacgtgcggccaacaaatcgaaactcccttttgtttaatgagtccaacgactgcatgggccggaattcgccttcgtctcctccgtctcggatgcgcagaaagtcctcatacgcgtcgtattttttggcatcctgataagacatgaaaattttaatttttaaataaaatccggtttccaatttctcgcgccaattctcaatgataaaaccatgcccgcagggcttggctttatccgcttttgagagcttcatctgcagtggttgatcctcttcccatcgtttggcataatcaaccagttgcttctttgtctccagccattggtaaatccatgcagtgaacgagttcgtggtagaatgagtcacttctggcactgtactaattgtgaaatgggataatcggcttccaaacgatcggtgcacgctgaaattgctgctgccaaaacgccttcgctgaaacggatattgggaagggacgggggaaagggaaattcataattaaatggtgctttgttgagttcaacggccacaattggattaaagaccgatctttcgtcaccagaaaaaaatggacttttctctggcaaaatgtaaagttgtgaaactttgaaatttgaagggcgtgtgagttggactttgcctaccatgaccaccatgcctggctgaatttcctcatcgaattctgccccgaattgtcgtttgaaaagtcgttgataagggtggaggccagggctggcaaccacgatcgattgcatgcgtttctttttgttgtcgtaccgtacttcgatgacaattcctggctgatgagtgggctgctgtgggggattaggtgcgcagacagtaacgactgcttgagcattaattatccctttgtgaatccaaaatctggcatttcccccctctgaccctgacaattggcgaaaatcttcgcgccattcataacttacgaccctcacaaatca

SEQ ID NO: 2044 - DNA, 3038 bp, Heterodera glycines
  unsure (1)..(3038): unsure at all n locations
gacgggcggccgaccttttcagcgcgaggcgcttcctctgctcaatttggccggcctgcaagggaatgttgtggaggctgcgccaatttttactttccattctttttctttattctgaacgccaaaatgtcttttaacctgttttttagggaatactttaatcgagacgccgcactcccattctcctgtgcctcctacgggtgctgctgtgactctgtcctcgaccatttgctgaattaccacataaactttggtattttttggattttcatcttcttcgtctgaagcgaccggtttttcgaacccggagttcgcaaatcctgagttggcaaactcttcaccccctttcaatttgaaagcctcgaaaggcacaccctttcgggcactctcactctccttcaccgcttttggctcttttgagccaaaatcaccgccgcccgtctccgtcgtttcgacaatggcatagcagtccattggcacaattttctgcacgtgttcggattgttgtttttccgtcggttgttcgctgttctccgtcggttggtcttggcaatgttattcaacacttggcgaaatttcgcttgccggaacggaatgaggcgaggaatttggagatggaatttttgccggttttgttggcgctggatcattttccgtttgtggccgttttcgatgactctttttgggcataataggattagggaaggcggaatttggaattatttttgctaaattttagttttttgattgagagagatcagatatgaaatgaattatgatgatgaagaataagggaaaaggaaatgtaaaggaaggacaatttatggtcggaaaaacgtaataagcattaggaattgattagctggaaattgattcatcgatgtttggcgccgtcggtgcatcctgaaagagggaaaatgaaacattaaaattaattaaattgattaaaatcattatcaaaagtcctgatttgtaattgattaaaaatctgacctaaatctttttggtattgttattttgtttcggtccctaagggcacggccattaaaattctcattttcattaactggaaaatcgttcggatttgtttttaaagaaatggtttccgaatttgtaagaggagtttcctcgtttaaccccagattgaccggttcatcagtttgttttgcctccaatgcttgctgcggatgatcgtagccgggcaggtcgttcatctcctccgcatctgctttttgaagagtttcctgttcgtctttcggaagtgcaggaagggtgcatgccggacctgttatatcaaagcacttttttaattgattaatatgaactctttttggttttgattgagggattaaacagctaacaattgttgcatgcatcccttctatgcctatgacacggaatagccctttccacggtaagtggtattttttggatgttccaattttggcgcaataatttttgaaaagtacccgatcaccaattttaatatccaatcctctgacatttttgtcatactgtattttcatgcgtagttgagcctcgtggctttgttctgctgcacttttccaagcctttctcaaacaacttatcaatcgttgtttgaattcagactcgtctgttattgcaatcggatttgggactctagagtccaaaatttggtctactgcaaaaattggatcccttccaaaaacaagaaagaaaggactttccccggttgattcatgaactgaggtattataacagaaattagcaaagtctaaaaaatcatcaaaatgtgggtcctgaggtgaaatgtatttggccattatattatggaaggttctaaaggtccgttcagttatggcattgccttgtgagtaatgtggagtggcaaatttttggtttatgtaaagaagtgaacaaaattctttaaagaattcagaagtgaaagaagttgcctggtccgaaattaattcagtacatccgccgaattttaaataacaaaaaccagtgacctgagggaaatgggaatgtaaatgcgtgggggcgaattttgaattttaaaataaagaattcctgaatttaaatataaatttacggactgtgctgccaaattgtccttctcttcgtcagtaaaatcaggaggaaattcgccagttgaaagaaagtcaatatatgtggcggcttcgggatcgtctctttgttcatccaccaagttcacttcgtaagtgttgccatcagtgtgtctgaaagtgagggaattgatgaaaggattaagaattaatcgggatttaagagaaatggacaaacaaatcggaaattcaattatgtcctcaatttcctttaaattttcaacatctttaattggtatatcgtctgcggccctcgagagagcatcggctaatgtattttgtttacccgctatgtgaactattttaatttggtaattttggagttcaattagccaccttgctaaatgagggtgtgtttccgcctttttaagtaaataagccaagggtttgtggtcagtatgcaattggatttcgctcatgaaaatgaaaggtttaaattcccttagtgcataaattatggcacataattctatttgaacaggaggccaacgcctttctgaagccgaaagtgtcctactgcaataggaaattgcagaaaaagtattaatttcttcgtttttctgcatgagcactccaccaagcccaactgtggatgcatccgtaaatatgtggaagggtttagaataatccggaaagattaaatttggtgctgacataagtaaatttttgattttctcgaaagatttttgttgttgttcgccccattcgaaaatggttttgtgccgtgtcaatttgagaagtggttcaacaatggtggagaaattttttatgtgccttctgtaaaaaccaatttttcctaaaattcttttgacttctttgacatttttagggggttcaatatcttagatcaattcaattcgactcattgttggggtgtagccacgggagagctaatgtaaaaccaaggaannattaatttcttttacc

SEQ ID NO: 2045 - DNA, 3213 bp, Heterodera glycines
  unsure (1)..(3213): unsure at all n locations
catttttggaacagtctaagatgccatctacatatgctaaggagctatcatctaagccactaagcacaactgccattgccctcgagaaggcagctgtggcgttttttaagccgaaagggagatatttcatctgataaacattatcctctgttattaccccgcatttataagacgtttcatcgcctaatttaatttgtaaatagcccgaggcgaggtcaatagaactataaaaactacaatttcctttttttccatgatggcatccaatcttggtaatgggtatctgtcgggtactgtaacgtcattaagttttctaaaatctaagcaaggacggatcccaccatcctttttttgaactactacgaaaggggtcacccatggtgtatctgattcaaccataatttctgaggctaaaagctgatcaatgtgttttttgagttcctccctatatttataaggcattctaagagggggagaagaaataggttactcagttgtggtaagaaaattatgttccccgcctgtaaaagaacccaagtcgtattggctcttcgaaaagatgtcatcaaactcatttataagcgattttaacgcattaaggtcatctccttttaaattcgattttgaaaaatcgactttaaaagtaggatcaattttgagttttgtatttttatcgagcgacaaaatttgttccatcggacgttctgttaaaatgccatcattttcttgtaactcattaacaaaagctaagtgcatgcccttgtataataaaattggttcgctggtcggattaatgagggcaatgcgtattttaccctcgtgagggcacgagacagatggaattaggcctacattcgcttgaataagtttagactcgggattggtaactgttattgtattgattgatggaattatggcctcaatttgtgcatcaattaagttttggctgtttggtcctaaagtgcaatttttgagagctgcaattcttaaattctcaactaaattattataggatttccccaatggagtgctttttccattaataataagtttacgcgctgcaacgtcaaaagaaattacaggtaatttttcaaaggtgtccaatccgattaaaatttggtaattacgaatgtagttaaattcggaatcattcaaaaaatataatgttattttggttctgatacctaccaattcaaattcaacgtctgctttttctcggcataccatcagatgtccggatgcgctaattgcttcaagaaatgtcggttccactttgcatttgagctgatgtgcgatcgaacgtgggccaacagtgatgctcgatcctgagtccattaggcacctgactggtttatttgtacattgtaaaagattcggattattgtctgagttatttgttaaagtgttggaatgatcggaagggttatttaatggcttaatttgggtaaagatcagttcattatgaacactaaggcgttttgaggaatttgggccttttctaaagtgcgaaggtggtgcgttaccattagaagaatattgatttttgatcacaaagtaccatcgtaaaacaaaatcgacaaacaaaattattattaatactgtagcaattttccaaaaccaatcagaaaaatcaccaaggaatgtttcggttaatttctttttgatgtctatccattccttggcaggcataatcttggtaattgtttcttccttgtggatttggtaagaaatttggcttactttaactaaattattggcataagagtgggccaaaatgtcagtaacatttgcaattaccaggtgatgaaacgaataatggggaatttttggaatttcagcaatttcaaaatttagacttttaattgtattaatatttttaatatgtttcatgactgctgtgacttgatcaatagaataatattcgttgccaatgtgcagaatttgtttctaaattctacgcaaggggcttttcttgagtcaggaacaataatcatcgttatggtattcaaaaatgcatatttttcggttcccccaaccttaaatttcaatggaatatgttcaaaacattcattggcctggaaattgatatcctcgagaggaacaattaatctcttccaatttttgacataaggaggaaagggcgtgctcaaaagaaaattggaatgttttagaaatattccaacttaaaaatgaaagttcggactgcaattgtgagtccgtgatcagtccctcaaaagcccttttacttcgtgaagttttaattccactgttttgaattgttcggtgattctcgggttcctcttgatatccaaccgcaaaaccttggagagaaagggttaaaattttatcgcaattattgatttgttttgggtttggtgcaaattccagtaaaagtgggtcgtccattgctatccaaatattgtccataatgtgaccttttttaggtccccacgaaaggtactcacaatttttggtatctgagggctcccaaattatcagtgtgttgtcttctagaagacatttccctttctgatgagggcaatccgatgaatcccctaaaggagtgtgaataaatgattcaccaaatttggaagtgatttcagtttcaaataaataacaattttcattggattcatttttccaattccatgaaccgacgaaccatccccgtggggtgagatcaattttttgatttgtgtgccataatcctgactcatggattagagggcctattttacatgttttttgtttgaccatttggacacactcattataagacatttccagaacaattgggtcacgggtcttagaaataggaacaccagtgagagtcgtatatttttgaaccgtttttcttatttttcggcatgcccatgccttagttaaatgttcgaaaacgtttggatagtaaatccaataggtccgaaatattgggacttgtgagtgattcagtgaaatctgaggacatcctcgggttggaggaatagaccataacattcccatttgggaagtctggcataccatcggattaatcggcaataatgccataggagattttgaaggaatttttggtgaatttgatgacaccaaaggcaagaaaattgtgatcagacaaagaaatttggttaatttgggtccaatgccttcccaatttgttgttttggctttgcttttnaggtttggtgaattttcagaatggcctagacttgtgct

SEQ ID NO: 2046 - DNA, 1627 bp, Heterodera glycines
  unsure (1)..(1627): unsure at all n locations
ttgagtcgcgcatttttcgtcatcgtccatgtcgtcctatgctgcaatatatcttaaatttttctgaccatcggtcaaatgcaatcactgattcctctccaaacgcttcaagacctactgaagtgagtgcgaaaatcccttggagttcatcttcggccaatgcaggtgtattctgtggaggaacgttcagttgcggtgccatcgtgttggtgcgttgtgagccgactgactgtgtcgatgctttgctcacgccagtgcctttggttgtccccgttgttggattcacaatttgatccgtcaaagtcgtgatttgtgcctgtaaagttgaaatatttaaattaatatcagctgcattattattaattgcctcagtgttttgattagtgcgcctatttaatgtcctaactgctcggttcattccgtcttctaaccttaagacatccagatgggctctttcaacgtcattcactttcacttgggttttgccaacccaaaaattccgatcaatgaccgaaatgcttaggtcattttggtctccgccgctcattttcgtatatgtggctcaaaagccaaaaagataaaaatttgggaaaaataaagaaaattgggaggaatgtgagaagaacgctgggttgtccaatgtctttgatttgcttgaatgagagagcaattagttaaatgtttagcctttgttaatgttagtaagctgaagcaaatgaatggctggctatgtatggttcatctgttttttatttgctttctccctttcagttaatcctttcaacagttaatctgatcaagcgctaatggcgctaagaaatgagcggaagcgagaaataatcgcaaatttgtaaaatttaaagcgtgagaaatgcttaatgtaggccgctaatgctttttgttcgcttggcttgcttatgattgtgaacagcgattatgtaaaatttttctcttatgactgcctacggtgagaaaggaatggcgagcgaatgattgtaatggccgttgaaaggcaaaaaaaaattttcgttaaaatgtcatatgaatatgggcgtaatatgtaaatttgcatgccaacatttagattttgcttccatttgaatttggtttgcctaagacatgcttaaaatttgaagttggcctttctttatgttgttaaataatttgggccttgcctcttttttctttttttttttttgcgttttcaaaataaattagtttggcctttctttgtttctcataatgaattaatttggcctttctttttctcaaaataaattaatttggcctggcctttttggtttttctcaaaataaattatcggatccgtatatagctctcgtgagagcgccgcgcggcatattcattccaccattttccttttgttcgaagctcccatcctcagtaacgttgtcatcctgaaagggcagacaacaccaaccatccggtgctaccaatgagggaaagaggtgttgggccgagaggatgcgctgatggggggaattgaggaaagggcttggggaangggagagggaactaaagatcgaatgccgagggaaggtggcactaccgctcggttggtgagttcgaaaactatgtccaccccccaaacccatcctgactccga

SEQ ID NO: 2047 - DNA, 3523 bp, Heterodera glycines
ttcaaattttaattttcaaaacttgtttacattggcagcctaaaaatgtattccggcgctgggagacgtttaatgggttagccgacatttgcggaccgacttttgcggaccgacttttgcggaccgacatttgcggaccgacttttgcggaccgacttttgcggaccgacatttgcggaccgacttttgcggaccgacttttgcggaccgacatttgcggaccgacttttgcggaccgacttttgcggaccgacttttgcggaccgacttttgcggaccgacttttgcggaccgacttttgcggaccgacttttgcggaccgacatttgcggaccgacttttgcggaccgacatttgtgactaaaaaattatcaaaaaaaaagaaaaaaaaatttaaaatgaattttcaaataatttttcgtaatcaccaaattgaaataatgactgaagatgataatttaatagtgcttcttgctctaacaaataagctatgtcaatttcgacatacttttttttctttaatcggaaaatttacccacaactaaacgaatttattacatatagtttattaggcaaattgattaaaaaatgctttatacaaaaatcatatcacaaaatatatagcacgcaaaatttttcgtgtttcacctactagccttagtttaaagagcttagattttgatcaggcatacctaacaattaatatcaagaacaaataaaagatataaaaatatatatctttaaaaagcaaaattaaatgaattactcacattatcaatgacaatataattcttgtaaatcaggaatttataaactaatgcattgcacaagttgatcagatcactacttaaggatgatatgaagtgatcaaatttttagcaccaagaggaattgaaaaaagaactttttggaaaaactttataaatttttcatattttcattcgcattaacttgcttaactccgaaaaatcacatataaaattcaatattcagatgatcatccaatttaagaaaaaaaaatttttttaaattaaatccagaaatgatgacccgcaaaagtcggtccgcaaatgtcgcactacgcctcaaaaagtttctttgaaaaaggcgccgcaaaaaagttttttttatcttgttttatgttttttgactataaaaagttgtagaaaaattgcacttacgtgtttagtaatttcgcgttcttgagcgggcgaaaacatagttgtaattttatgcataaagattccgatttttccaattttttgcatatatttttgcattcggcatttttattatttaaaaacatatttattatctctctttttgtgtactaatttcatattacaagcggacccccaggatcccgcatcaaaaacccaatttgcagatctgaggtatacattaagggatgggagacgacgccctcaaaaaattttggcaattgaaaatcggcattccactggcttaaaaaaatttgggaaatctgctaccggaactccggctcatgtcggaaatcagaatgtccttgatttcatatatgtatgtaggagaaacgcaaatcaatgatttattattatttagcactaatttataattgttatggcacctcccgccgaaaaaaagaaaaagcattcctccgccgaccgccgtctcatttcttcaactaatgcaaatcaacagaaacagccgttgggttcgcttgtgacatcgtatggaaaacggcgaagtgttcgcgtggccgtgaaaaagaaccgacggtaatgaaattttgaaaattaccaatttgaaatttaattggttttccgcatttttagctgggtttgcaacgacattttgatggacattttccccctttttgatcgtctccaactcggcctcaaattggcactgatttctccacgtttcgatgcgctggtggacaaacattttgatggcacaaacgaattgacactttcgagaacaatcagaattttgaaaacgggagtaaaaaccaaactaactgtacttatggatagcaatctcaacaattttgtgcgatttccgttccccaacaagccgatgcccatcaaaattcgttttcatttacttcgaattgagtaagtcaaagaattattatttattggttttcagtgtcgcagagcccgattctgacatccatttcgacccaatttgaattctgaaaccagattcggacaaaaattcaacaacaatgatgaaacaaaatgcacgaaataaacggagaaaatgatttttaattttcatacttttgaacagcttttgtcgagaattacatttttgtccgaatccggatttgaattgagtaattgggtcgaaatggtgtcagaatctggttcgccgaccctaaaaaacttcaaaaaaaatttttttcgagacctgaggggggggggggggaccaccattactcttatcaaaaacattccttttcaggcacatagaccattttgtcgtcaccttccttcgttccaaccagcaaatttttgacaaaggcacagctttccgtttgtatgtgccattatcctataaacccagtgtgcagccaatttgggatgtttttgtgcgtgaaatttggcccatctttgcgaccaacattcgccatttgcacatttgcgatggccatcatttggacaattttcgtcgtctcatttcgcccacaattctcaccgatctcaatcaattgaattcaatcgattccgaatcggtctttcccgaagcgattattggtgattttgatggaccaaatgcaactgctggtcaaattctgtccaaatggttgcacactccgacaaatgatggccagccgaagcaattgaattgccgaaattattatcacgcatcaatgaccgtccacgaatggctccgcaatttcaaagaggtcaaaagaacactaatctgtttttaatctgccatattttcaattgtttaggcatttctccgtgccaccgcttctgcttgctaccaaattcgtcttgaactttctaagtcaacgcaaattgagcaatttgaactgaagaacgaacggatcggcgaaaagctgacagtggagaaaaagggcgaaaatggacatacttatagtgttgattggctgttaaagcgatgccaaattgggaagacggttcagtgggaggaagaaaagacgacgaacaatttgaacaatggtccactttatactttttggagcttcatccattgggtgagagtgccatcagtttcggaacaggacaaaattttgccgtgaaaattttaagtttcagtggcgaaattccggcgaattttagcggcgaaattttgcgtgtaacccaacagttttgtgatgtcgtcacatttaaattgcacttcattagtccgttgtctcaccagcgactgggtaaaatgaatgcaaaaagtcgacaggaaatgaatcccgggaccagcggccagcagtagaataaagcgaatgaattattgagacaggacaatgtccgataattatgaagtgggaaagtgatctgataattgctctcac

SEQ ID NO: 2048 - DNA, 5671 bp, Heterodera glycines
  unsure (1)..(5671): unsure at all n locations
tttcagtttacgcgcccaaattcatcatgatcatcctcattttcgggcgacacccagcattattattattttaatgaaaaagttttcctacttttgatccttcccccattaaaatggcaaatttttaatttgcgtgtggtcagtattaaccaatccgttcgatttccaaaaaatgtttttacaagtgaactcggcgattgctgctgatttcactaatggtgcagaagaatggacggcgccggaaaaatgcttttctttttttgatgggcggtgacattaaattattttcgcttgtaatatagaagaaagaattgcagaatttcttataaaaattagaatataagcagcgacaagccgtaagaataataagctcaatatatggaaatgctatagaaatttgctatagaaatggttaaataaaaccaaacttgcaaacgctgtaaaatgcgaacactgaagcattttttcagtttcaaaataaattacggtactcagccctcagcagtagaaataaggtaatgaattattgagaaaggacaatgtccgatatttatgagtggaaagtgatctgataattgctcctcacatttatttgttgcttctttcgttgcaatacatttacatacatttaatttgttttggtttttgcaaaaatggttttaaatcctcaaaaaatgccaaaaattgtgtaggcatgattcttaaaataaagtgccattggactaataaaagtcgattggcttataaagtgcaggatagtgaattttgcgagcaaaattttattctcgagttcgaaccgaaagtctcaaattgaaaaattttcgtatttttggttaagggtatgctctgccttacatcaagaaaataatttataattcataaatacgaacaaatattttcaaaccaaaaaaggaaatcaaaattcgaaaattatttttcggcattctgttcgaattcggggtgacgaaaagggtgatggattcgtgatcatcgccccaaaaaccctcggaaatatcttttcatgacttttgaaaacaaaagcaaattttcgaaaaatgggcccatagtattgccggttttttattcttaaaaaaggaacattttccaggtacataagactggaaaattggtgtcccggcaaaaataaatttaataattttcttttcgagttttctagtgtatctggggtttgttttcggaatcactgatcacgaatatgaccagggctcgcagatgaaaattttcaaaagcctcatttggcaagcaaaaaagcctcattttgggtcaaaaagcctcatttttacaaaatgtattctaaacacgcttaaaattttcaaatgatatatttttgattgtccatgatcaatttgagcaattttttgttcgaaataagcattttgtgaaattctgagcatgaaaaactgaagttgatttttttgcgacgctttttgctaagaaacctttttgaataaggggccggcggtgccgataggcgccgccgggaaaatttttgtgatttttaatacgatttgttaacagatttgtccacaaaaatggccaaattttgtgagtttaagtaaaattttttaagaaatttaggatttttagggtccggcgggagaaaaattgagaatttgtaccatatttttagcagattttcattgaaaaaattcttaatttttgggtttttttttggaaaaaattggttctattttcgttttgatgctctattaaaaacccaaattattaaataattgtcaaacattatgccaatttatcaaaatttaaaaagattctgaggattttccccaaaagcctcaaaaatcctcaaaatttctcaaaaagccatgaccttagtttttggccagttccgatcaaaattaatttactaaattatttgattatatatgattattagggctgccattttatgtaaaatagagtggtgaaaaaatggtgtgggaaaagtcggggtcgaagttaaaaacactagaggtgcgccatgactgaaaaaacccgtgaatcgtgaccgtgaattggttccgtgttgggaatttaagtcagatgacttttctgctgacgcggaatgccgtaaaattacttaaaaagggaggttcaaactatgcatttttgacttttttctactctaagcaaatttttgagattttttcgtgaattttagttgaccctttaaagactcgcgacttaaattgccagtcctactttttgttccggcccaaaaatacacagcacacttgcaatgaattttggtcgtctaaatttgactttttacccgaatccgatttcgtagttcgatataggtcggaactaaggtcagattcggattctgcgccccttaaaacccataaaacaaaaaaagagagagacaaaatgagaatggggtaaacccaactcatccatacccaactcatacatacccaactcatccatacccaactcatacatatacacaactcatccattgcacgatacgagtcgtcgccgtggcatttaatgccacgaccgagaccgcataatcaaaaatgtccacggccaagaccggcataatcaaaaatgtccacggccaagaccggcataatcaaaaatttccacggccaagaccacataagcagaaaaatgccatgccacgacgaagactcgcagcattatggatgagttgggtatggatgagttgggtctatggatgagttgggtatggatgagttgggtatggatgagttgggtatggatgagttgggtatggatgagttggggatgactcatgagaatggataaatttaagggacccatctctttttaaattttatagaatttttatacaaacaactgccaatatataggttttgaaaaagccccgaaaaatagcgaaaatgacttcgaatttctgaggaaaaattgttttacaaaaaagagcatcaattttttcatactttcttttctctaggggctggggaaaaagacaaaaattctatccctagtgactaaaattcaagattttgccagatttcccaaaaaatgccagaatacgtaaccaccgctgtctgctggtgctgagtttgctatcagtagcagggctgcacgcaagtggatttacaattacggaaatccgcaatccgcaattgcggcgattttctcagttgcggaaatccgcaatccgcaattacgggtgtccaaaaaccccgcaatttccgtaatttccgtaatccgcaatccgcaattaaaaaaaaattttttaaataattttaaattttattttaaaaaatcctataaatcttttaaagcaatttaaaagcatattaaaaagcaaatttataaaacaaaatcattcaattgagaaaccggttaaaagcaaattgtgatgaagaaacaaaagttttgcaagattttctggtaataaactctttcgcaagtcatctgaaattagaccggccgttgagaaaagcctctcactttctgaacttgttgcaggcggagaaagaaatttccgtacaacggcaccaatcattggccatttttgtgaattaacttcccagtataatgctggatcgaccctggatttaatttttggatcccgcaaatattcatttacttcaacttcggctttttgtcttgtctccaaggcagatggactgggggatgttgccttaaattaattattatgaggggtatataaagtttatttacagtattcagtattagaaaaaaattcattttataaaaaataatcttacaagaaatcgtctcgaaaaataatccaatagtcaaattacggatcaaaattgcggataaatcccaaaaatccgcaacccgcaatccgcaattacgggggtccaaaaatcccgcaatttccgtaatccgcaatccgcaattgcgtgcagccctgatgagtatagaatgtcataattgagacctcctatttatttattatttactgaaaaaattgaacttagaaaaagcaaaaaactaaattttgtaaaaaaaaacattacgcgaattttgctcatcaagaatttttgcacaatttttgtattctttccaaaatttttcgatttaagggagtccaaaattttaaaaccctgaaatatggaaaaatatggaaataaaaaggcatcatagaagcattaaaccaagctaaaaatacgaaaatttggagaatttttaatgatgcttaatatgaaatgacctttatttattaaaccggggtttaagcgtaaatttaaataaaataataacaaataaaagttgaattgcttttcgacgaggaatggtaaccattatagagaatttttttttttgctaaaatacgttaaaacattcataaactaaaaaataaattaaaaaaggcagtatataaaaataatttgctattagctgtaatcatcttatttatgagcacagttttagtggccgtatacacttccaaggagagcgccacggaattccgacggaaatgccaaaattcaattcattaaattgactgtattggcaacataaaatgattgattggcattaaattgttttgaggcaggagaaggattagaaaaaaatatagcaaggaagaagcatctctcaataataaattggcaaagaattagtaattaaatatcacgcgaattcgttaccgaaaaatacgtcagtgtaaaattcgtccgaatttataaaaaatataattcggtaacattttaagaattattgtataaaagatctatatagtaaaaaagcgtcaattgaatatttttggaaggttcagaaacatcaatgaaatttaaaaaattcaaatttgtaaatttgtcaatctcgattttaaaactcgagattcaagcggaggtggctgcgccgagaatctatataaaaagtgacttttttaattgattttttttaaacaaagtttgttctattcgggtggtgttcccccgagaatttgcattattttcgttttgcttttgtgtttttctcttcctctccatttccccactctttcattattgtatctgtctttcagccaaaattggcataataataggagggccaaaattggtatggcaaaacgagggccaaaataagcatgttggaaagctgaaattttgatttaaattccgaattgacaaatgcatatgaaggttttacccccccccccccttcccccttatctcgtgccaaaatatgagacacaagactaattcccgacgagaatttgtctccgacttttctttcccaaaagtcggggaaaaccatagatggcacacttgatgttggtcttttattcacacggacaatttaagcgaattacattgagataatgaaatgatagtaatgctctctttatgttggaaattnnnttnnnnnntnnntntttnnnnttntccnnnnngtgcnncntccccctggccctggttgnccnntctttgcnnnttcccctttcnnnnctgcgcnntggnngtgggnnggncctttttnnttttncntnttnttttnttctgcctttnntngtggggnnnnggcccgccgncggtggctccgncctgnttnnnnnnncccgnntttttcnnnntctncgcatgtaaaaagccttccggntttnnggnntttnngctttttttccctaaaataagtcttagcttttttgtcganagtattttttagaaattta

SEQ ID NO: 2049 - DNA, 2462 bp, Heterodera glycines
  unsure (1)..(2462): unsure at all n locations
tttttaatgattttttttaaacaaagtttgttctattcgggtggtgtcccccgagaaatttgcattattttcgttttgcttttgtgtttttctcttcctctccatttccccactctttcatgcaacatcccactggccctggttgaccaatctttgcaaattcccatttcaaaactgcgcaatggaagtgggaaggacatttttaattttacatattattttattctgcctttaatagtgaggaaaaggcccgcagacggtggctccgacctgattaaaaaaaccagaatttttcaaaatctaagaatgtagtaaaccttccggatttaaggaatttaagctttttttcgtttttaaattgtcgaagtattttttagaaatttactgtctcactgacgcattttctattgacgcattcaaagcatatgggcttttagggattcttttttgtcgatttatgcctgaaatttagagcccggaactgggatttaggtattgagtcgagatttcgctagaactcacaaaattctcaatgaaaaataatgaaaatttcctcaacaatttttcccttattatcattagggcttgccaaatatgaacaaaattcgataatcttaaacaaaattgtaacgtaaggccggggacagaagatttttttgtcgatttatgaattatttttcatgatttttctttgaaatttttcgagttagtgcgaaaacaaggcttaataccttaaatcatggttctatgctcaacagaattacacaatctttatgctcaattcagtcaccaaataagtttatcgaaatttcgacgggttctcttttccgattctttcaggctcgagtgcattttgggcgtccatcaatgacaatcctcagtttctttggccataactttttttctcttaattggtcatgcgtttctcaaacgaatgcttaaagtctggggaatttataaatacaaaaaaattgcaaaattgacattataaatacatgaaattccgcttttttctaatatattcaagaatatttttttgtctgttgtttttactagagtgccacgggaccgggaattttgggcaaacccgggaccgggaccttttcgggttgaaaacccgggaatttttggctgggaaaaccgggaaaaaaccgggactagtcccggtcccggtcaaaaccgggaccttggtactcagttgtactcaattgtccgctaccaggtcccggtcccgtggcactctagtttttacccagaattaaattaaggagaaatttctataggctttaagcttcattgttaccaacaatgtaggcattgaccaagtgagaaaaaaaagttatggccaaaaaaactgaatatggcgccattgattaaacacctaaagtgcacttgggcctcctttgcatttatccatcattttccgtgttttctgatgcccatttcatccacattgcttccaaatatttgtcaaaactgtgtcgaagtaatccttggaatcccatgacggtttatgcttaataaccctagtgatacggtaccaacgaacaatgtgcgtatcgggaacagacaccctttagtaccgtattatagcggcgacgaaaaaacaaaagcatcaaatgtgctaaaaaaattcgatccctgacgattactgtactattacaaatgctgcgtcactgagtattgtaccgtctcaacaatagctgctgtacttgttgtataacaagagtacagtaacatcacacaccttgtgatctggtaagtaccgtaccacctataccatacgctttgacaaatgagtgaaaaatcaccttcataaacttcatcacttaatttctggttgtccggttttttgctcgccacttgtataaacagttcttcagcttgaaatgtaggtttggctaaatttaattttattaattttccaaataatttttaatgagtttaaagagctaaatttattttaattaccggcagtttttctgtatttcaacaattcgttccaatttagcaatttaagtttttgtggctcaacatcgacaaaattttctaattcaaatccaaaatttaaatttgaaattttgcccagtgcactaatgacatcaattagcgtaagaattgtgccgctcatttcaaaaattggcttcacagccgaagcaactccattatgcactcggaacaaaaactcataaaccatgtccaaatatgagcgaaattttttgcattccacattttcctcatactgtaccaatgctgagtcattactgtaattgggttaattgatcattagcaaaggctaatatttgaagctgctaaaagtgcccagggcaaaagattggttgctaagattttctgccatcaaattgctacaaaatcacggaattcctaacccaaaaatgaccataatattcgttttatgccttgnttnacgtcatttnnctgcgcgtttttgtcgctgctgc

SEQ ID NO: 2050 - DNA, 847 bp, Heterodera glycines
ctcaagtattttttaccttgggttcatattttcgacctactatttactttattttttgcacgaaaatagtcacaatccttagatttttcgtccattttaaatggtcttattttgcaaatttagaattattcttattatattaatttcaccacgctttccacttcgtagtttagcaaatgcaaaatgagttcgtcctttttctcgccataatttttgttagcatcggcattttttgatgccgatttcgatgatgatgatgatgatgatgaaaatgatggtgatggtgatggtgctaaggtcaatgaggataatgatgatgatgataatgatgatgatgtttgtgccatatccatgccaaataactgtccattgccagtcagaaatattttctgctccatttcattttgttccatttttgtcgcattttcttttgctttattatacattttcttcatgattttttcaaacttggcacgtgcttctgctaagttcttttcttctaaaatggcaacaaacagttttttctaggacatagtaatgtcggcgctagttaaaaagttgtcctttttgaaaattttttcactttttttccatgtaattttattttataaatgataattttttaaattcattttagcaaatggttaaagtttcaaggtattctattaatgattccaacaatctgccgttcatcgcttttccaacattggacgatataaatttgagatggcttttttcccaaaactctgaagagattttacaatttttggcacacagcggacttattcaaaataaatgtttatgccataattgttggaactatatggctctgacaaaacgtagccaa

SEQ ID NO: 2051 - DNA, 1014 bp, Heterodera glycines
atttccgggctctttttaccgtctgaaccattcgaataatcttagtcgcccttttaatgcatcccgccagcccctaaaaatttctttttcaaaatgtcaggtattttttcttttttggaaatttaattggaattttttcaaatttctaagaatccgcaatcctgcgtgggatcctgaaatttaaaatgcaggattgcaggatttgcaggattaatccggccgggtccggtcctgcaaaaatttttgaattccaatcctgcaacaggatccgcaaatttgaaatttccaggctcttattaacactgagctttattgatgcaaaaataaaaacaaatagatttttaattagaaagagaaaaaaataaactcgccaaaatttcgtttttgattgattggcacaacaaaatcatatgaaaaatcgcatgccaccatttccacattttcaagtttttgcctccatttttaggctcggcgacacttttgagatacataaaagcatcattgtcatttaaaaaaattaaatggaatttctctcattaaaagtactcaaaatgaaaattcacacattttcaatgtggaattttatgggcattcaaaaaagcagcactttatagcaacaatggtgcagattttttaatgaaaataagaaaattagtcattttcgttgtgcttacccaaatttaatcaaataaatttatattgcaacaatggttgcacagttatctcacaaggaaaagtaataatgaataattgttaggaaaatgttgttcatgttgtatgtcccaaactcaaaactagggttcgagccccgcccccgtccccggggatgggacaggttttttggcctcacccccgcccccgtgactcagacccgcgcaatccccgcccccgcgaccttcgcccccgcgggtggcgcggggtgaaaatacaccccctaagaatgacatagtcgtgggataaaatgcaaaaaatttgtacaattttgaattttttttttaacattgaaaaattttt

SEQ ID NO: 2052 - DNA, 6846 bp, Heterodera glycines
gggacaacagtcacaaaagtgcttgcagtttggccaatgcaatcggaccacagtgaatcagggagagcaggttgaactttatttttattttgtttttatattttcttttgttgtataggcgcatgcagccttgaggaagagcaccgattggtgaacactgttcgctcgttgatccgcattaagaatccgaatgatcgactttgtttggccagagctgtgttgtttggtcttcacgattggcgttcacggtcaccaggcggaggcggaccgacagcattcaaaagtttcgcaaatcgccagcacacccacgggcctgatgcacgtaacttattgagacgtgccgcaattccccgcaataaacataagtacacaattgatgacgtccaaaaagtacaagattggattgatcaacaatacgggccaggagaaattcgaattgcagtttttgagaaggaacgtgagtaccgaattgtgttcaaggcagcatccggcgaggcagccaagttcaacttgtgtcttttgttcgaaaatcaacacttcaactacattggtcgaattgagcaactgtttcgtgtgcaaggatattgtattgattgtgaacgtcgcgtgacacgctggtaccacccgcaggaatgcaaagtcgtctgccgtctgtgtttacgttttggcgcagggtatccatgtaaacaacaacaataacagcaaccctagcagatgggtcaactggcaatcgtctttgccgtgattgtcaattcgtttttccaaatgacgactgcttcgcctatcatctgagcaatcaggcacccgcaagcatgtataatcagggaggacgcacttttcgcccaatatgtgaatggagaagagcatgccgacaatgtggagccataacctatgcgaattatccacataaatgtccagcccaaattggccaaacggaatgggtgcgctgtgtacgatgctctggaccccatcaaagtggagacccttgttttattcagctctcaaagatgatcctatgaggaggaaaaggagaagaagagggcaacagcatatagctttctaggcaaattctatatgctgtgcgtattgcaataaaatcgctgttttgcaatttggattggtgacaacggctccgggacaatcggacagtggacaatcggacagtggacaatcggacagttggacaatcggacagtgaggacaatcggacagaggtggacaatcggacagtggacaatccgacagtcaaatatacaaatagataagaaaatgccggtcgccgaaagggaccgattttgccatatcaagaaaaaaaaggaaaataggcaaataaattaattattttttgcgaatgacctagaaaatgtaaatgatgtgaaaatgcgatgataaaaatgtttgccaaattacttgcaagtaaaaatgaccattctcgtgcactgcacaaattaacacttccttttccttcgaaaattttcatttattccctcaaaaaatgtattcctcatcttccgaagaaggcgaaattcacgagcatccacagccaaatcccccagttcaagaatttcatccaaatccacaagcccatgaccccctcccgaaccttcaaccaaatgaaaaaatgttttttgttgctgaaacaacacagcaccgagttgttcttttggcggacggctttgagtacaactttgaagccgatagtcgaatggcggatggtgagattctttggcttttctggcaattttggcttagggattgagatttatcgctgtgtacaccgaaatccctactgtcctgggcgtatacatgtacgtggggctgtacatcataatgccgctggacgaccatacaaaattggaattgtaaaaaatggcaatcacaatcatccggcttctcatgaaactgttcgagtggcacaaatgactttgaggacatcggctgaagcagcaaatccaatgtcaacgcgtcaagctgttgacaataccagagcaagcataccagaaggggtacgagctgcgcttgcaccatcttcttccgcaatggggcggtcctatcgtcgtgaagttgccaggcaacgagcagacgcaggtgacaatttgttggatgcgcaggatcccgacgcaattgtcattggacaaattcttcaaccaattacaatttttgatggatatgttgagggccagagggtaattgtgtttatgtcggaatttggccgaaacatggttcaacaatatggacagcacttgtcgattgatggcacgtttaaagttggtatcccggtttaaaaatttggtccacgttttttaaaaataggtggcacctactccgttttcgcagctttataacgtttcggttattattgattttgctgctgtcccatgtgcatatgctttactaaattccaaaacggcacagcattatcgaagcgtaaacttaagtttagttattttattccatataattttaggtttttgcggccatcaaaaataccatcccgggttgggctcccgtctccatcatgtcagactttgaacagtctgctattgcggcagtaagaggggaattccctcaggcaacacacagtggctgcctgtttcattttgctcaatccctttacaaaaaagttcaaacattaccgcatttgaacacactttttttggcggcaaaccaagagggccatcagacaaaaactcttatcaaaagtcttataagcttggcattcacacccccgggagagccactatacaattatttttgtgcggttattcaccagtttgatcatcatcctgacgtcgaaggtcctaaaagttaatgaaattcctcattgttcgtttatagcattggtccagtattttgttatgaattggattgggtgtaaccgtgtttggcaacttgaacccattccaattgaagaagacccggatttgggtgcttatgggcatgttgacgagtgggtgcgaaatcggatccaaaaccatggcttacaagcaaggaatgcaacttttccacaggaaatgtggaatatgagtgaaaggtcgaaataaaaaaataataaaaaatatattaaaattaaatattgtcagagttgaacaaaatgttatgaggacaaataacagcatagaaggatggcatcaatctttcaacagccaatttcgttttcttcatccaccattaagctattttgtcaaaaagatgaaagcagaagatagtcattggaatttggttgttcaagatttcaacaataacccgcagaacggcattcgtgggcggggaatggcaagaaagaatgtttatgttcaacaagacgaagcgatccgtgctatttttttagaccgagccaaccgtccctttttggcctacctacgcgcaatcgcttacagaatgcctgacccaaactaatttagaaagaaataatgttttagataacattcgtactttttttcgcattcatacaaaacttagcttttttaaaactttaatttactgtccgattgtccactgtccgattgtccacctctgtccgattgtcctcactgtccgattgtccaactgtccgattgtccactgtccgattgtccactgtccgattgtccagtcacggtgacaacctttgtagatatttttatccgtttacactaatatagcctttcttggcaaattctaaatgctgtgggtattgcaatacctagaagcatgaactcaatgttgccaaactagatcggaggaagcctcgcaatcttctgaaaatagttgatttctacattttctagtatgtcatcgtaacaaatagaaatactgatgcattgtagacgcattcgatgccaaaattcagcccatctacgtgtgcagaaagtcaaccttcctttctgtaccatgtttttgtttcgaaaatatttccaattttgtttatgatgaaatagacaatttacaaaattatagaaatattagcaccactacagtaccacaaaattctttcgtaaaacacccgatcaactgaaaagtctgatcgctagaatatgtagctttgtgccatatgagagaaatatgaaataatggtatgagggatgttccaattacatgcttatgctgttactaaggctacttttagcggcacatctgtaatttgtgcaacccttattatcagtgagattaaacacaggattagagaaatgccaacctagcaaacgaagcatagcatagctcaagcccatgtggaaatcgctgttttgcaattctgatttcataatattgagtaaatcaagcacgctgagtccaactatggtcttagatttatgctatgggttctcaatgagcctgtacagctccaacttcatgcatgaagttgaagcagtacaagctcaggttgaaaagataagtcagatttaaggcgatattcagattctacttgttcctttttgttatatcagatttggtttttgaccataaaaactcggaaaaaattagtgggccagtttccaattttggcatagttgggaaaaaagctgaaaaattgattaagcaaagaaaaagtgaatattaaaataaatacagaaattacggattatgttaaggccgacagaacttatgttataccctacgtatataattccgattttccattcctaattcttttaaatattttttcgatataaataaccaattttatttgattttgaaaattgttccttttggtaataaatggtcaaataaatgtttttcatctgttcaaagttcgtcttttggtgcgattggggcactcggccaacgatttggctgatcattttgccgttggcagtgtttttggcgccataccaacggtttggcttcgcccgggggagcaacagcaataggcaaagacgcattggcaccgttggccatttgcacacgaattgtcggtggtttctgctgaaatatttacaaggcatttgcgggttataaactctgttgaaagcccaatatttactttatcccgtccccttctcttccctcacttccactcttggaaaagcctttaacaaattttcgaaattttggaaaaatgcgagggttccgttttaaaaaccctcatttttcgggggccccatattcccccacattcgcccctatgatcagaaaatcgtttaaaaatttgtttaccctctcataagtgccattttgttgatcatttgtcggaggagatgacgtattattcatgggagcaggcggcggtgccgacaagttggagcagtacatgttgttgttgtttgaagttgtggcggaaggtgtcatcggcatacgccgcctttgctgcagcaatggggtggcaacaaaagcactgaaacggcaagaataggggacgaactcgttaaggagtcttattgtaaaagaggaaagcaagaggaattttgaatattttcaccgagaaaattccattttttccgataaaaatccatgagcgcaaccgcggcatttgcaaaaagcggagctggttttagaagcgaatctcggaaaattttcgagcacataaactctctgaattttgcggttgctagctaactgatgaggctcatgcctatgatgaggttgggtcgggaaatacgagactggcaaaaacccagggacgactgagacagaccaatcatcgtttttcggcgccggcagagtgccgtcccggccgccgttgtgctcctgcgacccgtccaaccgttcgtccattaccattcccacgttttgttcgtttgctgttggtccaccacccgcctcattattatgctgctcatcaacatgctcatgcaaaacactgatcgtatctctctgctgctgctgaaatgtgtggacagttaatgtttatgctcgcgaatgcgaaatgattaattatttacccaaactctaacattgtcatttggttcaagaacatgccgatacggactaattagagatgagtaagttttggcacaaaattgtccattttttattttcaaaattctttcctatcgattgataatagatttaataaatttcccataaaaattttcaaggacacccttggaaaaaagagtttatcaattccttggtttaaatcataagtttcaagtacgctttcgtgtcaaaatgttacccacaccagaccatcttggtcttcgaattttgttcaaactaaattgaactaattagtcctaattatagtcccccgaccaaccaatccatttgccactttctctcctccattccttcccatcgcaccattttttgttattccatgcgatttggccatgtgtttttgttgtttttgtgaagtttttcctttttttaattttttttttattaaaacgaatcttttttctttgggtttctaccgtagtcgtcgctctcctcttcatttgatcgtaacggtcgcttctcctccgcttgttttgtcagctgctggtcaattcgttgcgcaaatacaccaccatttttggttgccttacaattttgtgctttacactgttaaaaatggagaaaaatgatcaattagacaattggtaacggacaattggcccaaaaaatggcagatacatattcaatgggttccgattttatatttttccttcctcttttttatacagaaaatgtcccatctttgtcatcttttaggaaataaatgattttcataatttaacttcctaaaaccgaaagctgccacaaaacaatctgttaaaattggtggttaactgacaaagtgtgaacgaaccaacccggtactgacggtgacgtttgatcaccacaccgccgtagaggagcaaagcgatcagaatgagagtgatcagtgcggcggtgatcagcagagacaagcgtgcggcccacacggagtctgcgacaaataat

SEQ ID NO: 2053 - DNA, 3525 bp, Heterodera glycines
tgaaacgaaaccggcggtaagacgactcaatcgagaattgtaggaagttcaccgtaggagccaaccccatttattggtgtgcccacaagggatcatccttgtggagaataccggacgcggataaatcaccattctgcaaaccacctccaggcctcacctctcagtggaaaagattgaccatctcactttacatgccgtatcggaagccacaaaaagtgaagaaggcctacagatgtgccatcaaacgaacgaaggagtatttttatactaaccttctgggggatcagttcgttcgtacggagaaagaattcttgccagtacaaaagagaatctgcatggccatgatcgaacagcacaaatgccaatacgaagataagccaatgactccgattgaaggaggaggatggagcagcaacaacccactgaacgacgaatttccgggaaggttctcaagtctaatttcgggggagcgagagagcgtaacgctgaattgttttgtcgagaaggcgtcgctgttttaccgccctcacaattttgagttgatcagcccgctctacttacacttggaggattgcaactatttgaccggaaactgcaacatggcagacaacacaaccctaaattgggaaacggagtgcaacgagagctgtaagtcatgcgactaccatttcgtcgaaagtatggacggagagcacacgggatcaacggattgggcaggcggaacatggatatccaaaagcaaggaacaggcgctaacgtttagcaaagaggcgaaaatggaaacagcatgcaacggaaaaccgattcgcttgtcggaccaatcgtttggaatcctggaggatgagtacctgaagatcgtcaacgatcgtggattgggaaaaagagccatccaggaggaacaactcgcagcacaattaaccgcaggacaactcgccacaagccgatcaatcgcgcagcttttttccaaggaatgccgaagaagttccagaggaggaaatccgaccattcaggccagacgacttttacgacgcaaggatgtttggctaaacgaggacacgatgcaaatcttctcgtgcgctgagttttcaatgcaaaatgtggaatatcaagcagtcaataactgttaccgctacattccggtccaaatccgcattgacaagaagacgctcaacgcattcctggatccggagcttcacatcctcacagcgtcatcaccattcgcagattgtggaaattttcgctaccattatctgcaactgagccagagcaattggatcaaaatcgacacacgcaccgctacgatccagaaaatcgactccagcagcatctctgagatccacgaagcctctggagacaaatcgttgttggaaatcacgccgctagtttttcatcgatggacgatcgacaacgaaacaggcgaagggctattcgcgcacttggatgaatggctgcgtttggatcaatggaagtcgaaggagaaggagcacaaaacggcgcgtgcgctcacactgggagctctcccgaacggagtgattggcctcaccgaagaatggttcatggacaaacttcggctgctcgtctcctactggacaacggcatgctgcatttacgtcacattcatttttgggcgcgatgtcctgatacccttggtatgggtctacttaatggggcccgtcatcgttaccatccgcaatttggtgacgggaaatcagtggacgcagcggaacagagttactcgaggcacacggcgagcaccggcaatttcaaggattgaagcaattgagctggtaccgccttcaatgccccaggaaatgagagcgaacgaaacgtcaagttcacatcaagaggaccccgagccgtcaccgctggtgatggagctgaaacgacaaatggtcgcattccgttcgaagcgacgttttcaaagccgtgggaatgtcgcggctgaacgacagccgcgaatgtccgttgagcggacaaatgaggaggacggggaggagtgaatgaagttgcgaacaaggagtgataaatggatggaaagatgggaaaaatagggcaaacgggaaatgatgaagggaagggaggacaaaaagggggcgaagggagggacggcagcaggcgagcacgtgaatgaggggaaggaaagcgataaaaagcggatgtggcgccttctccgcgtgaaggacgcccgaggcagtgcaaaaacgccgatcggaccatcgcggtgcgacgggcgaaacaacacatcaccaaggcggacagccgatgaaaatcggcgatcatttgatggaaaattgcgaatttgcgggagagcaaattcgcccggacccttcccctcccgcctttctccggtgatgtgcccccctccccgcgactcaccccacttttgtgcccccccaattgtgccatttttccctttgcatttcccctcgcattttgtccccattgtcacaatttccccccattgtatttctcacacatttcttatgtatgggtttaattacccaagtttgagccataaacttgtggaatattttggtgcaaattcttgggcggcaaatttgggcaattggcggcagcgaaaaacggacaaatcggcgcagacccctcccccatctgcgtcaagtggcctagcccattaaatgccatcaccctttaaagatacttcgcaagaaaagcttaaataacaaaaaattcgaatctgttatacaattccatgctgtgtagttttctataaagcaattattcatccactcttaattactcacctattctagcccattaaatgccatcaccctttaaagatacttcgcaagaaaagcttaaataacaaaaaattcgaatctgttatacaattccatgctgtgtagttttctataaagcaaatattcatccactcttaattactcacctattcgagcccattaaatgccatcaccatttaaagatacttcgcaagaaaagcttaaataacaaaaaattcgaatctgttcttaattactctcctattctagcccattaaatgccatcaccatttaaagatacttcgcaagaaaagcttaaataccaaaaattcgaatctgttatacaattctatgctgtgtaattttctataaaatacatatttatccactcttaattactctgctattctagcccattaaatgccatcaccctttaaagatacttcgcaagaaaagcttaaataacaaaaaattcgaatctgttatacaattccatgctgtgtagttttctataaaacacatattcatccactcttaattactcacctattctagcccattaaatgccatcaccctttaaagatacttcgcaagaaaagcttaaataacaaaaattcgaatctgttatacaattccatgctgtgtagttttctataaagcaaatattcatccactcttaattactcacctattctagcccattaaatgccatcaccctttaaagatacttcgcaagaaaagcttaaataacaaaaaattcgaatctgttatacaattccatgct

SEQ ID NO: 2054 - DNA, 1300 bp, Heterodera glycines
aaaaaatgcataaatttggacatagtgacatttttatgtaaaaatataaaaatccgttccctgtatatttctcgtaaattgtagaatccgtgagtactgcacatatgaattttttgctacatatagaaatgaataaataaatttgaaataaatataaagtacataaaagataaataatttagcttaaatatttatcaaatcatatttacaaaaattattttttaatgctcaactttgttttaaagtaatgttgaaaattttgtaaatatcacattattctaaaacctttatattctttgttaactctaaaaacgtgttttgtacatacaataataattgaattttaaatagactaacatagatgtaaataaatatatacaaaagcgtgaattaatgattctaaattaagttataatttgatgctatagtagaaatattttcacaaaaaaaagtaataaaaaacacattaataactatattagtaaattttgcattgcttaaaaaaatgatgatggcaggcatgtgtctgttatttgtgtgcatatttttaaaaaaatttgaataaccgtgttatagtgtttttttgtatcgcgaaattccgattcctataatccatttttgcctaatttgcattgtgtaaataatttgaacaaaaaaaacagaactattattttttataaaaatgggctgggtccggcgctatttaaaagctcagcttttgactgaattcctaaatccattctgctaggtgctaaaaatgggaatgagataataattttaaaaataaacattctattaataaacaaagcaaaataaatttcggagaagagttataaaatttttaatttattaggagtattttttttgtggtgtattttagttttattattacacttctaattttaaaattttcaaattcctttaaaatatttttgtaaattgcctcattagacaaaacagcgcaaaaatttaaaaatcaaggaaacagttaaaaacaaaccaaatcagtgtgataaagtgacaagaaaaatgtaataattaaatttaattattttttatttttttctaagtaattaatcatttagcttaaatgtagccaaattaatggaattttattaaaattaattattacaaacactttttttttaattcgtccgcactgatatttttgtcactttggctcaccatgtaaataatgagcatttaattttaattaatgcactttaatgaaatttacaactagcaaagaaaaaaaatttaaatactttttgaattataaagtaaccataaaaacctaaag

SEQ ID NO: 2055 - DNA, 4293 bp, Heterodera glycines
cccctttgtattctcacacatttttatgtatgggtttattacccaagtttgagccataacttgtggaatatttggtgcaaatcttgggcggcaaatttgggcaattggcggcagcgaaaaacggacaaatcggcgcagacccctcccccatctgcgtcaagtggcgaccctgggcacttcaacggaccgtgcgtggacaaaaagcggccgaacagacattgcgcacaggagcatttgggattagtgagtaaattgggggaagaggaaattttgagacttgggcagggcaaaaaagggaaaaacaggggacggtaggaattgaacccggaaggttgcccttcggattttctgtaatccgtagcgcttcctttggtcccagagctgagtcccgcgaattttttgtaattcgtggcacttcccttgccaatcagcgcagccccacggattttttgtaatccgaggcgcttccctggtcccatagttcggcctcacgaattttttgtaattcgtgtcgcttgccttcccgagggtttggccccacggattttttgtaatccgaggcgcttccccggtcccatagttcggccgcacgaattttttgtaattcgtgtcgcttgcctggtttggcccctcggattttttgtaatccgaggcgtctttttccttgctcagttagcccctcgggtttttcgtaacccgaggcgtgttcctttctccagtgaccgacccctcgggttttttgtaaccaaggcgtcccccattgtgagcaggtcgctcctagggtttttgtgacccaaggcgcctctcgcttacacggtcggacccatcgagtttttcgtaactcgtagcgtccttcttcatacactgtaagactcttggtgggtctgaagtcaaactcactttgtccactgtttgtccaacttactgctattttgtgaccccgaaccccacacaatttgttcggaagtcgggtagcagaacccaaaagtgagcaaaaataagggatttttgcgtacaaaaatcgcaatagagctaaaggctcttgagaaggcgaaaacggcaacagaattgtatgctgagccggaccaaactctgacctcattggaaaatgcaattctcctggaaagcgcggcagagagaataaagtcagaggtggaggcagtgaatgccaaaatcgagcaaatttggataaccgcaagcaaatggcatgacgtcatacaaaaaatggacaaggacgaaagaaaaagtgagcagacagcgtatgaacaatttcaaacaacggagaaactgaacacaaaaatggaagcagccaacacaaagctaacagagctgaaggacctggagatgaaggtggaagcaggagcaaagctgcaacgctccaaagcagacagagacgcgcgagtggagcaaagagaacatgcaaaagcaatgtcgaagtcgaatgcagaagcagacaaagggaataaccgtgcgagaggcaatgaaatgactgccgcattgtaccaattgccaacactaagaattaagccgtttgggggagacaaacgggaatggcccatgtttgaagaagcatttaaagtggctgtggaccaaaagccaggaagcaaaacggagaagctaaatttgctgaaatcgctggttgagcgagaggccgcattgctcatcggaggcctacgcttggaagagaaaaattacgaaattgccatgaagctgttaaaggacacctatggagacaaaggcgaatatgtaaggaggttacacacggagttgtcgaacctcaaacgatgttactcggtggaagacacaaagcaattttgcatggaattggaacgcctagcaagagaattggaagcagcggaagaagacattgaagggccgccaatttatttaatgcttgagaagaagctatacaagcctttcctgcgtgaaattctggaagagaaagcaaaaaatccagacttttgggacacgtcatccctccgaaaggccttaggaagtgcattgagcaaagagctagcaatcaaagaagtcatgagggagtatggcttcgaaggcaaagaggcaaatccagagcatggattcaaacgacaattaaggcggaacagattcggaggctcagtcaatgtagccacaacacatttcgggaaacccaatggagagcgaagaaaaatcccggaacaaaaaatgccaagtccgaggcaaggccaacgaagttttcagcagactccacaaaattccgcattccgagaacgtaagggacaaggaagaagcccaaaaattcagcggaatccaacagcagttaacacacaaggtgaactgtttctgtgtgttttctgtggagggaagcacagacatgacagttgcgaaaaagcaaggacggtgcaacaacgatttgcagtcctccaagagaagggcttatgctacaaatgcctgaagggcaatcatatcggaagaaattgcccatgcccaatgaaatgtttcaagtgccagcaagcacacccaacggcattatgccatcaggcaaacccacaaagggcaacagagtggagaaacatggcaaacaaagtcatgaacgtccggaaagaagagaaaccggacaaacgggacgaattcaaagaagtttcgttcacgccctcacaatgcaattcagtgcaaggaaattcgcgagtcctgctgagaacagcagaggtgaccatcttcaatccatccaatccaaaaagaagcatggtcgcatcagtttttgtggatgacggaagtgaacgctcattcatccgtgccaatgtggcaaaacaattaggccttccggtgattgaaacggaagagtgccatttgactggttttggcgagaaagaagccaaacgctacgtgagcaatgttgtacgcgtaggatttctgggagtcaacggagacccatatatatgcgcactcaatgaaatggaattcattgtgaaagcgatgcccatcgtaacgctgaattcgatggatgaagcggaattaagcaagaaaaaactttcccttccatcgcggccaagacagccagacattctgttgggaatggatgtcagacatgacctgaaaataagagacgaaacagaaaagttgccaagtggattcacattgtcaacgtctcgagtcgggcggatgataagtggttatggccaagtccagggcccaatggacatgagtgtgcaagtgacgtacactggagcactcataagtgccttacaatgtgccagtagcagaagagatgctgacgaagaaatggaagaacagataaaaacatttttcgggctgaacataatcggattgagcgacaatcctgaagaagaggacaaggaagaagtgatgagaacgttcagaaaaggcttgacattcaaagaaggaagatatgaatgtggcctaccatggaacgaaagagtaaaggatttgccgacaaattttcaacaagcgagggcaagactttgtggcacagtgaaaaaattgcgagaattaaatttggtggatgaataccaaaaaattttcaatgagtgggagaggaacgggataatcgaaagagtgccggatccaacacaaataactggaccggtacattatctcccacatcggcccgtgataaaaatggacaaggccacgacaaaaataagaattgtgatggatgcatccgcgaagccagcaaaccgcaaaggagccccatcgttgaacgaatgcttgcacacagggccgttgttgttaaatgaattgaccgggatccttctaagatggagaagaatgaaggatctaatcctggcggacatcgaaaaggccttcctccaattatcagtgagagaggaggacagagacgcgaccagatttctgtggtaggaggatccacaaaagacagaaatttcaagcccaacatatgtgagaaccgttgtgtttcggttctgtcgggtctcatttggattgacaactttaccatttcttttaaatgcaaccatgtgaacatctctcattctacgacacggttctacagcaaaccataatggagaatttgtacgttgacaacatactgatcaatgtgaagaagaatgaagacatggcgaaaatttgtcatgaatcgatcgagctgttccgtcaagggggaatgaagctgcaggaatttttctgcagtaagccgatcgccatacgaagccttcctgcggaattattggccaaaaaccaaaaggagataaaagttctcggaattccgtggacgaatgaggatgatgaaatttgcttccgatttaaaaaatttgccggaaagcacacgaagag

SEQ ID NO: 2056 - DNA, 6019 bp, Heterodera glycines
ttacaaatatgaatataattcgagatttttatctctttttggaaaatggcatgcataaaatttacgaatacgaaaaagattttatcttgactagttttattcccaggggaatattcttcagcttgatatttgtttggataccatgtatgggtaaaattgtcataaatcataaagatcttatcaagagataaagggttattcccgtcgttttggcaaaataagattttgttctaggaaacataaatcataatgtggttgacagaatttctggaaggttacggtattcccaaggggattcttggtcatgtcatagtttagatcttatctttaaatgggacgttatagttttaggcaaaataaaattttgttctaggaaatataaatcataatgtggttgacagaatttctggaaggttacggtattcccaaggggattcttggtcatgtcatagtttagatcttatctttaaatgggacgttatagttttaggcaaaataagtttttgttctaggaaacataaatcataatgtggttgacagaatttctggaaggttacggtattcccaaggggattctttgtcatgtcatagtttagatcttatctttaaatgggacgttatagttttaggcaaaataaaattttgttctaggaaatataaatcataatgtggttgacagaatttctggaaggttacggtattcccaaggggattcttggtcatgtcatagtttagatcttatctttaaaaatgggcgggattttcatgtgtagtaaatatttccgctttaccaaaaatgtcaacaaccaaaacaacgaccaaaatcttgatgacttactactatgaaatgattctgttgggtacatttaataacattcgttcttcacatacacacgctctattgcttctcgcgcaaatcccatcatcctacccttgtcgtgtccttttccgctgtcccttttcagctgtctctttccccagtgtccctctccaactgtccctttcccgttgtccctttccctctgtccctttcctcagtgtccctctccaactgtccctttcccgttgtctctttccccagtgtccctctccaattgtccttttcccgttgtccctttcccgctgtctctttccccagtgtcactctcccactgtccctttcccggtgtccttttcccactgtccatttcgctctgtccgttccagctgtcactttccctctatcctttctcacattatcgtttctctatccttttgcgcactgtatcttttcccagtgcccttcctgttgtctatttcctctctaaccctttccgctctcccattttgtcctatctcttttacagtcatttattatacttttactctcctcatcatcgaatattattaatgttcgcaaaacaattaaaaaattgttattaaacaaataaaaaataaaaataaaaataaaattcaaaataaaaataaaattaattaaagagattaaaatcataataaaataaattaaagtaaattaaattaaaaataaattaatattaaagttaaattaaataaaaataaattataaaattaaataaattataactaaattcaatttgttcgactataaataggaaaaattttctcccattattcatttaaaatgttttttccaacaatcaaaaattgcgttgctgttgtagacaccaaaacaactctcgatattgaaaaaatttatttaatatcaccctccactaaatataatccacgtaaaattcatgctgtaatcatgaaagtctataatccaaatgctaccgccataattttctcaactggaaaattcgtatgtacaggggcagctaatgagaaagaatgtaggcaagctgctgagcatgtcacggaacgaattaggcaatgtggctaccaagaggcactaatccataaatttgatgtgaaaaatttgattgcgactgctgatgtagggttccatataagattaggagaactttcagactttcttggtgtaaaatgctgttcatttacccccgaacttttccctggactcgcctacagaaacataaatcccaaaatgtccataattgtcttctcaagtggaaagctaaattttacaggaaacaactcgattgatgatatcaaaattgcatttaatcagttttatccgattttgtacaaatttatacattcaccacaaagggtatgagtcataataatttttgataaaatgtgcattatttgaactttcttgcgctgaagggacaactttaggaaaattttgacccaaataaatatcagcttgatcattttcaatcattcgcacaagctcaagcggatagaatcgatcgtgcccattcttattcttctctattacacacggattgtttgcataacggagacaaattctatgccgtacataaaagtgctggtcgacggtcacattcttgaatccgttgtacgccatttgcttgcgagcattatccttcgtaattccgccataaataaattctttatgttctccaatttgatttttataagttgtttgtagagttttatctttgagaaaattttcaaccttttgaatttcatcaggatgatttagacgatcgcacaaattacgtgcactgcaattcagaagagaagcaattattgtgtctaatcggtccatttttataaatgagttaatgaaaaattccttaaatactttttatcattttcttaacaaaatttacaacaaagaagtcgggatcatattgtatcattaacttttttaatagatttaaaaaagtacttttaaaattaacacttcctgaacacatacaatatacaaaataaatacaaaaatatccacaattctcactaataattgattgtataggagttttattaccttccacagtcttaaattgacttaaaaatttttcaatacatttgttaggtgtacgtccaaaactgtcaaagtagtacacggtcttataatctttgataaaaattgaaacccaatgcgttccttccttatttgatgggtcgttgttcgccactaatactgatgggaatttgttgatatttaggggtattttgttgcatgggaaacatcctaaataatgttcttttgttttttcgttcattgttagaatccgatttatcgtcgctgtgtccattttcttctctacatattcgcataattttacacaaatttctgattaaagaattaaaatagaaaaaaatgcctgtcattacaacagctatccataataaaactaataatacgcaataaacccatcttgacaatgactttgtctcttcaatattacaaagttgaaatttatcaataatttcatcaatcattgagaatagttgactttgattcattttatttaaatacgaatgatcaaaagaagcaattttataataaatgtctgtcattcctacattagttgaacgttcagggtaaagaataggactattaaaacatgctacatattttattaagaataaaataaataaaatatacattttgaaatacaaaatgaaatataaaaaatacttaaatacattaaatggtattatcggtcattactgtacgatttttatctagaatcaaaattgaatccatttcactcatggctattagggtgatcccacccgatgggacaggtgatctaaattgaatgcacacggtagtcgtcccttctgtaataagatcaataccctcgttgtcctccatgctattagtcatattaaacgcaaaaattgtccaaccctttctatacttctcaagagaaattccgttactgtctgttgaactggccatacctaacgcctcattcatttcgtggaatgcccgggtatataagtttttgttgaaattaagctcaaatggcgctgcgggccattgtttcccgtttgccatcaatgtaacggatcgtacatcaaaaggtttaaaattaaatgggcttttcttttggttgcctacgtatgcagcgttctccaccattccaataataactcgtttaggtaattgacccgtaaatagcgttccattgtattcagttcgattctcgcttataaatgtggatttgatcaatgtttttctatgggcatattttgcttctttgctttcaagttttttctgtatgtctaatgcaagaccatcaacaacttcaagagttttaacatataatttacaagcggtaatttctattctatatttatcgtctgacgctgccattaccataaactcattgtcattaggggtaagttgtatatcaatctcaactccattcaccatatatctgtcctgattaaaaatatctgcatccaattttgtaataaattgtgcagtttgactttgtgaaaacaattttcttctcagttcaaaaccctgctgagtaatatccgttccgtcctgattttcactgtccacataatatccgctcgcctgcaggtctgactcctttacgtttttggaataagaaagttcggcatccaagtatgctttataagcataaagtgagtttgagtcataaatctcacgtccctgcacagtgatttttaaattctttatccaagtcgcaccaatcatattaattgttgccgcttgctcattcacttttaaattaacatatttatttgtgtaagaatccagctttttaattgacatttcggttaagatgtaacatttgttcaaatcaaagaaactggcggtagggtgaattttaaaatgaaaaggaatgtccgttaaaggattgagcggtaaatattcccgcactgaagaactactcactgacacattagttggtggaagggtaaatattgacaaagctgaagttatagaatttaccgattccttgtcaattttcttgaagaccattttaaaataattttccaaatacgtctgatctttttcgccttttttattactgtcttaggtatagtttttccaataattcttttccttttaatactcttttttcttcccgttccgaattgacgcccaaccccacctttttcgagtacattatccattcccttctttacttcattaattattacttgtttgtttggtgtttcagctttctctattgtatccaatacacgtgttccagtgtctaatgcctctctacctaataatgtaccagccgattttaattttggtaaaagtgctctccataaaaacctcaacacatctcctactcctccacctcgctgtcttccatatcctcgttggtatggaggtatcccgcgaaaataattaaaggcttctcccgagccaatctgctctactacaacaaaatcatcaaaactaactgagtttggatcaaatatttgatgcaccatatttattcaattattaatatatactataatgtgaaaatgaatatttaaatactaaaatacaatagattttttaaatgctaatacaagtaatgttgtaccccattggaatggaataagccttccctccctagtcctaatttcaatttcaatctcattaatttcctttactaccaccttaatgtacattggtgtgttataaatcttctcaatcacgtctccaaattttccttcaacgacaacaattcgcaaaagtgaagcgagttggtcccctactattacattctcagtgattccattaatgtacacacaaaggctgtctataccacctttcaagtcacaataatactttgctatagctccactcagaatttttgtcgggtcttcgaatcctagaatgtagccgagttgagccgacaattcaataaagtcaattctttggtcattaaaatcaattgaaaatttccgccgctccttcaaatatttaaataagactgtttcaatttgttttgaaacaattaaatcctttaatgattctccacgtgttttcacaccttcaatttcttcttctattggtttactagcccccatttttttctttaatatttcacctcttgtttttccttctgttttttcttcttctatcggtttactagccccaatttttttctttcatatttcgcttctt

SEQ ID NO: 2057 - DNA, 3147 bp, Heterodera glycines
ggtttaaaataaaagggcctttttttttggttgccttagtatgcagcgtttctccacctttccaattataacccgtttagtatttgacccgtaaatagcgttccattgttattcagttcgattctcgctataaaaagtggatttgatcaaagtttttctatgggcatattttgcttctttgttttcaagttttttctgtatgtctaatgcaagaccatcaacaacttcaagagttttaacatataatttacaagcggtaatttcaatcttatatttatcgtctgacgctgccattaccataaactcattgtcattaggggtaagttgtatatcaatctcaactccattcaccatatatctgtcctgattaaaaatatctgcatccaattttgtaataaattgtgcagtttgactttgtgaaaacaattttcttctcagttcaaaacctccgtgagtaatatccgtgccgtcctgattttcactgtccacataatacccgctcgcctgcaggtctgactcctttacgtttttggaataagaaagttcggcatccaagtatgctttataagcataaagtgagtttgagtcataaatttcacgtccctgcacagtgatttttaaattctttatccaagtcgcaccaatcatattaattgttgccgcttgctcattcactttcaaattaacatatttatttgtgtcagaatctagctttttaattgacatttcggttaagatgtaacatttgttcaaatcaaagaaactggcggtagggtgaattttaaaatgaaaaggaatgtccgttaaaggattgagcggtaaatattcccgcactgaggaactactcacagacacattagttggtggaagagtaaatattgacaaagctgaagttatagaatttaccgattccttgtcaattttcttgaagaccattttaaaataattttccaaatacgtctgatctttttctcttctttattactgtcttaggtatagtttttccaataattattttccttttaatactcttttttcttcccgttccgaattgacgcccaaccccacctttttcgagtacattatccattcccttctttacttcattaattattgcttgtttgtttggtgtttcagctttctctattgtatccaatacacgtgttccagtgtctaatgcctctctacctaataatgtaccagccgattttaattttggtaaaagtgctctccataaaaacctcaacacatctcctactcctccacctcgctgtcttccatatcctcgttggtatggaggtatcccgcgaaaataattaaaggcttctcccgagccaatctgctctactacaacaaaatcatcaaaactaactgagtttggatcaaatatttgatgcaccatatttattcaattattaatatatactataatgtgaaaatgaatatttaaatactaaaatacaatagattttttaaatgctaatacaagtaatgttgtaccccattggaatggaataagccttccctccctagtcctaatttcaatttcaatctcattaatttcctttactgccaccttaatgtacattggtgtgttataaatcttctcaatcacgtctccaaattttccttcaacgacaacaattcgcaaaagtgaagcgagttggtcccctactattacattctcagttattccattaatgtacacacaaaggctgtctataccaccctttaagtcacaataatactttgctatagctccactcagaatttttgtcgggtcttcgaacccgagaatgtaccctaattgagctgacaattcaatgaagtcaattctttggtcattaaaatcaattgaaaatttccgccgctccttcaaatatttaaataaaattgtttcaatttgttttgaaacaattaaatcctttaatgattccccacgtgttttgacacctacaatttcttcctctattggtttactagccccaattttttcttttaatatttcacctcttgtttttccttctgttttttcttcttctattggtttactagccccaattttttcttttaatatttcacctcttgtttttccttctgttttttcttcctctattggtttactagccccaattttttcttttaatatttcgcctcttgtttttccttttgttttttcttcttcgggaatttgttcaattctatttttcaatgcttcgccatgggttattctttcttctttcttttcttcatctttagattttaacttttcgcctaaaatttctcctcttgtcattactttttcaccaatagttgtttctggtttattttttagtacttcaccatgggttgcaccatctgcactactgtcttgttcatcaattttggcttttaatttatctcctaaaatttctcctcgtgtcttaccctcagttttggccttgctatcatctctttctttctgtacctgttctattaactctaccaaagattttccatgagtttttgtctcttccccgtctgctgtggtggtagttccctctatttttcctatccgttccttcagtgcttcaccatgagtcaaggctaaagccattggttgttgttggagtgcgtccctctttttagcttcatactctagcgctgcaaatctttttttcctataatcgacaagacgacgaagttgatcaatttcatcctgaattgactgttttttctgttcatcagtcaaaaattgttgttgttctcttaattcgcgaatttttttgtaatcgtcttgaagcccttcatattttttatgaatatgttcccagtaatctgttggatgactatcaaaaaatggctcaacgtaatccttattttgttcatagctcgtcctctcatattcttcagctgatatttgtaaatcttttttcaatacagccttgttaaaagcattcaaattttttcttctgtgtttcattgctgttctcattcttaatgcttcctcattcagagcctgaattgttctaccatctgttactccttggtattttttcatatggtcttgaatgttgaataaatctcttattaattctaatcgaacttcatttaatttctccactatagtgaacagaatacatttcgaggaattcttgaccagttctc

SEQ ID NO: 2058 - DNA, 1607 bp, Heterodera glycines
tggttgttgttggagtgcgtccctctttttagcttcatactctaacgctgcaaatctttttttcctataatcgacaagacgacgaagttgatcaatttcatcctgaattgactgttttttctgttcatcagtcaaaaattgttgttgttctcttaattcgcgaatttttttgtaatcgtcttgaagcccttcatattttttatgaatatgttcccagtaatctgttggatgactatcaaaaaatggctcaacgtaatccttattttgttcatagctcgtcctctcatattcttcagctgttgttcgtaaatcttttttcaatacagccttgttaaaagcattcaaattttttcttctgtgtttcattgctgttctcatctttagtgctgtttcatttagttcttgaattgttctaccatctgttactccttggtattttttcatatggtcttgaatgttgaataaatctcttattaattctaatcgaacttcatttaatttctccctatagttaacagaatacatttcgaggaattcttgaccagttctctcctccttttcctccttcccgtcatctctttgccttgctgcttcttcaagcgcctctattcttgctttcttagtcaatgattgattttggagagggtcaatttcctcatcctctatttttctcttcctatgcgtgtccgtctcatcatcacgttctcttgactttgtcactatcaattttaacaattctttatatctttgcctttcttcctcaattttttcccagtaatcatctggattataatgaaaaaacaaatccactccatattccgtttgtcttttaactcttgtagccggttgttttataccattttttatcgactcatttatagcattttccaattcttgctcattttggtatgacccagcgggaatatcaatttttattttatcaccattttttaaatgcactttaatccattggttctctgtggtaccaatggcgggccaagaatttgtataaattatactgtgcaacccacacaaccattgacctccaaaagttagggtcctaggcaaatgaaccctaaatttattaggcttattgtcataaccaggagagtcactaggtaaaagaacgtaaaataaatttgacatttttatttttctaaaacataataacaatacacttaaatacattcatctctcaatatcattgtctttaatccactccggttctttgtacccgtaaaatttcaccaaatgttctttatgtccacttcttgtcctagtcttcagcaccctctcaattctgtatgttgtctccgcgtcctttctggtcttgaccaagtcttcagcataaaatcgggtgtcaaacggctcttctttatcgtcttttatcccaaaccgataaggatttgcttttttaatatcataaacttggaaaatttcatccgaataattgggaaggtatgatttttcaaaactggatttatactttgcaagtctaacatgatccccctctttaaatcttggtcttctataagtttttcgtgaaaattcatttccatagacctttttcctaaattttttgagcattatccgggttaatatcaact

SEQ ID NO: 2059 - DNA, 5985 bp, Heterodera glycines
ggcaaaacgattggggtgaactcaaggcgttgctgctcgccattctgattgatgagtttgaatcagctgttcccctgccggaaattgtcatcacgacactctttgcacatgaacgtgaacactccgtacttaagaaattttcctattttttcaaattaaatattagccaaaacctttgggcgggccaatttccaaaatatggtcgggtactcaaacacattggtcggttgttttttgggcgattcatccactaaaatttggctaatttaaagaaatttgcagaaaaagccaaaccttcagcttccatggcttttgctttcttcattgcggaagcaatttcctcatggattttgtccaagcgaggcttgcgtcccctttttgagggccccggttgcaggtcaagcagtgtttgagtgttgttgtctccaattgtgatgacgtcatcatcattttgaggggaaaacttttcccgtttcgactcatccatttctttaaatttaaaattattataaaaaacccaaaaaatgattacttttgttctcaaacaccaattgatcattgatttttctcggggccattacgattaagaaatagtttatgattataattgttaaaagcataaaatgaacctgcgaaaaaaaacacgtaattattgattgatagtgagaggggtgttagcgcgcagcgacctccagacgggctgtcccttttaatcgataggccacgcccatccacaaacacatagacgagagagtagtggttagagaaagatacaaaagggcgccaattcaaacacacagtgaaacccaagccaatttattgattttttacagattatggtactccctctgactgctgccctatccaaactgctaaactgtaaacccgaaaatttagcagaatatttgaacaaccccgaggcagtgaacaaagcgaacgcttacttggccggcaaaaaactcaaaacaacctaccagggtcgtgattccaagaccaaagaggtcaagttcggcacattttcggtgaaagccgctgcgggaacctacgcctttgagggatttcttggcaagtttccaaaaattcagtttcggtctaacacacatgcgttcagaggttaaagtccaccagtatttctacataaagcaccggatccgcctactgtaccctcagctgaagtgcattgttgagtaccacaacaagggccactgcaaatactatcccttgggtataaaattttgtcaggaaaaaaatcaataatcattttcagagttgttggccgttgaggagggcggtgagagtgaacccgtcgaaagacctgccgctgaaaccgactacctggactacttgaactttcgcagtgggtggcaatcaacactctactgatcaatgaagcgtgtgcggcaatcggaaaagttgggcgaattcccggagattgagttcgccgtcaacacaatgggcgtcacggtgtactgcccgcggcacctgcaaacgcctcggtttgtgccatgggaccagcccgggcggtgctcgagctgtagaagcggaactgttgagctggactacatcatccagcccgagggggtgaccatcttttcgaatcggctaaagacagacggcgagaactttgtgccgtttgatgcaattggtaagctgcaggtgtatgtcagagtttgactcttttcttaagtggactttgccgatcgtgcgtccgcattagggcccggaataaggtgttcacgctgccgctgcgacacccggaggtgcacgccgccggcccaagcttggaagacggcgtaaaagaacaaaaggaaatgactcagatgtcataagcacttgtccatttttctttctattgttgatattctgatggactacccaagaataaatgaaagtgaactcgcttttcccatcccttcggggattattgtcagcggtccgtcctcatcgggcaagacccagctggtccttcgcctgttacggcatgcaaacgtgatgtttgacccgccgcccaaggcaataggtatgtgcaaagggggtttctgtgcagtgggctgttgctatttagtatgggcatacggtgagtactcgacgcagattcccgatctggagcggcagggagttgtcccccacgcaggtgccccgtctgacgagatgctgaaaaagctgccaaagccttgtctgattgtttacgatgacttgatgggtgacattgaggccaagaagttggccgatctgtacaccaaaaagtcccaccataacaatttttccgtgattttcctcacgcaaaacctgttcgataaatcaatgcgggtgccaaggtcgaacgcccagtacatcttcctgatgcgggctcccaacgacatgcttagcattcgtaatttggccagccaaatgttccctcgcgagcagggattcctgatggatgcctaccgacaggcatgtgctctgccgtacggttacctgttggtgactctccacgcgaacagagacaacattatacgcctaaggacaaacattttcccagacgacgaggagagaatcatttttgcccccaaaaatggttaagcgggaacagaagatcggtgagcgggttgtgcacaactacgactatttgaagaagttgggaaagacaacgtcggagaagaagcgccgtcatttgttgaacagtgccggttgtgaggaactgttaacgcttgtcgagatttgtctcaacgttttgaacgggagtttctgtctgagcaggaaacaaaagcagagacttgagccatttgccaaagacatcagacagttggcacgtgtgcgaagtgagaggggtgcgcgaaaactagtgcagcagtcaggcggatcactttttgcccctttgttggcccccattctgattgaggctgcccgatacctgctttcgcgcagcaataatggccaataaacttattctgctgccatacgaacactacaaggggctggttgcagcgagggagacaaagaatgacgacgacgacgacattgctgagcggacaaacttgggctttgtcaaacgacaggtgaccgctgcagtacagaagcggaagggaaacgtcagcgaacggaacgcaatgtacaaccagcacctgcgccggtacctgaagatgcgcaaggaacataaggagcggcccgtccgagtacagctcagcaacggcgctcaactgctaaataaaacagtggagacgggtgtgcaggtacggcctggtccggacgaaccgaaggacaagtccgtgatggttaccgacgaagatgaagaggaagagattgaagtgccaaagtttttaaccccaacaagcccgacgcagggaagcagccgatcacccaggaccaataagaaagcagcaaaacagcaaaaattgatcgagaagaaggaccacctgttggccatcattatgtctgatccgcagagattcggcgcaactgaccgtgggaaaatcattaacccaaagacgggccgagagtttatcgactcggacctggcctggtcaattgaacgcctggtggaccctcgcccggagaatgccccttcgccacgcggaaccaaagagttgaagaagaaactcgcacagaatccgctcgccagtagcctactcaatcgactgtttgttgggtctgggttcgtcggacaagtcaaacaaacgagaggatttgttccctcaaaatggacaagaaaataaacaaaatatacaccgatccggccaatccgggcgggtatgcgggtgcgagtgccctgtacgcggcggtgaaggagaagcacccgaagttgaagcgtgccgagtttgaggactttttgcaaaggaacaccacctacgcgctgttcaagccaaagagagacaagttccgacgcctacgcactgtgcctacgggtttcatgccggtgagattttgtgcggcctttttacactttattcacgggttcagatgttcaggcggacttggccgatttccaagccctttcgcgcaagaacagcggcaaccgttacttgcttttggctgtggatgtgttgtcgaggcgaatgttcggctctcctgtaaagagtaaacgaccggcggacatgaaaagggcttttgaggagcttttcgagcaaatgccaagggtgccggacacactgtacaccgatcgagggctggagtttgtggcaaaagcgttgaaggagttttacgcggagaagggcattcaaaagtttgagaccagttcaaagaagaaggccgccgttgcggagcgtgccatacgcaccctaaagactcggctgtacaaatatttttcctccaacaacacatcggtgtgggtggatgtgctgccaaagtttttgagtgccataaataactcggtgtgccgcgcgaccggacttagaccgagagaaatcagcgacaccaatgcgagggaggtctggaagagggtgtacggcgaagggcttgtacaatcgaacaagacaccaaaaatcagagcaggggaaacggtcaggattcccgagcctaagcacattttcgagaagggtactgtaattcacacattttccgatcaatttattttaattttaggttatatacccaattactctgatcacgtttacacagtagatgaggcccgctcaaccaacccccagcactatttgctcaaagactattatggcacaaagttgaagagaaaattttatttaccagaattaacaaaagtacaagtggatgaaaacacaatgtatcgaattgataagaaatacaaagaacgagtgagagatggaaaaagagaaatgttggtgaaatttattggatttccggaaaaatattgggttacaaatgaagaaatgaatgtataaaacaatgaaaaataaaattattattattattattcatgtttacaacgacaatcatcagcggggttgttggctttacaatattcccaagtactgtagccaaagggcaccaccttcaacccgtggtcccgaatcacacccttatttacggtcgggttaaatttcttcgtcaagggcacggtgaagatctcgcccttcttcgttatccggaagttcttcgtcggatagttgaagcggacattgttgtcctcttggcccatcttattcaacaccatgtccttcatcttctcgaacgtcatcctctcgcaggcgtccgagtccatggtgatgccgcgcagtttgaccttgtactcgtcctcccccgtggcgttgttgcgcagccacaatccataggccttgggtccagctgaaaatttcaaatcattttaaagttattttgcgcaaattcttaccgcacacaaattccataatggtgtggttggggtactcgtctgtgagttccccaagctgctggccgccaggaagagggtcgctgagttctgacttgaagtcgtagaagatgctgtccgtgtccttaaatttagcaattattattattattatttgttttgattttaccatatagagaaggtgcgtgtcatatcgctgcaccccattttcttgcttatacaccaaatgcagcgattcgagcaggtgcacccgcgctgccgccgttgtccagagggcaatggcaacctgagatatttgcatttaaaaacaaacgtttccaagtttacattgctggtgccgtgctccactacatcctcatcgcaggccttgtagcagaccatccagaatttctccgtcagctggtcgatgctgctgatttctattttggtgttgttcagcagcttggccaactcggcatggcattccacgatctccgtctttgtgagccggtttctgagtgcaaaacggccccacaacgagttgaggcatagcttcgacagataacgtaggccgggattcggcataattttgttcgcatcgaggcacactttgttgccctcccacggcttattgatgtagtcctgctgtcgacgctcacgctcctcttcgtcaatgccgacatctctgcacggtgctgggtatccacttgctgaagcatttt

SEQ ID NO: 2060 - DNA, 4353 bp, Heterodera glycines
  unsure (1)..(4353): unsure at all n locations
aatcattttaaagttattttgcacaaattcttcccttacaggaannccanaanggngnggnngggggacncgcctttgagaaccccgagccgccggccgccaggaagagggacgcagagggccgacccgaagncggagaagaagctgttcgagnccanaaanggagcacacaaaaagaggaaaaggaccaagcgcacggacgacaccacacagagaaggcgcgagccacaacgcggcaccccaannncgagcagagacaccaaacgcagcgacgcgagcaggcgaacccgcgcggccgccggcgaccagagggcaacggcaaccggagacaccggcagngaaaaacaaaagaggccaagcaaacagcgccggggccgagccccacgacacccccaacgcaggccaggaagcagaccanccagaacaccaccgacagccgggcgaggcagcggannaccatngaggggccgaccagcagcaaggccaacgcggcatggcatcccacgagcgccgcccacgcgagccggaagcagagcgcaaaacgcccccacaacgaggcgaggcatagcttcgacagataacgtacgcgggattcggcataattttgctcgcatcgaggcacactttgttgccctcccacggcttattgatgtagtcctgctgtcgacgctcacgctcctcttcgtcaatgccgacttctctgcacggtgctgggtatccacttgctgaagcatttttgtttttaaattttgtattacttttttaaaaaatgcttacactcgaatttgatcttcagaaatttgttcatgtacgaatggaacacgctatcgctccaatcgcacaccagcggccaaatgtacgctcggtagacgtgcgtcactttgtagcctgatcggagtgccgcctccaactcaatgtgcgtgacagatgtggaaaaacctgtgaattcttctctgtaaaaattactttatttgcccattttacccctttcagcgtccgaaaagtgtggacaattgtagttggggtcaatcaggccgttcgggtatatcttcgcgcatgttcggcacagcggaaagagagtgcgcttgctgttccgatgcggcagcacggggatgtcaaacaagcaatgccgtgggggcaccgcataacatttgatgatcccctgaagccggacgccgtcctcgcctacaatatgtgccgggcagcgccaatccactttcttgtcgaattgcaccacggttgggtggccaaccgggtacttggtgaacatgttgcttaaaaattttaaatttttaaagtcatttcttgtgccatttcttaccgggatgggtaaaggctgttgaagtccttcacttttattgttcggcttttccattctccattcttcgggttgatcaccgtcgccgcaagccattctggtccggtacggcctaagaatttagcatattttacacagatttaatgggaaaattcaccgccaaagaaggcgtcgtggaagtcgatgggtccagagtccgggcagttgtcaaagtacgccctcatggccgggtcgtcctccagctgatcggcgatctcgcactcccacaccacttcgacctcgaaatcccgcgcaattgcatgcgttcgtttggcatccctggcacgaatggcaccggctgtctcacccccgcccacaattgccatatcatcttggaagcagcgtggacaggcgtgccaatagcacctttggaggggtaaataggcaaattttgtggcattttctttacccgttgacttcgattgccaggtccttctcctcttccgggcgctcaaccatgccgtccaagctgtagttgccgtacttgaactcccctcccgggctctccacgtggcgaatcgttcggtcaaactcgcgcttctcctcctcggaacgccactgagagaaaagaaaatgaaattttttaaaattattttttcaccttcaggtattttcgggcgacggtgctctgctttcctcgcttttcatatcccaggtgagggatgatggcaatccgctcattgtcgcagtgcatcaacacaacgaagaacttcatgcacgccgatgggatggtgatcgagtcggtgatgtcatgcttggtctgcgacagaaacagttgccgcatcttcaccagaccgtgggccaaaatttggacatctttaaaatttttaattctgtaagttaatttttcaaaattcttacccgtcttgcagtagtcggcaatcacctcgcacaggtcgaactccgtctcccggttctcctcgtaccactgctcgaatttcgtgcgctctgccggaaaaaggctgccggggtagtattcttccatcggtggcagggtgtccaggacagtgccatagtttttagcctgtattttttatcggtttttaatttctcataattatttatccctcaccttgttatatttgtggggaaaatactttttgttgtccaccccctcgatttcaaggtcgaacgtcttgacaaagctggccagtttgatcgggattagcttgtagctaaagtggggataaatttaaaaaatttgttcaaaatgattacctgtcacgaaatactgtggtggtgatggcaccccgtttgcgcgccttcatctccagcaggtggtttccctggcggatcagctcaggtcggactcccatgcgcaacatttccccataaatcagcacgtgatcgtagcgagagcctcaaattttaagattttaacaaatttttaaatataaaatttaccggcatgtgcataggcatacgttgtcactgattccggcttctcccccgcttcatcgtagcccaacatccagttgttttcggcatccagatccacggcatcatcctcctcatccccttccatggcctcgccgtcgttgttgttttcggcattttttcgctttcggcgcttcttcgctccaagctccataccgaggacttccgcctcaaagttcagcagccatttggtaaaagcggccagcggatcatcgacgacatttgcacattccacgtccgtgcgccagaattcgaacggcgcccatgagtaggtgcggaagcggccgcaaagggcgcaagcccgttccaactcctggtcccacacgcctttttcgatgcagcgcgtgcaggtcacgtgggcaaagcaaaaattgacctgtgatttcacaagttttaatttttaatttgacaaaataattttttacttggtgtttgaatctggcgagttgcgggtccggcttgaagtccgtggtgcattaaaagtcgaagaagatgatccgcttatccttcttcgcttttcgctggtaagtgatgtagcagtcccgcggtgcgtgaaacccaaggcaggttttgcagaatttgtggccgcatacatgtgctttgttcttatgtacctttgcataataataataataataataattgtttgttgaaaataatttttaccctagtttggtaaataataccgcagtcaacacattttttttgagctgttgcaaattgatttcacaattgttgtattttctgtgccacgtttgattttacaatgtgtgactttggcatggtgtttgtagcaatcgagacttttgaaagtcttaaaaacaaaggtactaaatattaatcgataagacgaccttattgcatcccaaacaagactcaaagaagttttgatgatcgtcacagtttcctctgaacgcccagcccacgcgctggcaattgtgacatttccatttgcatttggccgaatgttgagtgtgttgaaagtacggcatctcacacttaaacttttattaatattaaaaaaaaaaattgtttttgttaccccaaagcaataattttgtgtgccgaacagctttccaaccgatttcacagcgtcataatgcccattctcaccattcacatcctcagtaaaaagaacacacagttcatgctcgcggtcgccggcacatgacttccatgatggcttcatccgaccggacgtttcgaagcagtaaagccaaaacaacccgggatgaagacgctgataataatccttaattttttaattattattatttattttttttttaaattttgcctggatcctatcgccgtattccacaacacaataaaagggcaagtccatgtcaatattgcatgctcggcagagggcttgcacattttcgagttgtcttctttcgtccttcttgtattcggagaaacgttgctgaggcaatacgaatttcatccgcttttattcaaaggctcggaagaggcagaggttgtccgcattctgcaggccatacgtcgctccggcagagataccgaaaatcacattgaggacccgccgccctctgccg

SEQ ID NO: 2061 - DNA, 2904 bp, Heterodera glycines
ataatcagaacagataaccatttttaatagaatttttgaaattattcataatatttttgtaaaaattatgaacaatcaaaaaaaaataacttaatgagtgaatagaaaaagcaatattttaatacaaaaataattcatttaaaactttccatttaaatatatacttattaatatttaaaatatttgtaatgtaaaaagtgcatgaatatttggtgaaaacaattattttgttaacttttggagattaatgccatcattttaatcctaaaaatattttaaaacaatatttaattgaaaaaaataaaaattagcaccaatactttattaatcgtggttggccacttcacaaaagtgcaaatttgggcgcctcacaaaaaaagtgaaaaatcaaaaacctgattttttctatgatttttattaattttttaaattaaaacataatttaattaaattgtacttaaatacacattattcttaaagttttttggatcacgaataaaaataattaaaatttacctaatattaaaaatcatcagcaagattacttttaattttttaaatattcaatggcgcccaattacaaaataaagccaaaggtagtatttaagcatcaatttattaaatttaaaatatttataatttaaaaaattgataaaaaaacataggaaaatcagttttttgatttttgcactattgctaaacgccgatatttgcaatttttgtgaagtaacctagcacctttattaatgaattcaagaaaagaaaagatgaaaaaatttaggtattttaaaataattagaaattatttatttaaaataaaaatattatttacattttaaaataaatatttgtttctacaataattaatattaaaatctactcatagtaattacataaaaaaaataattgaattacaataattcgcattaagaaaggcaacttaaataatagataaataaaatgcacccgccatcatgatgtaaaactggagatattggccatgataaaaacatattgaaagaaaaaatttcgtctaattaaaacttattaaagaaatttttttgaaacacaatacgaaactaaaacatatgaaagcgctttcaaataaaagttgaaattaacacatctaaaagttcaatagtttgaataatttaaatagaaaaaagacggtaaatttttccgattttatttttaaaattaaaaaacaaatataaattcattattttaaaattaattgacggaaaaaattaattaaagagcatttgattgaaagatatgaatttcacagattaaagagcattaatacgaaaaggaattaactatcaaatcataatgaacttaaagtaaacaaaattaaaaaaacataaaatgaaatttaaattaatttttctaatatcttttatttcaataaataattaaaataaaatatattaagtgccgacgaaattaaattcaaaaacgaacaatttctatgttttaggacaattcattaaaattttaaaaaatttaataataaatttaatagcagattaaaaataaggagaataaatgacaattggcacataattcaaattaagaaataaaaagtctaataaaattaatattgaatgaattggaaaaagaaggtgcataattttgaaatattattgtttcaataaagttcataaataaataaatttaataataaacttttaggttttttaattatttgtataataaatgattgaaaaatcattaaaaacgatttctataaaagaaatatttttgaagaacttcaaaaacttttttattaaataagaccataactttttatcaactgaaaatatataataaattattaaggcaaagttaataatgtatcttgaataaaattaatcaaatatttgctacagaaaagtttataataacataacagttttaaaaaccacacaatattagtaggactattttcaaattagaaaataaatgtttaaaaaatgtttattgtcattaaccttaaaataacctttataatattattatcaatgcattagtaatatatattgaagaaacaaaaatataattaaggattttatttgctatatgtacatattgaatcaaaaaattcatacaccagccacactgggaaaattacatgcatccgggcaagttactgtataaaaaaattagatttttaaaattaagctggaaatatattattattaaaaaaatgcattctaacttaatttcgaaaaataaaatttcaacaaatcagataaaaaacaatttaaaaataaacttagcaaatgtgaaaattttttgctatttcttttttttagtgttgaaaataattgtatgaagaggcgctcgtaaaagcctcctgcccaaggcttatttgggcaatgaatctccatttgattctgttctgagtcaggaagttttgtacttcctgatccggacccggagcactgagaagctccagggttttctgagcgagtttgaaggtcgtagcgttgtcgctccaaatgatgtcgcgttttcctcgtcgacttatgaatcgacggagaaaattgatgaatgattcagatgtgaggtccaatgttgcctcaaggtagacagcgcgcgtcgcaaggcatgttatgatgaggatccatgcctttattttttctccggccaacgaaattgttgttggcccgagaaaatcaattccaatcgactgaaatggagcgtgtcggtaatgcaaactgttgtgcattcattcggcgacaatggagacagtcccgaagagtccgtttaacatttaaacgggcacttggcatccagaattcactcaagaattctgtcagagtggtgtccactccaaggtgatgccttttttggtgccgatccaaaatgatcagctttgccaaagcgaaatgcttggcg

SEQ ID NO: 2062 - DNA, 6918 bp, Heterodera glycines
aaactttgcaaaacttaaaattttccggggactttcccttgtaaaaatggaagagccgatctcgagttagaaaagaaactttcaaaaaacaaaagagaattcgatagagggggtcaaactatgggcctatgcaaaatttgaagaaaatttgaacatagggaaaaatttttcaactaggtgaaattttcaataattttaattcttttttagccaagtccacaatttaaggccaaaccaaataaaatttacaatattctccagaattttcccttcaaaatgagcataaaatggttttatttgctctagtattcaccaagttataagctaaaaaaatttcataaaattgtcgatgttggacgtaaccaacgctttttgaatatgattttttattgccacgaaaacttttattaatgaaaaaataattctgccttcttctttaaaagaagaaattgaaattaacacacaacatagggaggactcgaacttgagacccccttttggtgactaactcacagaccactaagacgaaaaatccagcataattgtacttggagcccaaaattgggccgctgtgtacacacaccgtccgaaaaaacgagatgtgtacaaattttgcatatcgatagagaaaaaaacaacacattcagtaatacagccattttatattttatacactttcatgaaaacccgggaatcccgttcccattggaaacggggtaaatttgcgaaaaaattcctagtgggctggaaatttcgtggaaacgaatatggcggacagaaagagtacaaaattttccacagcatgcaaaaaaccgcattctttgtcatttttaaattttgcttttgcatagaaaataatgacccgtgaaaaaatcggtgtcaaaggctgagagacggcgctgcttttttgacattcacatcgatgttgataggtcaggaggatgtacggaggagagcgaccatctcgcattggattgaaagagaggggtcgttttcttaagcggatgggcggctattgtggcgtttccttcagcgcattgtccaaagggtaagtgaatgaatagttcaaaagtttgattggggatggccattcggattggtcatatcgttttggcccagcaaattatttgtactttttttcctgtacaaattatttgctttatagaataaaaatgccctctccctctggactcccttggcttcccgtggagaattgccaatgtcctattttggacaatgagtgcattcgtccactcaattacacaaagcccgttatctgtgctcacaagagcatcaaaaacttgttggattttgttgcttccccagggcaacaccctggtactcacaatcatttacctatttattttttctaatttttaattaatttagtgttcgcgaatgtccatgccactgataatggtggctcgtgtgccgctcagtggtggctgattgtggttctgcagctactggttgtgctgctcattgtatgtttaaaatttaatttttaaaaatttaattattttaaattcttctcaatgttttcacgctatttaattaactgttttccagcttggtctgttttttgcggcgatgtggagcggctcccgttgccgcaaatatgtgatgcgcgggccggttgaaatgaccgcgcttcgccggcagagttcaacccgccgtcgtggtaaataataaatttatttaattaaaataattaattacaagtattaaaaacttcccgtttccatttagtggtcaactttcgtgatccacccgagcgcccgttgaccatttccgcacacatgcgtgcgcgatcggtaagacattccattgttaaatttgtaaaacattttgctttttcgttaggttcaatgagtgattgaacgatggattggtggatcgaaggatggatggatggatggatgaatgaatgaatgaattaattaaattaaaaggaaaataattatttaaataaccgtaaacttaattttttttttaaacaataaaaaacattctgttctgtaaagaatttaaagtggtactgtaattgactgattaaatttattacacaattaaatagtcatgttaaaaggtaacttaaaatggtaattaaatgggcggagtttattttataggcaactgtatataagcataacattttcaccccgcacaatcccgaaatcattcctagaaatttcaaaataaaattaacatttccaaatatggcaaccaatatgcacgacaaaaagacgctgctcaaccaaatacttggtgaagcggatattacagtttctaatagtgggattaccgtaagcggtcctcgcctctccactcctcgcttcgttccgtttgacgaaattggcagatgccactgctgtaagtcaactgaggtcgaagtcgacaccatgttcaccaaagaaggggtcacaatttggtgtagcagaattgacaaagtgcaatttgttccctttgatgtcgtctatgacctaccgggccattgctttttccgactaaagaataaagcacgagtgttcaacatcccgtatggagagcctccaccaatgacgtgcaaaaaccaaaatagtcaaagtgatcaacgagaattgaaacgaaaagcaaaggttgcgctcgatttgttggagaccggactaatggcagatgccttacaagacagtgagagctggaagaaagcaaagacagcaatgaacgtgctcggaaatgtacttttggccgagtctctacctaccgtcaaaaaagaaaacaaaaactctccggcttcccctgttgaccaaaatattgcgcagccaaaggccgagcctcaaaaagaaaccaccaaaaaacgagaagctagcgaagagaagaaagccccaacaaaaagccatcactcacaacgtcaatcaagtggcacacgaaaaagcagcaaagagttgatgaacgaaaagccatcttctcctcgtgctgagtccattcccgtacagcacttggactctgcttccacgcaaattgatgacgtcagcgtgcctaaggcggataaaataccaaaaagcaacaacgaagaagacctcggtgacattgataaaactcttgatgaattttttgctagcataaaagcagcgaccaccggtatgtaaaatgcatatttaagtcattcacgtcatcattacaacacaaattaaaatgcttaatacacaatcatttgttgataaagatatttgctttaaactgccttgtggaattattatttctggtccatcctcctcagggaaaacacagtttttgttgaaatttattgacgaattactaattattccgcagcctgtctctatactgtattgttttggggaaatgaattcggcagtgccggcacttcaacgggcgggtgttgccgtatactcgggtgtcccttcggaggaattgattaaacaacattgcaaacctctcctactcattctcgacgacctaatgctgtccattgacgaacgttatttgtcagagttatttaccaaaaaatcccaccaccaccaatttgcggttgtgtttgtaactcaaaatttatttgaacgaaaaataaaagttgcacgtctgtctgcgcaatatttggtgctgatgcgggcgcccaactcattgctgtccattcgaaatattggcgttcagcttttccctcgtcagcttgatttttttcttgatgcctatcgtaaagcaacagcaaaaccttatggctatttgattgtggatatgcatgcttcttcggaccctcaattgcgacttcgcacaaacatatttaaggatgagcaagaggaggatgggggtccagttgtattcataccccagaatggagcatcattctaagcaacaagcgaacataagccagcttgtgcgtgaaaatttcgggtttttgcgtgttttatcgagaacaaagtccccaacaaaatgtagccgaataattagaaaagcaaacaccgatcagctgttagcactggtcgaaatttgtttaaacattgtctgctcccgcttccaattgactactcgacagaaaaaacgtttaatgcctcatgtggagtttgtgcgatgcatgagcagagcgagaagcgagcggggcgcgaaacggaccattgttcagaaaggagcggggattggtacattcgctgccctattgacacctgtactcattgaattagcaaaatcagttatatccaaaactatataaacaattccctaacaattattgttgaatcattttaaatggctaataaatttattcttgttccacaagaaatttaccgtggtctcacatccgcacctagtacgggggatattaatttggataccgtacggcatgatttggaccgtaccagaggtgaacgtgccaacccttctactaaaaatgtccgctataatcaacagcttaggcgctacttacagatgagacgggaggtcgcagatcggccatccaaagttgagcttaccaagggaataagtgtgctgttaaaaagaggtggcgaagacggagacggccaagttgtggatacacctccccgtcctcctggtccccctcctcctccgccacatcgacctcgtggtccccctcctccgccaccgccgcctggtcgtccaccaagccctccaggtcccggtccctcgccgccgggaagtcctccgcctcgtccacaacgtcctcctagaccaagcagagctgcgccgcctcggagaaaccgtcgtctggagcaatggcggaaaaggcgatacgatatacaacaacgacggcagccagctgtgcgcgactttcttgcggaagcagctgcagctcctttacccgaaagcgacgaagaagctgattacatgctggagaatggattcgcgctgccagcgccttcacaatactatggtgacttgcctgtgctaccagacaatgcggatgaaattgaggaaatggacactgttcaacaaagattggctagcaggaggaaactaaaaaaggacgacgacgacgacgatgatgattggcaagacaaaaaatacaaaatttactatccacctccccctgctcgccggcccccgtctcgtccagcaaaaattgaaccaatgcatccaccacgtcctaacccgaagagagagccacagccaaaggtcgaccctcggccatccacatcaaagcaggccgatataaaacctaaaagggagccaaagtttgagccggatccgcgaccatccacatcacggcaagccgggtacaaccccgccccaccagctcccaaaaaagagccaaaacatgagtggaaacagacaaagcggcgccattctcctcctcgcaccgcaccccatcggattccgaaaagagagccagaaattgaagaaacaccacaagagcaacctccggctgctgctgctcctgctgacgttgaaatgccccatgttcctccgcctaggcgaggaaccaaacgccgttatcccccggaaaatgttgaggatggtcagccgcgcttacgtaagagagtgaggcaagcgagaagagcaagagtatattattcgccagagccaggtccatcgacctctgcacaaagtgatgaacaacaacagcaacgcgaactattttccattccgacaaatcagctgacgatggcacaaagagttgagctgatatgcatcaaatgcaatcgctattccgatcgtatgggtgttcggggaaacgcaattattaacaccaaaaatggacaaccattggtgcgaagcaatttacgaatggccatcaggtatataatagacaggagagcaggccgtcccacgattagaccaccaggagcggacctattggaagaacggcttaggcaggacccaattttgtattcattgacagctccaccaaagagaccatcacagagtacaaccaccaggacggcatcgaaaatcaaaaaagagtttcgcccgaaaaaatggaattaataaatgccactcttgacaaactgtacaacgatccatcctcccccgcggctttttccggtgttactgcactgtggaaagaggcgagaaaaaagataaaacaattaagtaaaaaagaagtgcagaactatttggaaagtcatcgtacctacacgttaatgcgcccccgacgggtgcacttccggagagcaaaaactgttgcagcaggattcatgacagatgtccaagtggatttggccgattttcaagcgctttctcgtcaaaatcgaggccatcggtatctgctcgttgcggttgacgtcttgtcaaaacgcttgtttgttgttccgttgaaaaataagagggccgaggagatgctggaggcattcaaggaacttgttaagcaaatgccaatggttccacatcgcattttctccgacaaagggactgaattcaaaaaccaattactcaaaaaatttttcgatgagcaggaaattcagaaacatgagccagtccactcatccgtgaaggcatcagtagctgaaagagccattcggaatgtaaagcaacgactgtacagatattttgcagagaaggaaacattgaattgggtagacattgttgaggaaattgttgaagggatcaatcactctccgtcacgggtccatggaatgcgtccaattgatgtgaattttaaaaatgcacaaagggtatggaaacgcatgtatcagactcggcctcctattaggcgtccgccgcgcttctataaagatgattttgtgcgaatgactcgtgagaagggacaattcgagaaggggtatctgcctaactacggtgacgagattcttgaggtagatgaagtgttaaaaggtgtacagcctgtacgatacaaactcagagatgatcatggtgagaagttcaggggtacgttttacgaacaggaattggcacgagtaagaaaagacactgataccagttaccgaattgagaaagtgattcgtaaaa

SEQ ID NO: 2063 - DNA, 830 bp, Heterodera glycines
taacttcaagtgaaaaatgtcaaatttgtaccatcaaatttattgtcaaattcgtatgctgtgtaatgtcagtgggacaataaaataataattaattagggcagataattctgcaacaaaaagagaaaagtttccgggtatcgttccaaaaaagcgaatggtttatgatattgttaggtgtgttcaagtagagtcaaagtccattgccgccgtcattcaccaccaaaactgtggatgttcattcagccaacactaaacaaaatcgtagcggaacttctcgcctccgggctcgcccaggtcgggcagcgaaccagtgacgatggcctttaaaatggaacggcttttcgtatttccgggaaaccatggcttaaaataatggaaagaaccaacctgaatgacccattcgctggacacggccaaaccgccccgttcctcgaccagcttggccacctcggcctggcagtccgtctccgccagcagcacatcaacgggaggctcaactgtagaaataaatccaaaataagtgtaataattcactcaaaatgtgtacttttggaacagaattccatcttttcctcaaggttagcgctcgatttggaggcaaacggttcaccaggaccaatgccgactaatgttgcgcccaaattttgcaggatcggtgtccaaatttcggcaaaactgacctaaagtgaaaattgtaatgtgatattttttcaattttcagtcatgttacaatgccagggtccgtctcggcggagctcgaccaaatcagcacacgctttcccttcatcagcacgcccctttagtggtctcctaaatttgcaatgttt

SEQ ID NO: 2064 - DNA, 7062 bp, Heterodera glycines
catttatcttcatatgtatacataaaatattgtccaacaaaaattattcctacaaatttatggtacaataattggtgggcaacaggcaacaacaaaaacagaataacggtgtccatatcattatgcttcttctcttttttttccgtaaagtcttcaatgatactgcccccgcgctcctcaatcacttcttggtgttgccgggcagtttgaccttctgttcggctgaggatgcatcagacaacaggctcgaaggaaccgctgaaaatgaaaaaaaaatattttcgcgttaactctttcgcctcaactcacaaaagtcgggaggagcttcatcagtctaaaaaattaaattgcaatacatagagcctcaaaaaacaactcaccactttggtgtactcaggcgaactctgtcgcttccctttcttcttccggccgaaacacattataataataattgcagagaaatacaattgttgaatgattacagagagaatgaaaatgagtgttcattccgtctctatttataaaggcgtaaagacaaaaaatgggtaattaatcggcggcactaattgaaaattgcctgtttaattaatgcgttgggctgatcatttaagccttaaatgggagttaattaaggcgggtggtttgacgtttaacttaatgctatatcttgttaattttccggctaacactaattgacacgaatcgctttttttgttcaaaaaaaatgtcaaatacaaatttcagggaaaatttttttgtataaaaatggaaaattttatgcgttttcttcacttcaacaattccctattcttcacaacaattatttgttcgtctccaagtctcgtcaaacgtctgcatttattgttcatcaatccttcatcggttgccacccgcgcgcacttcaaaatggacgccctcaaaagacttgcgagccgtgcacggcaggtaaaaaaggacggattgtggtgaatcaatttttttaaaattgccatccctgcacatttcagaagtcggcggagatcatcctgagcgcggagaagaccgaaatcggtaaggagggcatttttggatttccaaaaatcaaaaaaacaattccccaaaattcaggcgccgagcttgaacaattgctgaccaagaccgacaagacggaggagcacatgaagaagctggtgcatgccatcgaggtgtacctgcagccgaaccctggtggacacttggaatttgcaatttttggaggaaaacactaatttttcccccaattttcagcagtccgagcgctggacccgcgaaaggacaaatccggccgacagaatacgctggacggtcttggggaggcgatgaaggtgtggtttttggcattcacaacacattttaatgcccaccaaaatttaaggaagcagcatcgaaagcggtgggcgccgagtcgaccttcggaggtgagagaatttgaatcggaaatgctcaatttaattaaccccactaattgcattttctgttcttttcagctattctgctgaaggtgtcacagacggagtccaaaatggcagcaggggaacgccaactcatccaatcggtcaccacgcaaaccttggcaagcctccggcacctcctggagaacgaactgcgcaccgtccaggcgtggatttgcaatttttcactcaattttcgacaatttttaatccaaatccctcccttttcctttacagaaggaacgcagcgtgttgaacaagaaacggctggatttggacgcgacaaaaagccgttggaagcgcgcctcggacgacaaaaaacccgctgtacgtcgtgtgttcatttcgtcgccggggctccatttttcaaccatcgaccaatttcactgttttttttttcaggttgaggcagagttgcgcaaagcccaagacgaatttgacacccaactggagaccatcagcactgcgttggaggctcttcaaacggccgtggtgagaattctcaaccccaaaaaattgtttgacaaaatttcaattcttttccaggatcgtcaggctgaacaattggtgcagttcgtggcggcacagatcgaataccacagcagcagcctcaaacttctgaaggacctgaagcgcgacttgggagcctagtgattgatgagcacaacagcagaagaagaagcagacggatgatgagagacgaattgccatggagattcatattggacatacccatatttgtgtattatactggattaatccaaattgatgcgtatatattacttgtacttgtacataattgtatgtgtataataaacactaattaacccgtgccatttgtgtgtttaaaatcagattcgctatttaacaaatttgactttttcgtgacaaaatggcggttaaaaaaagaatgcattgtcattgccgaaattatgaattgaccttcattctattcttgaaaaccaagataatgtttaccaaaaacacggcttttcgccaaaaaaaatgccgaattcggcgttttggttggtccgcttcaattcctaaaagcagcaaaaacagcgtatgtaacgtacgcacttcacgaatccgtggtgaaagagttttacggatttatgtgctcttatttctttgtcattttcaaaaaacttttactaaattacgaatttctaagccaataatggctagaaaagagcgttttgatcagctttatactcaaaatttttgtttgcttttataattcagaaaaagaaaatacgccgacacttttgtatggcagagcagagaaagaaaagcagaaaaatagtgcatgtacatgtacaatccggaaaagaaacaaaagaatagttagaaagtactgttcgaatcttccctttcctcgcccctctttcatcccataaattaacacattcattcaacttttgcggtgctttatcccccccccccccgcaaaacgaatttgaaatgttcggcaattcattcatttattcacaagcacagaattgaacgaattggaatgacagcacgtgaaagtcacacacaaaatgcttcttctcttttcctcccgcgtcggtcggcggttcatttggcgtccgtcggcgcttttcctccttccctttgtttgttaagccgcttttcctcctcctcctcctccgcttttctgccgttcctttcttttgctctctctctctctttctctctctgttttctttgttctttctttctttgtttgtttgtctgtctgtccgtctctcctcccctccccattcaaacatttattggcttttagtttagcgtaaaattcattggaactgacgagagaacaaagaaaaagagaggtcatagaacactttgggaacgaaagcttcacaaaaaaacataaaaaaaattgagagatggagatgaagcggctaaaatcagggaaaatgccaaaaaacatttttttaatttcctctttatcttttttttttttgcatttgtgccatatcgaatgtagcttaatttttttccgattcccgagatatttaaaaagtattcaagtggtgccaacccaaggaaaacaatcccattaattttttaacattttgtgaaatttattgactgtgaaaaatacttaggctgaagcttgtagcagggatttgtgaaatttcgtgcagttttcatttcgtcaattttttcgacactttttttgttcgtactcaattaaaattttatatttaaagattgtaattttcatttagtttttgaaaatttttgatttttacacatcctatgcttgtcagcgatttaattctgtctggaaaatccggcatttgtcgagtttttggattttgtccatcgtatgcccgggatggcaccttttcaagagcaaaaccttggcacgcttctggaattttttacatgaaattctcggaattacagattttgacttttaaaacaattctgctgttcacctcggttggcacaaatttaaatttttctagaaatcccgaaacattttaaatatgtaaaatctttacaaaaaattcccaaatatttttgtataatttttttaaaccctaccacatttattctgctgactatgaaaattcctttctatttttgcgcatttaaatgaatgactgacatagtaattagtacataaataattatgatgatcactttttgtcctctcggcgacagcttctcactttgagatcgatttgtttgttgtgaaagaatgaattatttttgtaaaaattgccctatttttgcaaatattaattaaataataattatgtctttttggcattttaaaaatattttattatttttgtgcgctttttgcaaatgccaatgccatcggcggaagaaacaaacaatgaacaaggcaacaacaatgaacagcgtttgctgctcaaccattcatcgaacactgaagaaagcttatgcagcagcgggtgaaaaaaaaccaatggaaattaattaaaaattgaaaattaaaattgaaaaatacctaattaacagggatagaaaggatttttacacaagattttctgcgggtaacattttaggagataagtacgaaaattttgcggatttttccgcccaactttaaaattaaagcgatttataaacacccaaaatgcccgattttgggagtttggcacttcaaaacggatggcacgaattccgactttcggttttcgccatttttggggtaggaattccgatttctgaagaatttttgggccacggaaatgccttccctgcttcaaaaccaagttgaacctttatttgtcgggccgctaatgtccgattttcagcaggccgcaaatgtcttaacacgtttggcacataaaaaccggtctacgtcagttgggccccagcatgtttttggactataactttttttgtttgtcatccaaatcaaactttattggtatcattcgaaagcccttaaggctgtattagcctgcaaaattccaaaaaatttcgtcaattttattgtacgaactgccatgaccccctccctgattgtgagctgattgccggcaattttcttttcttttttgtttctgatttgttctgacgttagtttgtggttgcagcggagtttaaatttgccaaagaatttgcataaactgaaaattcaaatccgtggcgaatgccccgcggggtccgcccaattctttccgtttctccacaaattatgcacatttaaacattttagtaaaacatcaaacaatagaaaaaagcttttgtttcagagatgccataattggtgatgtattattaaacaaatcattcgtcaaaaaatgaaatttggtccataaaatgcgggaaatatttttaaaaatccaatttagggcataaaaagagacgaaaatttttaattaaaaaaagaaacaaaattcaaaggtgtcatagacatcagtggtggcattccgaggcccaaaaaagtatgggaaatcgaattccaacgtccaaaaatttaccggaaatcggaattccgaccccaaaaagtcggaaatcgggaaccgaaataatgaaaagcttttttttgaaattataacaattttccataatattttttttactttaaaaactaaaattaagccaaatggcaattctgaattatttagcattattttttaaatgtcactaaaatttgaacctttttttaaaaaatgtttacgatttataaactgctgatgatgagaaaagccgccggcggtttttgatcagcggaattgcgcagcaaataaatgtcaaaatgaattaatacattaaacacagtcccgaggtgaacagcagaattgttttaaaagtcaaaatctgtaattccgagaatttcatgtaaaaaattccagaagcgtgccaaggttttgctcttgaaaaggtgccatcccgggcatacgatggacaaaatccaaaaactcgacaaatgccggattttccagacagaattaaatcgctgacaagcataggatgtgtaaaaatcaaaaattttcaaaaactaaatgaaaattacaatctttaaatataaaattttaattgagtacgaacaaaaaaagtagggttcgagccccgtggggcgggggtggcttttcacgggggcgggggatgcgggggtcagagtcacgggggcgggggcacgataattccgcccccgcggggacgggggcggggtttgctttgaattaggtccaaaaatctcacaaaaaaatattttttaagaatgatttctttggctccacattcctttatttgttgatcgcctcgatactatttcttttgacataaattgcacagatttcgactaaaaagtaaccaaaatttagggattgttgggtaattttttttaagaaaaaaatttgccactgttgccacgtgaaaagaaggcttgggattgttggagatggagcagcaattcgtttcactctcatcggtttagtcacaatcaaaatttgtaattaattttaattcgctgtcattcattggtcattgttactaaggaagaaattgcccgggtggtgaaaacgcagaaagagtgggttgtgtcgagtggttcgattcccacccgaggctgacaccttagacttaagctttcaaccagacaagcacttttccttaatttatataaacatttttcttaaaagcgtaaagtgccaattggtggtgtgtgtaataataataataatgcataatttgtgggaattgggtggtgaatgagggtcacattctccgatcagtcagccaaaattggtcgattctgatcagcaaacggtggaaagcataaattatatgtaaaattgggggggggggaaagaggaatgtctgatgtttgatgggttaatgatgggacacaaaaattgatgatggaaacgaacggggcgatttgtttttgtgggtccagcggcggtggtcggaacggaaggcaagaataaaatagaatttgagagaaagagataaagacgaaactcatcgttacaacagatgatgatgatgatgcaagtcgggaggagtttggcggaggatttgaaaaataattaattcaatttaaattgtgtaataattaaatttattgttccatgacgtcatatgcaaaaaa

SEQ ID NO: 2065 - DNA, 2495 bp, Heterodera glycines
gtgaggggaagggccaagggacgatttccaatccgagcacagggaatggcgcgcgacccgaaccaatcgaacggttaagccattcccaaacgccggtggtcaaagcatcggggagggagctgagctatgtcctgttgttctcctgcttgctctgctattcaatgacttttgtccttctgtccaagccgagttggacagtttgtaccattcgaagaacaggtgaacttggaggggagggagggattgggaagaaagcccccgggggagagaaatgggcagagggaaggaaaagccaaaatgggggggggatcggaaagtttgttgtctgttgacttcatcacttgctcatgttaaggcatcggcctcgctttctcctgtctgtactccgcccttctggtcaaaactaaccgaatccatcgcatattttcccaggtgttctcactgctaatgaattccttttaattactaattaattgactcattaattgccctctgtccatttcctcctctaaggccactcggactcgacgtgcccctccgctgatctctcccatctctcaactgttgctcacttccgcctttattggctccaaaatgatcttctcattggtttggcttatcattcagccgccgggtaattccgctgggtgtccattcattaagccctaattggcaacatttaattacgcaactgtccttccctcaggcactcgccactttcatcccacccgtgccgaagttgtgctcacttgcattgtgcccgaccaccactttctctattccctcgcctatgaaagccttctgttaattatgtgcacagtttacgccgtgaaaacacgaaaagtgccggaaaatttcaacgagacgcgttacattggcttttgcatgtattttaatttttgtgtgatttggcgtccgttcgctttttcaatttttcccttaaggtacacaacgtgtgttctgtggggctgtctgattctgttctttttcggcaccggcagtgacttccaattgcgcacaaccgcactttgcatgtccacttcgatgagtgccaacgtggtgacaaatgggagaaaggcggggaaagggacggaccaatgccaatgccaatggcaaatttggggctgcaaatgccaatgtccaaaagatcaattccctctcttttcaaggcgttggtgtgcattttttctccaaaaatttacgtgattttgttcgaaaaggacaaaaatgtacgcaaagaaggaagtgggagcatgctgaacaaaaagagaatggggtcgaggtgagcgaagaatgaccactcatccattggctaatcgggggtaattaacgcactaattagggacggtgattaaggaaggagtggtggggactgggccattccgttgatcacattcagttattacgccaacaatttggccaaaaacaacaaaaacgcggccgcatgttgtgacgagccgagtcgagcgctttgctcctccgctgaccatcactcgtcctcctcgcccacagtgcacacggcgctgttgggcaacaacaaccacaaacggcaaagcaatgcttcgtcttgtcgctacactgagggccatgacagcacaacgaccgcgcagcagcaaagcggcggaatttgtggccaagacacatttttatgacgaaaattagagcaaaacgaaattcaatgatctcacaaagccgatttttattgttactattgcctcataagttttgtttctttaattttttgcgggttttattaacaagaaaaggtaacagtttgtctgccccccccccattttctaaatcttctaaaggacatgaaaactggtgcacctaaaaaggtcgtcaaattttttttccttcaaaaactcaaaatttgccaaatatcagaaaaaaagtaaaaatctctttgaattcatttttttcttttcggcgacatttaaaacttttatcattattttccgtactttttcgattgtttaatgaaaacaaattataaaggaagtggaattaagttcaaatatgttctgcgcttaaagttcacatcacttttctacaatgaaagggtgtttcaaagcatccgaacacgaaattcgtttggaggggtccaaagctgtcatctgttcgagcaaagaccggaaatggtcaaccttggcaaacccatctctgtcaagttcctgatcaccggagagttcagccggaagattgcgcaacaatttgatgttggtgagcactgtaactttgtcctgacaatggaaagacaaatgcattcaaaggtttactcagaatttatgattgtttgtttgtcagtactcactttgccggtgactttgtccgtctcatggtacaaaaaattgcagttgtagtcgaagtgttggtccttgaagaccgcctttcgaatcaccttgttcgggaacttcccgcgcaaatccatcatgaacttgagcatttggatatttgacttgcccgggaacattatttttcccgaataaacttca

SEQ ID NO: 2066 - DNA, 1838 bp, Heterodera glycines
  unsure (1)..(1838): unsure at all n locations
aaagagtgagaaaggttttgcaagaacccttaaaagcgtctatgtaattaggaaatggtgcaaagacacagaaaagcaaacaaactttggaataacaacccaaaacaacaacaacacatcgaacggcaaagttcgcgaagctcaacggacagttccgaagagcactttcaagagcattgtgaacatggaaaattccgttgaaagacaaaacgtttcagatggttaatgtttttgcggcacaattttccggttaaatttgtgttcttcggaacctttcctaagacacttaccaaaatattgtccggctttatgtccgcatgcaaaatgttgcattttttcagcagtttcattgccaaaagtaattgttgtgcataactgcggaccgctttcatgtgaaggccgacgttgttgccgtacttcttcagcacttccctcaaattcatgctaaaggggggggggggggggggaatctgttactaacaaagtgacgacaaaagaaaacacctgagattttcgaagaccaaacacaagtgattccgatggtaaaattgcctgtaaagctgtaaaatgtgatacttgtccaatcggtcggcctcgttcaacttcttcaacacttccaattcccgcacaccggtcttacgcctaattaaacatttaatgaatattattcattcaatagaaaaaagaatttatttaacggaatactgcagttttttgtgtctcacatcatgtcgttgttgcggataatttttatagccacttttgaatttgaacggtgagtgtcagttgcccggacgacatttccgaacactccggcccctgtgtagccgtaaacgcggtaacgaccgtccaattgttcgccgattcgcacaccttaaaataaaagaaattggaacatataaatagagcaaaaacaccataagattaaaaaaacagaacataaaatctaattctgaaatgtcatttaaatttattttttttatcgttaaaatgctgaaatttctaatttcttgtacattaaaccaatttaaaaaaacaaacgatagtatccttcggtgtcatcccaattatccttcaacgcagctgtggttgtgtccagggattggattgtggctgctttcgaaagaagctgaaacaaaacgaattacaaaggatatttggtccgttttacctcaacgggggcatcatcggcgaacatgtcgaactgaagggacccatccgcagtgtccgcctccttttgctgctgctcactttcttctacaacttcggcactttcccctttgcagcgttcaattttttccctttgcttctcctccagaaattggcgcattttctcttcccgttcatattcctcggcttgttttgccattcgttcagccttttttaatgttttataaatgttaccaagtcaaattcactgacctcatctcgatttttcatgtgcgatattttctccttcaaatctccaaagaaatcaatgttcggactgtccaaaatgcttggcgagtgaattggagatgacccagtcgtgccgggggtgtcttctccgtccatcttcggcttcttcagaacgtcaattgcttccctcaacagacggtcaacttgggattcgccatctttcccttcttcaccatcctccaggccaatgcttttgttacagccactgccattgtcttccgaatcactcgaagagtcgctgcttgacgtgtgctttggagatgaagcagcactcgtcttttcttggatactgtngtgaagaagaaaantgcaaatttaaataaaaacatcgcgtcgaattataccgatcgttttgctgctgctcattcacatgatcagtc

SEQ ID NO: 2067 - DNA, 5367 bp, Heterodera glycines
aatggttatttttgggaaaaaaacccttgtaaagtgttaaataggcgtaaaatggcataaaatgacctaaatatgttagaaatcaccttttaacatttaaaaaattatttttggaggggtacatttaaaaaaagttttttttttaattttttcactagaaatttctaaaaattttcaaaaattctcaaaatatgtataaaaaaataaaaaatttgccaaaattttggattttttttgaggatttccaaaaattttccgtaaaaaacccgcaaattatgtaaaaaaaaatcaaaatatgtaagaaatagtctaaaatatgtaccaaatatgtataaaaccccgaaatatgtaaaaatatgtaaataaaagtcccaacttttgtttgcaaacataaaaaagaaagtgtttttcctactatttagagcatggagaagccaggaaaaaaatatgtatttacataaaattgacatccctaataattagggttgtaaattatatggattaacatattttttctgcgcatatgctatgaagaaaggggctcaaaaatagcatttctacgttaaaattttttgatttgctgaaggtttttagtccatataaatccatattttgggggttttcgggaataaatccatatttcgccatttttgtctttttagtcaatattttggccgtttttggcaaattttcacaaaaaaaaatgcaagaaaagcgaaaaatgcacccctaaagatggactttttggaaattttaaaaaaattagaccccaaaaaatccgaaaaatttgagttttcgtcgtcattgccattttttgcgaacttttctttttttaaaaaagaatttttttgaaattttggcaaacttggaaatattttttatacgatggacgacaataaaaaaaatttgcatttttatgttttaaatccatttttggttgtttattgtttttttaagtttatttaagcaattattgaacacaaacactttttttggaatttttgagggtttaaaacacatattttgacagtttttgtccatattttggtccatatttggccatttttgagctttttagtccatatttcgggcttttttagtccatattttatgtccatatttgacgttttttagtccatataatttacaaccctaattattacctatttattttcttaccaaaaattaaaatactgatttggcttaattttgttacttttgcaataagcccacaccgtttcaaaaaacgagacatgaaccaataaatagagagtgcagagaaaaaaacatctctctttttggcgtactatttctttatctctgttaatagagaaaaaccgaatttacttcgctacgtttaattttttttctatacgttagatccactccaaattttgcatatcgatagagaaaaaaattacaaacaaaatgtaagggtttttaaacgcaaaaaaagggttaactaaaaagttattcgagaaacaaaatttcgaaccctcatatctttttcctaatcaatccaattgcttagcagttgcttagaaaaagcttctcctcataaagagctttcgaatgatatcaagtttttccaatttggttcggaaaaaccttcaaaaataattcccaaaattcgtcattttttaatattttggacaaaaataaataaaaatattcatgttgcacaacggactcgaaccaccaccctttgttcctttactatcttacaaaaaccacttcgccacacatgcaaatgtttttggaactgagaggccaaaattgaaacggtgtgaagccctaacaatgactggtattatttcaaccgaacccagtgtaaatacagtcgatgattccaaaagcagtggttcttctgcaagtaagcgattctcagctaatggactaaccgatactttgctcattcagaccctgaaatcagtgctgaacaggaattctgtctatatgaacttgaaacactttctgattcttctagcattggcttggttctgaggtatctatttatttgcatactttggcagtaattactttccaccaaaaagagcaatttatgattctggagatgtgcacaaattcacacatgctttggagaagcgaataactcactatgacaagagcatattgaaggtgtgcactcatcattatcagggctttctcgattcgatcaaacagcttcgtgggctcaaagaaaaatgtgcggagattcgcgtaattttctttttttaatgtttttcaatttatcatttaaacagaaaatgacagagacgactgatcaccaggttcaagaggaaagcaaggaactgctcaagcgcagtgccgaaattgtccgatatcgacgattacaccgaaatgccaacatagccattcaacaactttcgatgtgcttaccaatgttggaaaattatacacatctgcaaaaattaatggagcagaaaaagtaatggttctaaacgcgattttaggaaaataacattggactgtctatcatggctcttatttatgggggttaaactgtatgatagtccctatcattgcactcttcgagatcatatttttttaataaaaagaccatttccaggtatttacaagccttgaaaattctcgaagaacttgagcataattacttaaatcagcttcataaatatcggtttgcgcatcaattcgtcaaatcaatcaagccgattcgagaccagattagagagaaatcgtattccgaactgaccgacttcctcgaaaaattaattgtaatttttacatttatgatttaaaactgaaattatttgtttagaaaatctcagaaacaatcggtgaagacgcatgcaaacaagtggacatttgaatgattgaaatttatggaccttttatttttagaccgagaagttctacacacaatttcattcgaattccgctgagaaaacacaaaaagcaaaccaaatgggcagtgcaaatattttagtgggcaaaatggaattgttggatattgaaatttccgaggacggatcgttgcttagaaagacagcaaacgcagcgaaaccaatgcaaagggacaacgaaggaaaaacaacagaaaaaccgaaaccgatggctagaaagatgcttccggcgaacaaacaacaacatcagcatgttcaattccattcacaggacaaattggaattggggccggtccaccgatgctgccaaatattcaatgttatggtaggcatttggagaaattcagaaatcacagcaatttttaattcttttcaacaacagttaatgttattataacagggtgaccgcgacaaatttgaagcctactacagaaagcaaagatgcgaccaactccaactgattgttggacgacaaatttcaatggtaagttttttatgaatatacgaacaatttcagaatagtcaacaaataaaaatggtgaagaagaatgccaaaacggacctgtcaggattttcccgggatcctgtttgtttattgatgctaaaattttgttaattttgcataatgtttatccaattttcaatttcgctttttaaccccaaaagtgttcctttggtgtttggaacacactgccgaaccgtaaccgttcctttcagaaaataaaaactagaaaaattgattgaaatattttagctctcttgtaattttttaggctttttgtattctcatgtgggtaatcaaatgtgattcgatccgtgtcctatttccaaaccccaaacctgaatttttcaaaatatggtctcttttttatttaattatatatgttttttatttataaatagcaaaagtgttcactaatcaatggcgaaattatgaagtttttacgcttgcaaattaaacaaagaaatttatatgattttttattatgatttcttttgcaaaaaatgcctttgaaaataaatgattgacaataagagaattttgtctattttttaaacatccgaaaaatttagacagattccgtggaagtgttcgtaccatatctcaacgaaatcgtcggcttttttgtcattgaaaatcgaatcgctcaaattcagtcgtcgcttgtaaccgctggacacaaagacgaggcctgggaattggccttaaatagcatctcagactcaataaacgcacattttgtgagttttttttaattaaaatcttaacattttttgatttagggctcatgccaaaatgtttctctgatgttagcaatgaagaaactgatccttctgtttacacttaccaccaaaagttgtggttacgacccgaccactctctacagtctacttcaaaactttaggtaattatcgtttttctaaaaattaatttagtttctttttctgggataaatacaaccaaattttgatcgaggaatacagtgaacagtttgaaaatgcgttagagaacgacgattacacgcccattcaagtgaaggatgagcgcgagtatcgcaaggtggtcgaagagtttcccgtcaacaaaagaagcgttgaccaagaggtgagttgacccctttataatttggttataatttgattgattggaactcactcattttcaggatgcatttccacgaaaatttcccttttctcggtttgtgccaaaagtttattgccaggcaaaagaatttgtcgcgaattgtgtgcgctttatggaagacctgcaattgtcccactcggaagtaagcgacaccgtcagacgatatgcaaacattttattggccaaatggtcaaatgcgctgagaaagttcgtcagctcgcgaaaacgatcgcttattcaggtggggtttcccaattcctttatctgcaccaccgcattttaagctcatccaaatcaccattaacatgggatatcttgaacgatcttgcgaatttctcgagcgatttattgcggaaatggcgcgtaatttaagtggcgaattcgttggttcattgggcaacagtgggggcactttgtttgaaggagggggccatttggtcgcattgaagaaccaatgtatttatccgattggacatttattttctatgcttttcatttttagtgttcagagattctcgatcagaagttgagcaactcatagacgaggctttccgggagaaagtccaagtatttttggacaattgtaagttaacgtttgccggaatatgcacatatttcgatacttttagcgcattacgtttgggagttggaacagtcaagtggagtcgcaagtgaatttatgtgagtgatttcttacgatttgttttccgaaactctcatttcctttctttgttttagcactgatctgatcacttttctgaacaccactttcatttccttcaccaacttaccgcccgtacttgccagacatgtctgtatgcaggtaggaaactcacc

SEQ ID NO: 2068 - DNA, 2004 bp, Heterodera glycines
ttttctggttactgtggcctataacacactttaccttatttcatatgttttttagacgtgcaaattccttgccgatcgcatgagttcgatgttactttcgtcggagcatcgttcggttagcatcggtgcacttgagcagttttcgcttgatgtgatgcaatgcgaacttttcactgcccagtgccctgtgcccggtttcgaagataatgctctcgccattactttcgcacatttgcgtcaattgttggacttggtgatggggcccgactggacaactttctttgccgaaagggatgaaggaaattcgcatcgcaagggcggaagcagcggcaccaaatacgcccgagtaaaggcgtcgagtgccgcggcacttttggaaaagtaaacctctgaaatgttttgtgtccagctttttaaaaatttcagagtaattgaatttgaaaagaaaaacagtggcttttttgctattggtcgagcggacagtcgcgacaaacagaaactatatgagacaattctacgaaaattgcgatcatttacagattaattatttaatactttgtgaatatgctataattttactacctaacaataaaaaattgtaattcttcagatgtattattagattttcaacgggaagtttcatttttgtgaccaattccgggttccttaccccaaattcaaaacgaaaaatctgaatttttgaagttttgtttaaggattcggaaagagtagaaattggtattcgtgagcatatacctgctgaactgaagtattttaaaatataaactaagaaatgggcgaaaaattgagaattttttgtggtttcttcaaattttacgccaaaaatagctattttaaaattttgctttattttctgtaacagtgatttgtatcgatttgcgccaaaaaggtcattttttacaattttggagcttagatttcaaaaactaacaataagatacataaaatgggggtacgacggtgcccaaagacgccgcaaaatctcatgcaatgcatctatcgttgcagcctcctcgaagaagctgaaaagatgacatttttcgaaaaaaaattacacagcatcagaaataccgatgaaaaatctatcattccggtctctgatgtacatagtaaacattcttttaattagattattgtaaattcctataacatatacctacgcagtgtcaattactctttcttaaatcggacaataattagttggttttgtctttatgtctgacagtattgcgtcacgtgttaaactctcgcgacggaaatgtgtaaacgtaagtttaagcttttctgtccaatttttctgttcacttttccctttccaaatataaggcgccttttttagattggaaagtttgttttacaaattcggcaacggtcggagaattctctgctgaaattccatcggacatatcaggcagaattcattgattaattgtaataagtgacattctctgacatctttccccctcatttacacagtttaatcgttccaacacaattggcgctggacaatttgggacggtttatgcgggaacaaatgtaaaagatggacatcgagtggccgttaaagtaattagacaaattacctattttagtttttgacttattttttaatggttatttcctcaggttcttttaaaagagaagtttctccactcggccttttgttgtgttggctcgttgagaaatgagttcattttgcttaagaagttgaaacatcccggcatcataaacttagaaatgctgacggaatcttcgaaagaaatattcgctgtgatggaaagggcggacaaagacatgctcgagttcatcctgagccaggcatatttttcaggagttttttttaagaatgataattttttaggaaaacaggcgactggacgaacgtcacaccaaatttttgttgcggcaaatactcagtgccattcattttctccacggtcggagagtcgcgcactgcgatttgaagccgggtaaagacaaacg

SEQ ID NO: 2069 - DNA, 3604 bp, Heterodera glycines
atttcgaatgaatgccaatgattaatttcaaatgctttccttttcgtccctcttttctttgtggcgtcgtttctccctttaccattcatttttcccctttttattgcgcgaacgtggacttggggagggaaggcgtgccaatgcaatgacaaaatgccgtcaaattggtgccgttttgcctcccctgtccctccgtccttccgttgactttcttcccccattcccccaactccaaaacatcattcatcgattctgttgtgctcctccgctcattcgttcgccaattaattgtccaccaattttgcatttgccttccccgccccagcgaaaatgtgccaccaaattcgaatgccatgccaatgttttctctcttatgagtgacttcagctgttatttgcatttttatgaggctgccaaaagtaacacaaagaagggaagtgattaattggggagaaaagggaaaagcgacaaaaaaaaaacaaaaaattaattaaattaaacgaccattcgacttttgttctgttgggctgtcgtcgcttctcactgtccttttgctttcactttcgccgattgtttgtcctactccgttacacaaattacaacaccaccccactcgaactctttctcttttctctacccttcctttttctatttccttcctcttccgttttcatctttcctcatcccttttctcttttctttccctttctccttcctcttttctccccttccctttcatctttcttcttcccttttctttttttctcttcccttatctcttttccttcctattttctcttccttttcctcttccatttttctttccttctcttcctcttttttcctctttctccctttcctcttttcctccctaatccatattctctgtcctctctttttcttccatttcaattttccctcctcttcctccttttcctctttttcttttccccttcccttttctcttttccccatttttcttccccttttttatcatttttgcttttctcagtttcgtttatacaattgcccaaacaaaaatgcgaggccatcaacggtttgttttgttgtcgaattttatgaataaacaaatcgttagttaaaggggcagagtctcccaattcataaaactctttttgtgcgtaatataataatattaaatgctcagcaaagtccgatcaatttgctctcattcgccactgatccgtcgttgatcacttccttctctgcccccccccccacttttctgatcagttctctccctctttggatcataattattatttgtttctaactcttttcgatccgttttaattttgaattttggtcatttttcaaattaacaaaatttttattttttataattcatttcatttcgacaatgggcaaaaataacagcaaattcaaaggcaatcggagcagccaaaatgaagaaaatgcgcaggcgacgattaatggccaaaggggcggtggcgatggggcgacaaaagaaaaagggaagcggaggaaggcgaacaaaagtgggggcaaagggcaaaacaattaatgagcgctaattgaattcgtttgtcattaattaggtttgagtgcggacgaattggccgatttggagcagaaaacgtactttagcagaaaagtgaatcgaattcaattgaacaaattggcaaaacaattaattaccatttaaggagctgagaaaatggtataaggtaaggagtaggaggagaaaaatgagcctaataaatttaaatttttgaggactttgtccgcgactgcccaagcggagaattgagactcgacgaagtgagagacagagagatagagagggggggggggcgaagagaggggagggtgggcgtaaaggatcacggaggcggatcaaagtgtttatttatgattttggtggctttagttccaaaatatttatcgtcaatttttccccaacggcgacccgtcaaaatttgccgcctttgtgttcaatgtgttcgacgacaatcgggtggaattgcgaagggatcaatatcattcagttaatttgaattctgttcaggacgggcacatcagtttcaaagagttcatcgcggcactttcgatcacttcgcggggaacgctcgacgagaaattggactgtcagtggggggggggggggggacgaattgaaactcgaattcgattaatcgcctttttcttattttcaggggcattttcactgtacgacgtggacaaagatgggttcatcaccaaagcagaaatggccaatgtcagaacaaaaaagcaattgaccaatattatttaaattatttgagtaattttaatgaataaattttgcacagattgtggacgcaatttactcaatgattggcaatatgttggaattgccaaaggacgaagacacaccacagaaaaggtgaatgaaaatggaaaacagtgcaaaaataaaaaattaaattaaaaatataaataaaataaaaaatataaaaataaaattcagagtggagaaaatctttgccaacatggatttggtgagaaaatgaaaataaattaattctccaatcagatgagggtttaatttgtttttttcattctcagaattttgacggcaaattgacacgggaagaattcaaacagggatcaaagaatgacccatggatagtgcaggtaaaaaagaaggggggagagaaagggggaaagagagagagagggggagagagagagagagaaaagagagaaagggagagagagagggggagagagagagaggggcagagagggggagagagagagagggagcgggagtgagaaagggagagggaaagagaggaggagagagagagaggggcagagagtgagagagggggagagagagaaagcgggaaagagagagaaagggagagagagatggggagtgaaagagaaagagggggagaaagagaaaagagagagagagagagaaaagagagagagagagagaaaagagagaaagggagagagagaaaagagagaaagggagagagagatggggagagaaaggtggaaagaaagagagaggcgggagaggacggaacttaccctgggaggggcagaatggagaaggggaggggagaagggcgcttaaaacttataaaggcttataattgaaaattctccaggcactgacaatggaaatgaatggcgccgccggcgaagagcaaacgcctcaaaaagccgcgtgaatttgtctctctctctcacttctcattgaaatccattatcttttactttgagcttctccctccctctcaaatcggtgaaattatattttcttctcaatttgtctcccaacgctttacaatttattagaacaaacaaaatgtcccaaaatgagcagcgtctcgtccgactgacaatgaacagtcaaatcgacgctttttccgcttctttttttgagtgcaccaaattaacccaaccgagcaaattgcatttactttttattgtacctccattcacaaatctcctccccgctgaccattttaattattttccatctcaacttttgtcaccaaaaacgcagactctcggctcgttttttgggttaaacggtgggggggggggcagggggggggga

SEQ ID NO: 2070 - DNA, 805 bp, Heterodera glycines
gagagagagatgggagtgaaagagaaagaggggagaaagagaaagggagagagagatggggagtaaaagagaaagagggggagaaagagaaagggagagagagatgggaagtgaaagagaaagagggggagaaagagaaagggagagagagatggggagtgaaagagaaagagggggagaaagagaaaggggaaagagagacaaagggagagagagatggggagtgaaagagaaagagggggagaaagagaaagggagagagagatggggagtgaaagagaaagagggggagaaagagaaaggtggaaagagagacaaagggagagagagatggggagtgaaagagaaagagggggagaaagagaaagggagagagagatggggagtgaaagagaaagagggggagaaagagaaaggtggaaagagagacaaagggagagagagatggggagtgaaagagaaagagggggagaaagagaaagggagagagagatggggagtgaaagagaaagagggggagagagagaaaggtggaaagagagacaaagggagagagagatggggagtgaaagagaaagagggggagaaagagaaaggtggaaagagagacaaagggagagagagatggggagtgaaagagaaaagagagaaagggagagagagatggggagtgaaaggtggaaagaaagagagaggcgggagaggacggaacttaccctgggaggggcagaatggagaaggggaggggagaagggcgcttaaaacttaaaaaggcttataattgaaaattctcctaggcactgac

SEQ ID NO: 2071 - DNA, 1297 bp, Heterodera glycines
gaagaagttcaccttttccctcctccctggctcagcccctctccccttggctacgcccacactgtcacaataagcatttaaatatatttttatatctcatggtaaattgcaaagtgaatgaaaaagagattcatttctgtccgttttcggtgtgtttattagacacgggcaaatatgacgagagaaggaatttttcagcaatggtccgacacggacggacgacgcgagaaatgtaaaaagagagcaaaacggacgcagaaagggcgtgggactcgagcacctggtggacggggttctgaaaagacaacagaaacgattaacgggggcatttttgattggaatgggtaattaattggacagactttgaaggcggcgatcggtcgtccgctctttctctgctggtcggccaaagtgcgcaaatgtttggccattacgtccaactttttcacaacaactgccactaactgatcagcaacggcgtcagaaattgctaaaaaaagaaactataaatttcaaaaggaaaaaaatacggcgaaaaaacactttcgaagccgtggaaaaaagcgcagcaacagacggcgagacggacaacgcgaagcatttgctcatcagtggcattgtgtgggagaagagaggaggaggaagggacatgaaaaatggaaggaaaaggccttaaatggggaaggaacatacgacagcgaaataattgcgaagaaaacgaatgtaattttacccatccgcagaaagcagcgccatttgcgaatgatgagacgaatcggccaaaagggacaaattgcgcaaaagttgaacagcgagcactgaaaaggacaaacaaaatgagaatggaatcagacaaatgtttatgagtcccagaaaactgaccaatgtttgggtctatgccacaactgaaaaagaaagcaaatggaataaaccaaagggaaacgccgaaaaaaaacctcagaaattcgtggacatcaaaggcaaacacatccattctgtggcacttttatttatttttggtggaatttaaaagtaaaaaaataatttcggattgggccaacaaaatgagagcattcatttgttcattattgtaaagcaatgaatttatataagctaaacactcttcagagaaatggaaatgattgaaatctcttctcggggtctcccactctaaaaataataaattttaaattaaaattcgcttacaattaggaaataccttttcatagacgggcacttggttgatcttttgtaccacgttgaaatcctgcagcaaaataaaagtgaaacgcactca

SEQ ID NO: 2072 - DNA, 5582 bp, Heterodera glycines
  unsure (1)..(5582): unsure at all n locations
ggccaaaaattgtgttcttttcggtcggagccattcggccggagcaaattttgatgaaaaaattgggaaccgttagtgtttggcccggcatgtgccattgattctcctgaaaagtcagaagacgaaggtgtaaaagcacagaccgaaaaaatgcgaagacttactgaatgctttgtcatgtcgtagtgccgggtgaaattcgtcctcaaaatccccgccccaaatggactgtccgccggtgcctcggcctgtcggatcgcccgtgtaaagcgaattcagtcagaaatgctctgtctcgcgtctcactgacttggatcatgaacgacttgatcactctgtgaaaggcgtgtccgttataataaccccgtcgtgctgaaacaataccaaaagtttacaattacattaataaatctatcagagaaatgcctgttgagaattaccgtgtgtacagaaattttccaccgtccttggcgttttgtccgggaatagtcttaaatacataaaatttgataaaaatggagaaatgaatggatgggaaagcacaaaacccactcaatgtgaatgtcgccatatgttgtgtaaacaattgccctaaaagagcaaacgcttttggcactttaattaggaattacttgttgcacagcttcgattggggtgcttcttcctgcagtaataaaaataaattaaattatttcccacaattggctcgtctccctaactcacttctattgcggtgatcatgtcctcctttagcggcttttcgttgtacacgtctctgctatgagtggacccttaaaaagacaaaaacgatttttaatgactgtttttgcataacaaaacacaccatccgcttcttccgcgtacggttcgacattggtaaacaaataaaaacgattgttgcctgggggaagggaaattgtacaaatgtattacttataaggagagggacgggtgggcatgcccgaggacagctgagttcggacacttcagtatggggaggggacacaatttggtggacttttgaagttcatttttgcattttattgaatttgtgacagtaaaaacttacgatgcgcacaagtcacctgaaaaatgtttaatttagagaatgtattcgttggtgggttgggcaaataaataagcaccagcattgggtcgggttcgttgatgcgaaggttcggattgtccgccgcctcaaccttcacacttgttgctgcaccttgcagtttttcctgtgcaattccattagaaaaatctattttaaatggtcaaaaggaaatgaatggcaccgttacgccgggaacagcgcgacacaacgcaacgccaacaaagcgcagattctctcccgccccaatacgccttgccacttggtcgctgaccaaattgtacacctgccaaaattagaatgtgccaaaataattggcaattccgcgacggtttacggttatgccgagcggagttgggaagatgagaaagttgctggaggcgtcgtaagtgatgctgatgaatcgcagtgcgttcgggtcacggctcatttccttttcgagcgcaacacggcgattccattcgatcgccggcagtccgttgccccttaaccattcagtccaattcaatgaactttttttgcttaattcacttagtctcctttcccatttcgatgtatcgttgaagagtttcgtcgagttttttgattattttgccgcttctcaagtcaaaaatgtaaatgtacgaattggaacaccaaacggcgaatgtccgtccgtccggactgatggccaatgctttgggcatttgttttatctgtcaaatcaaatgggttaaatgaatgacatcacagcaaacgaaaccttgcaaaattcgtataaatccgtgtccgttttaaattcgaaattgaccgtcttgggaaatgaaaactcatttctgctgcctgaccaatattcaaccattccaatttcgtctgtaaaattggacaaattcaaaaaatttgctttctaaactcaccaaaggaaattgctacatcaaatgccgctgtgtactgtaattaaatggtaaaatgctttttttttgaaaaatataaaatttccgccctttgtgagcgagtgaaatgcaacaaaatgtcaatttatgtattgtaatagtctggtcgtttcagcggtcagtttacctgcatgagaatgaccgggtgttggtggagtgattcgaaaacatggatcggctgtttgtctccgtttgcgtccaaaatgtaaattttgcctgaattcgcatcggaaatggccaaggcgctgatcaaatcggagccctggtggacaaagcaaacgcagcgcggactgaagtccaatttgaacatattctgagtagagggagaaaaagaagaaatgttgcaaacaattcgtcattttaacagcgtacgatcatgtcgaagttggccacgtcgaacactttggccgatttgtcatgggcacagcaagtggccatcagtgttccgctgtgattaattgcaatgtccgaaaatccttctaaaaaacaaacaaataataataaaaaaaaaaaaaacggttgcccactcaaatggcaacgaaagtgcttcacaaattcgatgccttcgttgtgctttttcttccaaaatttcaaatgtccgtcctcactggccgtgatgataaaatcgtttcttaattttaattcaatttataacttcgaatgtcccataaaacacagcccactccgtgcatttgacgtgagttatcacatttctgtgcataaatgacttttcgtattggtccgaccgcgggatggcacgcaaatacacttcctcgtgtttcagagctgaaaccgggggattgtgttggtttggtgaatgtttggctccccaatttgacttttttgctgctcaaccctcgccttcttcgctcgtcctccattttccttaatatttgggtccgcgggtcgtcggaattcctgtaaattttttaaatttacaataaaaagtaaagaaaactaacatttttgggaattgactcagatgatggctcacttttttgttgatcattcggagcatcgacagccattgaaaattggaatcaaaaaagaaaaaatgatcagcaaaattaaggcaaaggaaggatttgttatgcagaaaaacattcaaacagaagcacaaagaccaaggtataatttattttccaataaaattgataattagggtatctatttttgcattcttttacagattctcggcaataaacatctcagctttgttcagaagtttcttcatctcatcaaatttggccaattcaagcgcacttttaagctcggcccatttccaattttgatgctcatcggacaacataactttcacttccgggtctgtggattcggcaagccaataagtgacctaaacagaacaattttatgaaaccaattcaaatgagaaaaattcttttccaaaatgtgttgaattttcaaaagttaattttttaaatgtccaactttcttctgttcctccccgtatttggtggattttgacaaatagcgcatttcgtacataaattccttgtggattcgcaatttgttcacgtcaatcccggcctcctccatcgtttctctgattgctgccgtccattcgtcctccccggggtcgacatgccctaaaatcggcccaagcgatagctttacattttgaataacaatgataggtcttttctcgagattagcatcaaaattacctttgggaggcgtccaatggaaaggctcataagacacttgaagcaaaaggtactcaatttgtccagccgtattcttacgataaatcaaaaacccagcggctctaacgagcgattcaattaaagaatttgacattttatttaagcttaattttttattttcaattaaaaatacatacatatttattttggagagaattatataaaggtgtcaaatttcagtatcctttttcgtaccggtggctgtataaatattttttctttttgttcattgtgtattaatttgatgtgatttatgcaaatgtttaagatccctcttttctttttctttttttttccattttcatttattttttctctcagttcgatatgaaacagcgatgcctttatttgccgaatcaaagaattaactgcgtaaaaaaatatttgaatcatgacggaagaaaggaaacagaagaaaatcggacgctgcttttggaatgggcaaggagggaaacagaaagggaaaatcgggcactgatggtggaatgggcccaggtttttgcatttccacttctttgtttttgttatttatattgtcttttgcaggtgctgctgttcaccttagttttcattgtactgctcgaactcttcgtcttgccttggtcgctgccaattcgctgatctgataaatcgcatctattcaaaattaattgttttattgatgatctcaaattcctttaaaaatcccgaaacagaagcagtcagagctgatgaattaaaaaccaaaaaatgatcttcaattttcaatccctctataaaaagacacagaaaacttgagaagtccaaaaaaacaatgcagttgatctacctaattatgcttaattgttggaaaatttatgatcaagaatcacttgggatcaaccaattctcgttttttactccgaacttctcgtctctatagacttttaaagagacgagattattaattctaatgagttcgcttcatgaaccttctcatccattttatgtttnntaattatgtacctgtcaattatttattaatttacttttgcatatgttagaaaattattatatttagacaatctgaataaatattgatggtatattatgtacatataataagtaaaatgcctccgcttggcttcgattaattaattatttgttggcactgttccgttttctgctgttcgttccatttcctttccttcgttttgctcctcccttttttttgtccgatttccgtttggcgtcgtccccattccctcctcctcgtcaatcgcaattaaagtgacattttccgcctcgccgctttcattcagcgaagaaaacatcacttcgtaaaatgcgctggccattggctgttcgtccgcaattctttggtatttttcgctcgtcgcttcgtccgtcacgaaatctctgagcatttcggtgcctttgaaacggcttccctccagcgccacgcagaatccctaaacgcccaattagtttagtgatggcattcgaaggtgccattgtttcccctcgccttctccgttcggttgccaatgtcgtcgatgtgcaattcgaagcccggtcggcactgacatgtcatcgacttctcactacagtaggcgttgtccaccacacactgttccgtcaccactaccgtaggcaggcaaaatccgccgatggttccgttgtcgcgctgctcaacagagtccatgaaaacaaccgaagtcaaatcgtggcatctgccggcaatgttcaaaaagccttcggggcactgaaaaggaagggaaaaccatttgcataaacttgtcaaaaatggacctgcaaaacgaatgttgactcatggattagcaagggaagcggacacgcgca

SEQ ID NO: 2073 - DNA, 7243 bp, Heterodera glycines
  unsure (1)..(7243): unsure at all n locations
ggctgtgaacgggctgttgtcggtcaacggttcgagaaatggcccggcgttgggcatttgctcggcaacaggcgggctggggccaaacacgtccgtgaagtgctcatgaagcacttcagccgagagctgacagagcggagatgtctgctctgtaatttcccggtatgcccttgcgcgtgaagcgcggtacagcttttgaatacgtgcggcggcagccgggtcaaatggcggaccgtcgtcggcattcatttggtttcggcgtcggccatgttggttcggtggtggtcttggccgacgtttttgctgagcgggcctttgcgtgaacgccacttgcgcctgctgtcggacggcgttgatgaattcgttcagtaagtcgtcgagctgctgtgcgcttgtcaccgcattgaaccgtccaacccattcgcgttgttgtgcgttgggttgccgtggagcgaccactggaacggcttgatcatcgtgctgttcaggttgggcattgacgaccaattgtgtcggtggcgtttgattttgacgggcggtacggctgtgcgctgtgcgagcgcttcggtcacttccattgggcgaggcggtgcctgccgagtgccgttgtgcaaccaatgcaggcggggtcgaacgaccagacggtacatccgattcgcgccggcactgcatgcggtctgtccgtgcccccgtaccgctgggagtggtcccggactgatccgcagcagcgggttgagccggggaaacgggctcctggaggcgaggagcccgcggtcggacctggcgaacaacattcgcgtgctgtggttggtgccgttcttcttggatcggctgtgcgccttggcattgtgccgacttcttctggtgggcattgcatgtcctcagctgtgtaaaagtttgtcggcatccattgcagcggaaggccaaattccatgtgttttgcggtgtgtggtccttctttagatgctttgacagtccggcatgtgtgttgaatgatcggccagcgcaaaaccgacatggcaaaggcagggcaattggcactccaaggacgtactggtgggctacgtcctcttcgccaagttcgccactttcatcgccttgctcagtacgattttgagcactgccaaccgacaggtcgatatttgggtcggattgggcagatcgtttccctcaatttgacaaaatggtgatgattgttctgtgatttctcggtatgcacgaggacgactttggcggtaaagtttttgaattcgagaagccgcaacagggtcgtatgccggttcttgggcagcattcatggcgttccgtcttcccccatgggggttttgtaattggtttcgattattaccccttgggggacgacgctgttgcggatggatgttgattttggccttttgccgaacttctgccaatagttggaccaaatttgtttcaaaatcgttcgagtcatttactgcttcaaacaaccttatccaacgtttttgatgttctgattttggcgggataattatcagcggattttggtgaattgggtgttcggcggcctcgacattgactggtgatggataatgttgaggatgatttaatggccgtgcattgttttggccaagttcaacagactcagacgacgtggagagatgttgtggttggacgggttccaccggggaacgccgattgtgtctttctctaacatttctgtttgcttatcgagtgtgagaagaggcggtactttgactgtccatatttaaatcgacaacaaattcgctgtctgcagaagcaaaagaggaatcactagagacactcacttgccttctgtcgtctcttatttgtaattgcggtggtgactgactcgctggggtgacaagcctttgaattggctgtggccggtcaacattctcaacctggcgtgcccgcgggttgaagaaattgcgctgaacaattgcagcaccgggggcagccaaaggacgctgcggcatttcctccgggacagctctcgcatttcggcatgctggcgtcttttgctgatgagctttgcactttttcactgtatcgaaaacgataagacaagtgttgcattgaaagacaatccgctggttggggtgataacgctttaaatgcttcgacagatcaccatgccgtttgaaaatttttggaattggaacacataagcggcaatggaaagactcgccgatggtgtccagcaatggaactcccaatacgtaattgatcggctgtgtcgctgcttcgccttcctctgcattgatttcctcctcttctctgtcagactcccccagtcgttggtcgcctcctctttgtctgtctccttcggcgctttgtagtgtttcctctgcctgtcttctccggcgtgtgatgaccattatgggttagtttttcgtccgatagatgaattgggattctacccttttttggaagataagactctccgagagagaccttaatgaagtgaagtcggattgagatggaaaaccgaattagttttcggtgaagaaagtagagaagttcggggttttagtcacccttttttttcgtagtgtcgaacgaattgatgaatttgttggaagataaaccgcacacagcggaaccgcacacaacacgagtgtttggtttttttgtcggatatgaaaccgcacccagcggaaccgcacacaacacgagtgtttggtttttcgacggatggatggacgatgggatttggttttcccttttaagtttgacggatggacgattggcgatcgatgggattttgttttccccttaaatgaaaattgtcaggcagaattgtgaagaatcaatcccctggcatttgcattgcttcacccaatgcttttgctcttttgatctcccccgcgggggagatgcgccgctcccggaggtaagtgcaataccgggccgacgcgcggtcgagagggggcaagccccctactgcgacctttttccaaaaattggttaatctctttgaccccggtaggggtcgttacggagattaagccgtaaagaacagatactacactttgatcttagccaaaaggccgagaagcgatgccggaacagcaaaatgggttccggaaacggaaccggcaccatcgaaaacatatgggtagcattttaggcgaccaaaattgcacatcgtgggagcagagatattgaaaaaattggggaaatagcgtttaacgggagggacaaatgggggaaagaaacaagacggacgagagagagtgcttcctgaagaggaaagcgtaggagagagtgtgtgccacagacatgggaagggagaaagtggggggaggcagcagcaggtggtcgccatgtcgtcgcacgccgacgaccactttcgttctactctcattaactctcgctcgctctctctcactctctatactctctcatctttctttttcgtccctgtcctctcattatcgcacactctttcccatttaaaataaataatttttttaaatttttgtataaattaatttgctttttattttctctctctgactctctcacacacactctctcctctctctgctttgatcggttatgtaaataccccatccccccaagcacccacttgatctgccgtttgggctctgccgatcggcctccgctgttggcacgaccaccgccagcctcggccacccgatgtgtcgtgatcattgccgccgggcccattctgctgttgctgtttttggcatgggcaccgcttccaccgccgccgccactcgtcagttggcacagcgtttggcccatnccgttgggtgtccttcagtcgctgctgactgtgccngcttggtgatcatataaatgcgcatgtacaccacgacgagaatggccaccgggatgtagaaggagcccagcgaggagtacaatacgtagtccaactctgaggatacggtacactcgccgggacgctgaacaaaatttgggaattatgtaatatttggtgccaaaaaattccaaatagcggcacaatttgccaccctacggtaaaataaggaatgacggtacaattgagtaccaagcactttgagctaatatgagtcccagtcattttaagcaaatccttttttgggatttcgaattgccaatgaatttgcgtatcggtttttaaaagattaaatgtgaaaatattttgagatttttttttggggggggggggggtttaatttaatccaagttttagggtgtgtatcagggaaaaaattttcggtttttatttttcggaaaaatgatcgtcgatcggaacttctatttcaaacaggtccgaaacaaaacaaggattttttacaaaagaaaaaaaatcaaaaaattttaatttaatttaattaaatcgtttgcttttaattttacaaaacaaataaaacaaagccatctcaaaattttaataaacaataatcgaaatcaatttacttcgctttttttctctaaattcaaaaaaagataaatttattttagattttaaagttttcctaaaatcccttagtttttgtgggatctgctaaaaaaactctcaaaaatttttttgccgcatatttttataaaattttttggtggaggaggggccgacgatgccgataacagttctgttgtgaatttttgggttgaaatttaaaattttttagggcactcgtggcattatagacaaaaggagcttaaaaaatcgaattggataccctaaaaatagttttaaaaaaatcggaaattgaggcccacgcaaattcaatcttctgctgctgatcattgcaatgaagtgagagataattaactaattaggaccaacagaagcccgaggtaataaataattcaattggttactgtaggatttttgaaagaacgttcagattgcttactgtatgcatgctgtatactgtagccttgcccatttaaatattttcgaaccattttttaatttaatttttattaattactccttttaatcatcaaagtctgccgcgaacataagtgttatttttcaaggcttttccaccgccgcccccgcaggggaatttcacagctaatttaatgacccccccccccccgcggggttttcccgccggtcgccccccggggctctaattgccaacaacttccgccactttcctcgcccctacagtatgccccatcttagtgacttcattagcaacagcagcacagttcgcaaattagtttttttcaaatgtaattttctctccccgccacaaaattgcatttaaaaaataataatatatttttaatgaaatttggcaaaacaaaaaaatgattgaaaacaaaaatatttttaaaaaaagtagagacagaaattttgaaaaaatgattagctgtaagggaatttccaggaaaatccaggtcgagccctaataaaactcctataaaaaatcaaggaaaacaccaggtcaaggttaggggcacgaaaatcccaaaaattctatgccgttaaaaaaggcaaatgccgttttgtttttggaattgttttttttctacaaataaactcacccttttcggtcgccagccaagcaatggggggaaacagatgagcagagagaccatccaggccacacctgaaaaattgggaaaaatgctgtcaaattgataataattactgttgaaatggttaatttggttactggaaatgcccgtcattaccgtataaatattctcaaaaaatagtgcattagagggtactgtaggtgctgttaggcaccgaccaacaaaaaaagccaagcaaataattcaagaattttgtgtgccagaagtcgagataaaagcaaatccaataaatactttatagggcatactgtcagcgtccaccctactgtaattgaacaatggtactctgtctctctataaactggctgatcactcactgtatagctgtgatcagactcgattacatcatcatttgaggaaatctccggctgtacaaaaccgatcggaaatcggtggcactgatcccacggcccggactgatcagtattggttttagccggaaaccgagacagagaaatcgagagcccctgagagactggattctcgaaaatttaatgatttttgccgggaatcgagacagagaaatcaagagtccggggaacgggtaaatgggattattcgatcaatttaaaagtcgggactctcgaaattcccaaccgatcatgatgctgatccgtctcggcgtgcgcttggccggataactgagcggctgcgtgacggaccaatagcggtccagggaaatgatgcaaatgtgcaggatggaggcggtgacgaacagcacgtccagcgccagccacagctcgcacagcacactgcctggaaaaggattttggattgaatttggcaaaatcttttttttttggcaaaatgccaggagagggacttcaaaaaatgctaaaatgtaaaactatgggagacgaccacgacggcactttccgatggattttcgagttacaaaattaatcccatcttcgttggatttctctggaatcggctttgccaatctctgcaatagctccccgaatcttgacattattatgaaaagagtggccccagtcccgaggcttcattcggcagaaagtgccaatggtccaatcttgtcatattacgaaggacctttcagtccagccttgattttggcaaagtcttgcgacttggcaaaatgcaatttttttttcttacattcaaaatcaacggttgtgaaaaactgtgaatatccaaccgaattcaaatttctaaacatttttttaaagaacatataaaactgtcaagagtctcgattcttgacaattttaatgttaaatctatttttggtttgcatttatatataaattccgctaaaaattggactgtaaaatgaaactcacccagcacccaaacgccgacaatttcgtaaatcagcgtcaacggcatcaccaacagacccaccaacagatcggccatcgccctgggcgagaaaattggaaattttacaaatttactacccaatgaaattttaaaaatttattaccccttggaaaatttacaaatttactaccctctcgaggagggctcaataaatttatggaaaattcattggcttggtggaattttagattttaaattttcagtttccagtaaaatgcaaaaacaaannctcntnntcnaaactttaaagattgtatttnactcannnaattaattaaaagacccggggggagttaccctatgacgtttttttgtagaaattacaatt

SEQ ID NO: 2074 - DNA, 2792 bp, Heterodera glycines
  unsure (1)..(2792): unsure at all n locations
gtaaatcagcgtcaacggcatcacccaacagaccccaccaaacaagatcggcatcgcctggncgagaaaattggaaattttacaaattactacccnnaatgaaattttaaaaatttattacnccttggaaaatttacaaatntactaccctctcgaggagggctcaataaatttatggaaaattcattggcttggtggaattttagattttaaattttcagtttccagtaaaatgcaaaaacaaaggctcgtggtcgaaaaaaaattcattgtatttgactcagggaattaattaaaaaatttcaaaattgcttaccctatgacgtttttttgtggaaattacaattttcagacattagagactaatttttgccaattttaaaaccaaaattcaactgtctgcacgcacaaaaataatgtaaattataaaaatttaaaaaaataaatacggcatttttgtaaattcaattaaaaatggcaccacctttgctaaaagggggagcacataaaactcacaatgagacgagaagccaattttggcgttggcttcgcattttcgtgtcattggacacagtgagcacaaccatcaaattgccaaggacaatcacctgacaaatgaggcgtaattaggcactaattgggtctctgtacgtttcggcgtcgccgtttctgcgccataccaagtttttggctttttggcaaaattccgaaatcggcggagggaaaggcaaaaaaaaaatgccaacatttgccaatcgaaaattttggcataacgtcggatgcttctcccccggcccaccagcatgacgatgagcagaaacaatgccatggccaaggcttctgccagcgtaatgcacgagggccacacgacggcattcgacacgttcgggcaccattcagccgcaccgtggaacagaatgatggtgcttaacacagaatgtagaaatgatcgggataatatgaatggataaatttagtgatcaaaatccttatgtgattgaaatcgccttgaaagctgatcagatcggctcgaaaggaaccgaaatttatggccatttattttgatcaatgaacggcattatttacagagctaaatgaccaggtggcttaagacattttgggtgcgaattataggctttaggaatgacaaaagaccatgtaccgtattgcttttacaagcaatcagacggagaatggggcaaaggaataaaagtaattttgaccaatcagtctgatcagtgaataaacagtgcaattggctttgttatgccattttgtttcggtgccgattcaatccgatatgtttactgaatcgccattcctgcactttcaaccacctatcaaagcagacacttttgccgtctgatcatcttcatcatcactaattttgcttacccatcagcaaagtaatcagaatgccgatcgccgtcgccccgcactgtcgcgtgtgccaattctgttatttcatccgtcaaattgttgttgttgttgaatggcaacagaacagcagcagctgctgccgcggcatggttgttgcgatggttgtggtgatggttgttcagctgctgttgttgctgatactgcttgaccaccaccaccaatgtgctgtttgggttggtaaaaatcgaggaggaggaggaggacaatggagcagcagctgaagatgaacccaagctgttcagcaagtccatcaaaatgaggagcaggacggaaattgttgtggagaggaatttatgtcaaaaatcgtaaggcttttggacatttttggcaattttttctgcaaatttttaagtaagcaatgattagggtgattagagaacaatttaagtgattgggtgatgattaaaaggcattgaagaaatggtaaaagaaatgcttaaaactgtccaaaatgatcggagtgatctggcactgatcaaaaggtatgtgagtgaataagtgatcagcaatgagtgagctttttggaattagaaagcgtttttaaagtgatcagtgggtgactgactgatcacggaactcacaatttgtggtgagcaaatgatcgggaaaagattccatgatgcggaagtgatcatttcaaagtgggaaaagagcaagaaaaatgcgagtgtgtaaagtgatcaggcccaagtggcgtgacgagggaaaaaaggaaagggctgggacactttgaggaagcaattggacccccggggggggggagagtgacgacgacgccgcaggggacataaaatgtgcgtgcttactaatgtggtgacaggtgagggtgacggggccagatgaagcgggaggaaaagcagcagcaggagaaaaagccatcgtgatttgcgggaggaaaggacaaaaattttcgggaagggaattaaagtcattaatgggttaatagaaaaaataaaattttccgggttttttttgggttagggccccttagaaaatttagagggcttacgagagaaatgtataatttgtacaggcccaaacgtgttgcccaaaaaattgttggccattaaatgcatcctagaagattgacagtccaacgaaaaattaatttccaacattgctagcggatgcagcaaaattcgtaaaaaaaatacttttttttttgcaataattgtaaaatgccgtataattacgatgggcaaataatgaaaatgccatgccgttagtccgtcccaaaatgactgctaccaacccgcccaattggccacacacaattcgaccggcacaacaacttcgtcgtggtcttgcgttgcccttttcgtggtcgtttgtgtctgtctcccatgcacctc

SEQ ID NO: 2075 - DNA, 1728 bp, Heterodera glycines
aatttgtagggatgcgatttttaggcacaaaaaatcgcaaaataggcagctaaaaaggcaataaaaaattgcaaaataggcaaaaaaatcctcgaataggcactaaaataggcaaaaaaaatttttattaacgctttttaggtagcgaaacacgtaaaaattaataaaattattttgcttatacatatttcaattgttttaaagttgttttcgataaaaataattttttaaaccaaaaatttttatttaaaaaataattgaattttgaggatcaatttttgtgaatttttttttttcaattcttagggggtgtattttctaaaaaattttcaagtcgattcttaggggtgtatttttcattttttgttaacgaattttccggaaatcctgaaaaattcgtcaaaaatggcgaaataggcacaaaaataggcaaataggcattaagcacaaaaaatccaaaataggcaaagttaggcattataaaagtcatcgtagacacgccaaatcaagcggaaaatgcgtttttcgtgcttaactgtacgtattaaatgcgcaaaaattttaggcatttgcctaaaaatcgcatccctactaatttgtaacaaaataaatgggttttaaaaaatccgaaaattttttgataattttgaaaaaatccaattagaaaataaatattaatgtgactgatgatcattggtcaccggaaacaaatttgctgtttaaaatacgcgtgagttcattatcattttgaaataatttctcagctgaaaaagctggacgtaaagcagagatcgcatttttacagcagcacttaccacgtgctcttgattttgtggcttattttagtgcttttttaaaaaaaaaataaattaaaaaaggaattaaaaaatggatttattttatgaaaaattaagcgacccttttttaattatcccaaaaattttgatagaaataaatttaaaaagctaataaatttgtcaaaaaaggttgattttatcgagtaaaaatgctttaaacctaaagagagagttttgccaaatatttgagtgccgacaaaagtgacgagagtctcgagaaaatgtgccaaatttggtaaaatatacaaaaacggcggatagccaaaaaaattgagttcaaaaacattcatgtaataagacaaattgttttactcattttgctaacgatgcttttcctcctcagctgacaaatgagtgaaaagcgaagcgaatgtttggccaattgcccctaaaaaatgtctcccgtccgcccaacgaaaaacaacacagcaggccaaacaaatttttcaacaattttttttttcattagccaatgttttcagctgccaatgcttctccctccctccttcttccgtcgaaggagtgaaaagaaaaattggttcttttttggggggctatcggacggaagcaaaacctaatgaaatttgtttggcacaattcatcagcagcagaatacggcacggcggcggccaacaacaaaggcatggccatggggaccacggcgtctctccgaaagaatttttcatttgcatggaattgcatttttttccccggccctgctaatttacctggaaattcttttttcaatttaattttatttttgcggatttccgtgccctttgttttgttatgtgtgccgtggtttgtcagcagtgaagtgaaatggagagagggcagaacacacaatgactggtgactgaataggaaatga

SEQ ID NO: 2076 - DNA, 3664 bp, Heterodera glycines
attaccgtaccccttgcaatttgcttctattattattatactgtagtttcatattttgtttgtggcgtaaatttgttcacacttcttttcggtttttcatttttggtttttggtactaatttgatctttgggaacccttttggtttcagttaaacaaatttaattaaaaataattaatttaattaaaattataattaaaaaactttcaatcccctttaaaattaacaatgctccgattaaactttaaaaaaattctcacttttactgcttaataaattatttcgatttttgtctcacaaaatttcaaaattttccatatttttgcgcccaaaaattccaaaaaattttctaagaggcttaccttttatttaaaattaagtaacaaataaaatataataaattaaagttcgcccctcccctctgtgtggagaagccctgggttttagccccgctcttatcgtgaaaattgatcgtctccattcaaaagcggatgaaggaggaggaggaaaaggggaagcaatttgggagagatttggcgataaatccctgccgcttcacactgttcttaaccgactcactctcgacactctctcgagtttcgtccgtccgatcaatatttctgatcgctcactctcgacttttccaaatggcaaattcacacccgtccgcagattggtcgaccaatttacacacatacatacaataaaatccacaacaaaaaacaacaaaatagtccagaaacatagattgagcgggtgagagaaacatagattgagcgagtgagagagagataaagagagtgaggggaaaacagtgtgagtgagtgagagatagagagagtgagaggaagacagagagaatgagagggactgagagagagagagagagagagtgggagagagagagagagagagagaaagagagacattttacaggggcataaatttgttttggtgatcggcagatgggataaacttttatgtgtatttgtgtattgaaccggtggaacattcgttattagcatcggcttgaatggccttggccagcagttgttgcttgttgtccccccaccccatctcttctctctcattccttctcgacttattcccgaaaataaattggtgccaaccacacacacattcattaaagaattaaattcctgtttagcgtttttctctttttagttaaaaaaagaatatttgaaaaatttaaaattgaattaagaaaaagcaacccaaaaggtaaaaatatttttgaaaattttcgagagaaatatttttcaaaattcaaaaattttggaatttgttttaaatattaaacagcactcaaacaaaatcatcagctcttgctcgctaacattttgtaatgtcgaaattcgcttccaaaattttagtttactaaaataattattgttaaaagagaaaaatccaattaactcagctcatcaacaagcaatttccacgcctaattacggcacaaaatgagcacttttgccggtttccctggtggtggtagtgtcggtatcggcgtgccaattcggatagaaagcgcttcgcctcaccaagcaaccgctcaaccccaaaatgccaaccaccaacaacgccaaaacggtgctgcagcacaaccatcatcatcatcatcttcctcggtggtggaccgtctccaacggcttgaggcggagatggacgcggaagcggtggcgggcgccatccacttgccggatgaccgggagttgaccgcgcggctggccgccttcctggcggagcgctttccggacgcggatttgcagctgaccgtgagcagcgtgcggcgcacaatcaccaccaagcaacagtacgagacggagacgccgggcatggttggcctgccggtggatcagctgcaggagttgcagcgcaaactgatggccaagatcagtaagctgtgcttgtctctctgactgaacagggcaacaacacgtaaaaaaatgagaaaaatggtggcacaatgccaaaacgccataagacttgaaaatccctaaaaaattcaaatagtagggttaaagaatggcacaatgccaaatgatttgaaaatcccaaaaaattttatttgattaaagaatgaatgactcaatggcaaactcagttaacctgaaaattgctaacacttacaattaaagcatttatttaaacgcttaaaaataaatttaaaatgtattaaaattattttagtaaattttttggccgatggggccaaagaattaacaaaaataaattaattaataaatcaattatcattattttacatatgcacttgtactttttatcatgtttacttatttatttaattttttttttgcactgcacaattttatttttatttcaattttatttttatttcaattttatttttatttcaattttatttttattatcgattgcttttccttttttcttctccaagtgctttactttttattatgttagttttgtgtgtgttgctttttgcttctttttgttgtatttacaatttatgagtatttattattttaacattaagcgaaggcgacggcgttaattttaaaatttaacaacaaaaaaattctaacaaaaatgggtacgaattaggggtgtttcatgagacccaaaaatctctggaatccggaatttcgggtagaaaaagcctgaattatggaattatgatttgtaaccatccttggtatggttttttttagaaaaaatcctaagactggtgttccgtagcttattgttagcatttttttttcattttatgcaaaaagaatttgttccaggcgcccaaccattcgaacacgcaaaatccactgaaaagggtgaagaaagtgaggagaagcgagaggaatgggctcgtcgtgggcctgagggtgagttttccgaaaaattgtaaaaaatttcaggggcctagccttggttggggttagggtttaggcttcaccagttaaattaaatttgaaaaaatgggattctccaaatggaaaacgaaagcaaaaacttttaaaaaaatttcaattaaaatttttgtattttaaaaatttgtaaaatgttttttttacttttttaaaattctctaagcgtcgccatcgtttttttttttgaattttctgtgtctttgtcagatgtgcaacaaagtgagtcggtcgaggagggctttgggcctaccgacgacacgggcacaaccattgccaagaagcgcatgcacgtgctggccaccagccagtcccaagtgcaaggtgataaatatatctgtgaaaaattgtggtgaaaaaacccaattaattttgtgtggcgaagtgtcaattttttgtggttttttttttgtcttaaaaagggaaatcgaagtgtgaaggaaatttttcggaatttttattcttttctttttttttttttgtaaaactaattttttttattaatgcatattttattttatcccatttttcttgctacttgtgtgttagctgtgggcagattttcaaaaattttttttttgagaataaacttgttttaggggtttccggggtcggaaaaagcgattctggcatctatattgggccaattcaaaccctgaacccggattcgaacaaaaaagtcaaaatccatttttcaaaaaaattcacattttagacacaaaattgagtcctggccttttt

SEQ ID NO: 2077 - DNA, 6262 bp, Heterodera glycines
atcctaactctaattgaatatttttttatttatccctaatctatcgctttaatattcgcttaataatcggtacagtattcagaggatgatcataaaaacagacaaatgtaattgaattgacactttgccataatttataattaaattctgattgaaaataaatgttttttcattaaaagatgaagccttcgtccatctttcgaataatggaaaataatttagaaaaatttttaaggcctcgaaggtttccagccacagcacacacccagcggaattcctgttttccagcagcaacaccgaggcgaagacggtaattttgttttaataacgcaatttttaattgtttttttaatttgccgtgaaacaaaattttttagaaaaattaattaataaaaaaataaattaattttataaaaaagaaaaaaaaatttttattttatttataaataaaatgtttcttgcttgtccttccaaccgttcgtttgtctgtctgtcatactaactgttgttcgaaacctgtaaacaatttttttttaccgttaccgtataaccctcatatggtgtgttaccattaggatatttgttttttatttaaataatttttatcataatattaaaatgatggtgttgtggcacctcaaaaactatcaaaatgggcgttaaactatcaaattaaaatttttacttataagctttacaatatttttaattattcatatcattcgatagacctaaatgttctctattttcctgccaaattttaaaaaatttcgtctttccaaaaagtaatgcccaaaaaatgtttgaaaaagttggtttttattcctctggcaatgacttttttaaaagtaaacgaaattttttgatattttataggctaattgagaaaacctagagctaccgaatgatttaaaaaattaaaaatttggttccttttaagcaaagaataattttttcccaaaaattttccatttgatggtttttgagtacggcttcagtaccaacatgataatcattttttggaaactaaaatcggcgggggcggcactattaggagttaaaatatgagcaaaaattggcatgcatatttaataagaaaatcactcaaaaaatgcaaattaataaagatgctcgtaagactagaaattaaatttaaattctgggtgacttgtgccaattttttaaatcttttattcatttcaatttaaaaaatatcttggtaacattgcgccaatatttttttttattgtgttcctcccaattttgtcgttttgtgtttgtttgtcgtgcccgttgtgtgtttgtgtgcatttattgtcttatcattcattaccaccgtaatttaacaacaaacacagtgtcccttcatgtcagttacagtatatctttgccaatttcggcacatttttgcaggaggcattcgtggcataaatcgcaccaatcagggacaagcggcagccgggcaatctcagtccccaacaacattaattccaatacgacgaatctgatggattactactttaatttttcttaatcattttggaattgtatttcacactcatctggcgcttgtctccgttcaaaatttgacaaaaattaattttaaaatttaaatttaggatattttcggaccagaaaatattttaattggctggcattcataattttgccaagaaatttttaaaaaatttgaattaaatgaaacaaagtatacggagacaagcgactcaattttatgaataaagcctaagcataacaacaatataaacttttaatttccaaatgcttttgtctcattatttggtttttttggtgattggacaattggcattttgccaatgtggttggttcgtttcacatttatatggtgatggtttcaacataatttatattttgttggtgatggaaaatgcttcaatattggtgctggtaaattcaaaaaaatcttaatggtcactcttaaattaatgaataaaaaaactaataaaatttattaaatattaaggtttaatcgcaaaacttcaataggaattaagacttaaaaatttactacgacaattttttagtaactgaaaaattctctgtattttttttttttgtaattttagataaattttcgtcgacgttttttacttttttcatttcgtatttacctaaaatatgtttaatctaatatagatatgtttatttgtaataattaggtattaatttgaatctgtatcatttcatttaatcatggatattttaattattaattgctcaaatacaaattttattaattctaaaaacttaataaaaaatctattaaatattacgcattttaattgattaattaacaatcattgctttttcctttcctctagactcagccggctcctcaaccaccgcttccgcttcgtcagtgcgcgaccgcatcgcgcattttgaagcacttaaacggggtgaagcggaggcggcgccaactgcgattcctcgtcccacagccgctgctgcggccagtcctgtggcggatcgtccaccgtcgcgcgagcggcctccgtctcgggaggaggacgaggcggcacgtcgccgcttcggctggcgaccatcgaccgccgaacggcgcacaatgcgacgtgaagcggacgaagttgtgcagcgagaagctggaaggtaatttgtatgaaatggtcacgtgtttcgatttaggtaataattaagctgtcgaaattttgagcgttggtagttcagtggttagagcgtaatacgcattgtgttaaagcgcgggttcgattccgttgttcactaacattttgtttttttcagactgtttcatttttatctgatcctctttccatttttataaatatatggtcaatattcgaaaattcatttccatttttaatgatatttttaaaatttacggtatttaaatgcttcgtgtcgtactgagacgaagtacgaaaaagtgcaattagtggcgaagtacgaaaagtgaagtgatcaaattaaaagcaaaataattattttaatgatccgaagttacattatttaaaatttaattaattatgttaaaattacagtaaatgatttttcatattttgcgctaaaaattcatgaccgattgagatccgcttttgtacccaaatatttatgagatgcttcttcttggtttttaaggaagtcttcattagtctaacagtgaaactcaattaagcataagcaatataaaaaattaatagcttttaaagcttttgtttcaccatataatataaagtttattttgcttttaatttttaaataattatttttctttttaatttttaaataattatttgcttttaattttcaaataattatttttcttttaattttttaaataattattttgcttttaattttcaaataattatttttgctttaataatttgatcacttgcactttttcatacttcgtcatagcaccgtatgatgtcataaaatttatatattcaattgaaatcttggattatgattccttcctgattacattttttgctttaacatttaataatgaaattttttattttagacaactcaaagctgaagacgaatctccaattagccccatcaaaggaacagacgaacaaattgtaacaattgtaacgcaaccgattgagtcacacgcggaggaattagcgacacaagcacaagcagtaccagcacaacaccaacagcacagacatggagaggaagaagaccatcaagcagtacaagaagaagaaccaaaacccgaaaaaattcgcaatgaaattgaaataattcaacaagaagccattgaaacgcctggatcagttgaagtgaaggaaattgaatcaccaaaattgatcagcagaattgagccgatcattacggtggaaccgccatccggagtttttgaagaatcgcctccagaaagtccaacacgcgatgaaatgaaaactgtgcaagccgaacaagctgaacgccatgacacggaggttgaaaagtacgttcctgaagaagaagaagcatttgaaaagcgtgttcctgaagagacttttgaaaaacgccttccggaagagatgattgaaaggcgcgtcccggaagagaaagaagcatttgaaaagggcgttccggaagaggaagcggaagaagaaacattcgaaaggcgtcttctggaaggagaaccgaaagaggaagaagctgttgaaaggcgtattccggaagaggcgtttgaaaggcttattcacgaagaggacaaaccgtttgaaaggcacgttccggaagagaaaggagcatttgaaggacatcgtgtggatgaagcatttgaaaaacgcttcccggaagaggaagaaatatctgaaatgcctttaactaaaatggaaaagccaacagatttgagtgtaaaagaggaagtagaatccgaacttgaaacaaaaacgcaaaaggaagttgaagcagtacctgaagaaccacatgtgaaaagtgaggctgttattggcaaatacctcccatttggggctgaaacgcccggaagggatgaaaaagcattggtggaagaggaggaaattgaacaaaaaggcacggaggaaattacgttaaaaggagctgaacggggtacttttgaatacaaaacaaaaagttttttgataaatatttttcatgtacacttttgtttttataggtttttaattattttatttttacatttttgaaattaaatatattttagcagagaaataacagaattccgtaaatgccgcactttttcgtaccgcaattttttttttttatagataaaacccagagaaatttggaattttattttttttaaaatggaaatcttattttttacgttttaaaaactaaaaaattaatttttattagagttgttaaaccaatccataaatagcaatttaacgtaatccgaaccctaatttttcctcctgatgatgcttattgacactcgaccaaaatcttttctctgatattttaaagaaaatttgtttaaaaatcaaaaaaaaatatttaatcttgaaaactaattgaggcctccgcttaacccttattagtgaataggattatcattccaatgattaaatgaattttgttgaaaatttagtgaattttttcaaaatttttaattgcaaattaatcattaaacaaacaaataaaaattgcagaaaaaccaaacaaatccaatctcgttgttggagcaaggaagcggaagaaacatatttcttcatcattaattccaataaaacagtggaagaagggcgacaaaaagttggcaaaaatgccaaaaatcgacgctgcttttaaaggagcaaaaaaatcctttattccaaagccaaaaaaagtggcaaaaattcaaaaacccaaagtgatgtcatgtcgcataaaactcgctgtaattaaaggtatttaaaagaataaaatgatgtgtgactgacccccttttatgcttcattttcgggctttccttctttatacattatgggaatttcgactcaccctaaatggatttcagttttttcgggttatggaattttcagcagcgattaatttcattctttttaacgggaattaatttaaaattttttatttttttcaatttattattatttcttccacttttccttttaagttttttcaaaatataatttattttaattacctattatcttcacttccatttgaatttttattttttttataaataatatcaatattaaacaattattttttataaaactttcattagcgatttttaattttggaatttttcagctcgaataatttgaatcttttttaaatttttttccttttggataaattaacagtataattttctcaatttattatttgtttttcttcaacttttcttttattttttatttaaaatatatttattttttaattaatatcttctttaatattaagttgattttcatattggatttttatttagtttttataaataatatcaatattaaacaatttattttttataaacctttctttagcaatttttaattttttttttctaatttcaattctttattttgtttcttcaaattcctttgggattttcgtttttttcaattcaaatctttaaacaacttttttctctttggactttcgtttatatttcttctccaaattagttcaattccaaaaattgcagaagagtcgtcacttggaacagacgttgtgaagaaatgattcaagtccgaaaaatttcaatggacactgagcccaaaagccaacaggtccaatttaa

SEQ ID NO: 2078 - DNA, 1594 bp, Heterodera glycines
agcccaaaagccaacaggtccaatttaattaaatttacaatttaaattgtatgtgttaatcaatttaagcttctcaaagaagcgctaaccaaggatgaacatccggaaatgtttgtcacaacagcattggagcgatttgacagcgaaattgtggtaaatattccgtggttaaatttcaaaaaaatatattttaaataaattaaaacatattggaaaataatatttataaataaatttaaatatatatttcaaaaacctaatttctgaataaatttaaataaatttttgaaaaaaatatatataaataaatttaaatgcataatgaaagggtcgtcaaactttgcccatgactccggtggaacagcagattgagcaagaaatgccatcagttgttgagccatcgacaattgaacagcttcaacaaattcagggtcagcagcggttggatgaaacggaaaggtaggcataaatttagaattttattaattattattaaattgtttgtcgtttaaaattagaaaattttccagcaggacattattaggggaatttgttccaaaaatattcataatttttcattgttcgccaaaatatattcttataaataatgttaaaatgctttttttctccaatagtttataattttgaaaaaaattgattattttttttcaatttcatttagtccaatcactgaaattgctgaaaagaaggaagaagaagcaccgatgattcatgtgctgcatcaatcccaaactgaacataagccaattgtttggcttgaagaaacgccactggagcaggtgatagcattataaaaacgattttatattattctttttgaataaattttcattcgaatttcatgggttacttaatattaattagaaaaactggactaattttcagaaatttgctaaattttcgaaacacattttttttgggttaatcactcagttttccaaaaaacctaagatttccaacattaccacttgccaaatgtaattaaataaaaaaatgttctcttcaatttttgcattaaatacactatttaaatatctttaaattaaatatttattcggtttcaggcaccttatgaagctgaagatgttgcaaagctgcaagccctgcatggcgttcagagtgagtcagcagcacaacagccaaaggaggcgccagacgcaagcagttcaaccaaaccatggttttccgccgtaatcggcggaattgcgggcgctgtagctgcagtcggaatagcaaccgacaaagcaaaattgaatgaaaatggggaagaagaacaaattgaagcagtacaggaacggaatttggagttggaagacagtttggcatttgaggaccaacatcatccgactgaagaggaggtgaaatttccagaacacgtgaaaacggatgaggttccggaagacctgaggacagttgaggagtatccggaagacgtgagaactgaagaaataattccggaagagcatctggaaaacgtcgtttctattgcaaaccacccggaagaggagacaactccgaaacatgtgacagcagtgaaaagtttccggaagacgtgagaattgttgaatttccg

SEQ ID NO: 2079 - DNA, 9056 bp, Heterodera glycines
acaaatggcttagtgcagttatcttaattttattatacaacattcccgtgtcaaatctataatttagcacttgttctcggaattcatttatctttgaaaaagaaaggtccgataaattctctgcttcttgacatttaaatatatttatttctttgagtccaatttctattttttgcatagctaatgcttggtttctatactcatgcataataagtttaggtagtttttgaattttttcgagcatttctaagaatgaaaaatataaattttccattccaggtgcactaaatgctgttatgtagaaatttttcacccgtttaaaaagcatatttgcaaaaatttcgagattaattgatcgtttaagtatttttccagaaattttccaatttctcgtaattttgttttttataaaattaatttcttggtctattgtcgacatctgggattatagttacttctagtgttatgacatcatccaaaggatagaaaagcgaatataattcttcttttaataggacatgttggaacaaagcctcggctgtgttttcactagggcatctaagagggcaataaaatgattcaaaaccaaaagaaatcttcagaatgcttttgaattttccttgttcatttttataaatttttacgattattgatgcgaggatatttttaaaattttcctccgcattaattaggaaaggatttttaaaataaaatttggttttatattttttaaagccaaattttaagtcctcatgacataatgactcaattatggcacaattttccattttggtatatcgttatttttttgttcttatataccaacgtgctcccaaacaattgttttgagcctattttcataatttaacatttggctctgaacccttcgggactcgaaatgtaatctccgggcttccattaacgaattttgcgcttgttcctcgaattttgttgcctggtcaaaagttttgcatctctcgaactcgcgccatgcagattcagcctttacagactccaaattgatttggtcctcgattttgaaaatttcccaaattgaatcggacattttaagatataattctcgaacaccgttagcataaggagctttttctctagattttattgcctgattaagtgtttcccgagaagacttggcaaaatcgccaacttcttctgctaacgccgctacatccctccatgctctctctgtctctttttttgcagcttccaccaaaatggtattagctttttctgatttttcagaattcatttttttatttttcatttattaaatttttcttttatattttatatgcaataaattcgtctctaaattctgtttgaggtctcggcctttccaaatctatttgcttttctcgcattgtttcttttaatttattggccaagtctccaatgcctaaatcgggctgcgagtaagcagtccgatatgtttgcccaatttcctgtctatagttttttgctaattctattgatttctttgcctcatccgctagttcttggcacatttcagcatcttttctgtcaaggcatttttccatacctttttttatatttttaatgttattctcttcattttttattttatcaaatagaacatggatttttctcaccccatttaaaagcttttcatgccaaaattttaccccatgagcactaggatttttgtcttttattttttgagcttcaaccatggtattatgtgccgataaagaaaaatctttggcctcttttgttaatctaattatatcttcaagtacggcctcaattgttcgtcggttattgcctaattactctttttcttcttttgaaatgcagcagcaactttctgccgcgttcactatgataaagaggaaaaataattttaagaaaaacattttatttaaaaaaattaacaagtttatttatagatttaaaggctgacaatatcgatcaaagagtaataaatccccttcttccctccgaattctttcacccttgccccaattttcatagtgcacacggcgcccgacaaactttccacctcttcctaaattaaaatgtatatgcgaattttaaaaattcgttaccatcccattctgctttccacgcatcccaaaaaatgccacagtttccaaaattcctgtatcatcagccacagacatcttcaaataagatgtcatcgtcttctcattaggattgaatcaatagtttggtttgcagaaaccaatttttaaaaaaaacatttccaattaatatttattataaaaaatcatgcgaaaaaatgatggtaattttaaaaattcttccattgccttctcagcaaccacccgccgtgaagtgttaaaaagtgaaggtggaagtctatagagtagcgcccatgttccaaccaactctctaaaatattttttgaaaatttgttttttctatgttctgacctatctatacggtggtagaagatgtcaattaagacctcaacaggggtcaaaagtagctctctgccccaggctttgcccatcactctcaacgcggaaacgcaatataaaaaaaaacggctcctgaaggatgcgttggttgtttggcttctgccttcccaatagaaccaaaagtaaaacgctggtgccatgtacccctctcccgtataattcgcctgcaccgtaacatttagcacagttgtaaaccttccgataggcgtccctcttcccgagtcatgaaaatatctcacatttctctcaaccatggtgaaacaaaaaattgaggtgcgattatacatagttatataatctgaataagcgctgtcgtagtctctgtgtattgctattttataatctgatgagtcaaataacaatgcctcaacttcctctctgttttttggccaaaaaaacgcttctttttcgagagcctcctcaaaatatttttgaaacgagtacatctttaactgaaaaattaataacgaaaaaaactctaatagataacgattgtaatcaacaaaaaataaagaaatttaaaaaatttaaaaattatttaacaggaaaggaataagtggcaataattatcgaaattctctggtccaacaaattcacttccccaaatgattgctgtctgtgcatgaactcattgaaaacaatgtctgggttcgaatgttggaaggggcgggcagggatgatcactgggtccgacagggcactgcaatacagatcgactgaaattttctcaattttccagtccggctcagcttcacggttcatcgcatccgtcattaattttttcaggatttttttaaacatttgttcggggtcttcgttttctgggcacttaaaatagaaagtagtcacatgttcttttatcccaaattttttattttcgtttgtgtgactttccacttcttcaaaacattttcccaaattagcactgttcttgaaataattttttgtatttttcgagcggcgaatttcttttgaagtttcttggaaatttttctttgacattctaaaaataggaaacaagtttgattaatttaaaatattaaatgttataaacatgagacaaaattatccaaaaacaaaaattaataatatccaaatggtaaaacattaaaatgatcatcaataattccttttttctgcactggcgaatattctttttgcacatcttttgagagaacccggaagtcgtttgtcggcccgatcttctccgggtagtgaaaaacttttttgacccctttcttgtagtccagcaccatctctttgaacaaatcgtatttaaaatcgtttcgtttatccaatgtcatccctctgatctttgttttgtgccaaactaccccatccttctttcttctgagttttaatgcatactgcttcggacccgcagacacatactccaaaatttcgctgtcggaatattctcgagtcatctcccttaaaaccacaattaaatgtgtttcaaaaattatcctttaccccaaaaatttcccctccttcaatgggcaccgaccctttggatgtgcaagcgccagagagtctaaatttaaaatgttatggaaatttttattcctgccgacctgtatcacaatacagcagcttagacccctcctccctgtagacttgctccatgtactcgtacagctttatccttgctgcactagtggtccacaaggacaaaacaatatttgacactttatgctctttgatgaacgcctcctttttccggtaaaccacccgggatagctcttcgcttatttttactgggcgcccaaattcaattgtattatctcttcccaattccatccaacgttccatactccccacaatttccgtatttgaaagggtattacgcattgaaaatttgccccacaaactgtttaatccctaaaattgaacaatttttcgatatttttgataatttctcaccaatttcgcaatcattcttaacccaggattgagtccaattttatcgtaatccaaattaatgtcatattttgccttatacatctcgaggaatgctctcttttcctcctcactcttcacctccgtcggccaccccgacgcttccacctttatcttcaaaaacatccgcacatatcctttgaacagttggcggtcaaactgctcaaaatgataggcccgatagaagcctgtgaccctatatcccagctctaaagccttccgcaactcaattgatgtgaacgttcccaaaaatgctctctgcgctggccggtggttgcatttctttacatcttttgccatcacaaactcattcttggccctttttgcacaagcccaacaattggggaagaggagcatgtcatcgatgtgcattgggaggagggggtacaaaagatttttcggtgggatgacttttactttcaaaaggccatcatagggaacatcgtcgggcaccgtccaattcacattgaaattcctgctgactacaattttcgggaccccgacggggtatggggtgtcttaagcgaggaaattttttttaattaatcagatttttttaccgtaattaacaaaggggtataaactgatgatgtcgaacattgatatttccatttcttccgtagcctttgcgtacaaacaaaacggcatcgttctccccccggcgtaagcatcccttggattgatcggtcccttgtctggcacactttcaaagaattttttcatctccttatttttcttcaattcctcactcacgtcacactcctataaacaaaaaaataaataaaatatttctagatatttattttacccaaacttctccgattgaaaaatttttgcatttttccctcaaattttccatgcgaatttccgttctactgcggttctcttccattgtccgtccgtttggcgctatcgtccagggcaaaaaacatctcgaacatccgtgaaacgcacaccccttaagaattgttaaaaagaaaaaattctttttctttcacctgaaactcaataatctttttctctgccccaatcacacagtccactttcagccccccaaattccacttctcctccgttacacgcatgccgcacttttactccttttctttgtgccagccactcaaaatatttcactgcaattttgctctgattctcagctctctcgtaccctccctcgggcataatcggaatgtgcctgtccttcaagaattttgccctgaagatcttcataaagacacccgcgattgtgacactgtccttcatgacatccaaatctcctgttatccccaaaaacaactgccggaacttcaaaatagccgccatgagaatttccacgtcgttttcgcaatacaccctaagctgctcccctaaaacctatttaaattaaaaatcccatatttttagttttacctaattcaaattctgtttgaaaattctcattgtgccatgcttccaattttgccgcttcctcctctttcatgctgtcggggcaatagtctccaagtggcggcaggtgtgacaatctcttcccaaagttctcatttttgttgtatttgtgaggaaaatacaacttggccgcgatgttcagtcccaaggtctttgggagatcccccaacttgttctgactaagcatccagaaatcccggaaatacacttttccagccttgatttgataaatcttcaaatctgccatcatcagctccgtcgcaatttccttctttgttagctcggacaaaacaaagtgggaatcgaacctcccagcataatgcgcaaaagcaaccgtttcaaatcgttgaaaacccattatccaggcaacaaactcgctcattgggtcaaaaccatccgctactgaccatgtgattttcttggggccttcgcaaatctcacattcccgctcttctcccgcacaaatactacaagtatgtgaggcactaacaagattaggccggtgttctcccccatctactgtcgtttccaggtcgtatgccacaattctatatgctttctgcggccgcactttaatcggtttgatgaaacattgacgaccaggatggttaactttgcagattttacaaaatttttccccacagacgtgttttgaacgtgtttggtagacttctccacatttttcacatttcttgtactctttacaagccatcttcttgtgcgcttcaaagcattcccggttgtagaacttgagattacattcgccgcagtgaatctcatcacagacatccacgcatggaaagccaaaccccatccgacagcacttcttacagcggtccttgcattccatccggtgccgttcagttcgatcatatgtcacctcacaagccacacaaaaattgcgaacaccaaaaaaccaggaagccgatttgatcccatcccagtgattgccttctcttatcacacaaacttcatttcttcgaacaccttcccctttgaaaattggcttaagtcgggtcttctaaaaaagatgtaccggtatattttttcaagcgaatttatttaccatttcaaaagcaacgatgcgaaagttgtccgggtattgggcgtcccaaaacttttgtacagcctcaagttgttggataccaaatgttttgtcgcccatgctaatccctgccttttccatcaattctaaaaccatttgtcgttgttttttctccgtttccaataaataacggaaagccttccgagaaattacatgatcaattagttggtaattgcgagcaaattcaagggcataaaaaaggcctaaacacaagtaaaagatttcatttgtggaaaataacgattttgaactcactaaattttccctttggtgtgctaatccgacccgattccttgatttgggcaagagagcaaaagggcgacatttttttgaaaggagtaaaaaaccgcagttgctactgtgagaaaatttcttttggggaaaatacaattttgtttaattatcaaagatatcaattaaaattatcaaattaaaaagtaaaaaatttataatttatttaaattttatatcctggatgagttgtgtggggaataaaaacatcgaaaaataaataaattccagttcttcgggccattggcattaaaatatgatctgagcgaaacaatcttctcatcatggaataaaaccgacatttaacaaaggatgccaaaacaaaatttatgcacagcagtcgatgtgtttttggagggggaagagcatcaattatttccttgatcaattcggcggggagcggacagggcataatgttggtgaattttcaaaaaaggggttatagcaaattttaaatgattttcaaatgaagaattaaccgtgtcgacaacaccttattaatgcaaaaataaaacacaaaaagtaaagtccataaataacaaaaagaagcattccgaaaattttgtcatttcttttcatttgctcgtaatctttgtctaatgttaggttttgcatctaatttcttaaattttgttaattttcaaaaaaaaagttaggtaatgggattaaacccttatcattacaaaaaatttaaaaacaacaaattttatcagaattccattcattcattgaggcggacgtcttgggtcccttggtcttcctctccactctcccagccgtcggatcacttccagcactctcggagggttgggatgaattggcttaagaaaagatgttttggtgttaggtaaaagacagggtcggaaattaccggtccatttggcaacggttggacgaatagtggcacgtctctcagctgccgcggtcgttgccatggttgtactggttgaatgtcctgaagaaacatccggaaaatatgagaaacgcacgaaaacaagacccaacattaccggaacgttttcgggtggatgatacggcacgtttcgcggcggatgggcaaattgtggtacggcgtattcgcgttgaatttgccgaacatgaattgcctgaagaaacacccagagactgaggaaaagcaaccacaatttgatccaaattgatgtcacatttcgtggcggatggtgaattggcggaaagtctctcagcggctgtggttggacacgaacagcctgaaaaagcactcgggaatttgagaaaaagcaacaaaaaacgagtccctaattaccggcacgtttggcggagggatgccaaattgcggcaaagctctcagcggcagtggttgttgcattcccacccgaattgcctgaaaaaagcactcggaaatttgcgaaaaaagaaacaaaaccgagtcccaaattaccggcacgtttggtggagggaggtctaattgtggcaaagctctcagcggcagtggttgttgcattcccacccgaattgcctaaaaagcactcgcaaatttgcgaaaaagaaacaaaaccgagtcccaaattaccggcacgtttggtggagggtgatggatttgcggcaaagctctcagcggcactggttgatgtacttgttggacccgaattacctgcaaacactcgggaatttacgaaaagcaacaaaaaaaacgagaccaaaattaccggcacatttgggggagggtggtggatttgcggcaggtctctcagtggtatcggttgttggacccgaacagcctgaaaaaaagca

SEQ ID NO: 2080 - DNA, 2392 bp, Heterodera glycines
  unsure (1)..(2392): unsure at all n locations
ggatgaattgctttaagaaaagatgttttgtgtttaggtaaaagacaggtcgnnnaattaccggtnccattgggcaacggttggacgaatagtggcacgtctctcagctgccgcggtcgttgccatggttgtactggttgaatgtcctgaagaaacatccggaanatatgagaaacgcacgaaaacaagacccaacattaccggaacgttttcgggtggattatacggcacgtttcgcggcggatgggcaaattgtggtacggcgtattcgcgttgaatttgccgaacatgaattgcctgaagaaacacccagagactgaggaaaagcaaccacaatttgatccaaattgatgttacatttcgtggcggatggtgaattggcggaaagtctctcagcggctgtggttggacacgaacagcctgaaaaagcactcgggaatttgagaaaaagcaacaaaaaacgagtccctaattaccggcacgtttggcggagggatgccaaattgcggcaaagctctcagcggcagtggttgttgcattcccacccgaattgcctaaaaagcactcgcaaatttgcgaaaaagaaacaaaaccgagtcccaaattaccggcacgtttggtggagggtgatggatttgcggcaaagctctcagcggcactggttgatgtacttgttggacccgaattacctgcaaacactcgggaatttacgaaaagaacaaaaaaaacgagaccaaaattaccggcacatttgggggagggtggtggatttgcggcaggtctctcagtggtatcggttgttggacccgaacagcctgaaaaaaagcactcagaaatttgagaaaaagcagctaaaatggacccaaaattaccggcacattttgcggatggtaatcgaattgtggcaagtctctcagaggcagacgctgctgcccaacatgtattggctgaacacgaacagcctgaaaaaagcactctgaaatttgagaaaaagcaacgaaaagcgaaccgaaattaccggcacatttggcggagggtggccaagttgcggggggatcggcggaggtggcaagagaatttcatcatcttccgattcgtacccatcgtcatcggggaacatctgccgccctaaaatggaaaaaatcagacaagatatttgtggaaaaccaaacaattttcatcctgtggacgatttcctgcaaacggaatatttgcaaaatccaaaaaaactgaaatttaaattaccaacgatgaccgggattgggaagctgggcgatggtgaacggggcgtggaaggaggacttggttgcttggatccgtatcggccatccagaaaatcttttctccatttcctacaaagaaaaaaatcaaagattggaaaaaataaatggcattacgaaagttgtgcaagtgaatttgggtcgtatgctctgtttgggtcaaaatgcccagccgaaaattccccatactcttttgaaagaaacgcgaaagtgccgggagcaataaaaggcatgacgagaaaatggaaaagtggatgaaaatggcaaatggcgaaaaaagtgaatttgggatgcagccccgctgatgacaaattgaaaagtgtggcgaaagtggcaaatgatgagaagtgaacttggggatgctgccgctgctgactcctcccactgccatgccgtgctgccgtgccgcggcggcagatcaaaatgattgatggaaaaaatttgaatatttgggggcatgcgccccgaggggcaaagtgtgcccccgactcagccgaatggaatggaatgaagtcgcttcggcgtccccttctttatatgattgacagttcccgtgtataaaaactgcggtttgtgtgatgcaactatttttgcataccgccgcactttaaattttctcgaccaagaactttgattgacaggtcgtgaacataaaaaactattttgaccttgctggttggatggcaccatttttgtgcaaacgccgcgcagcaaaatttcgcaacacgcaaaaatggaaaaaatacgaataatcttatctgatcaaaataggcgggtggcgaacggtggtagggggaagatgggttgaatgaaaggaaggggaagctgtcgatgaggagggaagggaagggggggggggattttggggccaaatttgggccggaatttttcaccttttttcacctgctatcgcatgctatgaccctttttcacctgttttcacctatttacaaagtttttcacctattttcaccacttaccacaggacatttcaatgtcacctattggttttcacctgatttcctaatgttttttcacctcttttgatcattttggtaagggaaggggggggggataggagaaaaggaaggaatcggagggatcattaagga

SEQ ID NO: 2081 - DNA, 1672 bp, Heterodera glycines
atacataaaaattgcttgccctgtcgacgattcgacctccgtccctttgacctccctcccttcccccctcttcccgaggatagggtcaaaatttccccaccattctcaaaagttggcctggattactgtggcccagtttacgttttgacaaattcggcaccacaggccaggaaaatttccaaaaaatattggattgtcatttgggtctgtttgcctacccgtgcaatttctttggatttggtagaggaccaatcagcaccaatttttaccctggcatttcgccgctttgtctcaaaattcagcctcccccaaaccatttactgtgacaatgctcccacttttgtcgcattttctaaatttattagccctcaatttccaacggaatggaatttccgtgtccctcatgccccatggcgcggtggtcattatgaaaggttaattgcgcttgtaaaacaccatctcagaagagcattcacttcattccgtccccgcgcaattcatttgacacagctaaccacttcactttccgaaatagagacggtcattaacacacggcccataacctttaattccgccaatccaatggaccccaaacccttaagaccgattgattttattcgtcccctcaatcctcctcaaaattttgtttccctcctcactaccgaaatcgatgggacccaatcaaaattaccggaaagtacccaaatttcattgcaaacattatgggaaacagcgagccttcacacagaaaggttttggaaccagtggattaacgactacttaccctccctgcgagagcgatacaaaaaattggggttttacaccggattttggaaaagcaaaaaaaaagaaaggatggggaagggtggaggggatggggccaaattttggggccggatattgggccttatactactcttattatttatttattttttcatattttaaattcaacaaataaaacacgtcatccaaagagcgaaaatttggagaatgctgggttattcatgtcgccaccaccatttttcattaataactttcctcttttataggacactaaatttgggtaattaaattattttcaaaatattcctattgttcgttgcacaggagcgcaaccgttctgccatatatgaattattaaaatgatttgaaagggttttagttaatttttattcaaatttttaatttattaaaagttttttgtctctttttttgttttaacaataaatttaatatcattatcttgttgttaatttaaaaaaaaagaaggaggcgcaacttgaattttaagaaattaaatcatccatcgatgtctatgcatttatttagagtcagaagactttataattttaatttaaatagataattgttttgatattgaatggtattttaaacatcattcatttttaatacaaaaaattatctcaaatcctttttgtatatattgatttttggatttaaggttaatttcatatagtaatcaatggatttcatgagcataaattaattaattgtagcaaagcggctgtttttttttgtgaaattgatctgactgatgtgatccatttgtcacactctaattgccaaatatataaattgaatatataatttgaaagttatttaaattttcaaaatttaatattttatattaattttttaaattgttagt

SEQ ID NO: 2082 - DNA, 2217 bp, Heterodera glycines
aaaatggaagaagggcatattgattcgggatttacctctcctatataaaatttctttcaattttaattccccttgaccccctgcccttttttgtgtgtttccttaaaccgatgtttctcccacgagacgcctttcgtcctcttagaaagtgcacgtcattctttcccactattctatcagtccacccaattttctgttcattttcatttgaccgatggttcggggacgagatcatctcaaaactttgcttttcctcttctctttttgtctatttcttttttttttgaatttaaaaaaaaataaatttaaatatggatttttcgctcgatacaaatgcattattttctcaatttccatttcattttccgctggtgatccctcgtcctccgatcgtccgaatgcctttttgtcactgtgttcctaactttgtttacttctgaccaaatcacattttaatgactgagcttttcctaaactaactgagtacttttaagttaccatttctccgccttttaccattaatcgcacgtttttaattttgtatttttgtcgacattttaagaaataattttattgtttgtacctatcattcgtccacacaaacaaagctctctttcattcactctttcagacttaatatccgatctgatcagtcccccccccaccattcgttctgatcactctcatcgttttgtcagtttattcgtcattcttttcgtatgtaatccgtcctcaatttgaaaaaaaagtgtaatcgccgttgttcgttctgtgcataaaggcgtccctctgctctttcgctcgttaatttgggggcggtgtgctctccgcgccactgctccgtccgtccccgccaccgtaactttgcctgaagcagttgcactccgtccagtgctcattgtgctgaagaagcaattgaaggtggcggatgtaagcgatggccagcctcaggctgtccactttgctcatgcgtcgatcgcttaatgttggagagcaaattggcgacagaagggcaaatcaattgcatttaattggttttgtatggcgattaaaaattaccgctcaattagcggtaattgttcgcgcaattggctgaatccgctgttgagattatgaacgcgttgcctttctctttcattgcgtctccaaactgtggttccttgggtactgaacaaaaatgttatagttgtgggtaatagtgtgctttgtccctccccccccccttttttggaataaatttttgttttcttctaaaaagtcgtgaaaacagttccaaggttggcggtactaatgcactttagcagacatacatttttttttggtcttaattcatgtaaaatagcttccgggggttttcagcatcgatgattcaattaattctgtacaccagaacccgaaatcgaactattggtcgaacatcgaaatcttcaaaatccttctattcaaaaaaagtccaacaatatttaataatgaaaaatcaacgaaaatcaatgcttgcattttcgatgttcgaccaaaagttcgatttcgggttttggtgtacggaattagttgattcaacgccagattcttaataatgatgctataaagcccggaagctagtttacatgaataaagacaaaaaaaaaaatttcatgtctgctaaagtgcattagtacccttttggctaataccgctcttcttctcttactgattatagacattcgtcgcattttaaatgatcgaaattcgggggccttcccatccgcaccaccttctgctgttggtgcaaaagtcactcgcctcatttccaactcgtggggcagtggactcttgacggtgtcttcgaagggactgatgaatcattgcactccgatctcccgcggagacggagccgtggaatttctataagtactaattcactgacgatgtcgtcacactggagaatgtcttagaaaggaaagagccatttaaatatttatgtttcttctgctaagagctaaataaaatctacatactaatattataggtgctgaagccaatttttgtagaaaataagtactcaactatgaaaagtaacctaagaacattgagcctgtattataattagtccctgtcgaaaatcactgacgatgatattaaccacggtcaaatcacttattttctttatatagatctctgtttttgaagtaatccaacgaaaatccgcctagaatgtcttataatcaacaaaaggat

SEQ ID NO: 2083 - DNA, 3664 bp, Heterodera glycines
aggcgtccctctgctctttcgctcgttaatttgggggcggtgtgctctccgcgccactgctccgtccgtccccgccaccgtaactttgcctgaagcagttgcactccgtccagtgctcattgtgttgaagaagcaattgaaggtggcggatgtaagcgatggccagcctcaggctgtccactttgctcatgcgtcgatcgcttaatgttggagagcaaattggcgacagaagggcaaatcaattgcctttaattggttttgtatggcgattaaaaattaccgatcaattagcggtaattgttcgcgcaattggctgaatccgctgttgagattatgaacgcgttgcctttctctttcattgcgtctccaaactgtggttccttgggtactgaacaaaaatgttatagttgtgggtaatagtgtgctttgtcccccccccctttttggaataaatttttgttttcttctaaaaagtcgtgaaaacagttccaaggttggcggtactaatgcactttagcatccggggcttttcagcatcgatgattcaattaattctgtacaccagaacccgaaatcgaactattggtcgaacatcgaaattttcaaaatccttctattcaaaaaaagtccaacaatatttaataatgaaaaatcaacgaaaatcaatgcttgcattttcgatgttcgaccaaaagttcgatttcgggttttggtgtacggaattagttgattcaacgccagattcttaataatgatgctaaaaagcccggaagctagtttacatgaattaagacaaaaaaaattttatgtctgctaaagtgcattagtacccttttggctaataccgccaaggcttctcttactgattatagacattcgtcgcattttaaatgatcgaaattcgggggccttcccatccgcaccaccttctgctgttggtgcaaaagtcactcgcctcatttccaactcgtggggcagtggaattttgacggtgtcttcgaagggactgatgaatcggcgcactccgatcgcccgcggtgacggtgccgtggtacgtgccgtcgtgccgcggtcgtccccctcgtccgcctcctcctcgctctgcgaccgctgctcctcctccgctccctcttctccgtcttccgccccctcccttcgctttctcttccgtccctttctcttccgttctctcttctccccattgtctctctccgtcccttccgccgttggcatttgatgcgtatgcacaattactgaatggtggtggtgctgcggatgattgtgctgctgataaagggctcctccatttggctgattttggtgaaaggcaccacaatttgcggtgccatcggcggacggcccgctgaacagaaaggagagagacggcgcattttgggagtgattttgttgttggagttgggcgacatcggccgcattggcacttatcattttagtccaatgaaagtgccacaaatttacttaaattgtattggattatcgatcatttctaatttttaataaaagtggtggatttaaaagcgaaaagcttaatttggccaattatttatgagaagcggctaattaattgcctcccatttttattttgtggatgcgactgattgttgtgagtgatgaattggtcgtcggctccctctttcatccctccccctctgcccctttggcaccaatcaccgctcgtcctcgccccggccgaccacagtatcgaattcgccctcctctccatccctttcccttccctttgcattggccaacagaatttggccgttggatttgtgcagctgacaattggtggatgagaagagattattattgaaatggtgagcagcacttccatacaccacaaaagcagcaatttatttgggtaattttttagatttttatttttcaaaaggatcaatcattttacaacgtgatcatttgtttttggctgtgttttcccgtccgttatgtttccgaatcgctgtgtgtctttctgagggagtgccattgtcgctgttctatcggtcgtctcgtcgtcgttgagtcgtcgcccgagggcacattgcgtttcgccactgcgtttggcgcttcgtcttcgccaaattcggcctcttcgtcccattggggttcgtcttcctcactctcttcttcttcctcctctttggcactcacttttgtgccatcttcggacggtgccaattccatcgtaggctgaggcaatggcgacgatttgtgtgaaaaagacggagaagaggaagaaggataagaacgcaaagggcaggtgatcagaaactttggcaaagtgtcgtcaagtgacagaatgcgttgcgtttcatcggtcaaaaataaattttgaagggtcctaaacagggctgggcgtaattacggaaattacggcctttttggacctcgtcatgacggattacggcttacggatttttgggatttttccgtaattttgatccgtaattgggtttttggattatttttcgagacgatttcctgcaagattatttttttataaaacaattgttttcttttaacttttaaaaaattcttaataatattgaaatactatataaaccaaccataatgattaatgatgcaattttattctctaaaaaaagacaaaaagggtaggttttatgtcctaaaaaaccaaaaatagtcactaaaaatggaaaattttcactaaaaccctaaaatttagggtataaaagcgtaaaattttacccacaaagcaacaaaatgaagccaaatcagtattgggacacatattttttaaactttgtcaattggaatatgaatgtcctttctcgacactctcgacgggatttgtcctctccctccctcctgatcaactaataatcacttggattggatgtactgacccatccgatgtttcttcgcctgtcactgtcgtgctttgtgtcaatgggccgctgagcgaagttggcgacatggctgtcctcagcggacttccgttcagattgtcgctgtttccttctacgccgctgttcgcgcggcttcgatcagttgaacagaggccaaagttcaagctgttcagccgaagtcgcgacatcgactgggcggtcggcaaagcgccgcgggtgtaaatgtgggcgagggctgcacggagctaagcgaaggggagaaaatgaagggaggggagagaggatgatcaaagaatgaatggttgatcagaaaggatcatgagaatgagagggaagacggaaggattaacaacgaaggactgatcagaaaagtaaaaaaagtgatcagtgggctaagaacggaaaaatcgatcggaaaaacaagctgattggagaaaaagacaaattgactgtgaatgcgtttcaaacatttcggtatccgtacctcgcgcaatgcgacgacgcctacgagacggcctctgttggtgacataagctgaacaaaaaggcgaaatgaaaaacagagagagaggggaggggggaaggggacatcggcacaaccgctgcggacaaagcgggaaatgggatgaaaaatgatggcattggcggtgaacatgagcaaaacacgacgcactcggagtttgactcgagaaccgaacaaggttttcacatttatcgtttaatgacataattttttgttgtttgggtcttgcattctgagccacgactgtc

SEQ ID NO: 2084 - DNA, 4239 bp, Heterodera glycines
gcttgcgcagttgggcggccctgtcgcgcacggacgtggaacgaccgagaaaagccttaaaaacgaacaaatggggaaaaggggggggggagagggagaatggttgaactgatcagtctgacaagaacttgaaatgatttgatcagaattaacgcggaagaaattccatgttatgaaaatgccatggggaaatgccctccccggggcccacctgctgttggttgatcgacttggcctccttttgatggcgcatcagcaaaggcaccaatcgcccgctctctgaaagtgtgccaccgatcattttggccagtcaatcactttgatcaaactttctgccatccaactcactgctttggtcgtcgtgcaacggactgatggacagcaaagtgttgccaaacaaattccgatcattgatcatcgacattttataatttgccggcaccgcagtcgtagccaatgtgttattcggcgtgggattgcgatggaaagtgccctcggagaagccgctcattgtccgacttttgcgccgtctgctcccgtgcaaaagaagtgccgggtcgggcccgaggtgactggtcagcagatagtgcagatatttgcgcgccacggagcccaacaaaatgcgctcctcttaattttaggcattcaaagtgagcaatgttaagttggacggttaagtgatcagaataatgaatctgatcagctcacaatcaattttaaatttggtcacacctaatcaattacccagcataaaagtcaatatattgatcaaacaatggtcagatcaggcatgatttgaattggattagtaacaattagtgttctgatgggactgatttggcattgccttcgtcggtgaccaatgggtaggagcggaggtgcggtgtgcaaatgagcaactcgcgcaactctttgtaagtggtcagtttggtgacgaacacaacgtcacggaccataatctaaaatggcaaaatgtcattacaattttccacagataagctgtttcaattgttgtccacctgttcaaccttcaaagtgtggacactgaaaaagggaaaaaagcaaattaaaagttgcaaaagcaatgccacggcacacctaatccgagaggggggcaattcggccaaatggggcaactttcggatgttgatgatggactcgtaaatgctcggctggagaaatgaactgaccgcatttgccaccttaactggggacattcggtgtagctttgccaccgccaccctttgatcaattttcctcaagcgatcggaacggaccattaaagcgacgaggacgggcagaagggcgcacaactgaccggtggtctcgcagacgatcaccgcaatggaaagcgaatgcgtcacggcgccggtgtacgcggcggcgcctgggaaaatgccagagcagagaattgttcattacaaagttgcattttgccttttagaactgaccgacgacggcgtaaaggccggggtaaatttgggggccgtccgaaccgcgaatgccctcgggaaacacaacgaccatctgaacaaaaagtgccaaaacataatcagtcgtcgcacgcattagtcgaccaattcgccaatgattcgtccgccgcacgcgccgatgacaaaagaggggacgaaaatgccggcgggaagtgccaaagttatgcaaatagcgacgaggaaaaactgacaaatggaagaacaaattagggagggggaaaggcaaaagagacgaacattgaccagcaaatagccgaacagaacagggaaagggttgggcctaaacttggaaaacattggcattaatttgggcgggggcggggtgggcaagaaaggcacacataaaagcggtggtgtcggtactttcgtcgatggagtccaaaacggattctgtaacggcaaagtatggtaaaggaaaaagaactaacgtaataggccaattatccaaatgattcccatgatacgctggtaaaatgttgcaattacttctgcggggaccctcctcctcccaaaggtcctcaatggtccaccgttggatgaccttcccaccgcagcccatcgacgtgacattgtacagagtcatggtacagttggagatgaaatcgcccaacgtttcgcggaaagtgtactgaaatggacggctaatttccaagcggtcaaaaggcactaataaaaattgcctttccggcaatgaaacggccaaaaccatccgggaaagtgacaataccaacaatcagtgccatgaaaatggtgaaggacatagagctaaatgccaaggatagtgggagatgggacaaagcggacccaaatggacagactttttgccaaaaatggcacgaaaagtgcgatttcgccgtttgaaataggcaatacgacgatggacgacgacaaacaaagcaccgaaaagaccgctgagaaggccaaccaaaactgcaagagaaggcatttccgtggggttgggagggaaaagcggacgaaagctaaccgaagacggggatttcctccaccagaaacacttcattggggaagctggtctggtagtaagcagtgatggtgccttaaaggaacggaaaagagagttatgaaacaactgatcaacggactgatcagtgactcagcctaaagtgatcaaaaaaccagaagccccattacgtgtgtgatccatgggacatcctaatcaatgtgaccgtagtgatccgttagatgattaagcaaaagccgaccggattgagtctggccaatgtgaataatctgatcactcatcctcaaaagttgcgatcggcagaccgtccaatgtgactggtcttatcacttgcccattccaaacaatcaatcaatcaaaatggtccaaattaaccgcatttgtcatggattgtccatccgttccttccccgcgtcacctgcgatgtgcggcggaatgatcaccgcgttggcgaagcggaagatcagcgcggcgcatgtggtggcgaagaaggcgcgccaataatttttcacagcaaaatatttgtgggtgcactcgataccgtaaaggacggctgccaattgacacggggtacggtaacgctttggcatcggccgattttggtggcactcaccgcccgccggactgctaaaggtgcacgcaatgcccacggaacagccggacgagagaatttcgaactcgcggccttcgttggagaagaaggcgctgctctgccaggcacgcgtcactttggacagcaaagtgccgacaatggcgcccatgtgaacgaagggaccctttggcattggcatttcattaccaagaaattgaagaatcaaagaccacccacttctttgccaacgggaagccctgagcccaaagtgagcgtcagagaaagcattttggcgaccaaagtgcggaaggagaggtaattctgcagcatgaacccattcatgatcactttgatctcggggatgccggaccctgaacaaaagcgggcgattgtaatgccaaaatggacggagcaaacgaccgatcgcttgggcggagacgtatttgcagaccaaagcggcggcaccgacaaaaacgacaagaaagccgacccaagagacgaatcccgacaaaggaaagcaaaaggcaattgggactaagggaatgccgaaagagacataccaacatcacatcgtaatcacgggcaaagtcgaacagaatggcacggtctgaaggtgaaaagggaaaaatgggggaagtgaaaatgggagggaacgatcagaaaattatggaagagaaagtgatcaaaaaagagagtgaaggagagagaaaaaacagtgaaaaacagagacactgacaaaaaaaagagagagtgaagaaaaaggatactttccagggatgggccgaggtttcgcttttcgcatttcgctttttggcgcgaaatgcgaaatttccaccctaagaaatgaatatatttgaaaatttaatttttaaaacgaatgcttcagtctaaaaaacccccaaaataggtgctaaaaatgggaaaataggagccaaaaagttccgaatttggggtgtaaaatcgaaaattttcttcaaaaagcaaaaatattatgccaaatcattaatgagatagataattttcaaaataaaaaattctcgccaagaaaataaacaaataaattttggaatgatttttgagaaatttttctttgttcataggtatatttttgaaattttcgagtcgattcttaagggtatattttttgaaaaaattttcggtcgattcttagg

SEQ ID NO: 2085 - DNA, 4265 bp, Heterodera glycines
tgcaataaaaacgaaatacaccaataagaatcggtcccaaaaatttaagaaaatatacccctgaaaattgaccaaaatttcagaaaataacccataagaaatgaaaaattttcccaaaaattcgtctccataatttatttattttcattttcttgacaaattgtaattgtgcgggcgaaattgataaaatgagaggcaatttatttatttttatgttaaaatgaagtaatcatttgcatttgcagaattgtgaacctaaatacattaatgaattcataatttagaaaggagaagaataaataaaattttataataataaatttataaaatgctatttttattatgatttaaaaatggaaggataaataaagtttataaattataatgaaagaatatttccataaaataaagtaaaaattgttctaaaataaacagaaatgtgtataaaattagttatcaatgagcacttatcacagccaaacaaaatcaaaaaagaacagccaaacaaagacactgatcagactgatcaaactgttgtagacgatgaacattgacatggaaaagacatcgtaacgtccaaaaacacataagtgaaaagcgaacagaatgccaaaataaagtgcaaaacattttgttgtgccaaatttgaagcatcgatgcatcaaacctttgcatttgcgcgttggcatttcgcgagttggtccgccactaagaattttaaattacccaattatccattaaataattaatatttaatttattaaaaatatttataataattaaaaataaaaatttacagcatttttgcatattgtttgatgaaataaacaattaaatattaatcatttttttcaattttaattttctttttaccattgctttaatggcattttgacacgcctcggcagtgaatttatcgcaattttggctttgtgccatctgttcgggcccgaaattcgataaacatatggcacatttgggccaaaaaacaaacggagtgcaaattttgggtcgtccataaaaagctgaatatattatttactttgaaatgaaatatgtaattattaattatgctctttttgattgagttttaattgcaaaaaaaatatattattcggaatttttaaataatcaaaaagaaattaatatttttaatggattatttgttttatcttccgcaggtttcaattttgcattttcaatgataaacccatttattattgcaaaaaaaaaaatattaataaattacctaaatttcaactttttttattcattaaattgtcccatggaatgtgtaattgtgccaaattcactcccaattataaagtgccaaccacctttgccaggttcggcttgcatcccacgagttcggccagttcgtccatgtaagggatgaacggcacttggacagtgtgtttggccgactcgaaatattgacgacgcatttgtgcccgcgtctgtgctatgtcctcacacattgtgccattgtcgggaagttgaagacgaccagcaaaaactgcggccgcccagcgggattgcatctcggcaatgggtgcctgagaataaaataaaaattataaattcttttaaaaaatcaaataagccgatgcttgaggcgaatttttcggcaaaaatgccaaaaataaaaggcacaaaaacacaaaagagagcaattatatgcccaatcatacagaaaataatccataagtaaggttaaaaaaaagaaaaacaaaaaaagaaacactctgaagcttcaaacaaagttatttttgatgaatttaaaaaaattaaaaaacaaattatgggattttacctcaaaaactttcaattttttttttgcttaccacactcccaattggctgcaccaaaccaataaccgccagacgttttgccacataatttgagggcgggaaaacatatttgtacaagtcaatttcattttgtttctgaaatggagcgtttaagaacattaaaatttagcttaatattgatcaggtggtacccaagagccaaaaaacacaaaacgattttttataattttcttaaaggttaaaaaaaacgaaagaaaaaccaaaaaatgtaagttcaaaaactgtttaaacgcttttttaattttgcaagctaatttagaatatttagtgctattgaatgatatcaaattgcattcaatttggacaaataggcgtagttatacccgaagccccggagcaatattattcatattttcagcattaaaactctattaaaatgtttactctgatgggaattaattctgccggcctaatgaatggaaatccgaaagtgtatccggtgcacaaaatgatcacatctgcactgaattcacgtccatcttttacacaaattgagtgttcgccaatggtggaaatgtcgtcctattaaatatttctatttttattattattaataataatattataattaatttcatacggtaattgtaatacggccactggccaacagattggccaaacagtcgttcactgctgggtgctgttggaagaagcgatgtgctggacgaagcccgtatatgtcatggtccctggatttcgatgttattatgttttctcgaaatcttattctggaaaattattaaataccaatttttttttctcatcttcttatttatttgaattcaaaaaagaatttttcacaaatagaataaaaaaataaaattatttttcttcaaaatttatttaaaaaaatccattaaaatatggtaattggtaagaaaataatattttttattggatcatttgaaaaacttattattgtaatatctatttttgcttttaggctgaaagttctgattttgaaggttctagactttttgccttaataaaaatctctaaaataactcaatttaacatctttattttcaaactattatcaattttatcattttttaaaataatttctttattgaataaaatttttgaattttcttattgctgtcactactgtttttaaattattattcttatgcattaacattctctgttgcattcgatgctcatgaaaatcgttggcaattgtccatggcaaagtgcgcatcagccaatcgtaaaaccgactctgataaacaacatcgtacggtagcccattttggatgacccgattgaacacccaagtgccgcgtcgggtggaaatggtgacctatttttaaagacattacatattttacggctaattatgataattttttttattaaattattattcgaatttttcaatttcagtttctaaatttaaaaaattcaaaattcccacatttttcgcgatttttgccaattcgacgccaatgtccaacgcggaattgccaatgccaacaatgaatacatttttgtcttcaaatcccttatagtcgcggtactgtttggcatgcaaaatttggcctttgaaattctcaaggcctaaattaaatttgagatttttacgcaataattaggaaaaaatcaaaaaattgaataaaagcagtaaaaaaagcggaaaattttttgcaatttcaaggaaaattgtcgaaaattccatctgaaaggcgactttttttcttttttgcttcaattgtggacgaaaaaagtgaagaattggaaatattcgaaaaagtaaaaaacaagtttaaaaattagaagtttctgaaaaagaaaaagaggcatgaaaatgaaaaaataagcattaaaaatgttatcctggaagcaaagaattcacaaatatgctgatttaatgcgctgattttaaggtggccattctgacaagtcatttaacatgctaattaactcgacgaaatatctaacaaaaaagaagtaagccaaaataaaaataatatgaaatttcaaattaaattattattttttaacctgtaatttgcggcattaatggctcgcagtgatggcccgtacaaatcattgcagcatcaaattggcgtaattggccaaccgaaagttggactttccaaatgccattgttcagtgtcatctgaagaccattttattgtttaaatttgtttaaatatctacaactttaattgacacctctttaacttcggtgttaaattcaatgtattgcgcgagattgaaatggtccgcgtacatttcaacatatttttggacatacgaatggtgcataaaatttggaaattcaatgggcggaggcttaaaaaggcaattaattaattaaggtgcaataaggaatttaaaaaaataaaaaattctaataataaaaattgagttttacaaaatcggaatatg

SEQ ID NO: 2086 - DNA, 886 bp, Heterodera glycines
gaggattgaaatggaaagcaacaaaaaataaaatgtcggaatttttttgaattgaaaaaattaaaacaaataattcatttgttttgaaaatggaagacttacgaaaataaatgtgttccaattttgataatatttcttttttcgccgtgcaacataaaaatcaaaatcaaaagcacttgctgaaaaccgccgcttttttcatcatttcatttcgacaatgatatttgcaggggcctatttcaattcggtcatatcactgatatgacttcatatttgaccgattttgtcttttaacattggtgaattttcttcaaaatccaccaaatttcaaaatcttggtatcattcgatacccctaaatgtctacgatttgcatactaaaaatcaagaagttttatccagatacaaaaaagttatggccgtaaatgtttgccaagttggttttttgttctaatctggccataacttttttttttccaaaaatcaaaaaataacgaaattttgaaaaataaatttttaaaaaacggagattttttgaaaaattatcgtgacttcaatcccgcgggatcccgcgggattggtaaaatggtcgggagggatcccggttcgggatcccgatgaaatcccgatcccgatcaatcccaatgaatttaaaaaatcgctcgggacggatcccgaggtcgggattccgaatttaatcccgcgggatcccgatcccgtccggtctctatttcacacacctaatttgttttttccatttttaagttaatttaaatccgccgggaacagtcttaattatctcaacaaaatgtctgacaaccgaaaacaaggagaggaaaagatggccaaagcaatgtaaaattaaaatgccaatttccatttttatt

SEQ ID NO: 2087 - DNA, 3189 bp, Heterodera glycines
  unsure (1)..(3189): unsure at all n locations
gtatgtaatgtatgagaaggtcggcggtgccgagagatatcggcggataaattttgnaaaaactaagcttcaatttgttaatatcttcaaagaaatataggcattgaccaactaagaanaaaattatggccgaagaaactgaggatacattcatggaacgcttaaaanccgactagattctaagattttaaagattttttgaaagctatttctcttactaatttaaaaaatggtaactataaatatgctgtagcacatgcgaaaaagtgccaattgtttattttgttttcagttcatgcagttgaatcggttttgttgcataattttttaattttgttgaaaattcaatttttggttttagttcgaatccgaattcagggttataaacaagcgaaagaaaatacctaggtgtcgaaatcggattctacgaccccgaaaaagaaaggcatcaagatttgttaactccaaatcaatgggaagatacaatactaattgaacacataatattccatttattgctcctcctttaatacatacataaaaataaataaaattattttgactgttttatatacaatacaatacaattgggcatggcatttatttgaattcaatatcacactgttggcacttcattctttaaatactgggctgattattattctcggccgcctcctccgtcgttgtctcagtcgtcggcggtgtgtccacgccgctgtcattggccactttgcgctcctcctccgcggacaccgcctgctgttgttccgcttccacaaggggggccacctcgtccaatttggcctgaattagggcacagtgtttagacggtgaaaaattgcaatttcttaaaattttcggcgaaaataaaaaaacattaataaaaggtggggaaattaagaaaaaatattttttattttttgaaaacatgttagtgtgaaaacaatttttccaaaattgttaaaggcgccccaaatggccatccaatatgcccacgaccccaattcacctgcggaatgtccgtcccttccaccacaaaagccgcgtatttctccgccaccaaacgacgcaaacggtccaacgcggaggcattgctgtaaatttggggaaaatttgacaaaatgcatggatttcccatattattggtcaaattgtatcaaaaattgttagttttggattcaaactccccctccaccttacaaattagggagagcagagctcgtttcccgcccgaaaatttttttctaataaaatttcaaaaaaacgaaaatttttcagtgatttttttacttttatgatgcattactaaattttttcaagaaatcgctggaaattttttttttgtttttttccgaaaaattctcttaagtttgaaaatttgttgattttttcggggggtggggaggaaacataatgaactccaaattaaaggtaatgccgtttttcaccttctcgccacttcgtcctgctccccttgctcagtccgcacatcgctttgccctcctcctccctctcttttgactccttctctccttcctcttccttttcttcctcttccgactcgtcttcttctccttcttcatcttccgtgtcctcctcgtcctccttctgttgttgctggtgcagaaattgcgactccaagaactgcagaaccatctcgaatacggctgtgccggtcaacagcgggtccaagtcgctctgaacgccgatgtaacgggcgacacggccaggcaccaggaagccaaagtcgctgaacgattggtgcacaatgcccctgcaaaggaaacaaatgttcaaataaatatgagcaagcaattcggggaatgccaaaaagagtgggtgaattctttgtttttacacggaccaatttgcaaagaacagggtagcaaaaaaattaaaaataacagaaaattttttgtttctaaccaagaaaatatgtatatttttgcttttcccaccgcttcttcgaccactcactttatcgtgaacatcattcggctgtccgtgttggtgacactcggctgtgcagttgctgctgtcgttgcggcgccgtcctgcgactgttgctgcggtgccgtcgttgttgtcgtctccgttgctgttttgtcgtcattggtggcagtggtcgccttcgctaacagtcgctgcattcgtcgcacattgtgtggccattgccatttgctggcgttgagcatcagcacgggctaaaaaagtggggaaaggtgatgagcaaaaaaaaaaaacccgaaattttctggaaacgggccaaatttattttttgcacaaaaatgggttttattggcgcgggttcgaatcccattgggtgtgtgtgccgatgaaggggggaaagaagacaaattttgaatttgaacaaatttaacaaaattaaaaatttccagtggcgcctatcggcacccttccgccgttcctcaaaatttttttccaaaaaatcgcatttcacacacctgcacagtcgccggatacattcgtcgttccaccgggtacagccaggcgtcgagcagcacacaggcgttgaacagcgacggatattcggcacatgcggacagcgacgaggcggcgccaaaactgtggcccatgcacacgcagcgatccaacgcgagacgattctgacaaaacggggagggaattttctattttttacaaatttttcaaaaaaatgagcgattttctggatgaattttaagaagaaattttaatatttaaaattttgacacagcagtgaagaattttggttggacgacaaaatttttaattttttactgcgcttttccaaatcgagcaaaaatttccagatcgcaaacccgttttcgaaaaatgtttcattttcatttatttcccccaattttccactcactttgaattgtgcccaatcgaatgtttggccgagaagaatttgctgttgtccaatttggcgttcgttgttgttgtccgtcgtcagcttctcaccaattggcaccggtccgttttgctgctgcggcgtcccttcaacggctgttggtagcggtggcgagggcggcggtgttggtgatagcacctgctcaagcgtatacgtccaatagcaggagccgtccctggaaagcggagagggggaggaggtatagtttgaattttcaaaagcgccatgccatggccgactcactcaccggtgttccaacgctgccactacgt

SEQ ID NO: 2088 - DNA, 2719 bp, Heterodera glycines
  unsure (1)..(2719): unsure at all n locations
tgccgggtggagcgcgcgccgaggcgaagcaggcgacgatcaacatcnggggagattctgacgtacgccggctcgtccttcaagcacggtgagtgagcaaaagtcggatcacatcatccatcatcagtgaattcccgccccttttcagttatcaactgcaacatcatggtgaccaacatgagcgacttccaggacgtcaacgaaacgttcaagaacttcttcaccccggacacgtaccctgcgcgcagcttcttccaggtggtcaagttgccgaagaatgcactcgtcatgatcgatgcggtggcggttgttgcgggccagtgagccgaagtgcagaagagcgcacagatgaacaacagatgtacattcgtgtattgtatattgatgtgatcatgtattcgatcctattgtattattgcgtgtaataactgtcctcgttctgatcacgattgtatgtatatattatgttgcgccaatcagataaatgcctattgtatgtattctggtcctcgttaaattttacagaagtccgctaaaatcctttacagcaagtcaaaatttttcgaaaccgagaaagacggcaattgtccggaaaaaccgttcaccgcttggtcaaagagtttttggggctttgaaattcgttttgaatggggcctctagcaaaactaagaatctgactacgattaggtatctagcaacaaaattgagattaaaatgaaaagccacctactcttctcatttaccatcactttgctgatttcaagacagcaatgatgatttttcttgagatgctaattttcaaagagtgtaatttaactaaaaattgccaatttcgaataaaaatctgtttaaaatttccaagtcgaagtggccgcgccgaaatggccgcgccgaagtgaccccgacccatttttttagccctcgggccagcggtttgcaattaaccggtaagaaaacgtttaatcgggcacgtttgtttttcaaaatttaccggaccgggcgcatctgcaaaagcccgccggcgggcgcccaggctttactaattatgtcgtcaaaaatgaacggaataaatattttcgtcggaaaaaatcatcaaaattacagacgagaaaaatgagcatcaaaaaaggaccaacagatcaatttgtccattcaataatctccaaaatatccaatcatttctcaattatatttcacttccgcacaattcgacgtcctattctttgtttgacacgccgctgatggggacaatggcataaattcattttgttcaaagattggatatacggaaaagttgaaaatttgtattattttcttaaaattcttttttcattgctcacccaatccaatttttgacgagacacaaacgaattttgacattgttcaaattgtccgtcaaattttcgtcctcccactgaacaatttgtccaatttggcatcgcttcaaccccatttatgatttggtccttcctccaatgtcagtttttctcgagttcgttcattgaccaattcacatggcacaatttgcggattccgagcagggagcagcaggacaaaacgtcgccgggacatatcaaatttctttattacctagcctggtttggaaaaaattctagaaaaattcgaaaaaaagttattaagaaaattcaaggaagtacgttttccgttattttgaaaatcagcagatttagttttttattaacacttaggctttcaaaaaagttaagttttaaattttcttaaatttaagttgttttttcaaacgcaaattggtgccagttttgtcccaaatttgctgattggcacggagaaaagcgaggacggaatcgtcgtacctgaaaagggaatacatttgtcgtcaacaaaatgtttgaatttcaattaccaaatctgaaggtccttaaagcgaattttgtcgggcagcggaaaatcaattgaattggcatggtcaataaacacagacagttttggcatttccgcgtcagtgtcttttcgaattttgattggtctccaaattaccaatttgcttttgccatcgaaatgtttgtccactaaaacatcaaaacgtggcgaaagcaatgccaatttgaggccgagttcggcatggtcaaaaaagggaacatatccatccaaacacccgtaaaatccaactgaaatgcggggaaaataactagggcaccgatttatagtgaaaaaactctggcccacaaaaaaggaatttaccagtgtaaattttaaattagtgcgcaaaaaattacgtcagttatgctatttggcgaaatgataattttgtctaacactgcactggacttgacccatagtgaaaacggaaataatgtatataaaaggagcgcatttgcagtgttccatcacataattcattgcccacatattattgttattatatattgctcatcgtctgcaactttaatcccacgaagcgacgtgcccggcgcaacaatggcaagagaggaatactgcttcgatgcaacggcggcggcagcggcggagcagtctcggccttcggcaacgacttcaacacttgtgcaaggagatggcctgtcaagcagcttcgtggacgcgatcatcaggaaggtcaggcagtcgcctgtccaacgcttcacggatgaggtgggatttttttgacatgacatttcaacaattaaaaaatttcattttttccacagatcaccgacgaggagctcaaacaactctgcaa

SEQ ID NO: 2089 - DNA, 6599 bp, Heterodera glycines
ttttatccattgttgttttttattcgtttttgaatgtattggttggtttacgagaaagcataaaatgtgtcaaaatattaagccaaaaaacaattaaaactaaatgggcattacttaatatgttttctaactgattgtcctaaatccaccgttttatcgccgcttctgatcggactttgatcgatcatttctgctcttttctttgatcactcaacaaacgaacgcaaaaaacattctgcgaagaagccgaaagatgggtgccatatgttttgtttcatggccaaatcacatcgatctttagaacgcatttgagtgatttttgttggcggatccttccgctccgtttatccaatcaatctcgcccctgctgataagatcaacagcaggagttttcgtcatgccttttcaattaaaaatttttaaatttaatcattcttaggtatttaatttaattttcttttacaattaccgaaagaattgaaaaatggaaaaaatcgaagtaaaagaaacaggtttattataattcattactttttggacatgcgaactttttcagatatgaagtcaaatctgatcgaccaaaccattgaaattgtgcgcgatggcctgcaaaaatatggccaagataaattaagagaattattttatttaaaaatttgaaaatgaaaaaattttgaaaaataaaaatctaatattacaaattgaataataagtcgcatttgtattttccctaaattaaccatttgacagataagaatatatctgaatgattgaatgattattaattttttcataaaaaattacccaaatattttttagcaatgtttttgcccaaaattgcttttttacatcctttcatgcggaacaaaatgctaaaattcttttttttaaattcattaaaaagatttattgtaaattaattggattaccaaattgcccccccccccccgccctgcaggacattgccagcttcgtcaaagacacaatggagcagcgcttcgccggcacttggcattgtgtcgtggggcgcagtttcggctcacgcgtgtcctatgaattggagtcattcgcgcttttcaaggtcaaccaacacaccgtgctgattttcaagtgcggataatgggagaggaaaacaaattatatcaaatgctaatacaaatattcattttgtatatttgtaaaatacatttaaaaatagctgtttcaaaatcagaaaataattttgggtttttaagaaaaagggtaaaaaaattgtcaaattttcttctgtcgacattttcttaaaaaaatgacatataaccgcgaaatttgatcatttcagacaaatctttcaacaaattctattcaaattttcctcggcggcgcccaatggcactgtcggccccctatcatccataattaaggaatatcataaaaatttcaaattgggtttaattaaattccttaataaaaaagagtgatcttcaaagtttgagcattgattattggggtgcgttttttataaaaaattttctaagggatttaaaaaagtgccgaaaaaagtcggaaaaggcataaaagtgcaaaaagtggcaattaaccgcagaaagtgggaaagggaaaaaaggtgcactaataaaggtgctcaagaagcttcatgctaaattaaaattacaaattatcgcactccattaggccatccaaattttaagacattcacatttggtttatccaattctaaattccatatacaattccgatatctgcggataagacaattaaatttgtccaatttcctttttatttgtttttcacttttgatgaacaagaaataataaattattggcaatttaatagattattgtgaagctgcaagtcgacccaaaatataaaatattcttattctccaaccactaaaattaaaaacaaaaacaaaaagtgcagcattaaaaaaaaagaattcttattttttcggaaatataaaaataaacagagccatcaagcggatgttgtaaacccacgcaccaagtcataagctcttaatggcacgtaagggattaatcagtgattaagcaaccgaatgtccacgccgccaaaatgtataaaacaacacacactgtcattacgataacggctgtcatcattttaatcattttagtcgattcaattaaaaggcatgaaaatccaatgggattaccaaaaacgacttaattcctttgggaaatcggaagcattctttaccattcatgttaagcaattaattgtacaacacacagtgtcattacgatatcggctaattataattttaattcaatttgcctattcaattaaaacgcgtgaaaatccgatggaatttccaaaaacgacttaattttaattcctttggaaatttgtccaaagttaaaaaatcggaagtattcttttccattcatattaagtagttaattattgtctcattttttaaaaaatgtagcaatatattttaaagggagccggaaaatgtcacaaaaaattagaattttaaaaacaatgcaattgattttgtttctataaatcgtccggaaatgagcatctgtacctaaaaaaattttcatgtgcttaagtggatttggtaggatagtaaagggaaagcggatgtagaactaacaaataagtccgctccacgacaccatatttttatttacttattttcttcctgaaaaataaaattggctgttttttcaaattgttttgaaggttttgccaaccaattggataattaatgttggtatcattcaaaagcactttttctaagcaaatgtgaagcatttcgaaacaccacaaaaatgttgcgagtctttgaaagtttgtatttgcttagtaaatttcttcttatcaaaagcatttgaatgataccaaagattatccaattggtaggcaaaatcttcaaaacaaattttcaaatagccagtttcaatttatggaagaaaataaaaatgaataaaaacattgtgtcgtggagcaggttcgaaacacacccattattgtttttaaaaatctagtttgatgtcggattttcagggagccatttaaaagaatacaaattatcaaagaaagatcagtcaactttgtattgcaattaacacaaagataagccagactttgtagtcatccaccgtattatcgttgctttgtaatgggccattaatgctaatgattttcccattaagctgaattacgcaattggtcttttttttgctcattaattggttcccatgcgagttttattttgacgcttcagatagaagaaaaataatattctaaccacaaaaaaaactgcgaaatgtcaaacggaaagtttgcacaaattttgcttcttctgctgatcattgctgaaatattcgtcgcgataaaaacaaagaaaattgtaattttaaattagagtacatagagcgggaccgggaccaaaacacggacaactgagtacaactgagtaccgaggtcccggttttgaccgggacgggaccagtcccgggttttttcccgcttttcccagccaaaaattcccggtttttcaacccgaaaaggtcccggtcccggttaagcccaaaattcccggtcccgctctactctattttaaataattaaaaaggcagaatttcattttcagttttttgttataaggaaaaattattgggtattatgcatttttactcaaaaatctccaaattagaaaaataaatgtatcttaaagatgaatttaatttattttcattttcctcaaaaaagaaaaatcaaaatcgatatatttattttgtaccatcgtcctcataaaatgggttgtatttttaattaacttgtcataattataaaagataattattgtttggttatgtaagcattgcaacatttaggagaagaagcatattcaccgccactctaagcgcgaggtcatcccaatttgcgtcgacttcactcgaagtccagtggagtgcccgaagaagttcaagaagctgaagttggaccggttggtgatgcagcagctgaacacgccgagcagacggatcagtttgaggtgctacctgaacatgttgccgagcccatactgtttccggcgaaactcaaaactgttctgatcgatcacaactaatttcgtaacagcagaggaagagagagaagagagcgagagagaattacaagaaaagtgaaacgaacaaaagaagttaagttcatattgaaccgaattgatacttatgtattttagctgggtaaaaaaattttcagggaacgtgagtccagtttccgtaaaaatgcatttactttcaatgagaatcccgtcgggaatgcgggaaaaataaagtgaaaaataataatttgaacatttaaaaaaaaaatttgtttttcgtcgttaaaattgtctattattttataatccaaaggattcaatgcctaaaaaatgctaagataacaacgactaaaaaaacctctttttcatgcatttcagaccatagagagcaaaggaaaaaataggtaaaaacctaaaaatattagcactaaataacctacctaattattttgataattataaaactcaaattgaatttggagcgggcggtgccgccacaagccatgaatccatatttatattacattcagttatttgaatcggttttgggcaataaatttggactttggtgaaaaatgcatgttcgacttttgtctgaatttgggtccagggttcgaaattgtccaaaatgggtgtcatattcgtgaccaccccgaaaaatcaaaactcacgttatttggactttttaattacttttatacaaaggaagtgcggtatataccttacagaaagataatattatttgtacaagaaagcgatgcatttaacaattaggattattcaaggcgcttgtcaaatcgttcgcccatgccccgctggttctgaaattgtctttctgaacaccgctcatcaggtcgaacttttgctccaccgcttcaaatttggtcgtggtcacttgcttgtgcagcatcgttttcgtaacatttcccgtgtactgtccccatggttgtacgttcggtcacgggcaaaagcattcgtaacactggtgctcttcatggccacaggatttacaaattgtaacggcaaagcactgatgcagaaatatgtatgtttaaaattgagattaaaagcatgagaaggcaataaaaaagatattgttgattttttacagaagtgaataaaaattatagataaacattcgcaatttataaaatttgcgtcagccatttttgctgaaaggaaatttgaagcaaaaggaattgacggaccttcaaaaacaaaaacaaagtccgcttcaattttttgtaaaagcacagaaatatatttgctggattcgaataccgtaaaacccgggaacattttccctggtatgattgtctcttgtacggttttatgtaatttgggtttgggtcttcatccaactcgtaattcgcattggtgaggctattttaagagacagaaatttcaacgggtaggaaagagagggttgagaaatgtttataattcttcaaaacattacagcaaaagaaaaatgatgaacgaatgagtgaaagaggagaagcataaagacttttatatgaatgatgttctgaaagtgatggaaaaattacctaatgcatattctacaaccaaaagtttttacctcaacagtctgggtggtatataaataggcaaaatgttaaggcaccttccatttgacttttttccaacggcagaatttgcctcgtcgctcatcactccgtcccatttccctttgcaataatgcagcggaagcaacccaataatgtaataatcattattcaaaattgtttgttttttaaatttggtcttgttacaggatttgctgaacgtcagagacaaccattggagtgccggtggagaaggaacgcgccacacacagaaccacgggagtgccggcggagaaggaacgcgccacacacagaaccaggggagtgccggcggagaaggaacgcggcgccacacacagaaccacgggagtgccggcggagaaggaacgcgccacacacagaaccatgggagtgccggcggagaaggaacgcgccacacacagaaccatgggagtgccggtcgagaaggaacgcgccacacacagaaccaggggagtgccggtggagaaggaacgcgccacacacagaaccaggggagtgccggcggagaaggaacgcggcgccacacacagaaccacgggagtgccggcggagaaggaacgcgccacacacagaaccatgggagtgccggcggagaaggaacgcgccacacacagaaccatgggagtgccggtcgagaaggaacgcgccacacacagaaccaggggagtgccggtggagaaggaacgcgccacacacagaaccatgggagtgccggtcgagaaggaacgcgccacacacagaaccaggggagtgccggtggagaaggaacgcgccacacacagaaccaggggagtgccggtggagaaggaacgcgccacacacagaaccatgggagtgccggcggagaaggaacgcgccatacacagaaccaggggaatgccggtggagaaggacgcgccatacac

SEQ ID NO: 2090 - DNA, 1448 bp, Heterodera glycines
tccaccgtattatcgttgctttgtgatgggcccttaatgctaatgattttcccattaagctgaattacgcaattggtctatttttgctcattaattggttcccatgcgagttttattttgacgcttcagatagaagaaaaataatattctaaccacaaaaaaaactgcgaaatgtcaaacggaaagtttgcacaaattttgcttcttctgctgatcattgctgaaatattcgtcgcgataaaaacaaagaaaattgtaattttaaataattaaaaaggcagaatttcattttcggttttttgttataaggaaaaattattaggtattatgcatttttactcaaaaatctcaaaattagaaaaataaatgtatcttaaagatgaatttaatttattttcattttcctcaaaaaagaaaaatcaaaatcgatatatttattttgtaccatcgtcctcatcaaatgggttgtatttttaattaacttgtcataattataaaagataattattgtttggttatgtaagcattgcaacatttaggagaagaagcatattcaccgccactctaagcgcgaggtcatcccaatttgcgtcgacttcactcgaagtccagtggagtgcccgaagaagttcaagaagctgaagttggaccggttggtgatgcagcagctgaacacgccgagcagacggatcagtttgaggtgctacctgaacatgttgccgagcccatactgtttccggcgaaactcaaaactgttctgatcgatcacaactaatttcgtaacagcagaggaagagagagaagagagcgagagaggattacaagaaaagtgaaacgaacaaagagaagttaagttcatattgaaccgaattgatacttatgtattttagctgggtaaaaaaattttcagggaacgtgagtccagtttccgtaaaaatgcatttattttcaatgagaatcccgccgggaatgcggaaaaaataaagtgaaaaataataatttgaacatttaaaaaaaatttgtttttcgtcgttaaaattgtctattattttataatccaaaggattcaatgcctaaaaaatgctaagataacaacaactaaaaaacctattttcatgcatttcagaccatagagagcaaaggaaaaaataggtaaaaacctaaaaatattagcactaaataacctacctaattattttgataattataaaactcaaattgaatttggagcgggcagtgacgccacaagccatgaatccatatttatattacattcagttatttgaatcggttttgggcaataaatttggactttggtgaaaaatgcatgttcaacttttgtctgaatttgggtccagggttcgaaattgtccaaaatgggtgtcatattcgtgagaagccaccccgaaaaatcaaaactcacgttatttggacttttaattactttt

SEQ ID NO: 2091 - DNA, 2214 bp, Heterodera glycines
  unsure (1)..(2214): unsure at all n locations
aaaaatgatggacggaatgagggaaaagaggagaagcataaaggcttttatatgaatgatgttctaaaagtgatggaaaaattacctaatgcatatttacaaccaaaagttttccctcaacagtctgggtggtatataaataggcaaaatgttaaggcatcttccatttgactttttcaaacggcagaatttgcctcgtcgctcatcactccgtcacatttcctttgcaataatgcagcggaagcaaaccaataatgtaataatcattattcaaaattgtttgttttttaaatttggtcttgttacaagatttgctgaacgtcagagacaaccatgggagtgccggcggagaaggaacgcgccacacacagaaccaggggagtgccggagaaggaacgcgccgcgaacaattgcaagagcgtggcattttcgggacgccaaaagaggaggtaggaggaaaagtgtaatttacttttaaaaggctttcttcatctttcaggcgatggcattggcaatcaaggacctgacgttggcgacgaatcaactcacgatgacgatgcagacgttttcgttggatgtgcgccaaatgaaggagacgacttaaatcgacatccaaacgaagcggcaactgatccgttcggtggacactctggcccgtgacctgaacaactacaacacacgtggtggagaagcacaaggagttgcgcttggccttctgaaccgaatcgacccgcagacgttgttgcttgagttgcttcgtattttgcttcgtcagtgatctgtcgcaatttcaccccgtcctatatattgtcatgtgttctcttttgtggatcaaatgttccctttatattgtaacaacgattacccaccatatatgttgtgtgtgtgtgtattgtatatactaatgttgataaaggaatcgaagctttttaccccagaaaaattcagaaactgattttagccccaaaaataggggtaatagttcagtttgtgtttttgacttttgaaaacataaaaaaattttcgaaaaaggggggggcgacaaactgaactattaccaaaatagggaccacaattctttatcattactgcaatattaaaaatacctaattttgatttgcttaatttatgcttcctgttcttcagccgaccaattgcttacaaattagcattccctcccacccaaacattccacgccaacatgtgcgcaacaattatttaataaatttggtttttaatagagcatcaaaacgaaaatctcacccaaatttttaaaaaccagaaaagaaccaattttttccaaaaaccactaagaattttttaatgtaaatctgctaaaaatagggccaaaattctcaatttacccctggcggcgcctatcctctaagcgtgttttgaataaattttgtaaaaataaggctttttgactgggcttttttgcctgcaaaataatgcttttgaaaattttatttgctagccctggcagtcggcaattcaaaatgtttttgtttgcaaaatccacacacatttttcagttcctcctcagctcctcacgcagcaaagctgaatttccggaaaaaagaaatcggtttttaatcaaaaaaatcattttaagagacgaaatccaaatccaatcagtctaaaccatagataagctcacagaagtggagacagccgatcaaagtgacggcgtcggaaaggaaatcgccgtaaaagggcagctgatgtgttcggaaagtccaagcaaatggaactcgtcactttggagctgttgttggtgctgctcatcacggtcagcagcatcagcgagctaattgtcagtgatcagttgctgatcaacagaaaagcgaagtgacaacgaagccataatcaaacaaattaatatgccaaaatcagtcaaaataataagccaaaatcagacaaatcaatgcatatgccataattggccgaattaaaatgccataatcaatcattgataccaaaattaaatgtgccataataatgcatttgtcataattaattaagtcttgagttaaattaatgcatgtgccgtaactgaatatgccatatttagaatagggattcgatttataaactgccaaaataattagtttttagtttctaaaaacaccccaaantagtgctaaaagtccgaaattaggggtgtaaaatcgaaaattttcttcataaagcaaaatattatgccaaatcatt

SEQ ID NO: 2092 - DNA, 1842 bp, Heterodera glycines
atgtgcgcacaaattatttaataaatttgtttttaatagagcatcaaaacgaaaatcttcacccaatttttaaaaaccagaaaagaaccaatttttttccaacttcactaagaattttttaatgaaaatctgctaaaaatagggccaaaattctcaatttacccctggcggcgcctatcttctaagcgtgttttgaataaattttgtaaaaataaggctttttgactgggcttttttgcctgcaaaatgatgcttttgaaaattttatctgctagccctggcagtcggcaattcaaaatgtttttgtttgcaaaatccacacacatttttcagttcctcctcagctcctcacgcagcaaagctgaatttccggaaaaaatcaaaaaagaaatcggtttttaatcaaaaaaatcattttaagagacgaaatccaaatccaatcagtctaaaccatagataagctcacagaagtggagacagccgatcaaagtgacggcgtcggaaaggaaatcgccgtaaaagggcagctgatgtgttcggaaagtccaagcaaatggaactcgtcactttggagctgttgttggtgctgctcatcacggtcagcagcatcagcgagctaattgtcagtgatcagttgctgatcaacagaaaagcgaagtgacaacgaagccataatcaaacaaattaatatgccaaaatcagtcaaaataataagccaaaatcagacaaatcaatgcatatgccataattggccgaattaatatgccataatcaatcattgataccaaaattaaatgtgccataataatgcatttgtcataattaattaagtcttgagttaaattaatgcatgtgccgtaactgaatatgccatatttagaatagggattcgatttatgccaaaataattagtttttagtttctaaaaaacacccaaatagttgctaaaaagttccgaatttaggggtgtaaaatcgaaaattttcttcataaagcaaaaatattatgccaaatcattaatgagatacataattttcaaaatcacaaattcttgacaataaataaataaattttggagattgatttttgagaaacttttcattgcttaggggtgcattttcgaaaatttttgggtagatttttaggggttttttgggtcgcttcttaggggtgtatttttctttttgttaacaaattttgggcaaaacaccaaaatagttgaaaatattttttttttcaaaaattataaatcgcatccctaatttagacaaattagtatatcgaaatcggaaaaattgaagattaccgccaactttgattttgtatacaaatgatatcattcttctttatggagagagaagtcgaatagtactatttttagggtgccgcgacaaccctgagctgagttacacacccgggactggagtgtccattaaccactgggactgaatcgtccaactcagaaaaaaaggccggacgggctcgctttcgcgtggccgttttcgcgtggttgcatataagcgaattttttacttttttatatgtcaaaaaattttttcactcccgttctacttcaggtccttaactcaatctatatttaagtgaattttataatctaaattaagaatgacaaattattatacagtctaataattttttcacggtctaatgctttggtggtattagtgtagactcaccatcccaaatgcaatttggtataaaattgttttctgtctttctggcaggcttatttatcataaaaaaaatttccaatccctattttctatataaaattgagctatttgtgcgtaaaatgtttggggcatacttttgtacggcaaa

SEQ ID NO: 2093 - DNA, 1214 bp, Heterodera glycines
ggtgtcaaggcagttcgtacaatggcgtttcgtacaatttcaaatgggaatggccataacttttttttcgtcagttaatttcttcaaaattggaatcattcgaaagctctacgtgtttagacgacgtttgggttaaggttgttcattttttgtttttctttgttatacagaaaaataatttgccaatattttaggcctagattaacaatgtaaatttagtatcagaaaataaaaattaaaaaacatttactaagatatttattttcattataggataattttcatcaaaaattgatttgacatacttttattttttattacgtttattttttgtatttaacaccaaaatatcaatattagttaaattttgaaaattttaagtattcgggtcctagttatttttaaaatttcaaactctaattttgttaaattaattatttattatgagttttcttattgaaatttcctgttacaaaacttatttgcgttaatttctttggtaagttattgtacttcaatgtcaagaatagttttattaattgataaatgtttcaataaacataaatcaataaaaatatattcagttattattgaaaattttgattgagacaagaatttcagttttctgttaaaaaaataaattaatatattttattcgaaattttattttatgaatacattttatattaagattcgcatcattttcttaaaatttataaatagtttatattttttttaatcgtatgaattatgtattattcttttgtttttggtcttaataataaggcaaatgaaatactattatgctttacacacggcatcaagctgaacaaataatatctcgcattattggattttaaacgaacaaataaaattcttagtacgcgaatgtcgatgaaaattatattatttccatgagtattttctatttctgtctattctctgaattttattttttattttttttttaaagaattttcacaccctaatcaaatgtaaataataaaatccaaggtaagaatttttttttatctctagttctcttggttttcactcttgattttctgccatcatttttaagtttcttcatggatgctgtgacattttggtaaaacattgaaagattggtatttgattcgttcattagtaaaaaaaagcaaagtaaccggacatccataaatttaattaaaactattcaactatatgaatgtttt

SEQ ID NO: 2094 - DNA, 2195 bp, Heterodera glycines
agagcattgcttaatgtatcctcctcggttggcaaaagtttttcaaaaattgttcgcgtatgagcacctaagtgtaatttaagtcgatttattttgtctgcttccgaccaatttgatccaaagacatccacataatccagaaatttaatttgccactcaaaaatgccgaagcagtttcaccatcaaatatttgaggtaaaggatttgaagaacctatagcagtaagcgtattcagataaaatattttactaagctccgcatttttttgcattatcttgtgcctttgtatcgccgaagcgttttaaaatgtcaaccaaaggcgtcacactgaaacttcagtaaattctttgcctttgtgctgccgaagcaattcctaattttaattgttttcttttcccttttcggtcttatttattatttgttccgtgttttggttttgtttgtttcaattaatttaaaatcactttgtcccgatctgcactcaaaagtgccaagtcctcgatgtaaatgtccgtagttgtacagtccgcagtcagtcgttgcctttgtcctttcactgtctcgtaaagtgatcgctgagtaacgggtccaattgcactctccacgtagtcgaacagcacacaaaatccgttgaatcgccgaagcagggagacgcgcaccgtagctcgacgtacctaagaatttatagaatttttttaatgtgtcattcattcaaccaagcccactgaaatatgatcagtttatttaaataaaaattctaaattatcactcaattttaggctacagaattatcaagcttaggctgatcacagcataccgtaaacgtctaaaaaaaggaatacccaggccaaaaacagtgcatggagtgcattgataggaaaaaactcaaaatccggtccccagagttccaaaaacacagctttttgggctttggaaggatttaatttttcaaatcccccagccattaaattcgaaccaaccgaaatacctattcaaattgtcggccctcagtcggacttccttcacaattttagtccgccgaagcactgtgccgttgcttgaagccaaaaaagtgccgaaggactgacgatgctgctggtgggtctgttgaatgtccaccaaagcaattccgtctgatgtttgactgttcgctgctgatgtccctttttttttgttggtgatgaattgaagaaagatcactaattaaatgcttttcgctaaaaagaaattaagaattaaaagtaataaaataattaaatttaaaaccaattaaaaattgttgggtggatgggaaggaatggggcggaaggagaatcgtatacggacaagccaagcgctaatgcagcggtgattccgtcagaccggcagatttcaatcgccgttctcatcgccggggggtgagaacaaatagcggtgagaaaggcagggacacagcagagggacgaaagcaaagagagagtggcaagggcaggggaaagggcagcgttctctccgttccgttaagcatccgtcaattttacacctatgacggactttgaccaaaaacagtttgctaatacattttcctaccgtagtcaatggaatactgtattcagccgtttttcttaggattgtcaaagatttcgaatttgcttgatttttttgactttaaaactgccgaagcatattccaaattttctaaataatttttccggataattgagtcacaaaattataccttttgttttgactaatcccaaattttatttgaattcatatacggtcgaagccaaattcctctacttttttttgagcccttctcattttccctcatttaattcacctcccatcgatagacttcggtcgaaatcaaatcaaacacttagttttaccgttcactgttccttaatttttgctttcgtatctccgaagagttatgcacctcaattaaatttccaaagatttttttttgttttgcttattcattttgctcattttctccacattttttcacttttactcatatactgccgaagcatttaacctctctccgtttttggatcatttcaatccccattttctttcataaaaattttggtccctttgaggttgttttttttgtattcgttgtcttccctattttcggggcatcccattttaggggttttgtttccttcccttttttcggggcatcccatgaaaagtctacaaattgc

SEQ ID NO: 2095 - DNA, 3055 bp, Heterodera glycines
agccctttttcttaggattgccaaaaatttcgcctctctcttgactgtaaaactgccgaagcatatttcgtaacttttctaagtcattttacatgataattgagtcacaaaattcgaccttttattttgctagtcccaaattttatttgaattcatataacggtcgaagccaaattcctctacttttttttgagcccttctcattttccctcatttaattcacctcccatcgatagacttcggtcgaaatcaaatcaaacacttagttttaccgttccctgttccttaatttttgctttcgtatctcagaagagttatgcacctcaattaaatttccaaagattttttttttttttgcttattcattttgctcattttctccacatttttcacttttactcatatactgccgaagcatttaacctctctccgtttttggatcatttcaatccccattttctttcataaaaattttggtccctttgagggtgttttttttttgtattcgttgtcttccctattttcggggcatcccatttttggggtatttatttccttccctattttcggggcatcccttttttggggtatttatttccttccctattttcggggcatcccatttttggggtattttttgagtcctccccgggggccttttataccgccgaagcgctttttcctctgtcagcaggcgcatcctcagtctccctctttgactcacctccgttctactgctcctttgtccgcccaggccgatgaaaagtctacaaattgcagaaccatccggtgctaccagtagcgcggccgtgcgcggtggacgtgctggcgttgggactgggcaatttgggagggcagatggggaacattgggaaggaacttataaactcccgaaggaagggccccatgggatgatcaagcccagagatcccatcccgcctttgatggacacactgggataagtggctttattccggagagactgaagatacttcgcttgaaatggcgaacattaaatacacgtgaaaaatgaaatgtgatcgatcaattatcgtcgggaaaggggcgacaataagcaaaagggaaattaaatgcgaaatgaaataaatgtgagaatgtgaaattcatagggcttcggccggcaaacaagaaaacccggatctaacttacaatatgaacaatatttttccgaaagaaagatttttcattaataaatgaggtactcatttaaaattatttattatttacgaattttttttttgatataagtcataatgcgcgaaacattgtttatttttaagcgaaatttatattcttgcacattgtttgtgtaattttttgcagcattgcttttatcgaattatttttatcatatttatttaaccatcaagtgaacgtcaattaatttagtatttgagtgtttacattgggttaattaaagttgcattattttaacaaataattcgagtctccgatggttgaaaatggttggataatctattagttacatatattttatttaatttttaagaacactataaattgttatttatttcgtagcagaaattttattttgtctatacaatatattgtttttaggtttatgtcgtgcagatgcggatgactttgaatttttaattgagttagttgttttaccttgtttttcttttttgtttcttttcccaaaactttttattttccttcgaaaaaattcgtctattaaattgattttaatatttagtatgttctgtttatactattattttcatgcaaaaacccataaaatgtatttttcatttctgattaagatatttgttttacttatgtagttatacagaattttttattatttattggttaaaaaaaaggttagcttatttgcatcttttctcaatatatatatttggataattttaggtgtttcatcctcttttatttgaatttgtattaaaacaaaggacgaatctcatttgatttttttgagatgatgatttgagtcggaagagtcagcctttaaaaatcattattttcttaaaaatttgctcaaaatcggaaaatttggcaatttttgtgtacaaatctgttaacaaatcgcattaaaaattacaaaattttcccggcggcgcctatcagcaccgtccgccccccttgttcatcaaaagttttttggaaaacgccgcaaaaaaatcaacttcgatttttcatgcttagaatttcacaaaaaatgctacctaacaataaattgaaattacatataacatttgaacattttaaatgttttttaaaaagtttgtaaaaatgaggctttttgcatgccaatgaggcttttcaaaattttaatctgtgagtcctgcttttattatggtagtgagtgatcagctccttcgaattttttgaagcaatattttattcaaatttttttttcattaattatttattcaacatttccttttgaacatttaacgaccatataaaaatattgtttaaaggcaaataatataaatatattttaaatatttttaaaatcccttaatgcattatttgatcatgtaactaatgcatcagcttaatgtttaattaattattcttaaattaattctgatctgcatttatttttaaaattttacttatattttttatattgtaaaaataagaaataaaaggaaaattcaaatgcattaaattaaaattgttttcctcagttttttcaatctcggggttgcgttcaccaagcaatgattattaatgcgttatttataaaaaaaattaaaagcataattatttcgatttataatgcacaaacgatttttttcgattttattataaaaatagggcttttgtaaattttggtaaaaatcttattgattggttttatttaggttaaaaggcttaaaaaattactccatgattatgtgatttttattatttacatacgagtatttcattagcataaagcgttgctgcattcattattttaaataatgaattactaatagaattgatgcaattaaatatataatttttttgtacatgagcagtaacgtgatcccggggt

SEQ ID NO: 2096 - DNA, 6513 bp, Heterodera glycines
  unsure (1)..(6513): unsure at all n locations
ctgttcgggcaggcacattttgcccccgatttatttatttcctttcttcatttgcatcactgttttggcagtgtctgctctcttcgtgctagagacagacacacgcatgcctattgattgacctttgcccttcccaattatttctccccattgacggctgaattcattctgtttttttttccccaatttatctggtccgctcccccgtctttgcatttatttgtaatttattatttgcgtaataaatttatttgttgtttggacttgtggtcttaacattggcgacgcccgtcaaaattcatcggactattcattatttcgaactgttcgaccatttattcacttcgaacaaatttttcgacgccaattcaactcgcgtcttgaatttattctcgtgttgaataaattcatttttgggaagttcagaaagctcgtgttgatttctgacttcgctgatccatcaaaaaacttaattcctcgtgttggaattggttctgctatgtgcagtttttaattcatcaatcaaatggcaaacgcaaaccccccgacattggaccagctcatcacggtccttcaacagcagcagcaattggtccaacaacttttggccaatcaattaccgcaaaatgctgcacctgctgctgctccaccgacaattacaattccgtcactgccagatgttcatccatttgaaccgacggatgacaaaagcaggatttcggaatggttggcccgcttcaaattcgcacttgactgcgcggcaccgaatgccattgacgcaacaaaagtcaaatgcctcatgaacaaattgagtgaggccgcattcagcgaatacagccgctccgtcctcccatccgctgtcaccgatttcaattatgacgacacaattttgaaaatggaaaaattatttgcaaggccccaatcggtgttcattgaccgatacgagtgcctcaaggcagctcgccatgatggtgaagattttcgacagttcattaaccgacaccggaagctgctgaaagacttcgattttgactccatcacgaaagagcaatttcaatgccttatgttgctgacagcattgcgatcatctgatgatgcatcgcttcggcaacgcattttgataaagctcgcagcggacaaaaacggcatcacctacgattcaatggtggaagatctgatcaattttcagacgacaattgccgaggccaaattgattgagcagccatccgcatttaaaaatgtgagcgcattgaaaagggggaaggagagggaacaacaaaaaatgccatcaaattcgcgttttgccaacaattcacaaaacgcttcaacggcacaacggaaatgctggcgttgtgcaggcgatcaccgggccgacgattgtcgtcacaaattggaaaaatgccccaagtgcaaatttcccggccacatcgcttcacgatgcgaaagcgttcagcaatggcgacgcaaatttgccaaaaagccaattcaacgaaagcaaatcgggagtctcagcgtcggtatggcaacaaagaacatcaatgccacttcactgctgaaagtcggagttttcgtcaacaaaaagaaaacaaaatttgttgccgacagcggcacggaagtgaacataatcgacgaagaggcctatgacaaaattggccgtccaaaaattcaggaatgcgaagaaaaagggaaactcttcgacggaacaaaggtcgcattcatcggcaaaggaattgccacattccaatttggcgacattgccatcgaccaggagttttacgtcgcaaaaagagggtctttaaatttgctgagcatttcaacgatggacgcatttggcctgctggacgatttaaaaaggaaaatcagcaattccgcgattaatttgtgtgcaaacattaattcaagtgcaacatttacgaccgaggccgccgataaatttattcgggaattaaaggcaactttctccaccacttttgaggaaggactcggactctgcaccaaggaattggcacaccttcaattaaaggatggtgccactccaatttacagaaaggcacgaccaatgccacatcattcaaaggaaatcgtcgaaatggaattggaccgattggaacagctgggaattatccgtaaagccgaacatttgacttgggctgccccgattttggtggtcaagaaaggagacggatcagcacgattgtgcatcgattattccacgggattaaatgatgcactgctggattttcaacacccgctgccaattcctgacgacatctttgcgactttgaacggaggaaaattgttctcccaaattgacctcaaggacgcatatttccaaattcaattggatgacgattcaaagaaaatttgcggcatctccacccacaagggcaattatttaatggagcgcctgcctttcggagtcaaatcagcgcccggcattttccaatcaatcatggacaaaatgctcgcctacaagccatcatagttgacatgcccgcgccgaccaacatttcgtcattgcgctcatttttgggtatggtcaaccattaccagcaattcgtcaggaacatgcgcttcattcgcaagccgctggacgatctgctcaagcacgaagcaaaatggaattggtgcgacaattgtcgcaaatcatttcaaaagttgaaaaacattttgacttcggatttattattgacacattatgatccaaaattggaaataattgtgtccgccgatgcttcggagcttggaatcggcgccgtcatttcccatcgattcgcaaatgggacaattaaggccatcgcacacgcgtcaaagtcactcgcgcccgccgaaaagaattactctcaaattgagaaggaagggctggccttgatcttcgctgtgcagaaattccacaaaatgatttatggtcggaaatttattctccaaaccgatcataagccgttgctctccattttcggaaataaaaagggcattcggcagtgcagcgtcaaccgattgttacgctggtcactcattttgttggcatatgacttcaaaattgaatatgtcaaaaccacggattttggacaggcagacgcactctcccgtctcattgcaaaaggcggagaagaggaaaacgaacgagtcattgccttgatcaccgccgaaccaattttggaagaaattctccattcagcctcgaaaaatttgccgatcaaattcgaagatttggtcatcgccagcaaaaatgactacaacattcagaaagtcatcaaattcattcgccaaggctggccaaatgaaaagaaaattgagaaagaatcggataccatcaaactcttccatcggcgcaaaagtgatctgacaattttgaaaggctgcctcatgtatggcgaaagagtggtcattccgaggatttttcaggccaaaattctccgactttttcacaagggccatccaggaatgaaacggatgaagcagctcgcccgacaatacatattttggccaaaattggacaaagaaattgaggattatgtccaaaactgtgagccgtgccaattggctgcaaaggcaccgataaaaaccgatctccattcatggccaaaaccaactggcccgtggcaacgaattcacatcgactttgctgggccattcttcggcaaaacatttttaattgtcgttgattcattttccaaatacccggaagtatttgagatggcaaattcaacagcatcggccacaatcgaaaaattgcgttatttatttacgcgccatggcatcccagaaacaattgtttctgacaatggcacgcaattttccagttcggaatatgccaaattcgttgcggccaacggcatcacacacttattttcggccccatataatccaatgtcaaatggacaagtggagagatttgtcgacacattaagagaacattcagaaaattaaaaggggaggggaagcctaacaaggagatcatcgacacttttctgatcacctaccggacgaccccaaacgattcacttccggacttgaagtgccccgctgaactgctgctctgtcgaaggccaaggacaacaattgatctgcttcggccaccaccacaccaaccatttgaaattgatttggagatggaaaggcaattcaacaagaaatttggcaccaaaaatcgaagatttattttgaatgagaaagtcttcgctcgccatcgctcctcgcaacattggaagacaggagtgatcagcggcacatctggagtgatttttgaagtcaaatttcccgacggatcattcggccgttttcacgccaatcaattgcgcaacaggaaaacagccgacaattttgatcagtccttggccatattaaatgaggcatttgagttgccattgcctccggccctgcccaatcaaccacccgacgcagaaaatgccaatttagggcccaatcacttggaagatgaggctgcgattcccattcaggaaaatttggctgctccgattgaggacgtcccaaatcaacgacgatatccccaacgccaacgtcgtaagccgaaccgattctcgcccggccataactgatcagcctaaaaggggaggtgttcgggcaggcacattttgcccccgatttatttatttccctctcttcattttccttcactgtttgcagtgtctgttctctccgtgttagagacagacacacacatgcatattgattgacctttgcccttcccaattattcctccccattcatgggataattcattctgttgttttccccaatttatctgctccgctcccccgtctttgcatttatttgtaatttattattttgcgtaataaatttatttgttgtttggacttgtggtcctaacagttataaaaatcttttaacgcttttaagtgattattttttaatcaatttcattatttcaaatgtttctccaatattgtaactgtttaaattaattttgctgacaaaatttttcttttttgtattttgtactaattgattcacttatattaatgtttatatagcgaataacaaaataatttgaattatattcatttgataagggattatataacttataaattaataattgttacttaattaaattttatttttaaattggaacaaaattgtttgctagaaattaataattattttatttatttttattggcgcgttcgttcattgcattgatttttaaaatttaaatttatttgttatgccgtggtgactggcatttgctaaggaagggaggaatggactcttttcgaataaataaatttagtttttctgaagctaattttatgtaagataagaactttaattcatattaaacttgaatttttcatcttttattcgatatctttacgcgcatatttattttttaaatacctttaaaatatattaaatcataatgaattttttacatttattaaaattttctctttttcagtattagttgctattattaaggatgcgatttcttatgaaaaactttttttgctgaattgttttgaagaatggagctcaccaaacgcatttatgcgttaaaattttttgatttggacgtcattttttgtcactagaaatctctattttggcgttttgtcacttcaaatagtgaaatttgactattttggcgttttgtcactattttttcattaaatttttttggaaaattttttcaaaatttcatccacaaaattttttttgacaaaatttttgatttaaaaaatgtcaatatttgctaagaaaatattagaaaggaaatgcacctcatttgcaactgcaatcatttaataaaaattatttttgctcaatttttgcctgaaaattatacatatcactaagacgtcaatatttcggactttttaatcccggtcccggttaagtccaaaattcccggtcccgctcaactctaaattaaagttacaaaatgtaatttttattcgagtttaaaatgtttatgcttattttttcgaacttatctttaattatctgtttaacgcacaattcatttttaaattatttactgtttgaggtaatttttatttaacatcgtttttattattttgtttaattgttatttataattaagacaaattgtttaaatatataaatttactatctatatatttgaaaaaaagtttattataaaaattattgtttccgatataactctttattttttatcagttatagaattcttacaatcgtagtttgattagcggaaaactcaatttttaagaatttaatatgaaaaattaatgttaatttaaattaaggtttaaatttaataaatcatataaaaaatttaataaaaataaacaaaaacggtaataaaaagaaaattggactttaataattttattttcttcacttatattatttaatattatttattcgttgaattttttttgatttaatattgccaaattactatatattcattaatatacctaaatacatttaatttggctctttacgagtatattattttatttcgctnatttatactacaat

SEQ ID NO: 2097 - DNA, 914 bp, Heterodera glycines
cctaccattgttcttccgcttgcccaaccccagcagtttcaattgtgctgattcgatcaagcattggcccaatcttctgatgctgctgcagcagaaaaagcattattacttacttcgttcgccgccattcattcgtccattgtttgtccgatggtattcttcgattacacacacatcgccaacccaacccaacacaaaacattcacccccccccctcccccgtatatgtccaatcatttggcatttcttaattcatatcaattgaacaaattttgaattcaaaattctaaatggcacatgatcttgaatgattgggtctttttaaatctgttcggtataataattatttaaatttaatttttttaatccttttttttcatcacgattggcgttggattttctcaattaaattgtattaataatgcatattcatcgaatccattcggctctctctctttttttgccgttttcccatttatcgggcgattcttctcttattaactcattcctttctttgtaatgcttttttgatctcttttggtcctttgtcgagatttttcccctccgatcactttgttcccgcccaatttgacccttcgttgttttgttttgttcgtttgttttgtttatttgtttcatttgcacattccgtcccgcccattaaaacaatttcataatgaagcggcactgatcagcacacactctctccccttttttttatcaattttatcttagcaatcggatcaatttggggctgttgcttttgctgctaatgtgctaatccatgcacaaataaataaatgaacattcattccatccgtccgttgtgttcattaaaaggtgggtggtgctgttttgtctcccttttgctgctgctgctgctgctgatggccttcgcattcccataattttcc

SEQ ID NO: 2098 - DNA, 4776 bp, Heterodera glycines
ccaaatccgaataattaattcaaaagttgcattttaggcctcaagcgccccttcttccgtgatgcactcgtcctcatttacgctgccgttgcgcagcaacaatagcaacagcggcggcggaagcataatgaatttgcaccagacatcgggcagcgaggacttcggcacgcgacggagtgccatcaccgccggctccgcggggggaggcggcggaagcagacagataagcgttggcagtgccgggggcccaacaatcagcggcacgtcgacaatcagtgccggaagcggaatgaccaccatcggacggaagggcattttctttgcgcgggtaaaaaggacaaaaaaaaattaatgatttaattgagtcactccttttgctttggctattaaccaattaattaattatttgtttaatttcaggaaaaattgactttcgcccatttggaaaaaatttatgcgcaagcgatcgcaaatcgcagcaacgatttgagcattttggagttggaagcacattggacaaattttgtgcacatcaacaaactgttgaacaaaagacagagcgatcagcaagaagcaatttgggagattattgtaattaatgcaaaatgaatgaaaaacgaaaataataattaaaaaataatttttaatcgaatttaatttaattccagacaaccgaacgccgttacattttgcagctgcaaagtttggaggacatggagtggtgctttgtggagctgcaaaagcaaggctttatgcgtgatgtgaatcggcagtgtgtgttcctgaattattcacagcttttgcgttgcaacttggcattttggcaatgtgccattgtgccaatgctggagcgatcgcggtgtgcatttaggaggagggaaaattaaagaaattattaaagacgggaaaagtgtttaataactcttcattttattacctaaaatcggtgatactgtctgctgggctttagccaataggaaaagcataaaaagctgtgcccataaaacgaaatcacaaaattggcaaattcaggcaaagccatgagccgctgaacgcgctgctgatgcagcccgggttcgactccatcccggactggtccttctgctacatcgacttcaacattggtcacgcggacagtcacgcgtatgtgcagaagcggcagaaggacaacgaagtgttcgcggagtttgttaaatgggcggagcagcacacgatgctgaaccggcagaagctagtggacgtgctcagctcgccgatgcaacggatgacgcgctattcgctgctgctgaaggcggtccaacgctgcgcggcggacacggaggagaaaatcggcattcaggtacggtttgtacttctttggcacaactttgcccatttcatcccctcagggcatgatagaatgcgcggagacggccacaattcggttgaattacgagctgaacaacaacgacttgcgcctccaattgtccgagatcatgaagaccatcgagagttacgacgtggtggacagcgacgagttcgaacggcttttccctttgcccacggcgccggcgcccgtccaacagttggcccagcagagcaaccagcaccaacaattgctggccgctatgagccgtccgccgccccacttcaacctgatgctgccaatgccgttcatcggcgggcagccccggttcaggcggatgtacacgcggggcgacctgaaaatgcgcgagggccgacagagtcccaaggtgggacagcgccgtagggcagccattaggggcaattaattaataagtccattggtacaaagccatttgcccagcatttgaacgcgctgaatttcatggaaaaatatttttccattacagcaagaagtgcattgcattttgttcacggacatgctgctcatttgtcgaatggtctcccgaagaaatgaccgactccgtgtcaccaaacccccaatgcacatctccaacctccgtttccaccacttcagcgaaggaagtgggcatttatcatttatccactcacttaaatgctccttaattagcttccacttggtttaattgcctaattatctctccccgttttctttattaatcctaattaatcttaatttacttgtctcatttcccaaaaaaggcggcttctacttgatttgcatgaacgagttcgaatcgccgtcccaatttctgttgatgttcaccgcaagtgttgaggaaacgaggcgctggttggaaatgatggtgatggcacaggaggaatttcgctccctgcgcacagccaatgcgcagaacaacagctattattatggtaagcccaagtgattaacattaattcattattggttaagcctcgagaaaagcctctagggcttttgagtcagtctcgactcattcattcccgagtttcggataatttccattttttattggcatattattatatattctcgagtctcgagataactttctcatgcatcgtttgtaaaagcaatcaatggcattcagcagaaggctgtttcggaagcgttgaacggctcgtggcgcaaccgccgagttgcaacaaatgctgtggtggtggtggtcacaatgctacacaccgaaatgccaccagcgtcgacatttgtgcatcgcatttgcgacggggcgaaacgctgcgcacaatgcccgtccatcagaaacaattggcacaaaaaaatacagcattggcacagtgcaaagggtgtgccgaagcggggccgaacaacggcgattttgagggggtggtccatcggaagagcagaagcatggactcacaggtggccatttggggtgctgtatagtcaattgataggaaatattatcctaaggatttggcttttcatataccataattagcgtatggctttttaaaaatgaatttctcatgtttcgttatctcagtccgccagaggggtttaagattttccaattttaagcctaatggttgttcttgactctcggcacaaattcatttgtttattcatttcaaattggtgccgtctcgtcaggtgatggctgccgccgcgtccggctccgccctctgttccgcgtcccagcatagttccggttgctgtgcccttccccagccacgctcctccgccaccgtcagcagtgcgattcgcgcttccgctgaccaactgctgtttgacaagcataaatgctgcaacaactgcaaaagcgtggaggcacagcggagagaggacgaaaggcacggcgcggggggaggggcggacgaatgttacggcacgactcgctcaatggacgaacatctcctgtccagggttggcggatgtgccaaattcacgcgcaaaagtgccggtcgagagcgccaggaacgcctggaacgacagcagcgattggcatgctttacagagccgtcctcggatagcggcgttgtcgtcgctgacgctgccggccgagagtcggacagggactcaaaggcggcgacggaacccgtaaggaaaggctcaatggcggtggcatccggtaattaaggggcaattaatttatcactgtaatttatattttaaattttgcccgctttaatcttcattttccacttatgacagcagaacggaaagaaagcagcatcagccaatgctgcggtgtcttctcctcttccgctgaatcggcttcaaacaatgcaaacggcgcgggctccggtggctcaaacggcgactccgcttccgcttcagcagcgccggcgacggccgactcaccgcagcacattgggcacgcattgggccaagcagcgagcaccgccgcattgattctgacgaacccgggcagcacaacggcacacagcgccaacatcagacataaattgtcactgaatggcaccggtaaaaaatgaggggtcattaatttcattaatttaaaaacacaattttttccagccgatggcccccctcaaattgatggcattgtagcttcttctgctgctacttcttgtgccccttcaacaacgatcagtcagcggcgtttcgagcggcgatatcacaccgttggcgaaattgagacggttcggcagccgagtcagcaccaaaaaggttggcactgccagcgaattggccaattaaaagtttggatggccctgtcattagtgactgattccttatttacattattttcagtgtgtttatccgctggtgtcggaacgggcaacaacacttgcggcggtggcgttgccggaacattgcacgaaaaccaatcaaattgtgccggcggagcgtcaacgccgggctcgtccggaattctcaagcgcttttcatggaatgtttccagcgccatgggcggatcgtccaggaaaatctcttcaaaacttaacgaattggttggtattgtactatataataacaaagttattttaattgatggtaatgaaaagtgccaaaaattgatttgaacggaataaacgaaatttaaattcgttttaatttacattttcctttttcgtagtttcctaattagcattaatataaacccataatgatggttgtataatttcagaacggtcgtcgcttcagttctcagtcgacgatgagttcgctgtcttcggagtcgtttggctcttccacttccggcatttcgtccatttcgtcgctgcactcctcccactgttcggcctcgtccgcctccacccgtccgagtcacagccaacaatggcaccagccgtgccatgacgaagtcagcacgcctaccaccgaccgatcgacggcaacaaattccgacacacgcggctcggccaaagccacttcatcctcgctga

SEQ ID NO: 2099 - DNA, 4591 bp, Heterodera glycines
gcataaagttatcgaacagcaccaagaatgcttaatttgtttgataatgaacaaagtgatggtccaaaaagtcttccgttgacgttttggtcggcagcgttttggggtgcaaccagcggcggggggggggggggggggtctaagtgatacagatggattcttatattcttcaagatcagttctcctttccagtcaacctctacagtttttatcactttaagagagctgaaaatgccaatgccaaaagcgtcctcaccgatgaagcggcgaccaccgccatgcattgtcaggcgcactcattctgctgcaatgagggcgcgtcggttgcgcacaaattggtgatcggagtgagcgcaaattcatttgaggatgagaaaaaaatggcgcacaaaaaattggaggaggaaaacaacgaaaatcgaacaaatggaaaaggagtggtggggacagcaaaagcggaggaaacggcaaaagaggaaaagggggaggaaaagcagtgccaaacggaggaagcagcaaagtgccaacaaacgcagcagcagcggcagcagccattttgcataagattgaacagttcgccaatgtcgccaaaattggaggcaaagaacggtcagagattcaagaaagcaatcagtgatttttagggtccgaagttgtatgcactaaaaaatgctaaatatgcgcataaaaatatgcactaaaaatcccacaaatacgcactaaaaaccgaaaacgccgcaaatatgcagcaaaatatacttaaaaaattgccaaaatgacttttaactaaaaaaatgccaaaaattgtttaaaatttagcttctaaccctagtgataaatagaaagtccgaggcaatagcgggtcctaagccccctctattgtaatatatgaattgaaaagcttaaaatattggagatatcaatttattgctttgtatttctccagactcttcttccccctcaccgccgcccctccccaaaacgcaaccgcccgcttcgacgccgtccagcgctggcacagaggaagaagcggaaacggaggaggaggacgggcacaaagtgcgccgggaacggcacggctcaaacggcaaaaatgccaaaatcggcggcaaaggaagcgccagtcggaggacggcaacagcacgtgcgtttttaaaccaaatattgccaaattataattgaatttaattgggttttagtcaaaaacccccgaaaattcaatcgaatcaattaatattaaggcctcttgcaaatgcctcccattcctccacaaccgacgcatcactttgctcaccatcagcagccacaggcaacaattaccgtaagccaattgagagagagggggatacgcaatactataatagggaataaaccaccgtacacaattaccgtaagccattgagacagagagggagacatgcaatactgtaatataataaccaaccatacatttgcatttgcgtcattcgatcataatattattgataaaatttttcaaatgatgaattgcttttaagaaaacaatgaatgccaaaaatggaagcggcggcggaagcaccgaattaatgcgattcattttggacgacaaattggagacatcgtaagaaaaagaaataaaaatgggaaaaagagattttgaatttgaaatttagtgaaatttgaacggatttccaccactaaaaacattcgaacaaaatgaattgagcaacaggagaagctaacggaaggaaaagcggcgccaattcattctcttcacattgaaatcgatttttaaggaaatcccttctaattactactaattgccactaattgttagagaaattgtgtattattttattattgttcatttaatttttcattccaatgtttgacagaatcagttcacattctcaaaacacatttaccccactcactcactaatctttattaacttacaaatccattcatgcatttttcgctgtgtgtaaaatgcgatttgttgcgcaaaatgttgaataaatttatttatatcattaattaattactcttccatttacgaccaaattttttcggctctattgtagtcactgaccataaatcaatttaacgactgtagtgaaccataactttttctacaagcatccaaattagacattcacggtatcattcgaaagcccaagatgtcctctattaatcggttctagtcggttttacgcgtcccatgatcttttactcgtcccaaaacatttttgttttcgaagcgttaatcgaaaactatacctttccgaatcgttatagaaatacaaaaaaaaaataaagcctcaacttaggcctagccccaagcaagcctaagtcttcagcctaggtttaagcttaagcctagcctctaagtcattgtacgagttgcctttgtacgagttgtcttgacactgactgtaagtttaacaatcaaaaaatttaataaagctactgaacactcttagttattggaaaggctaaaatatcatgaacacatcatgggacgcgtaaaatgttatgggacgataaaatgtttcggcgccagctcgtttttccacgatagattttttctttggcatccaaatcaaacggctctaggaaaatccgacactggaaaatccgacaccggaaaatccgacactggaaaatccgacacaagcagaaaatccgacaccgctggaaaatccgacacgagaccaacttaaatttaaaaaatatttttgattgtttgagttaatatctggctaagtttatcaagttttcgatttggatttaaaaaaattaattgattctgccattcgatgggatattgatggcaaataataaaagggttgtcgattgttgcgagtcgcataaatctctgtgagattcatgtcttgcaccacgtacactttcttatgcttcatgccctttcatctgattcgatttgccgcattttttacaatttttttgagatgatcaaaaagaacattgaaataatatgattattatatgcctaccttaaatatattttatagcaataaaatatttattttaaataacttaagtatttaacttttattatatgtattttaaatatttactaactcaaacaatcaaaaattatttttaaaatttagttggggtcggtttttccaatgtcggattttccggtgtcggattttccgcttgtgtcggattttccagtgtcggtttttccaatgtcggattttccggtgtcggattttccaccggtgtcggattttccgcttgtgtcggattttccaatgtcggattttccagtgtcggattttccggtgtcggattttccagtgtcggattttccagtgtcggattttccggctcccaatcaaacgatcttgttttcatcgaatgctcgtagcatgctctgttagccttgccaaaacgaaaagattttcaagcctagaaaaaattttattaaaaaaaacttggaattttcgactttttgaaattttcatgtataaattttttggtaatgtcaaatcgcgaagcaatagcttagaaaaagcttctaaacacattaagctttcgaatgatatcaacaatgtttgatttggatgccaaagaaaaaagttacagaaagttatagtggaaaaacatgatggcgccgaaacgcagtggacccgtattttagacattagacgattcagtcccagtggtaaatggacacttcagtcccgggtctgtagctcggctcagagttctcgccgcgctctaaaaatgatacataccattcgacttctctcagcataaggaatcgaatgatatatcatttgtatacaaaatcaaaattggcggtaatcttcaattttacctaattttttgcccttcgctgtttcgtcgaactataaaaattgcgccctcttttcctccctttcattcactcatttttcttttatgcatgatttactctgtttttctgattcttcttcaattttcaatgtgaatttcataaacttcactgtttcaaaaagacatatttcttttcttaacacaccatcccagaaatgagctcctgtaccagaaaagatttgcatgtgtggctcagtggtttttgtaagatagtaaagggacaaagggtggtggttcgagtccgttgtgcaacatgaatatttttatttatttttgtccaaaatattaaaaaatcacgatatttgggaattatttttgaaggtttttgccaaccaaattggataatcttggtatcattcgaaagcccttgatgaggagaagctttttctaagcaaaagttaagcaatttgacatcccagaaacgagttgtgagattttcaaattttcatagttgtctcatgaaaaaatgggatgtataacctaaaaaaatatttgatacgttcgatgcagaatttttttctctatcgatatgcaaaatttggagtggatctaacgtatagaaaaaaaattaaacgtagcgaagtaaatccggtttttctctattaacagagataaaaaaatagtacgccaaaaagagagatgtttttttctctgcactctctctttattgacacacatctcgttttttgaaacggtgtgttaacccggtaaataacctaat

SEQ ID NO: 2100 - DNA, 2220 bp, Heterodera glycines
agagaatgaattgacgcttttccctccgttcgcttctcctgttgctcaattcattttgttcgaatgtttttagtggtggaaatccgttcaaatttcactaaatttcaaatgtcaaaatctctttttcccatttcatttctttttaatacgatgtcttcaatttgtcgtccaaaatgaatcgcattaattcggtgcttccgccgccgcttccatttcgaaacttaataagtgccgaaatgtaggacgaaacgaaaacgaaacgttttcgtcaatccctgggtctgacaaaggaaggtccccaggtgtccgtgggatttccaaatgaaatttggtgggtggatagagcacccatggtttcttaagaaaaatatttttattttctgcgaaatgagcacgagtgccgagttatgacgtgccaaagttttttaatgaataaacaaattaaaaaattgtttggacacctctgcagagttcagtggtgcagcggtagtgcgctattcagtgttttctggacccaggttcggatctcccacatacattttcattttttaatttttgctttttatgccaaagtcaattatcattatcacaaaaaaaaatttttttgatttaaaatcttatttttttaatccattttgacaaataaattactcataaagttttacacaaaaattaatttgtttttaagtaaaaattgtaaaatgtattagaacgcagaggattcgaacctgggacacaaaaaaattttacctaacacactacctctgcaccatcagatgcttttaagtgaacaaaataattgttccttttctttaattagaaaaaataaaaactttggcacgtcataactcggcactcgtgctcatttcgcagaaaataaaaatatttttcttaagaaaccatgggtgctctatccacccaccaaatttcatttggaaatcccacggacacctggggaccttcctttgtgagtgaaaaattagtgatgaaaattgaagttaaagaaaaaatttaaaaaaataataaatattctttaaacaaatggcctagtggctaatcagcactaattgtaaaaatagtgaccattaattttggaaagcggtaaacttaaatttatatcgatgcagtttagaattgtaacgaaaaacaagtgaaccctaattttatttttctctgtccgtggaatttcagtaccaaataatatgagtagggaatggatttttaggtactaaaaatcctgaaataggtactaaataggtgccaaaaagtgcaaaatagaagccaaaaagctaaaatagatgcgaaataggtattaaaaattgaaaaaccaatgtctttatgcacaaaaatgccaaaagtgactaatttattatcaatttcgacaacacaagtgcaactggtcaagaaaataaataaataaatttttgagacgaatttttgagaatttttcattccttagtgaatatttctgaagtttggtcaatttttaggagtatatattttttattttttgggattgattcattagctttttagtccatataatttagactctacagattaataattaaaatcagtaattaaatgataaaaaaatcagtaaaataatgtgcgggaatgtgggatcgaaattaatgcacagcacacacaaactcgcagttttcacactaaaataaattcttcaataagattacttttttttcttaccaaaaacgtcattcttaagggtgtaaatattttcgtattttttgtccaattttgctttgacaaaaacgaaacaggaaacaaaaaatcaaaattttgtaaaccgaaaacgaaacaaaaactttagtggacaaaaacgacacaagaaaacgaaccatttcgacctatttcggacccagaacccgaactcgaacaaaagtcgaaatttaatttttcacaaaattctcttgtattgtccgaaatcgattaaaatgcactaaatggccgtgatatttattttctattatattcagtccatttgaatagatttgggacaataatgtaaaatttggagaaaaatttatccaaaagcttactttttgcctcatttatttttttttcttctaaattttcaaattattcctttatcgacaatttttttctgtgctgacaaattgcttagcattcgcatagaaaagattctccttttcaaatactttttttagatattaaatttgttcggttcagttgagaata

SEQ ID NO: 2101 - DNA, 7447 bp, Heterodera glycines
  unsure (1)..(7447): unsure at all n locations
cgaacgacgccactcgccgatggtgggcgattgaggggggggggggtgaattgtagtacattaattatctaatatttggagcattcctaagcgataaaggccggcgataatttaatttagagacagacacaagggaatattgggaggaaatggtcaatcatcattaagacaacacgtgggcaagattcggtgaaatttgagaatgattcatcgagataagaaaaatgagtaattaggtaattaggaataatcgccccaaaaatggacagcgtttcaatcaattattaccgatcgcctgtcgtctcatgccgaatttgggcaagttttgcgcgcattcgtctcgtcaaattgagcgaaaggtgccagacgagaacacaaccgctgtaagagacgagcagaagacgcctgacaacgagagacgaagatttgcaattttaaattgcgaattttgagtgaaggacttgcaatcggacgagaaactgatgccggtcacactgtccgactgaccgttgagcaccgccacacattcgccattagacaagtccatgatgtaaacgaagcggtcggagcaaatggtggcagcgaacgactcggacgggtcaagacataacttaatgtgaaagtgcgtctccaattccgtctccgaatattctccgattaggtgtttacctttgtgattgtgccctcctcgcagacggtgcctctcaccgtcgtcagcaatttgctcgcctcgttgtacacgcgcaactgtctgtcttggcatccgaccagcacattgccatccctggtcactgtcatacagttgggtccgttgttcgacacaatttgcgagaggcgacgcgagttcaattgggtcgctggcgacgattgagaagaaacggcggcggaagtggcagttggttttgcgttgtcagtgaacatcatttgacggacgacgaccaatttgtcggtgccaaaggtaactagttggaacagattttgattctaaaaaccgaaaattcaacaaaaaattggcctttttaaaggttgtgtgtcgtgaaggtctcatttaaagaaaaaaaaacttcttgaaattaaaatcttatgttagtccaactgtccgaaattaatgaccgaaatgcagaatcggagtgccgaaatgctgctggaatggtcggaaatggtcagcaagtgggcgtacaattggtcgacgtcgaacagatgaataagccgatctctgctccccgatgctaacaaatggagtccgcctgttgctgtaaaaatgaaacttatgttaatgacaaatggacatcgaaacgtttaaaagtaaccatcggacggtacgcaatactccaagcaaagcacttctccgtcgtgggcttccaattcgaccaatttggccatttcccggtcgttaagatcgaacacacttcaaagagtaaggatttgcgagagtagaagaaaaccaattaccaaatgtttccatttcgtgttccgcacgacaaatgaacgccgaccgtactttagtntaatgcaacgcactcccgtagtggagtncgagggtgtccgacataatgccgccaaaattttctgtaaatgagtcacggaataattatgttaattagattaaataaactcactgtccggctgttcgctgagcgtgtcagtgcccggattaaggtataaaattttgcgcaattccaatgagaaatgattgggcggcccaatgtccaaaatgggaggcgaaggcgacccgttgctgtccgttaccgtcgtcactgaatgtgccgtggcggtgtcactgttgttcatgcaccaaatgcggacagtttcgtcggctccggcggtgaaaaacagttggggctgtgatttagagacctaaaatgggaattttagagaaattcgtaaaaatctatttgatattcacctcaatatcgaacacagggccaacatggaaaagttgggaactgaacagaaaaaagaaaatgaaggaaaactcattgcgaaaagacaaatgaccaactttattttgaagaccttcgttttggaagacgcgttttggacagaccaatggtaaatggaacgatcactgaacacgatcaatttgttgtattgtgataaataatttacaagatcaatcgcaaattgcaaagcagatttttatggaatttttgagaatacctgtagagagcagtgagtgttttggaatgagaatggaagacaattgaatggacatccgggaatctgaaaaatgcaacaattgatataatcaaaaaaagtatttattaataaactaagcaagcccgtatccaaaaaaatctgagagctggaaccgaaggtcttttttttttttgctttttcaaaaaatgaatttttggggaatgcactctaagccctgtcaacaaaatcactcccactttttcgcttggttttcttccgtccccgtgccatcgcccatcgcacaaatgtcacaatgtaaggcatgaggacggcacaactcaagttcgggctccattcgttccaaattcatggcacggattgcaccatttccgaaacccatgaacaattggtgagaggcgccaattgacaatgagaaaggcacctaaaaataaacaaaaaaaattttttttaaagttttaagattaaaaataaaagtgtatattttatacctcaccgccgagctcataaatattcgtaagcttcttatcaacaaattcaaccagtaactttgagatctgcaattgaataaaattgccatgtttttttatttcgtccgctcaccgtaattgagaaggttcgattgttcgaggcacagcaaacgtccacgaaagtgttgttgcgttggtcggcgaggatggcggaccgaccgtgcaaaacaacaccggcgctgccgttttcaccgttggaattgcttcccaaataccaaaatttgacgtgccgcacaccgacggtgacgaacatccgccccgattcactcacatccatcgcattaacctggcaaaggaggtgatgtttgttggtacattttgtaaacaaaaggtgaatgttccccacctgacaagtcagtctggtttcggccaatttttttctcgtccgccaatcccacacgcaaacggacttgtcgtgctgattgccaatagagatgacctggtcggaatcctttgtgaagctctgaaacattaaattagtgacgaatccgtagaatgcacgatttttattataaaatttcttttaaactgaccacgcaactgatgccaagccgatggccttccaattcaactcgttgctccccgtgcgtgtgcttctcgtgccgtaattcccacacacgcacttttgggtcaccaccaaattctccggtgacaatgtaacgcccattgggcgaaaaggccaaactggtcagctgaaagtaattgcttgaattaaaaaccatacaatttaaagcattttttgctacaaaaagaaaaaacacaaggaaccatgataaataaaagaaaccatgaaaacattttcatcaattttaaattcgaatttatttttgaatatttattttcaagggacggtcctaggatttcggcatgcggggtattttttgcttttcacgcctttttattacggcttttcaaaaaaaaaaaaaaaattaggaaaaaggagtccggagatgccgatatgcgccgctggatttttttgaagattttccctctttttttgagattttcgagaaaaaatttgtgcttaaattacaataattcaaccacctgatttttgctggcacagaccaaatgcgcttgagaaagtgttcgcgggttgagcaccacaacaatggaaccggcagggtaagcgacgaggccggaaatggggtcgaccgacaaggagctggagcatgcgggggtgccgaacacgcgctcgagtttggcctggaaagggagcgaaaaacgcattaaaaacagtccaaatattgcgaacaatcccttgttgctttgattttccattcctttcacttttccgtttaagtttctttgttgtttttaattttatttttatacacattccttttacaaatattgatacattccaagtcaccaaattcccccccattttatgacattccccagttgtaataaccatttgtacgatgaatacgagggcaaaagtttgggggatggattaattggagaccaaaacccccccgcggaaaatgggaaaggtggggctgattatggggggaggggggggggggggggacggaaggccggagaaagcccgcctattttcagttggaggagttcaaggacagtgaaagaagaagggatgggatggagagaacaacaacaacaaacagtgaaaagatccattagccaaattcagagagtccatttcattaatttaaggagcaaggaaaaaaatcccaacaaaaggaattataaaaataaaaaaaagtataatttgcctttttcataataaacgaattctgttttgcactcgccattttgaggatgtccgtccgtccgcaatggaagaggcgccttcacgatgttctcttttggatggagtgtccccgttgggtttttgccttcgccaccatcacagggggaggaggaggagggggaaatgcgtcgtcaagcggaatgaagagatgggtgggggaaaaagttgtgtgatcagcggagatgagagccacggaaaggagggagggttttgtccgattaggcctgactcttctgacagcgggacaaaaagtgaggcgttagtggtggtggtgcaattctgggcacaattaggggaagacaaaaacaaaatgagagggggggggggggagaacactgactgcgtttgttgtttgacgacttccgtgaaagagtgggcggagagcggaataaatgggaagagacaaattgatttgatggaggcggcgggcggaaaagggacccgaacagaaagcaaaagcccaccaccgccaccaccaactttgatggacattatccaatttggtggtggacattatggcggaggattgataagtcatggaaaagcattgactgatcaaacggtttatggaggggggggggggaaaagcaaattacggagttatattaaggaaacctccaacaggaagaaaaataaataaatgaaaacaataatctaatggaaattgacaaagaaagtacataacattgatatgtatgatttggctccaaaaaattattagcaaataggagggttataaatggtgaaactattaaattttctcttctctttacgggataagtaatgcaaaaacgcgatgacaaaatggcaataaatttgttgctggagatgaattacggattatatggagaggaagggaaagcgatgtcagtgatgcgcaatggacaaaacgattgcggaaatgaatggagaactgggggtaacagtgagaagagaggcaatgcaaccaaccgcacggagcagtcacctccgactgctgtggcggggaaggaggaaaggttcagccccgcccctccgtccggcccggcttcctcattcggtcgccaaatcccccctcttcagcaacaacacattgtgtgttgtttttggcctttgcttccgccgttttgcgcacgcggccgaggggagagggcatgaggaaaagaaaagatttgttgcttgatgagaaagtaccaccataagcaccattcaacattttctatctcttcctctgctggtgatggcccgtccagtttttgcatcgtcaatcgatcgaatggggcagagaaaataatggaaatggataggggctctccccgcctacccccccccccccctcccattctttctcggctctgatgtttgtccaccaaagggaagaggggcatgggaatggatgaggggaagaagcggaggaatggaaaagcgggggataactatgatgaatgggaagaggaagctgataaagggagggacgcccttcctcttatcatttgttaacttctcactttcgtcaaatctctttattccagacagtgaactctcataataaaacagccaaaatattgaaacccggcctttgctgctccttctaaattagaggaatgaaaatgaaaatgtcatttttcgttcaaatgccccatcttgtcatccctaccaacctttttgtggttctcgacattcattcatccaacccagaaactcatctccccaatgtatccctttcagtcaaattcctttcacaaaaattgtgaaggccttcgtcgattagggcggggttcggctgagtgatagccgtggtgccccctggagaaatggtacgcagaaagagggaaccggaacctctacacaatccaaccctccccctctccagcacccattcatttattcattcattttttgaatactttttgaaaaaagtgaatttttcggaggtcgacactgtccagcggtaaatgctctttgataattgttttgttcagtaaaaaaatagggggggggggggaagctgtagaaagaacaacaatgtctgatgagagaatgaaagaggatttttgggtggaaaattttgggagggaaataattgcgaaaagaccctctcaaaacgtacaacaaatccaactgctgctgattgaataaagtgattaaaaacgaattaatttttttctgcaggattttatcggttgggtcaaaagaacgtgcggaagtgctgagaaagaacggatgcaaaggggaagacgaattattaggatccccagtgatccgattgacggattggggaggaaatttcacatttcgagggtcgtacaacataatttttgtgatggatttgtgcgctgtgtgagttgagtgttttgggatgagtgcggggcattgggcggggcgccagggacgaaatttgacggtgaagaaaatcgatacattttcatttcattgtgtttgcttctcaggtcacacagcaggtgggccaattggtgaggagaaaaagaaaattaggtgggattttgagaagaaaatcggaacagaaaattgcggtaaatgccaaatgaacacccaacaattataaatttttaaattggacttaaaccagatttgagcctcgccacttttgttatattaaaaaaagtaaagaaaaatttgttcaagtttcatagttttcgaaatcttatttgtaaaacaaatatgaattgaaaaaaacgaaatcccatttcgtaaaaaaaaattacaaggaatcttacgaaaacttatctagtcgttatttcattaatttgaaaatattaatttttttaaaattcttttcgtctttacgaagtcgccctctctcataccctttcatctccaccgacattcacgatttccgaaaaatttttagggcctcggaatgccatccctggtatggtgacaagtaagttcgacctggacctggatccaggcctggatttttcctggatccaggtccaggtcatttttcgacaacctggatttttcctggacctggattttc

SEQ ID NO: 2102 - DNA, 3189 bp, Heterodera glycines
  unsure (1)..(3189): unsure at all n locations
attaccgataaaagtgcacctcataacggcatcctcttctgcaatttgattttatgaagagggctttgtttttgaatttagatttaaccatgccgcgaattatctaaatatactttaaagtttaataaatgatttaaaaattgtgagaatattattttataacaattgaaaatctttagctttataaaaaattttcgggggtggggggggggggtagcaaaacgttggccggttccatcgcattgcacaaaatgtttattttttgaattaacgcgtaaattatatttggctatatgaaataaaaacgatattggattggtggtattcttgatgaatgagtatatatttagaaaaaatttgctcatcgtccacttattttttcttccttctgcacattttgtgcaatatggtcgttttcatttccacccctctttattcgtggtgtgtcgctattgcgctcgtcttaatgatcatctctcaatgttgcggctgttctaaaaagaaagtagtactttctttcatttcttcaatattaaaacctaatttagcaaaagaaagctaaagagccgctgaaagcaatgcctactcagaaagcggaagaggcatctacaggtggaacgaattgaatggacaagaaatatttattgagcaattttaagggagcgagaaaacgggtcaaagcgttgtttctgttaggccacccaatgtgccgacaactgctccaggtggactactgttataatgttattttatatctaacctttttagtcgcttcaaacccacccatcagcgcggaacagaatattgcttctattacacttacaccttcagatgtgaagacacctgcaccaggtaaattaaatcaacaagaaattatttattaagcaattttaagtgggcgggaaaacgggtcaaagcgttgtttctgatacgccaccaaatgtgccgacaactggtccatgtctactgattattttttgtttttttagtttatacaacctttttagtgacttcaaaaacgccgatcaaagcaggacagaatgctgcttctgttaggccaccagtgcctgcaaacacatcaagtagaacaatttttgaatgccgtcaaataatactcgttttagcaagttcaaagcatgtcaaagctcagggcactgtttctaaaaaaccttcgaaagcatcgtcatcacatacctcacgtattgatttctcagatttagcaaaataaaccttttggtttttagtgaaggtacccgacgacctggtttctgcaataaaatcgcatgtgccctcgtttctccatgatctagcatcacaaattactggaaggatggaccaaagcagtgcttctgccatgtcaagtgattcggaatcctcaacagaagagtcgtcgtcttcaggtggagcgaaattgtattatcggttggcctcgtcttttcaatttagcatcagaaatgactgaaaggactgatcggagtgctatttccgtgaggcattcgagtgtgaagaaatctgtaccgggtaatttattttttttgagtaccggtttaataaattattttttgttttagtgcctccaagacctccggtcaaagcaggacagaatgctgtttctgttaggcccccgaatgtgaagacaactacgccaggtcgactgaatcaacaagaaattatttantaagcaattntaagtgagcgggaaaacgggtcaaggcactgtttctgttaggccaccaaatgtgcgcacaaccacaccaggtaggataatttttgaatgccaccaaaaaaggaccattcagtagttcaaaagcctgtcaaaacggatcaaagcgttgcttatcgttctacaactgcatcgagtttaataatatttttgcgcgaaagaaatagaatcatttcagcagttcaaaaggccggcccttcggacctcagcgcggtttttattcagaattctctgcaggtgtcggattcggacggctcgcgtagagagaaaggtataaatagaggttggacttacgttcatagccggcgccgaaaacctgtatttttgcttctgggtccggtgttattgtaagtcgggtgactaaaaatatgtcaaaaaaacaaccttaaaaacaaagatttttagtttttttcactattaatttattccttttgatttatagtaaacgaccctaactatgagacacttgaactaattgaccatggcatttttatgggggagaatacgaatgataccgaccttaaggcagttggaggtatgtgactagaaattgtggatgttctaaccaattaattttcattttaagcacaaaatccaaactacgcaactcttagaaacttggatctgaacatttttgtgcgtggaccgactccgagtaaaccgaaatgagggaaagactaaaatgtgaagaatatcagggacatttatatattgatgctaatactcattctttgttgttgtatttaatacactaaagtgcaataaatatatatatgcccatcttttgttgaataaagtgaagcaaaaattctctaaacttaagtagcgtggtgaatcttataaatgtggtgcctggtttaagactcgaataacctaatcttttgcttttagcaatcttcacaaatcataattgcacagatccatcaaaattctgagattgttatttaccctaactcatttccggtcatggtttaacgcatttaactctcggaaacatgttttcacggtacttgtttggtttaggggcagattttacataaattttgctgcctatacgcggcgagtcaattttgtgctcccagttaatcaagtttattttttgttcagtaatatgtatgtaagaacgccaaaacttttaaaatttgaaaaatatacccttataaaaatgcaagagccgatctcgaattaaaaaagttaagtttcataaaataaacttggaatcgctagaggaggtcaaaatatagacttcagaattttcccctcaaaaagagcacaaaagggtttgatctattacaaaaattttgccacccaaaactcaacacataaaattgatatattttctgctttcaaaatggaaaaaaattgaaaaatgcttatgggtcgtaaactgtatacacggcgagtcaattttgggctccccagtgcanaataagtttatttttaatttattaatcagaacgccaaaa

SEQ ID NO: 2103 - DNA, 3135 bp, Heterodera glycines
  unsure (1)..(3135): unsure at all n locations
atctcgaattaaaaactagacagctaaaaaatccattgtgtattcgatagagggggtcaaaatatgggcctatgcaaaattttaagaaaattggtcaataggaaaaatttttttacaagggcaaagttttttctttttctctcattttgacgtactatttcccagtctctaacatataaaatagcacgtcattcatttttttgctaataaactattttttaaatttttttttaactttgaaatattcttcagaattttcccttcaaaatgagcacaaaatggccaaaacttttcaaaacttaaaatttattggggattttcccttgtaaaaatggaagagtcgatctcgagttaaaaacttaagttccataaaataaacttggaatcgctagaggaggtcaaaatattggcctatacaaaatttcaagaaaatctgacccgaggaaaatttttttgaccctagtgaaaatttcaataaattttttagccaagtgcgcaatgcctgtggtttgctcaataaatatataaagtaaaaatggaagagtcgatctcgagttaaaaacttaagttccataaaataaacttggaatcgctagaggaggtcaaaatattggcctatacaaaatttcaagaaaatctgacccgaggaaaatttttttgaccctagtgaaaatttcaataaattttttagccaagtgcgcaatttaaagccaaatcaaataaaacttacaatattctccagaattttctctttaaaatgaatataaaattattatatttggcctattattgcccgagttatgtctggaaaatttcataaaattatcgatgatgtacctaaccaacgctttttgaatatgattttttattgacacgaaaactttattaatggaaaataattcttcctttattctttaaacgaagaaattgaaattaacacacaacatgaggaggatttgaacctgagaccacccttttggtgactaactcacagaccactaagacgaaaaaactaacttaattgcacttggagcccaaaattgactcgccgtgtataagaaagagccttcgtttttattaaaccgatcgttttgactttattaaatcgtcttttttcgttatcatagcgattcacattccgtattcaatcgatatacctttcaatttgcctttactatgcttcttgctttgacttctgtggacactcgcaacgcacttttgtgcgccgccgttccttccattggcgccttcgtgggctcgacgatggccatcaaagatcaggaattggttcaattcctcaaggtttgctgacaccagagatggggaatttaactccattcagcttttagaaacaaaattttccttctttcgcacgttgttgcaaatacaattatttgctggccaacactgccgtcaccattccgttcggttacgcttcttatttggtctacaaaattggaggaggtgtcaggttttttgacagttaatggatggaaaggaatgattcaggattcagttgcaccgactcaaaaatcgcattgggactgtacggtgcgacgctgctcagcggctgttttttggtgcccactctcaaaaagcatgacattaaggcggtaggcaacctacaagttcatcttcctcaggtccaagtccaaccctttaagctgactgccaacgctgttgtccttgccggactttccgtcgctacttcagtggctttctacaacatcgataagatttccgcttattggacgtgagtttatttgagagtcgtgccggttatatttgccaattcagcatgcccttcactctttgggccattttttgcgctggacttacggtgaaggcgaactgctgcgccgggacgaactcaaagcttatgaccaatgaggcggcttcgtgtgcttctgaaaaagggacgaactcaaagcttacgaactatgaggcggcttcgtgtgcttctgaaaaatctgagaataagaatgagggctcctgctatgtttagatacgatgatgatcaatatttctctttttgatcgattgtttttgctaaatcatcgcttgtttgattaggaataatgttaatggtaaaaatccaactcttactagggtaagtactgccccaactcgtatttttcgacaaaaaattcgtcataacttttgttgaaggcgaccaaattaaatattcttgttatcattcaatagcccttaagattcgtacgagttgggtttcatccgtatttgatagcaagaaaaattgtcttgtcatctgtttatttcgttgtaatgtaataaatataaaataatgctttagttaaaaagacttttactggtcccataaaaaaaggaacaaaaatgcagttttttgcgatcctgcgttactctcagggcgttttcggggccgttgatcacgaatatgacatcagatttgtcacatgacaacacctaatattgatcaaagatgttttcgaatgtcgcaagcgtcttttttccttgtaaataaatagtgactaaaaaggataaacgcttgattttttgtatttttgctgcgtaaaaataagtgaagacagttccattcactgaatccgcaaaaaaaaaatgaaaaatacttgatgaaaattatgaaaatcatagacttgaaaaaaatcatagattagatgatgtcatatgacaattttggtgtcacgttcgtgatcagcggcccgataacgcccaagtagaacgaataatcgtaaacacaccgtttcaaaaaacgagagatgaaccaataaagagagagcgcagagaaaaaaacatctctctttttggcgtactatttttttatctctgtcaatagagaaaaactgaattcacttcatcctgtttaactttttttctgcttgttaaatccacaccaaattttgcatatcgatagagaaaaacattctgcatcgaacgtatcaaatgtttttanaggttgtacatcccattttttcatgagacaactatgaaaatttgaaaatctcacaacctcgttttctgggatgtcaaattgcttaacttttgcttagaaaaagctctcctcatncagagctttcgaatgatatcaagttttccnaatttggntgggaaaacccttcaaaaataattcccaaa

SEQ ID NO: 2104 - DNA, 2056 bp, Heterodera glycines
gtaatcatgaaatttggaaccaaattctgatttatttatgtgaatctcgggtcccaccactgctaatgaagccataataccaatattcgtttcaatgtctatagcaccatttcacattgttactttattttgttgctttttcgagttcattttacagtctctgttttagttttgccaaaaatttttttatccgaagaaaatgaaccccaaagcaccgcagcagcagcaggccacaaccgtccctgtgactcccgccgctgttcttgaggtttggaattttttttattattattatcattgatagcgctaatataacattgaattggacccacgcttaacaaaaactgaagtttggctagccgaattttggcccaaaaaatacaaatcctgcaacctctgctggtatgcatgcaagtcttcctctctccccaaactcttgtcccctctgggtctgaagaagtgcgctacgttctccaatcccaccgccgccaacctgtctcggttggtcgcgcttagttggcggcaccagatgccttctaaccatcttcattcataacgccatccattgttgtcggtagtccggcagcgttgcactggcaaacctcccttcccccccccccacccaccctcgcccccaccttttgcacaggaatgttcatttgcgtttcaaatttgaaattgtttggatttgatgagtcttatttttgcatggctccgttttcccattctctgtgtactttgacaaagacggggcgtgggttaaagacgtgtaaattgctgccctgacaatgaatgacaactaaccacataaaagacaatctcattctgattcagtccattaaataccttccatttttctatggagggcactctcaaaatttatgtgttttttaccagcagagatggtttttcttaaaaaggcaaaatgccttccaaccgaacttctttttgagttggtcaatgcattccgttttgaccaccgttgggccaaaattcgagtttgcgcggcctttgattattttgtaaaaaaaagacaactcatgtttagcgagggagagaaacagagacaaaaagttaattctatatgtttttgtatgtttttatgatgagcttacttttttaaaataaacagggacctgctttttgtttacataaattcaaaaatcgaaagctccggaatataattaaataaataacaaaacatgaaaaacttctttaaacatactaaactgcatatttactttagtaccagaggagtattgaccaggccaagacttttgtcagccgcgagataaatctgttccgacccaacgctaccttcaccagtgagttttatcaacatttggcatcagtcgattcgtttatgtttcaaaaattctattcaataataaaagttatggccagaatttcaaaaaaaaaaaaattttcaaatatttttggccataactttttttaaacacaaggaaattttataaaatttaacaaatttgtagaagacacttagggctatcaaataatatcaaaaatatctaatttggatggttctaaaaaaagttaaggtgcatcagagtttaatttaatccgcttaagatctgttgagtgcatgttctgaagtgagcgaggttggagtggcagcacaaaaagcacaccacaaaagcaagttttgaacaaaaagcaacaaattctattatttattgccagagtttgtaattgtgttgtttttttagctttttattataaaaaaagttagataacttttggaaagtcaaatgcaacatattccattaaattcacaaaaaacttgctcatatttatcgaatagtcttttgataaactggtcctaaaatgcttaagtgatccaaaaattaattattgtgctgaattcgctaaaaataaattgttttcctgtattacattgtgtattaatgcctttttcagtcctcaatcatcttgccagcactttcgcacacatcagcaaagaacacgcagacaaacttcaaactttgcagaatgaatgcaaccgtttgaaggaagcgaaccaaaaacagaaggaaga

SEQ ID NO: 2105 - DNA, 5505 bp, Heterodera glycines
ctaaattaaagatttaagacaatacaatccgttttttctttaatagtattttcttttagtccactgaccctaattctgtgccggacaatgctgaaacagtgataatgtccgacttcggcttcgccatttcagccattttcggtacaaaatttattaatctttttcattgattacatccatttgattataattattcatttaagtgattatgactgtgaatttgctcactaatgctgcgtaatgaagtcgaaactgaatttagatgaaaaagaaagaaaagaatttttgttttgatcaacaaaaacaatacttatggttagagttgagcgggaccgggaatttgggcaaaaccgggacctcggaggaccgggaatttgggcaaaaccgagacctcggaggaccgggaatttgggcaaaaccgagacctcggaggaccgggaatttgggcaaaaccgggacctcggaggaccgggaatttgggcaaaaccgggacctcggaggaccgggaatttgggcaaaaccgagacctcggaggaccgggaatttgggcaaaaccgagacctcggaggaccgggaatttgggcaaaaccgggacctcggaggaccgggaatttgggcaaaaccgggacctcggaggaccgggaatttgggcaaaaccgggacctcggaggaccgggaatttgggcaaaaccgggacctcggaggaccgggaatttgggcaaaaccgggacctcggaggaccgggaatttgggcaaaaccgggacctcggaggaccgggaatttgggcaaaaccgggacctcggaggaccgggaatttgggcaaaaccgggacctcggaggaccgggaatttgggcaaaaccgggacctcggaggaccgggaatttgggcaaaaccgggacctcggaggaccgggaattcccgtcccggtcccgctcaactctacttatggtgataaaaactgtttataaaaatacaataataataattttgtaaaatataatgatttttatttttttaattaaaatgtctaattccttgcaattcaaattcaaattcataaacttaatgaaaataaagcgaaaaatgtaaaaaagtaagcaatttttgtaaaatttatgctgtagatttgtcaatatgacatagatgctgaaagttgtaataaatttaaaattccaattagaattaaaagctcaaagattttaattttaatttttaggaattctaaatttagttatccccgtaaaatatacaaaaaagagaatgattttgtattaagggttggttggcatgttaacaaacaaaaccgcaatcaaatgtccttaaaaataaggacaaaaactaactttcacccgccaaatccaacaatcttggtatcactttggtagccctaagtgtcctttattagaatgcaaaattccgttaagctaaaacttgtgctcttacgaaaaagcccgactacagatgtttcaattaaattttgtctagtttcttttcatacaaaatttacatttagccaaaattattatttttttaatggcaccgcccgtcagaaaaagaacaaattttcctccgacaaccgccgactcatttcttctaccgcaattggtgatgaacatgaacaacagcaaccgatgggttcacttatgacatcaaaaaaatttttattaacgctttttaggtaacaaaacacgtagaaattaatcaaaaaacttattttgcttttcaattgttttaaaattgttttcgataaaaataaatttttaaaccaaaaatttttatttaaaaaaataattgaattttgaggatcaatttttgtgaaaattttttttcaattcttaggagtgtattttctgcaattttttcaggttgattcttaggggtgtatttttcatttttattgcatttttgttaacgaattttccggaaatcctgaaaaaggcatcaaaaatggcgaaattggcacaaaaataggcattaagcacaaacattccaaaataggcaaagttaggcattataaaagtaatcgtagacacgccaaaccaagtggaaaatgcatttttttgtgcttaactgtacgtattaaatgcgcaaaaatcttaggcatttgcctaaaaatcgcatccctagtaatgagtggttcgtactatgcgattcgcgaaatcattttgcgctcaaatttgtagtggaagctgcgagccacacaagtgactaaaaaatgccgggaacgggaagcgagagtcccgagccacgcgacaaagagcccgttttgcccgcttcgtttttgccgaacaatttaaaataaacaactttggcacaaaaaaatcacattatgtgtggcaaaaaagaatggcaggcacacgacaatggtcgttgttgcagttgttatcttcgtaattattttggttgaagggagagggttgagtcatccatcaaccgattgtcgtgttggcctattggctgctgtgccgtggccgtggtacgcaaagtcgggcacgcaaaaggtcgtcacgggcaccgaacacaaccacaaacgggggatcatcaacggcatcgttatgttgccttgttgttgatgatgcattatcacagcagttgtcgtggcgtaacagcaacgggtgcccaaaggtttccagctgctgttggtccatggtgaacacgcagtccaacaacaacgacaccggcggcggtggccgtgtcacaacagtaccaccagcagcagcaggagacggtagagcactgtcatctttgttgttaccagcaggatggggatacggtagtagtgatgatggtgacggtaatgagagtagcaattcgtcatccaaccaaaggcggaacaaagtgcctgtaggttgaaaatgtgaacgcgcagcaattgtatatatacgctttcgaatcgggatacagtgcatacaaaatacagtattgtaaaaaatgcattactatagctttagttgcgtttactgtaattatcgtgtgaaaatgacttccaccaaccataacaccacactgtcttctgtaacattagtttgaaaatttttctgttgacacttattgaaatattcggaacattcttatacagtatgcctgggtacagtaaatttaccggtaaataactgtaacaatgcctcacctttgaatttctgagagtttttctatgtttttttaaaagttttcttgaaatgagctgttctcccacctttgttggtcaacagaaaagcaaaacggcgctgctgatggtgttgctcaaacagaatgggacggcgtacaatgcattcgccggcggcactttggcacggcaccaaaaaacggcgcagcacagagaagccaccggcggcggctgcggtgggacaacggccactattactgtagtctgcggccttacagtaatcggactgtgttgtcggcccattacggtaattgtaggaaagcaagagcaacgagttggcaccggcagaaatgagcaacaattgttgctgctgtttggcggcatcaatttgattgccgtctccgatcagtggagtgggcgagtcaaaaaattggtgcccataattggacagagcagagaaggcactgatctgagagagatgacattttgaatgaattaaatccggacgggggggatatctcatcccccccccccctcccccgaaaccgaaatatttttaaaaattttaaacttagaaattttccaaaaaaaaaaatctttgaaaatttttttggaaaattttcgaaaaacatagtaattgttcataaaatttcaaaaaaattgaatgaatttaaaaataaaaaatttaaaagtttattaaaaattttcaaggagaaaaaaaatattattatttttacacagaattagcaaaaaaaaaaaattcattttagatttgaaaaaaatttaagaaattttttcatttttttttctatgtaaaaatgacaatttttgggcaaattctcaataatttggataaataaattttctttcgtaaatactaaaatttaaaagagggagggataaaccacttagggtggtcttgagtttggcaaaacactcacaatgtgcccgttctcgggttcaaccagcagaatttggcccttgacagaaagggaaagacaatggccaatgaaagtgattggcgcggcaaaaatgggcgaatccatgcgcacagaccacaaaatcgaattgaactcctgtgaaattgtgaaaaaatttgataattagcctacccttagaaaaaattttgagcgaaaattgatttaaaaatttcgccacattaccccactctcttcactcgaaatttttaatgggaaactagtattttgtcttgaacattttgattttaattattggtaccccctccaagacttcgtagaaaatattttgagaaaaatgacaatttatgaaaattttgcaaaatttttgggtaaatcaccgtagagtttcaatttaaaaaatattggttcggcgctgcttacaggcaacatggtagggaatttttgtaaatttttaactttatccaaaaatgaaattgtggatttatgcgattacggcacagacccaaaatatgccaaaaacaaatatgtcatataaaaatggcattttggcaagctttaacggcgccaatgaacacacaccttacaactgacggcaaaaagcgtgccgttcagcgtgccaaatatggcaagcaatggcggcgacggcggaatttgattgtttgggctgatcagcaacaacggattggtgcgcaaaaagccgtgccgagaggcgtcaaatttggccataacaacagtacagcttctttgtgccaaattggtattgttggtggtgatgtccaacttccaaatatgcccgtcataactgccccaaaacagtcgggtggttttggtgccgtcctcgtcatcattgttggcaccatcaaaagcgggtgccattcgaatttcagcaccacaattgacggtggcaattggctgcggatggaattcttcccgttgctttagatcaaaaatgcgcattatgccggcaaagccacctttaaaattgaggcaaaatgacaaaattacggaaaaatcgctaaactgccggctcttacaaaaaatctaatttgttaggaaacttttctaagaaaattacaaaaaaaaaaaaaaattaaaaaagtgaacaaccaaatgccagcaaatttgtgccattcgccgaaacagaacagcctgcttcaaaacggtcgcccgggtaatgcaacgaaatggacggaatgcctatggccagatggacaccctgcaaagtgccggaatgggaggcggcataaacaatgctgaaacaatgtttagatgtgacaataaaaattttttattggtattggaaattaatttttatttcaaaattaaatatttataaataaacttttacttattttttgtaaaataaaattaaatttccttgtataaaattgaacgaattcatcagagaatttgatatataacgatggcagaaactaagccaatccaccaaaaaata

SEQ ID NO: 2106 - DNA, 4001 bp, Heterodera glycines
tatttttttttcaccccgtcatggcaaatcggcgttccgtcaatgcatttgccaaatgttgggcccatttctcatcaatgtcgaattttgttgacgaaatttgcaactgcaaatcatcatgaccaccgcctccatcattaacggcattttgaccatctccgcctccgtttgcggcatttcatcgatcattagtgaaaattggcacaaaaattggtccaatgtatgccgttcgtccaacaagaaacgaaacgttgcaaccgcataattatcgtcatcatcatcctcattatgatcatcattaggggcaattagtgtggtgcggcggcgtttgttgtgttgcaacaaaaaggcgagctcggcagcttcaagtgacttaaataacttgtacattttaaaatgcgttttcaaatatagtgaaaaagtatatggaaaagcttgagattgtgacgtcattatgcaaaaaaaaaataatttttttaatactaagaaagtaatcagattttatttttaaatttgatttacacccccctgaattagagcccccttgaaaaaagcccttcttctgaggggggttgaaaataaacaccctcgggtgcattatttcaaaatacggtattttcatgacaatttttcatttttttgtttatttttttaaacttaagtttctaaacttgatggtataatggcattgacttcctaccgtaacctgactgaaactgaccccaatgcccaacgagcgcaatgtgctgtgccggatttcgtccgaatcggccacaatgccgaaacgtttctcgagaaatttttgcaacgaaatttgaccacgatattccgagaggacaaattggcgcaaaaaatgctcgtcaattttgcctgaatgtgttgtgcaaaacatagaaatgaagtaattcaaatattcggcatttgctgttcgattttcaactgagaacggcgcttttccgtcttacaaattagcgtttattgtcggggccaaacaatcattgggttgctcagtactgtcttgtcttggtgacaagtctcgaaaaatttgtcggaacctctcctggccaagtcttaatctatatatatagtaccaagactggaaaaactttaattttttgaggcctcaatcatgcactaagtcccggtgtcaagagactcagtaaacttttttgggtatcttgtctcgggtcaggtcttggtctcgagcctagactcgagaaatctcgaattttttaggcatcgttccccaatttttggagtccccgtctcgagtgccaagtctcggcctcgagaaattttcggtttttactcaaaatgccctaaaatttcgctctctcacaccattttcagtgagtcgtctctggcggtcaatgttccaaaatgtgcgggtgggccattgaattttggccaattttgtgcgcaattgcgcctcgggcagtgccgaaacgccgtccaaatggtcggcaaaaaggaaacggcaattgtccacatagagcagcttggcaaacacaatttgcgggcacgcggccagcacttcgttctccgtgtcagccgccatcggcagcatgctgttcggcttgtgctaaaaaaatgccaaacaaatttttgtaaccaaaaaatgccaaacaaatttttgtaaccaaaaaatgccaaacaaatttttgtaaccaaaaaatgccaaacaaattttgtaaccaaaaaatgccaaacaaattttgttttatctttttttgtttgactttttggatcagaaagtgtcaacatttattttattgatataaaaaatatatatacaattaaaataaatgggatcagtttgttatcccccaccaacctgaatttttttaatctcgaagttagaaaatttttcaaaaaaaaaaacataggtaaaatttttataagaaaatttttgaaaaatctagtgatttttcaaaatttaatgtttttcaaaaaattttcccaaaaatgcttaaatttttcataattttttttccttctaattttcttataaaaaatttatttgttgaaaattttttaatattttacgggtggtgggaggacttagtgcacccaaaataataaatggactaaaattattataaaatatattttaaaatgtgaatgaaattcattatttaaaattattaatttatacccgtccccgcacaaaaatgtgacacttcttctgcagtttcatcccaccataatttgcaccattgtcattttcatcagcaaaaggtgcttcaaaggcaatgtccccggttggcgttgccgccgtgccatcattattgtactgctcgaaattgatggcacaacgccggccatggaccaacagaatgccgtcggcgccaatttcgagccgagtgcccatcaacggctggccaatgggcaccaaattgtgcgggtatttacttgaaaaacaaaaaatattttatttgaaattgcccataattattaggcatgagaatttaggcaaaaatctcaaaagatcgccactcaaaaacgtagcctaaacatggttaaaccttagtaaatccgctgtttatcaaaataattttaaataaattacaaacattttgttttatttttcaacaaaaaactttcagattccgttacggtcttgatgttgtaactttaaaagacaagaaatttgaaaatgaacattaaacaattaaatttttaaaaataatttaactaaatttttacgagtgtcatttatgtaaaatgaatttagaattggttttgaccgggaatttacggtattttttggcaaaaagtttacaaaaaatccccatttttgtttggtttttgaaaaaaaatgagggttgaaaaataaagcacctcccccctaaattagaacccccccccccctctaaaataaagcccctcttttgagggaggttgaaaaatagagccaccggaggctctattttaggaaatacgataatatttaggtcctcaaatatttgttcacactttatgtcggcgcgttcaaagcgatgaacggatgcccagcagctgacttcggtcagtccgtacacattgaacaccgccatgggacacgtcttcgtcaagtgatttttgaccaaattcaacgggaaattgtcgccgccgatcagcagcgattggatgggcgaatttggcccgaaaatgtgccgtaaaatgtccgtggaaaggcattggagcaccgcgggggtcaactgtgatgggtgttgtgaaattgtatggaggattaaatgcaaatttttaaaataatttttaccaaaaaagcatggcccaaagaaagtaaaaatttcaattaaaaaaatattattttatttatttacgatttatgtttggaaattttttaaaaaagtcggacagaagagagtgggagggggtgaaagttaattcaaaaaaatttatattaaaatagcaataaaaaatagggaaaatgaaaaatgaaaccctgccctataaaaaatttttatttaaaaaaatgatgaaacccatgcaaaaaaacaaaacctgcacaaatgagaggcgaaaatcgccatgaaaaagtgtggtggcgcagtgcccactaaacagccaatttgaaggcggaatgaccaactcggcaccggcacacatcgccacgaacagttcgaccattgacgggtcaaaatttgtttgtgtgccgaacagaacggtggacgaagtgccaatggaaaaacgggcactgcaaaatatgcattttaaaactcgcattcaagccaatttataataatcatttggtgtaattatttctcaaacctttaaaattaaaaaaaattttttttttgaataaaataatttattttttattttcattataaaatttcgcaaaagttgaaaagtttcgcgattttttgggaaatgtaaataaattcaaaaaatctataaaaaattttccctaactaaaatattaaattttctcataaatgtttttgggtgaaaaactaacagaattcaaaaaatatttgcattattttgaaaacgaa

SEQ ID NO: 2107 - DNA, 2674 bp, Heterodera glycines
  unsure (1)..(2674): unsure at all n locations
tggcaaactagtccaaaaatgcaaaaaacgcaccacaaattcaagtgcagaagaatccggcacaacacccaccacncagaaatgccggatttcccggccaaatcgtgaattcctggcacaacccataaaaaacaattctccaaaaagacccacccgatgaccatcgatgccaaaaaggcgctttcgggcgccacaatggcaacaagctgattgtgagaacaacaatcatntaaatgcgcaattctttgctgttgtttttgctgtctctgaatggcattggcaatttgctgggcttgatcaaaaattgtgccggatttgtgagtgatggaagaagctgaggaagaggacgaagaagacaacaattcattgacacggaacgattggtgcacatggaaagaatcgcgggaaaacggcataattttggtggcgaatgggcagaccaaataaaatcttttaaaatttctaaaataaaatttaaaactttaaatttagataatcattgaaatatgtatttggcacaattccaatataaaacataaaatgaaaaattggcacaggaaaattggagaaaatttgcactgaaaactcggcaccaaccaacttttttggggcaccatgacacctttcctagttgaccaattttcaaaaccttagaatcagtttaaagcttttcaacaattagaagctgatattaatttgtaagccattgctaagctattatacaactcgccaaaaaaaagttcggacaaaaaaaaacgaacaaaattggcccgattttcgagtttttgtgaattgttcaactgcttagctattgcttaaaatttaataaattgtttgaattggtctatttccaatcttacggtatccactctcaaaacgagggaacaagcatactgtaattgggcaaaatatacggtactgactgatacatttacagtaatttccacaaaaaaagaatgtacaatattttacaacaaaaacaataaaagttaacaattttataaaactatcctttcaacaatgcgaaacacgtcaaaatggtgatttatgtggggcgattcttgcagccgccacttggaacagagggcgccaaatttggcattcaaagtgccgaagaacacacgctttgcccgcacatggaccaacgccatggcacctgtgtccggaaaaatttttgaatagttttttaaatttctttgagaaaaaaacaaaggattttttgatttctaaatttttcatttttgagaaatcaaatttgttacgaataatgttagcaatgtcatattttatttcaaatagcgagattctctccaaaattattttagttggatttgctattgtattttcggtttttttcgtggcctccaagcatcnccgccagcatcaaaagtgatcagagagggtttttccgagaaattggtcagacaggttgattccgaaaattggtaaaacagttagtatcaaaaattaaaagagaattaaataaataaaaagatgccatcaataagttgaatagcacttgtgaaagaaaaaccaaaataattcagcatcagccgagcggatccgaacctatgacataatgcgcaatttggtcggtttttctgatcatttagaagaagttggcaccaaaaacccaaaatttacaataggaaatttgattatgctctacagataaaagtgatttgggcggtgaccagttcgggatgttgctttgtaagcctgtttttcaaaaatttctttccccggtacacctccgccgcaaaaaacaaacaataaactcacacattgtgcacggttccatcgccaaaatggcataaaatcctggcaaaacaaaaagaggagggttaaattttaaaaatttttcgttttttttcaccggttgccaaatattgtgccgaaaattctgccccgggcacttcgtcctcgccttcctcttctcgtccatctgtccgtgccgttgtctgccgttggttggcggacaaatgctcaatggcatttagcacagggtgtgccgccaaagggttttgccgtgggttcgctgccgccgcaggcgcctcaaattgtgccgtcgtcgtgccgtcggccacaatttggtcggttgccggatcgtaaaacagcgcacctatggcacgggaagatgagggcatgtattcataaaggtttgaaaaggcgacttttgagtcatttttgaaaaaaaaatttaagaaaatttgtggccctaaaaaatggaattttagcgaaagaaaaaaaaccgctttttgaatgggtttttgcatcaaattttgacgaaaaaataataaattttaaggaatttgggcatcgtcggaaaaaattttccatttttttaattttagaaatgttcattttttcattttggagagatgagggaatttcctcaaattcctcttccccctcactcaagtttttttcaaaaagttacgaagatttaaccgaaattttggacaaatttctgcgcaaaattggaagtacattttttgcctgtcccagtgaaattgaataaaaattaattagaaaaaaanaatccgttttttcccggtttttgtgtccataactnttttcggaattttcacgaattttttgcaaattttgcacgaaaaaaagtagaacatttagtgctatccgatggtgtcaaattcgttcatcctttttctca

SEQ ID NO: 2108 - DNA, 5463 bp, Heterodera glycines
gaaattttaaatatatgcggggtaaccaaagcgcgccccacatttagaaccaaatgtaaccaaacctagccggaggcgcggattatccaattaatagggataatgcctggaaaaaaaccaaatggaagggtgcgaatttggaatccaaaaaaaaaaccagtaccgggatttagtttaaaatgatagagctactcagatatccgagtttgaaactcgcgacccgagaaattactcgagattttttgtggtggtctcgactctcggggggtcaatccaatcacgcaaatcgactttcgtgaaattccaaacaaaaaaaaacaaattttcggaatcggtaatgcatttttttgaaattgctatttactgtaaatggaataaaacactagatactgtacctgagaaaccattttgtaaatgacattaattaatttgctttccataattggccaaaccgtggaataaaaatcactgattaaacaactttggtaatttgtaagaattgggcagaaattactttccaacatccatccattcactaatttgtttccaaaaataagcatcaattaatttgctttcgcgcaaattgttgccgccgagaataaacttaaaaaaaatggaaaaattagtcgtatgattttttgtgccacaaatttgggaacggtccaaagattgaacaatttttgtctgcaattagtagggattataattatataaatgcggaccaaagatcatgttgatctaaatttgacaattatttatatcacttgatggatgccggattagtgatcagcgaccccgaaaacttatcggattatgtttttttaacttttgaaaagaaaaaattattttttttcgaaaaatgtggcaccagccttagttatggcatttttaatatgagcctgcaaatttcaaaaaaatttgaactttcaaaatagataatgtcaaaaatgtttgaaattttaagtctctttgaccataatttttttgacttacctcgactttttttttaatctttttttgtttgggatgatctgagccaaaaaaaatgagtaaaaaaaattcaccgaaagtttttttcaggtggccccggcagtatgaagggcattttgacgcaagaattggcacaggaatttgactttgtcaccattagcatcggttggtcattgtggcacagaaaaaaatttggcaaaaaaaaaagcactcaatgtttcttaagaggatctgatcttcagcagtttgccaagaaaggtggcggatactgtaaaaaatacggtggaactgcaagaattgatgaaggcatttcaaatttcaaaattttgatttttttttaaatttaaaatttgaattttcagagggatcctgctgtgatcaatttgaaatgggtgcttcagatgatcagcgcggtatatttgaaaatattatattaataaaagtgtaaaaacaaattcagagattggctgccacatctgcacaggtgagagaaagagacttggttctattttggcatttttagtgaaatttttaaatttgaaatgggccaagaaaattcgaaaatccgaggtctaaaaacggcggacctagccgaaaatcggattttcggggctaaaaagcgaaaaccaacagcagacaggtgttagaaaaggcaccgaaatgagacgggtacctagatttttgcttggaaaagcacctactggagtttcttaattagaggtactaacagtgaaatttcaattttccggttacggtatggttacggtacaaataaacagtatgaaaaacggacccacggattttttaattttcagccgcttaagcctcaacacctgccgaaaaatatttatttattttaatttaaaatttgtataaatttttcttttcgctcgcagcgctttatggtggacattgtgccagaattgtctttcattttcaaatcgaatgccttcaaagcgggtgatcattgtcaacgattggaggaatttgatcggaaggtgaagcccaaaaaaaaaatattaaattggcacaaattaaattaaaattgaaacaataaaaatgcatttagcacaatgttttattcgccttagaactgttcatttctcaggaacatcagctgctcggtgaacccttctcaaatttatattcaaaaaattatataaattaaaaaaaataataattttgaattaaattttactaccgaagccctccctgaattttcaaagccaccctcttttgaagggcttgttgaaaaactaggcccccaacaggaattttttaaggaaatacgaatttttttttttttttgaaaatcaggtccataacatggacgcattggatgccgatttccgaaatttttgaaaactctaatttatgatttccaaaattttttgggccgttggaaaaatttcgtagaattttaaaaatttcacataacgatacctttaaaaagaatttctaataaaaattttgtttgcgattgaaatggggtggtcaaaaggggggcttaaaaattttgctaaaatatatttttgtttaatattttaatttaaaaaaggaaaaaatattttccatttttcagaaggcagttcctccggtagctcattttcttcaccctcatcttcttcttcctcaaaagccaaggaaaaggaagaagcgaacaacatttcacgcggatttgtacgaaaataaatgaaataattcaaattcaaattttcaatgaatttttaaattttccgttatttttttttgcatggattttcggggccaggccgttttcgtacgaacacatgttttttgactataacttttttctttgtcaaccaaattcaaaattgttggtatcattcgaaagctctttcagatgctctattagcctgcaaaattccaaaaaatttcgtcaatttaaaaaaaagttcaagccaaaaaaagctggaaaatttggttttttgaactcttctgaccataatttttttggaccttaacgaaatttttccaaattttacaggctaatagagaacacttagggctatcgaatgataccaacaatgttggatttggttgacaaagaaaaaagttatagccaaaaacttgggctcctacgaaaacggcccgtacgaaaacgaccccgacccgctgaaacactatacaatggcaaaaacaaccgccttaccttcacgcagcacgtgaaattgtagtgctcagcacaacatggagttgacgattggcccgggtgcgggatgcagctgtaccagccacagtcacaacttttcgcggctttttcgcaatcatcaatttggatgagttgcgctggtttcacctttaagtaaatgcgtttacagtacatatatgccaaacgtttcatactgtcgacgcaccggtggaggctaaaaaatgataatgtttcaacgaaaatttccaatgctaaatttataatatatataattagcagggctgcaaaaaatataatcaaataggttgtttgaaatgatacgtataaaaaatttgaatgtataaaatcctttgaaatttggcatgcagaaagcccttatagtaagctattttcctgcaaaaattcaactaattctgacactacggagcgaacacaaaaatcagatttttaaattcagtgaaacctatttgcatattttttgcagccctgataattagagcagaaattaaagactaaaatttttaaatgacaaaaaatcatagacaacatctcagctttttatccttttgtggcatttctttaagcaccgcaaaaatactcttgaaaaatgtatttgattgatggaaagaagaccctaattatttaggagggccggcataagagaaaaagttcaaataaaatatccattttactttttcgcaacacttgaaagcgtagtgctgggcgcaacatgggcttggcgaacggccttgcgccgggacgcactcgccccaaccgcatggtttgcaacttttgtttgccatattgcactcgttatcatgcacgatttgcggctatatttgcaaaatcgcaaaatttttaaatgaaataatccataccaatgattcaatcgtgatctaaaaaattacaattaacaaaattcaaaaaagaattctgaatttatggattttataatttccctttatgttgaaaaatctctcatattattattattattaattattttttaatttttgttttacatttttacaacacgtgaattccgtattttctgcacagcatgcggttgcaccatttccttgtttgcgcacacaagcgaaccatccacagctacacttagctttggctgctttttggcactcctccatttgtaccaattgtgccggttccggctgacaacattgacaatgttatattacaccaaaccaacatccattttgcacatacctccggaggctaaattttaatgaacacatcaaaattttattatttcaaaatccatgaaaatattcagtgacaaatttctgtgatgtcgtttagcccatggatttgcacgaaatatttttgaaaaaatgctttggaagtttacagtctaaagaccaaaattatgaagtgaggtgcttttatccacacgtgtccttatctccacctacatccttgcagcagatgaacacaaagccatctgcacagcaagtgcttgccgttttgccagcgcttggatggcattttccccaatcacagccatggtctgctttgcacattggcccagcaagtttgtctttgtcattctcatcaccactgtgtggcatttgtggtagtgcagcgctgactacaaaatcaaaagcagtgccaataaaaggtgcattctcaaatggtccaagaagcatgctcttgcccttggacaaatgataattgcacatagtatcgccaagctttccgtccggcaaaaagacgctggcatcacctgtgtatgagatggtgtattcgtgttaagtgatacccgagaacaaagactttatagattcgaaactcagaataaaaaagcttatagccttgaagaaataaaaaattttgaatctaatttttattaccaagtgaaaaagatgctccatctccaccctttccttttcccgcttttttcggattcttccctccctttccatccgttttctttccgtctccgccagtgtttcctccaggttctccctgacgcttatcccgtgagttgggccctccttaataaaaaaataaataaagaaaaaaaagtattatgtcttccacatccagtcattgtcatatgtctatttttttgggttttcaaatggcaccattcgttgggcaaattaaataaaaaaccatcaaatggaaattttcaacaaaaaactgtccataacttttgtcaaagtcaaccaaattaaccattcttggtatctttagatagccataagaatggaaattttattttatataattataaaaaaagccttccccaagggggggggggagcgagtgttcaaaaa

SEQ ID NO: 2109 - DNA, 2395 bp, Heterodera glycines
ccccctcttccaaaaagtttttttggaaaaagcgcgcctcaaatgcgttttattgatttttaaatttggaataaaattttaaaaaatgatttttgctttatgattttaactattaaaaagttgtagaaaaaatttcgctttcgctttcgcattttcgcatattttagcttttcgcatttcgctttttttttaatttcgcatttttcagtttcgcaaatttcgcttttcgcatttcgctttttatttttcaatttggcccatccctgctcagtgggtataatcgtatggaattgtggtcatttgcatattgtagagcattttgtgcattttctaataggcccactcaaaatttccagatttttgatcagcatccaaaacatttgctgaccgtttgccagtgcatccgtgtcgggcttcaatagtggcagatttgagccttccggtgccggttcttccacatcctgtgtctcctgtttctcttgcccttgcggcttcgcttccgactgttccacttcggagttttccagcttgtttggctctgtcagactcgattttttcggttccgcttcctcctaattcagaatttttgggttttcgggatcatttcctgtatcttccacctcctggctttcctgcttgtttggatcctccggatctggtccatcctcttccacttcctggctttcctttggcttcttcggatctggtccatcctcttccacttcctggctttcctttggcttttcggggtccttttcttccgtgtccgctccctggcttttgtccggctttgctttgtccgagtcgacagttcctaaatcaaattattaaattaatttaattgtttaataaagtcttttagtttacctggcttttcgttgttcggttccggtttcgatgcggcagcgtcggcggcgcgctgttgtcgcacaacagcgctgtccagcgcgctgatcagggcgatcaacagactgaaagtggacagcgagttaattttggccatggttcaagccccacccctccctccaattaacttacacaagtgcagaccacttgttcatgttagacggtcgagagtgggacgggttgctttgaagaatgggatttgggatcagaaatagaggaaaaaatcacttcctaaaaaacaatgaaatcaaaatattggcttttaaaccaaaaatttttttgatttctaaatttaagtgaaatacaaaaaattgaaacggttttcgaaaaaaattatttaaaattttttaatcgttgactgattttcaaaaatgtttttgtttggcttttcctatttccttccaccagcttatttgtcagttgaatgctttttggttaggagcagaatgaaattttggaaatgactgatttttcactgattggacagcgcttaaatgcggtggccgacagtgcccaaatgggcggtccctgcggcagaagcagcgcggctgatgggcggacccggcaaaatttcccctcgtcccccgtccccaacacaccccatgggcgggatgggcgggcggtgggtggcgctgtgacacgtcgcgtaaattgtccaaccccccccccccccccccccatgaaagccgagcaaaaagaaattcgaatcaacaattagctaaagggtaggggggtaaaaactgatcgctaatagcgataacagccaaattcattggatcggattggggatgaatcacttttgttgctccatcaatggcggtggttggtgcgaaatgatggtcggaaattgaatttgtaatgaattttttgcgatgagatcaaaaaaagcaaaaattaattttattaaaataaattattattattttcaaataataagaagtattttatattaaaggcattctaattaaaagaaattgaagaggtactgtaaaagaccgaggaaaatacagtatgattcaaatgattaagcgaattattgtaaaagactacaataattacaaaatttgtgtgcctttgtggctttgaaaatctattgaataggtctactgtaaattattcgataagaaatcaatacgaacaattcctctgctcagctcgtatttgaacggctttccggcattttaaaattcgattattgtcggtgcgctttgcagtgaggccgtaattcaaaattttctaccggcgaaaagtcacgacattttgtgtgatttttgggctttattctcgtggttcgttaacgggtaggggacggttcggtgccagcccaagttttggactacaacttttttcattgttgaccaaatctaaaatcttgaatatcattcgaaagctttatatgtttagaatctttttctaacctatttcttagcgattagacaattaccagaatggttataacatgaaataacaaaaaaagcaagattttgga

SEQ ID NO: 2110 - DNA, 2777 bp, Heterodera glycines
  unsure (1)..(2777): unsure at all n locations
ttcatgtttaaattgcgtcaattagcaactgttggatgaattaaattgtacttaaaattgcaaatatttaaaattttatttttcagaaattgtcaataagattttgccagtaattaatggctttttttaattattttgatgatttgtactacatatttacaccagcagcagtaaaaaaatatataaagaaatttcactttgtttttcgcaagcgatctgaaacaacaatacgaccactgttgggtataccatcggatgtagttcgttgatccaaatgaccaaagattgcataccagggatgacatccgagcagggattcacgcaactggatttcaattacggaaatccgtcatccataaaattggttaagagtaatttatgatcagaataaaagctttgaatgattttttgaggcgtaaaacctcaatatattggccgaaatcaagagaaaaatagcaaaaatagggcaaaaaatgagcagattcagagttgcggtcgaaaagttcaatttttttaaaattaattttcaataatctcaaacttttagaagcccttttaaaataaaattaaaaagattgtcctggtttggcggtgccgaaaggcaaataaattataatgtgtgacgtaaaaattctttctttttgagtttttagggctcattttgggaatgatttgtgaaggggtcccggctatgtaaattgacgaccttttttaagtttttgattttgcctcaaaatgactaagatttggagctaatatttaaaaataagtatgagtttttggaacgggcagtgccaataagcgctgccgaaaaaatttttcagaatttttaacgaattttgttaaaaaaatagccaaattttttaagcatttcctaatttcccctttgctagcaacccgccctctttttttgtatgttaatagtactacaaattgccaagaatatcgaaatatgggtagccttttaataaaactagttttataaaaaaataatttaacaagaaatcgtctcgaaaaataatccacaagtcccagttacggaacaaaattacggaaaaatcccaaaaatcagtaacccgtaatccgttactcaaaaaaccccgtaatttccgtaatccggaacccgtaatccgtaattgcgtgcagacctgattccgaggctcctaaaattgtcggaatttcatgccatccctggtgcatacactaaaaatagctgatatggagggcacttaaaaatgatttacgacatttgcactgaactaactctgacatgttagactgcaattttatgtcaattatttttgttgttttttagattatttttatcgcttttttgggactttatatatttacaattaatatctaaactttttgtaggtctccggaatgtttgtccattgcgcgctagaaaatctttgaaaattttaaataaatgcagaaactggaaatatcaaataggtaacacttttactttttttccttttattctttcaattttattttttaaaattcttttcattttgtacgattttctattaatgattattatttttgttcgtttattttttataaaattaatttattcattcgcttttttatctctttttctatcagtggaatttgcacagtttttccaatttgtcatcaccaccatttttccgctgttatcaaaaaaccatccggcaaaaatcgactctgattttgctaatgaatcatttttcatccattataatgaataaaattgtggatgcaaaaaaattatgttaattcatactaaattatcgaaaataaaaatgataaaataataaatggaaaattaaaaagatatacaatatacaaagaaatggtgtaattcgttctcggcctcgagaatcggtaaataggcgaaatgcccatgcagcttaaaagttacaaacccaattttaatcttagtcaaataacttcctaatttttgtttgccattacatagttttttccgtcttttggcacaaaatgccaatgcaagaaattctcattccacaaaacccaaacactaattttttgttattatttttcttttctcctaattttgcaaatggattcaattaaaatgcattaatgagcctaaacgcataaaataaccttttttaaatttgatttattgattgcttcgtgtgcacaatgggctttatgattgctaatgttttcatttttgttctaacgtcgtcgttctatgaccattctgtcaacgccgaacggtaaattgtttttgaagaattgcttttttaaaaagtgatttaaagtttctatctgacaaatggcacagacggaatgaagctaattcaatttcgagcttttgaaaaatgtagtgcaaaaaattgtacggatgaagccacggaagagcactttaaattaattaaaaataattatgatttttattttaaatgcatttgtttgacttgaatttgagttatttagtgatttgaaattggttgaaatggatgttacattcgtaattagtgacccccacgaccctcgtgaataattttcacgacttatggcaaaatttttcggtcgccatacagcaaaagtcaaattacttatattttaataatttttggcagtcggaatggaacagtattgaaaaaggatgttaaaaaataatactccaaaaccgacctcattaattatttcaaatctttctctaattaatgagtctgtctgatggtgccgatgtggaaaattaggaaaaattttgttacaatttataaagattccaagacctgnncnaggcatgc

SEQ ID NO: 2111 - DNA, 1268 bp, Heterodera glycines
gcaaatttttgatgtttgtcgcagtgtcacttcatcaagtaacggaaaagagagaagcggacgaaacggcagcggagagggaattccttttttggcattttaccgcaatggcatttcggccatttgccctctaatttgggttcattaacactctttaatcgttcctcttttacactttcaattttattttcttttcattcatttcatttacctaatacattttctattaatgaatattatttttgttcgtttatttttataaaattaatttattcattcgcttttttatctctttttccatcagtggaatttgcacagtttttacaatttgtcatcgctaacacttttccgcttctatcaaaaaaccatccggcaaaaatcggctctgattttgctaatgagtcatttttcgtccattataatgaacaaaataatggatgcaaaaaaataattatgctaattcaatactaaattatcgaaaatattgataaataaataaataatattggaattgaaaaatgaagaatttaaaaaatatacagtaatcacgataaatgcagatagtttggattacggtatgaattttccgtaatttaatccatcactccaatttaagttgatttccattaatcattggaaaagttaattacggacggagtgagaaattgattttgcaggtcgaggccatgactattaaagcatgtaaatgaaggaaattaattgttaattcgtgacatttgtaacacagttttcagagagtctctgcctttttatgccaaacatttgacagtaaaatattccgataaaatttttcacagttcaataaaaaattttcgcgaaaatcgaaccatgtgaacgaaattaaacttgagtagaaaaaacaaaactgatcgagaagtgattaccacatcattttttttactcaagattcgcgtatgaactttgacttaatcaaaccaaaattgaacttagtttaacttaataatttcactaagtactgtttttttttatacttaagaaaattaaattcataatatttctctttcatcccaaatgtgaggctttatcctcattttgtggtttttgtgaagcaatggggctaaattctcaaaagaaggcttgaagccattttggatttttttttaatgccttaaaaatagtaatcttgatcaaaattttgaataaatcgcattaaaaagttggatatttttccgggtggtgcctgtcggtaccaccggcccatgaatcaccagtgtttttttattttt

SEQ ID NO: 2112 - DNA, 1906 bp, Heterodera glycines
  unsure (1)..(1906): unsure at all n locations
tcgccgaccgatacacgaacggcgcaatcactcaaatcgtccaatcactcaccgatcaacgaaaacctcatcaccgatcaatcgtccaatcactaaccgatcaatgaataacctcatcaccgatcaattgtccaatcactaaccgatcaacgaataacctcatcaccgatcaatcgtccaatcactaaccgatcaacgaataacctcatcaccgatcaatcgtccaatcactaaccgatcaatgaataacctcatcaccgatcaatcgtccaatcactaaccgatcaatgaataacctcatcaccgatcaattgtccaatcactaaccgatcagtgaatgacgacccaatcattggtcactgtccctaaatcactgacaagctttgagtcgggagtacacttgcgtcggcaaccattgttttatgtttgcgtctctttccatctgtttgcattttgccagttgctgcactaaaatgccaaagaattcgttcgcttttcccctttctttccgatcgttctttttgttcttcccccccccccccccctcaattttcttaccaatttccgcattttgcaattccaattcgaatacaattacttctgccgcaccaaatgcttctttgacccgcggagagacttaaatttaatattttaatcatttcttttttatttttaaatttattttattcgtatttcgttttttgttttgttttttcatttatttttccatttttctctttccaaaattatttttcctcccaaattcctttttcatttcccatatggcatatgtatggggaaggtcattttcgctaattatttcccatttccctgaacaaacacaacatattcctttgttttcattttgccttccattttttttatcccaaaattgggccatttaatttattttttgccattanatgggctaccgtattgccaaactttgtcgtacggtacgtgaattgtcccctaaaaggggtaacaaattaggtatttgaattcgttgagttaaaagaaaattcgaattaccgaacaaaaaactgcgaatatttcgcgacggcgaatcgatggaccacagaaaagttgacttggcctgagaaagaaaggaaaactgaacaaatcaaatgcaaaagcagaagaaataatctttgaccttttgggctttttcattttgcgcgaaaaaaacggcgaaagcgaaagaaaaagcgaaaaaacggaggcaaaaagaaacgggacgaagcaaaggcattttcattttggcactttgggaggagagaaagcggcagacgaacgaagcgacggcacgccgtttgacttgggcactttctgcaaaatttgtcgaaattgggaaattgtcgcgggaggggcggcaattatttgcagcgaaaaggtggcgaaaattgggcggtgggccggaaaattgggccacacctttcgcatttgttttgtgaaaataggcaaatttgaaagagattttggcaaaatggcaacggaaaaatgagtaaaatgaaataaaacgaatgacaaacaaaagaaaagtaaaaatggaggaaaacgggcggaaaagggagcgatacggtggaaaaagaacaaagagggatactgtacagggaagaacaaagaggaatactgtacagaggaagaggaggaggagggaggggtacggtagaggagggacttacaacaggacaaggacaggggaggacactgttggagagtacggtaaagaaaaagagcgaatagcggcctacggtaagtggcacgacgaattggtggcaaaataaaacggaaatcgctgatgaagcagcggcggaagaagcagcagaagtgtgtgtccgtccgccctctttccttcacattcgccgcgcatcccgtgcggagtgtcttcatctcgtccaacgca

SEQ ID NO: 2113 - DNA, 3233 bp, Heterodera glycines
  unsure (1)..(3233): unsure at all n locations
ctgaatgaattggcccccttttcgtcggtcggcggtttcttcaaaggcactttctttcgacagatgcggcgacatcaaagagagttcgcttcacttcgaaaaagccgtcaaatgcgggagaacaaaggtcaaaaaacgaagccgaatttggacaaatggaagtgaaaagtgagaaagtgaagaaagccatgaaaaggcaaagaatggagaaaagaaattggcaagagatatgctcaaatggagaaaattaattaaaaaataataattaaaacaaataaataaataaacatttctcatttccctttttgggccttttatccgcccaatttaatgagacaataaaagcgctttgttcgttctgctaattcggacaataatccttccgcactaaattagcgattcatcgtattttgtcatttcattgaagccgaaattgccaaaatgccattaaaatttgccaaaattttctgctgtgccgtttccttttttcctttttaccttcaaattttattggggcaaagaatcgccgaaagaattcgcattgaattcgcatggaatgaaaaggactcaaaaagacaagtccctaattcaaatttgaagtttgccctgccattcccttatgtctgttgtcctttttaggctcgtgatgactttgcccgtgccgtggacggtccgctgggaatggcacaaatgcgccaagtgcgtgccgacctcgccgaactccgccgacgattgatggccaattgggagcgaaatgaacagctcggaccgagcgcattgcttgccgaagcgatggtccaaattgggaagcgaataatcggcaaattaattaattggccttaggcaatggcacggcgaagggaagcgaacggagcggagagaatggggaaagggcgcgaaagcatcgcaaagcttaatggggcaattgacgactatttatttcaggtggagacgaacgaaaatagggaaaagcatatgggaaaagaaagaggagaaaatggaaaagcatagggaaaaagaaaaagaggaaaaagaaacaaacggggagagggaaaaaaggaggaaaagggaaaaaatattgaaaaaaggaaaaagaaaaccatatggagaaaaagaaaagggataaaagaaaggaaaaagcatagggaaaaagaaaaataaaaaggagggaaaaaacattgtagaaaagaatttcatttcaaagagtgacattttactgagtgccaatcaaacgagcgaaatgctcagagagatggaagaggagcgcgaagaggacgaagcgcaagagattgtgctggtggaggagggcacggctcggagacggaggcgccgcaggcaggcacagacggggcacgactttccgcacaaccaatgggatccggcacgaccggtgtcattcgtattcgatgccaaaatcggtgggtaaaccgatgaaaaatgcaaaacggaaacaaattaagaaaaatgaatcaattaattttaattgggggaaatactttaaaatgtttaatgtgccaaaatgaaagggaattcggcacgaaaagccgtgagacaagctgttcgcttttggactgaccacacttgcctaactttcgtcgaaaacggcggcggttttccgcgcgtgcgcattttttccggcggcggatgcttcaggcggagaaactaattaatttcaaaaaattttttttataaattttatcaaatggaattattaaaattcttttcaatttcagtcaagtgggaaaagtttttcaccaaagagagcaagtaagtgagcacaaaaagtatttattgtttaaagttttaattcgcttgaaaggttatttcgctgggccgtggctgtgagcaggtgattttgtggaagaaacgaaacacaatttgctgctgatcagagcagtgatcaagcccttgtgcctgattctgagctgatcaaaggattgatcaatgctttatctctgaattttatttttctcacgcgcatttctgatcagcgatcaattcacctgtctcatttctttggtcactttcattgtcttttagtttggaattgcggctcatgagcttggccatacgcttggctttttccatggccaagcccgtgccgaccgtgaccaatttgtgaacattgtctattccaacttaaggcaaatttggctgaaaattcctcggtcactttttcacatttaaagcccacaaatggcgggacaattcgtcaaacaaagcaacgaaaacaacgacaattttggcgtaaaatatgactacggaagtgtaagagggaaaagcgaattcaaagcgaatttaattgatcagataatgcattattcggacacggactcggccacgagtcgagtgacaatgttggccaaggaagtgagtgaaagaggcggacattttcataatggatgagtcatgcccatttgtcactcgcctttccctaattaccctaattaccctcattaattattaattaattacctcccgccttccaattttggccgcctaccaacacacaatgggcaacaatgtgtcgccctcttttctcgacgttttggaggtttggcagagtggccaaatgtgcaaaatgaccaattttcagatgaatctctactacaagtgcacggacaaatgcaaactaagcggggcccagtgccaaaatggcggatatcggtgggaaaagtgccaaattaatgccgaaatacccctctcctcgcccgttccgcttgacagtcatccgcgcaactgttccaagtgcttgtgcccctccggcttcggtgcctttgactgttccggccgcggaccacctgaaaatggcgcaccagcggactgcggagagaccgtacaggtgaaggagaaaccatcggcaaaaggcaagggggtggctgggcaacatttaggcccatgaaggcgaactgcaggaattgagtggcaatgtcagtgccacgttggccagcggactgtccgaacggcacgccatttgccattggcacatcaaagtcggccttctctctttcatccgtttatgcactttgtcttccgcaggcacctcccggcaaaagagttcaaattcggctcaagtcgctgttcggtgcctgctccgacggctgtttttacggcgggacggagttgaaaacgcaagatttgctgcgcgtgggcgcaaggcaaattggcgcgaaattcaaaaggcaatcgaatgcctttgccttnccctttttaggatttgctgtcgctcggac

SEQ ID NO: 2114 - DNA, 651 bp, Heterodera glycines
  unsure (1)..(651): unsure at all n locations
ttcactgatttgacaatgcttaaaaggatttcttgtcttctttgatccataaatgggattgattatcattttatcactctttttgncattttcgcaggttttcctcatcctttttttaatattttatatttttttgcttcttttccttcttttcctccaatcctttttcgttcatttttctgatcgatcgttccttttcatcgcccgtccaacaacagatcagatccggatctgactgactgacctttgcttaaggaaatgccctggagcaattaatgcctttcgaattcggctgaaatttcccctcaattggtcactcaaagagcgcgtggttggagaggagaaaaagcagaaaaaagcgaaccaaaataagcgaaatggaaaagggaaaagcgaccaaagaaaagccggggggggggagggccatttgctgctggtgacccccccccccgccgcccccgtctcttttgacaattaaatttttcatttgaaatattttattttgatcatttattttattttttacattgtagatgctaattactatttatagaaggccaaaaggggcggctttgattcatttgatcgcccccccccttcgaattgggtgggctttgtttggatttgcgtgttgtcttggatgaacgtgga

SEQ ID NO: 2115 - DNA, 1292 bp, Heterodera glycines
gtcataaaatgttaggtgcagaacaacactcctcctccccccccccctctctcgtcgtttatgcgcagttccgggagtgaatgcctctgcggggatcaaagtgtccccaaaaagtgctcttcgcattgtttcgctagcgatttccccgcgtcattttctgctttttctgcaaagcattgcgaggcgtttgtcccgtcgagtgtttctcatcagctaatttttgttgaatatcggcaaaagcaaagcaaaagacgcaccattcatttggcgaggacttttcaccgctaattgaatcatccgccaaatcccgcgcattaattagcatgccacgggcactgcccattttactcattttgctcagccaaacaaagcgatcattcattcatccatcaaagggaaataaagcgaataatttatgtacatacctttccaatgcaaaacaattgttcaaatccgtcccccgcccctccatttttaaattaaatttttgttaattgttttgtcagggcctccaattaattaatgcggacattgccacgccctccgctccgccgttttctcccgccctccccgctttttgtgctgctgctccatttgctacttgctgctgttgttcggtcccaggacagctgctacgtgaccgattcggggcacacgtgctgtgacaaggcactcggtgagtcatccattgccattggcacggaaagtgacgacaaatcactctttggcggcacactatcctaaacaatcgcagaatcggccatgaaatcggcgatgagcggcaaagatttgttgtcctcggccgatcggatccaaaagtcggcggagggagcaatcggcggaaaattcgaaaccgtaagaaaaaacgaaacaaaacattgaaacaaaggcatcaaaacgatactttccatgcatccgccaaaaaaggtagtggcatttgacgactttgcgcacaaatcgcacttcaaagacggcaaatcgtgcaaagtggagaaggacggacaagtggcattggcatggcaaccgtaagaaaacaaatggcgaggcatacggtagaaaaaggcaattggactgaccaatcactacagtacctttactaatcattaaccgctctgaacaccgttcatgtccttttgttaagtcccaagcgcttttcaaggtaatagtttgctttccccccccattttttgaaaaaaataaaaaaaattaaaagtcgtcgaaaaggcctttcctgaggttttccgggtctctgatcacgaatccgacagttttgaaaaaatgggggggggggg

SEQ ID NO: 2116 - DNA, 6562 bp, Heterodera glycines
  unsure (1)..(6562): unsure at all n locations
gggggggaagcacactgtacccttcaaaatcgttttgtaaaagtcagtcatggacaaacattaggaaaggaggcctcaaattattattatataattttcactagttgaatttcgttctaatttgaattttgtaaacgagcaataaaaactgttttcgttcttcgcataaactgcctttcatatgcactttaaattttatgtaaaatttccatttttcaattgacatttatttccttttccagtaaagtgcaaaaataatggaagatttgtaaatgaaaagaattttattgtgtcactaaaaccaaaacacagaaaatgcaatttgttcaaagtatttttgggttccaaaagaattcttttttaaataggtaattggaccttccgctgttagttgtattaattgtaaataacatacaaaagcatattaattacagaataaaatcacaaagaataaagaaacaatattaaatttttcgtttgtacggagatcgcaaaaaaagaaaagaaaatgttttgacaatgccaaaatccgagattcctttcaaccggacacgaccacaaataaatggaaaatgcatgttcaggcacttcgatagttaaattgggaagaggtggacaaaaaggagttctcgacatctccaagatacgatcattcgaacgaaatcacaagaaaatgggtgaaagaaaggagagaccgaaaggatggaaataaacagtcggtcgtccgtccgccttcagtcacccgtccgattgctcggcccattctccgcttctcctctcctctgctccttttccggcgaacccttcgcattgtcctctctgctgggcccattttcagattcttcttcttcgtcatcgctaaattaaaaaaataataattataaaattctgtttcctctgtgtaattaattatttgacctgtcgtcgtagtccaccaaaggtcgtttcaccaatggtccatccgccacagcagaagcattttcggacgatcggccgacggacgtggaaggaagctgaagaaagaagtcacaacaaaatgccaaaattattgaagccaaacattttggtcatttgtatgtgctgcgcttggactgccgccatcgccgtttaccaatgggacagcggcggacgatggctctttgctgctcattcgaatcactattttggatatcctgctgacggacactgcgccgcccgctggcggagtgatattcccaccgaaaacactggcaattccgtcctcatcattagctgaaacacaatgtaaaagtacgaggggaagagtgccattcagagatgacctttccgctttctgagaagagacgggaagagggggtcgacgcccgactttcgacactgagcggtcggctaaacagagtaaaaaaatgaaatgccagggccaactcgacacaccatttcgtcatcatcgtccttgctgaagaacaattcctcgtcgtcatgttctctctctttgcgccattgggcattcggcggagtcatggccaatggcgtcgtctggccattttctttcactttttcgccctcgtcagatttgttggccaaatgagcctcccaaatgtcgtgcattttgacaaaagtttgcacatagtccactttgctgaatgtgttctcccaatggttgttgattaggtactcaatgagcggataaatccgttccttaaaaggaattatttaaacaattaaaaaatcaacaatatgccgatgaccctttttataaattcgaaaagttcaatgagagacgaattgagtaaattgtaacgctgcccattggcgacgaaacactgcacaatttggtccaaagtgcccttgtcacaaatgtgtcgaatgtacgtgtcgtccttcaaaccgatgatccgtcttatcaatcgcaacgcacctcaaagagaaacgccaatgtttttcaagaaacttgacccaagcaaaaaaaataaaatacataatgccaagaagtgatgcttgctttgcaaattcataagcacagaatggagcaaattcttctggatggtacaagttcgcatattgaagccatgatgttccacaaaaaagcaaagcaaatcgatgatttgactggtcctattcgctatataataagtgtctgaaaattgaaaatgaattaaattccattggatttccattcaaataaaagaaaatcaccgcaaatcagtcgcccgtccttcacattgtcaacaatcggcgcataaatcgtttgaattgcgcgtttgtaaaacatttgaagaaattcgcctttctctttctaatttgaatggattaattttgcgctccaaattcattacaaaccgccaaaacgccctcggggtccaacagaacgcgcagaacttgagacatttggctgccagcagtgaactcggcatcgcggtcactgagcatgtgtttgacgagtttgttgatgagcagagaatcctttgggaaaatggaaaagcataagcattaacccacaattcaaaagcactggtacatttctcccctcctgtcgcgactgtttcatgagaaaatcacggaacaattgcgggttgaagtcgacgacgatggtcagcaattcgacagtggctgtccgagtggagggcaacgggctgctaatgcacgggtcgatcgttccgagaacattgttatcgattagtgtctaaacaaagaattcaaatttttgaagatttatttatcgcactttaaagaattggtccttcccctgcggcccactcggctgaagcgaatgggcaaaggaacaaaactccttcagaaagttagtgaggtctctctgcctttcggggttaattgacgagttgcgcaattcctcaaaaagttgctgcagcaaatccttgtcattcttaaaaatgtgctttgcaattcagaaatttagaaggcatcccaaataaacaattcactgaccaaaagtgagttgacaatttcggctctaatgaaaaacaaatggctgtttaacaccgtcagaagattctcctcaaaaattgaaggggccggcaaacaaacatcctaattaaaatgggaaaattaagaaatcttatcaaagatgagaagaaagaatgcacctggacgtattggagtcgaaaagtttgatggattttggcttttagttcttcagaactgatgggcagaacttctctgaactttgaacgttcccaaaggaattcacgatgtttttttggctcatcgaatgatgcgtcatattcgagcattccgacaatgcccctgaaattgaataaatgtgacgacgaaagcaaagagtttagaaatgaaaggccacccacttgaaatatttgtcttcaataagttcattcaaaatggaattgttattcagaagaaacaaattcttagcgatggaagccaattggttgagcatttttgtgttctccaaatcttcacagagttcgaacaattcgcaaagtttgttaatgtaactgttgaacaaccaaatttaaaaaaattgtaattcattcatttcgcttgcccattctgcagaattgcggtggccatcttctcgcgcaaactgttcgcgaacatgttgttcgacaaggcctgctccaaatcgcccaagttttgcaaggtgcacggcggtatgctgacgcttgacgtagagcacgcatttgaaatgcccgaagtgctaattgtaagacctcaaactgataacctgccaaattctcgaatttacctgctgtcgctcggctcattctcctcgctctcattctcttcctaaaaaatcagaaatacccaaattggcattaagcattcattacccacctcagcgtcggtctcggggtctttgccctgtattctgcatatttctcccacagctcagtgcagccggccttttcttggaagctgagtgccaagtcgcaagtgtccgactccgaccacacaatcaaagtgccttgctgcttttggtacactgtgtccagttgtatttttgactccaacacattcttttctaaataaactcaaatgcaatattacgttttttccgaattgtctataaaaagcataccatttgtttccaaacggacaattatgcaccaagtgttgttgttttccaacgattgcaaacacgcgacgtgtccagtccctcggtcatcccacgacctttggtcgcaaagcacgtaaagtttcactcggttgtgcgacccctataccaggctcagttattaagcattgcatttaaatgatttgagaattacccgctcaaattccactttctccaatgttgagcttggccgtgcttcgggtggtattaaattgtaccctcgcatttcctcctcttcgtcgttgcttggcactgttgagtctgctctccccacttgttcttccgagtcttcgctgactgagtcggcacttgcattggcaatggtctcacgttttgtgctgttttttaagtgctgctgatcaagcaataaatttgctgaggtcgtcgttgtaactgctgattctgatgccatttccatagcagtttttcgaatatctgtaatttgtttttcatatattatgggttatttggaaatagtttaattatcaaaaaactatcataaaaagttatggtccaaaaaatcccggcgactcttcgacaagcgaccttttggggtgcatcgcaagaaccgaccttcgatatttaaaaaaaaatttttaatttagttttttgtcattttgttgacttgtagtagaattgaatgaagtaagacactaacgctaataaaaaaaacaaactttttatgtgcatagattatttctagttgaaattgacccggtgcgggattggatcccgcaagggattttgcgggattccagtccgcagattgcgggatttatccctgctggatccctattttgctggtttttttgaaattgaaaatgaacccacaaaaataagcacttcgaattcatatttcagggaggcgaattaaatttgtgctaataatgcagcggatttttggatcttcaaaaccaaaagctccgccacccaatctcgctgatgcgattacaactattgatgctcgtggcgaatctgtcgaaaagaaaatagagaaattggacggtgaattggtgaaattgcgtgttcaactcaaaaagatgagagatggaccagcaaagaatatggtcacgcaaaaggcattcaggtaaaatctgagcaaaagtttatgagagtcattttcattttagaattatgaagcagaaaaggatctttgagaatcaacgcgaccaactcgccgcacaatcgtttaatatggagcagagcaatttcgcaattcagggcatgaaagacaaccaagtaagttacctagatgcaatttcaaaactccgttttgaaaactaggactacctattaaaaaaaagggaaaacatcggtaccttttcaatgcaacatttagtatttttattctttttttatttcaccggtttttaggtgaccgtcgccgcaatgaaagagggtctcaaatcgatgaaacaggaatacaaaaagctggacattgacaagatcgatactcttcaggatgaaatggaagaaatgctcgagatgaattctgagattcaggatgcactttctcgccaatatgacactcccgacgtgagtttttttaaaatttataaatggagaaaaatatttctaaaagatttttcttggctttaattttttataaattataaaacaaaaaataacaaaagacatgtgaggaggggcttggcaggaatacttgacagtttcaacaggcatcggaaaaattgacaaaattttggtctctttccctcttaaacacacacattcaatacggacgggggtaaacgtcggttgtactccttgcaaagtagggataattctaaagtttttatattgaagatcgatgaagctgaacttgaggctgagcttgaggcattgggcgacgacctgcaattcgatgcggacacaagttatcttgacgaagcaatcagtgcccccagcgtgccgactcgtgacccggccagcgcttctgtgactatctttatttatttattttcatttgcttttttctcttcaattttcagactgtcactgatcagggagttgccgttgatgaatttggtcttccgaaaattccagcgcagtgaatggaggaaatttatcttcctgtctataattttaattgaataattttggttttattataaaaattcctcttgactttgtataacttgacttggactttttgtattagatataattcaattttatttttggaatttctcgcaaaatttaaattatttgagccttaagagtgaagtcttaagagaaggttgtcttgttaacatttgttttttgctgatggccccaaaaattggtttatgtgctgatgggtttggcatcacagaagcgcttgccattcatatgctacgttcaacttgtttctttgataacagtcatattngaattgtgagtttagcatttgcatttcttccattgttttttattatgngaatttaagaattccgaccaagaggagccaattgttgcgatgccaccgtcgggatttgaaagtgccgactt

SEQ ID NO: 2117 - DNA, 5891 bp, Heterodera glycines
gcgtggtggctacatgcgactggtccacggcaaggacctgacccccgacgttcattatctgcacgagaaggatgattatcactttgtgaatgctgtgcacaagtacattgtgcgacatccggaacttccgtgggactcgccggagtttaacccatcagcaaacattcaacaaaacatcgcagaattccgggaaatctttgagcgcgaagttttcgacgaaaattatgagctaaagacaagagaggagaagaatgagctgatagagctggtcaagggatttcgattctatttcgcggacgagcttggacgttttatgctaaggattttcagcgacaaaatatcacacatcactttgacggatcagctggcctacgtgttgggctacgaacagcagcaagaaattcataacgaagaccaagccaagtacgctgttgacttggccggtggtgtcagtcacctgtgcatctacttaaacagcggaataatcgagagcatgatttttggcaactccttcgccaatctcctccaagtgattgcggtcgagggtacgtcgggcagtgtggtcgagaaggactttaagtcaccgttgttccacaaaattgtggctagagaggtggacgtactggacgttgagattcgtacgctcacaggacggtagtgttgtgattttcaaaatattttccctacttttttttttggtttaagagaggtgccttttgaatttggccaagttgtgctgactcttcagtttaaaaaagtcgtaactttctgatacaatggtccgagttatattcaacgggtcgaacttgcggttggagaattatcatcagcagggtggaagcatttcgtactttgagggagctccgaccttccagcgtggctatggctacttccttggaattccacggcagaagggagcgggggtgggagccgtactgcggaacctttggcgttatctccgccctatgatcgctgcggcgaagccctacgcaaccaacatagcagctgaagttggcaaagaggggcttgagcggggcgcgcgagtgcttgctgaggcagccaaaggcggcgacgtaaaggaagcgctactcgcagagggaagagaaggcatgaaaaccttgctggacaaggcgtccgcatcgctacagaagggcagagggagaagaaggaggaagagagggacgaaagccgagatcattttaaaacccacagacattgttggacaaactgttccccagagagctctgttgaaaaagaaaagatttgattcccttggctattattaatcctcatgttgtataaaaaagttgatgttgcgagtgcagaggtggtcaatagcggattggacttcttcagtacgccgccaacaaactgtgcggtgtccaactccagctatcgggagtacttgacgctgaacccgatcagctcaaggcctttccattttaaggcaaatattgggcaatgtataactcttatcagtgtttgttcagattcatccgatcaccagctacatagacctcagcaaagtgtttgtgtgcacggaattcaagctcaagaaaatcgcagaagacggagtggtagttgacgtaccagccaacgcggctgttggccttatacaaatgcccggtgcaactttcatccgcaatctgaaggtgcacatcaaccagcgtgaggtgtacgactccaaccagctgtacagctacaaggtgtacctggacaccgagctcagttaccctgcggcggcaaaggatgcctactttggcgtggcgggctattttcgagacagtgatccgacaaaagtgaacgaaaaacggaaaaaagcggtggaggagagcaagagcttccaaacgataagcaagctgagtgccgacatattcaaccaggacttgtacatgatcagcaacgtcgagattgacattgagctcgcactgcagtcggacgactttatggtccaccaggacgctgcgaataaggacaagtacacgcttgaaattgtcgactgtaggctgatcgtgaagactgtcgatttgatggacgggctgagtcttgacattgccaggaagttggacactgaacccgccagatacggtatccggaagtcgttcatgaaatcgctctttgtcactggcggtcgctatgacttctctgccaacctattcacggaggaggtgccacgaagagttgtcattggactggtgtccaatcagaattacattggccataatcagaagaatcccttctattttaatcaccacaacgtgagtggcaaatggcaactgcttgtgaatcagattattcaggtgcgggacattgagcttacggcctctggcaggacatatccccagtacccgtacaacctggactacaagaacaacaggtacgcaagggcatatcacgatgcccaagagcacctcggcatggcgtgcacaacggagagcaacggaatcagctacagcatgttcaagactgcctattgcctctatgtcttccaaatgaccaacgcgcaggaggactcgccaggatttgagctgatcaaagagggctgtactgcagtgaacatccgattcactgaagcagtacccaacgagggagttacattgattgcgtacggagaggcagacgggctcattcttattgatcgtaaccgttcgatcactagtgacctcacagtatgagtcagaattattcctctgaaaacattctgatggacacgcctccgagggacgggatagtgatgtgcttccccgatgttattgagaagtcgccaatgaactttctcttctgtcttgtgtatctgttcggtgcggcaggggcggcaaccgtaggcacctatttattcctgcgagagagaagaattcgtaatggacaacagattcatcgacagacttctctttgagaatcctgcgacgaaaaggtacttcagcggcacatatcccgcagatgggttgccaaggtgttcaagatttccgtgcagtctgattgttaacctggtacgcttattttttgcttcattcgctcatcgtatttccattcaggaccctgcaggtatgccgggaactcattggtgtgcgatatgggcacagtctcctgctgttgcctacttctttgactcttatggagagatgcctatcagcttgatcaaaaaatatttatccgataattttaaaaagatttactataataagaggcggtttcaatcggtgttgtccaatgtttgtggtcactatgtaattactttcgtttattttatgtccgtcggattgggtttcgaaaatattatgcaaattttgaatcgttcaaataaccctgatggatttgtttatcggtttgtaacaaagagcatagaataaatattaacgaaattagtcttcatcagatgtgtcatcatcatcaaaggcatggaaacagaaaaaagtaaaggcccaattccgaataaattcagcaaatccgtttagtccatcatatttttcataatattcgttgaccactttttagctcgtgccgtcctcttaccttaaaaacccttcacctaaaatagcaataaaatatgaaacatattttccattaacctcaatacagtcttcagcatcgaaaatgtagagtcgattcaacgatgtcagcgtgcgaatcatcatacatccgcttacacgatagtcacgatggctactgtatgctggagttagtgttgtaaaacgaaagaaacatacccaaggtttggtagtggcgtaatacagccaaattcacgagcaacttcctcaaggattggcacacattcgatgagtcggaattcggtgttggatgtgacggtcatttttttcaataaaaatcgtaaaataagattgaggaaaattaaagtatgaaatatttgtacagtaaacagtacgcgaaataattgaacatttcaaagcactttatgaatcaacactgaagaaacacatgacattgttacggaggaagttatagaattcatcaattcccttttctttgtcgaagtagatagtctcaacgcttaggacgtatccaaactgcttgacaattcccttgaactcaatttggtctccttcttcgctgatgtagatgaaacgcggcttgtcctggtgctcgaaaacgtaacgcttctgctcctccgtttgatggttcatccaaagacaggctttcaatcattgtttgttcatcaatcggcgtagtcaaattgttgaaattcatagttgatttggctaaacagcattgtaaaagacagaaacagaaaatattcatgttaataaataatgaaagaagataagaatgattttgaaaaaagggtaggattaaggatagaaacaaaaaaaacgacgccaagccacttttcccgccaaattttgaatttgaatctaatgcgaaaggttttcgtctcaataaattatggctttatgtatatattgtggcgttttgtcttgttttgcgtattttcaaagttttttcaccagactacagtacccctcgcagtgatgacgtcatcatctttgcagcatatagtggacatttatcctttttctggcaactggtctcatggcagagtggtagtgtgttgggtttggtggcagaccaaaagttcgagtccactagcctgcggattatttattgcgaattttcaccggactaccgtacccctcgcagtgatgacgtcatcatctttgctgcatatagttgataattatcctttttctggcaagtggtttcgtggcagagtggtagtgtgttgggttggtggcagaccaaaagttcgagtccacttgcctgcggctaatttattgcgaattttcaccggactaccgtacccctcgcagtggtgacgttatcatctttgcagcatatagtggacaattatccttattctggcaactggtcttgtggcagagtggtagtgtgttgggtggcaaagcaaaagttcgaggccgcttgactgtggcagaatttttcgaataaaaattttaaaaaattcaaaattaaaaattataaattataaataattttcagaaaaaattttacaaaaaaagtcgcgcacccctgcaataggtttaggcttgcagaaaaaaagtcgcgcacccctgcaataggtttgggtttgcaaaaaaagtcgcgcaataggttttggcttcagtactgaaaattttggcgctcagatggcccgcgctcacccggcggcgctcaaatggctggcgctcagttggccgtgcacccctcccataggtatgggaggctaccgtaatccggtggaatttactgccctaactactcgttgtctaaatgactatggtagattaatgttatacggtagatgcgtgcctacacaatactccaggaatgcgatacttacggtagatgcatcttacgcagaaccctatgaacaactacggtatgcgtacgatgcctacggcagatgcatcgtacgcagaatcccattacggtatcatacatgcgtacgatgcctacggcagatgcatcgtacgcagaatcccattacggtagcatacatgcgtacaaagcctacggccgatgcatcgtacgcagaatcccattacggtatcatacatgcgaacgatgcctacggcagatgaatcttacgcagaatcccattacggtatatacatgcctacaatgcttacggcagatgaatcttacgcagaatccagatattcaacgctccagaaatgcgtacgtccatcaacacatacgtattcttgatgcctacgttgtctacatgactatggtagattaatgttatacggtagatgtgtgcgtacgcatccacatactcacgatatgcaatgctccagaaatgcgtacgtccatcaacacatacgtattcatgatgcctacgttgtctacatgactatggtagattaatgtta

SEQ ID NO: 2118 - DNA, 910 bp, Heterodera glycines
cgatttttacttgaccatttttttctaggcttagatcacatgcgattttcggcactctgataattttagcgctcataatgggatgtataaaggcgattgtagaaggaattggaagcgctaaaattgtttgagaagctttttgagcgtaattacgatttttacttagaccatttttttctaggcttagatcacatgcgattttcggcactctgataattttagcgctcataatgggatgtataaaggcgattgtagaaggaattggaagcgttaaaattgtttgagaagctttttgagcgtaattacgatttttacttgaccatttttttctaggcttagatcacatgcgattttcggcactctgataattttagcgctcataatgggatgtataaaggcgattgtagaaggaattggaagcgctaaaattgtttgagaagctttttgagcgtaattacgatttttacttagaccatttttttctaggcttagatcacatgcgattttcggcactctgataattttagcgctcataatgggatgtataaaggcgattgtagaaggaattggaagcgctaaaattgtttgagaagctttttgagcgtaattacgatttttacttagaccatttttttctaggcttagatcacatgcgattttcggcactctgataattttagcgctcataatgggatgtataaaggcgattgtagaaggaattggaagcgttaaaattgtttgagaagctttttgagcgtaattacgatttttacttacaccattttttgctaggcttagatcacatgcgattttcggcactctgataattttagcgttcataatgggatgtataaaggcgattgtagaaggaattggatgcgctaaaattgttgagaagcatttgagcgta

SEQ ID NO: 2119 - DNA, 1951 bp, Heterodera glycines
agttctttttaaatgcagccttccacccattccataccaacaaagattagaataccttcaactgccaacacttgaaagcaggcgaaagctttctgatctgttcatggctcataaaataatttatggccgaacagatcttaatccctttgaaatattcaaaccttctgaacgctttaacattcccttttatagacttaactcgaaatataaattaggcaaaaaatttataccttttgcggggcgggtaacaaaaatttggaaccaactcgataaaaagcttattgacataaactcattaaatcaatttaaaaataaaattaaaactatttcatttctataagattgaccggaaaaatagaagtcgaattattaattcattaaacaaaaagtgatttggtcattatttttatttatttttttttattgatttcacattatattttattttttggcggcgatctcgtttttaattgtttatgcgctatcttgaggacattttaattaatgttttgtcctcaatgtaagcggatttttcccttttgaggactttttctttattgacaataaattaaaaaaaaaaataaagcaactttttttagcattttttgttttcaaccccacatttttattacccacccaaaaaagaatttttctaaaagaatttttgtaaaaattatgattaccgcaacaggcgcctgcgactccacgtcgtcaggccccgtccgcgaccggcgataccgacaccacaaacccactgaaaagttaaattttaccataaaatatttaaccaaaatagtaaattttcttaccaccaagtgcggcggcggcgatcaccaccgtcaccaacagcaccaatacgggccattgccatgtccatggctcttctggggcgggggtggtgggcgtggcgacggtggtggaggccgtggcgacggtggtggaggccgtggcgacggtggtggagggcgtggcgacggtggtggagggcgtagcggtggatgtgcggcacggcggcgggcacgtacgcccgaagatctcattcttaattcaaaatcactgtttacccaaagctttaaagaaaaaatataactgatattttctgttttgcctatgttaccccttcaagaagggtgcactacgtccccccccccccgcatcgttccccccccccgagaaatttctttaaaaaatactaaattagaaatttttgaataaaaatcttagaaagttttttcataggaaaattctaaacaaaaatttttgtggttaaactaagatttttaaaaaattttccaaaaaagcgctgaattttctcaaaaaatttttttttcatagaatttccttattaaaaactttctaagcttttttcttgaaaattttctaagttaataaaaaaaattttttaaaatttctcggggaggtaaccggcggggaggaaaagagctgctcccttcaagaattccttcacttgaatttgaaaaaatgaatttcaaaaaacccaaaacacacgagattttttttttgttgcatttttatgcgttttgttaacccagcaaatgatcagatgcgcctattgactttttttaatgtggacaaaagagatttttttttcaaacaaaatccattaattaccgcctctgcatcatccaccgccgcatatgacacgtcgaacgcactaaacccagcaaacattgacaaaatgattatgatgattttctgaaaatacgataaaactatgcaattactgtatcgcagaattggttatttcatttatctaaatttttaaaaatgtaacaccaatgatgacaaaaattagggttctagtcagttttatgcgtcccatgccatattatgcgtcccatcaaatattatgcgtcccatgaatgaatccttagtttcttatgccataacttttttcttacttggtatcaatcgatatcttaattactat

SEQ ID NO: 2120 - DNA, 4226 bp, Heterodera glycines
cccctgccccccgctaaaaaatcatacatttcacccatttttttaaacaacgaatgtgatccatgggcaggggtccaaccaccatccgttcaatccccattgttttttgtcccgggcggcacgtgatcaaaaccagaccctggaagaccattaaattaatttaattcgcccgaaggcaagcggacccgaaacgaggggccgtagtaaaccataaagtactaccaaccggccattgatacagttgtcagaaaaacgataattgtcacctatgcaccattcttaattggatccattgagtgctatggtttgaacttttctacgagtcaaccttgctcgctatcacttggctatgtgctacgactatttagtgagttagccaactaagagtttaatcaaaaattaaaattaactttttaaaaagaaaaaatattttctataccccaccaaaccaaagcacaatctatctttttaatttccaacatatgaatttgaaatctccaaaaaaatcataattcgagaatgatagctgtaatcattcttcatattcattgcgatcagtctcgtgctcgacgtaaaaacctccaggataataatccggaattggccagcttccatcagaattcagttcagaaatgccgctggaagaacttgaacaaccaaagccgctgctactattcgttgattgcccattttgatcgacggccaaattgacagacggacttgtgatgttccaataggatgattttccattgtaagtcacggtaaatcgcccttcccggatcgcttgacgtagagtccgacaatcctgtcgaaggcggcacagcgcacgctgccgacattcatttgcgcttctgcggttctcacgcagcatttttcgcctctgcctttcttcttcttgagcaacttttttggcctgttgttgaagttttccttttcggcaatgtgtgcagcttttacacggcatttcgctggtcaacggcacttaagatgtttagggtttcaattaacggagagcgcttaaattgattaaaatttacaaactacaaaacataattctattcctaatttcgttatatccttaaataacctaaaggaaatcgatgccctttgccaaaaatcttgggatgttgcgttgtttcgatccgccgccctcccctagcatcgtgcactctgagatacagttgccgcaacttgctcagctcggatgattttttgatttggtttgatcggcagaggtgctccgaaatgatcgaggaaaggagggcggcgtaaatgactgggttaccattaaaaattgtttaattggactgataaaaactgatcagaaaatgcaattttgatgcttaatttgactgaaattattagaccattttatactcattacaatgttgtagtcgtctggctaattgccacatttttctaaatccaatttttcatttgcatatttattcgctatttttcgctgtcacaccttagcaatcgcaacaagttaattcctaagatggtaatcggcatggccagttggcaccggcaaactcgcaacattcatttaattatgtgtctgcctgacataattaattacttaattcaaatatttaaccggctcaaatgagtaagggagcagaacccttagctggaagcagaattccataattggcgatagccgaagcaggaggaggggggggggaggtggcagggtgttaagaaatggagaaggaaaaggaaaaatgaacatgaagatagcgatcagtctgacttatcgacgcgcagattcaacttcacaaattctccggcggctaatcggctgactcgcatgaatttgaattcaattacaaatccagctagcttacagcatttgcctagttcattttctaattttgcccggggcatctgacagttttagaggagggtaatgagagaaacggagtgatcgctatcattcttgttactaatgtgcaatttaaggccgacatgtaatcatatgctgactatagacgtgtacaatagggtatttaaggagaggccattcctgactaatttttgatttgctttatgctagattttgaccagaattaatcgtaaacttaaataatttaattccaactatgtattttgaaataatattttttaatttaattacagcgaatcccgactttcaaatgtctttaagcccttaccaaatgaaatctgcaaaacgaaaaaatcttaaaaatgatcaaagtttgcccgtttttgttcaagtcgacgacatttcatcatcggttgatcttggaaatgacgggataaatcctgaacaggtgggaaatgcgtgaatcgaatgcatgagaaaaagctgcttttctttacaataagctaaaaataattaattctgatttcctcagcattctaacacgaactcaatggagagtaactcgaaggaaatggaaatgcgtgaacatttggaggaaattgaaagccaaacgacaactcaaaataaatccgtttttgtgagccgttttcggcaggaattgaaaggtaattgacctatgaatcctttctgaaattacgtcagtttatagtttttgacatatttatatatttgagttttgattaagacgaagagtctacacttggaaccaaaagcatgaatttttaaaattattttagaataagaaaataataaaattctaaacagtataatttttaatacgcctttcaaaacaattgtcatttaggcattaattcattttaaccaaaataatttacctatcaatagttttttttgtatgtttttgaagtgtaaaacttttccgtttttagtattagaagaaacacatacaatttgaatggatacataagaagtaaaaatttgttactttatttctaggctattactgatcaaatatatttcccacagaatggcacatttacaagcagttttgtatttacggcacaataacatttgtgcgaaccttcccaacagcatttcgggttgattttgctcataaaagaatggcggcaattgcaatccgtgcaatgaacggtcaagattatggcaaggatggaaaagtttttatttgtgattggtggtcatggaaaaaggccaaaaagggaaaaggaaaaagtagagcaacaccgaaaggaattgtaaaattgaggattcggttaggggagggtgaagtgtttggttctcaaacaaaacccatgtaagaatatttaacattgaattcagagaaaattaaaaaagcgacctttgaatgctgatttatatttcggttcaaacacatttggcaattctatgctaatacatttgaagaatacgcattagttttaggcaataataatgttgaaaaaatataaaaacaattattttattttttttttgcaatttgtgatatattaaaatttttgcaaatcatctccctcataacgaattattatggcttcggttaaatgttttgctgttttttttaaagaaatattgtacggaaagacaaattcaaagcataattctgccatcagctccagagctgttatgaaaagaatggcattttaaacaaattaaaatttaactaattgttttagaaatttatttagctggtatgacaaaatcggatcaccgctgttttgaacccgttaatttcttctgtatataattttcattatttttatatttaccgttcaccaacagcagcgcctaattgttcttcttgtagaggatcttctacaccgcgttttaagcacatttggcaataatttgctgtagtttttgaaatatacaaaaaaagataattcgaaacagtgacatcctctgttacaaccccgcccatatactctttaacaaaatacacgtttaatattaattgtttagagattaattagctgatttaacaaaatctgagcaccgctgtcttgaacgcgttaatttcttttgtttacaatttcattattattttcatttattgttcaaacagcggcgtattcttagagtagaggagcttctagaccgttttaatgacatttggcaataatttactgtagtttttgaaatatacaaaaaaagataattcggaatatcagcgccatccttgctccaaccccccccccaaaaaaaaatccttcattaattcatttggctttatttcgttgctctttcgtcagtcgagattttatgaattgcctataagatgaaggtgcactgataaacaatcccttcaatgctaaacataaatttatccaaaaatttg

SEQ ID NO: 2121 - DNA, 1627 bp, Heterodera glycines
tgactatgatttacttacggtcatttaatttttctataaatgtagattaattattctataatgaatgctgccagatccgtagtttctgctctaatcggtcgaaaattttctgagattgattttgacaaaactggtatgatcacctcattgaagcttcaaagagctttgtcaaacggtactctacgaccgttcaacattgacgcatgccgtctgatcattttccaatttgatccaatgagacacggcttcgttggcattgagagatttgaatcgctttggaacgtatgtgttttttattgtttggcatataaaactattttctagtatattaacgactggaaatttgagtttgtggagttatcagagaatatgggctttctgacaatgcgtcaattacaaagtgccctgacaaaatatggtatatttattttaattcttttcggtattttcattaaggatttactttcaccacgcctttttttcacatactaatacatcgattcgaccggtcgcagactggtactattttaaattattaaagagactcactttttcttttcaggatgcttatattttgacgactttatatatttatgtattatgctccagcggattacaccgccgtttcgttatttagatagaaatgcgaacggtcgtattaatattcgtaaggttgaatagtttaactacactatatattttctattaatttcagattttgaagaatttgtaataatgatattatcagcgcaaatttagttgtttttttgctttaccagttttttcagaagtgatcgctcgcactcttactgttataaataggccctcgatatgccaaatcttcatttaattacttgaataaataaaattatttaatttattcatgaataataaactgttatttaatttgaatttattattattgtttaagcttggtgtacctatgtttttaattcatcatttagcataattcatattacagaattagaaatgagtggccttaatcggttccaaattgccgcatcaccgaagaagcgtttcgccgatgaatttccgccgtcgtgcaaagatttgcacgacgtaaaaaaattcaatgcgccgggaattttttacgtgcgcgcgaaagtgacggatttacagttcgctttgtataaggtatatttggaaaatatttacttcggctgattctcgaaattagttaattaatagtttaggcgtgccccaataaaatcaaggggttgccctgtaaaaaaaagcttgacgcagaaaaccattgcgttaattgcgggcaacgtgccaacttgtcgctccgcggcatgtatatgcgcttggacctccaggactgcaatgatcctgaaattaatcagcaagcgaccttgtttgctttttgtgccgagagttatctggatataaaggtagagcaattcgccgcaatggtgaacaacgatctgaaaagctcgaggctctgcttcaatcgaaaattggcccaaacgtttccgtcaaactaagccctaaaggttaggtttgcatttatcgatcacttagcactagctatatgacgatttaaatctttagggaaaaggggggcatggattgctcgactgggtcatttcggttataattgaag

SEQ ID NO: 2122 - DNA, 2015 bp, Heterodera glycines
  unsure (1)..(2015): unsure at all n locations
aaatgaaaaggatagaagaaccaagatcagcggctgtaanccaagggcagcacaaacttgaggcggagacgaatgctcaggatggtggaggcggcgaagctactatcaaacgggcgcgccgtaaaagttgggacttcaagacgatggcgcactttgataggggagaaacggaccatcaacagcaccaaaaagcaccactgtttgagcagaaacaacattatgtgcaccgggtggaacgttttgctctgcaacgccatgtaaccgaatttgtgttgaatgggcagcatgatgagccggaggaggcgctcttcctcgcctttaagcacatcatagatcgtgcaatacggaacgcagaaaactcgccgagtcatcagcagcagaagcagactagcggtggtgcagaattctaagtgaaggtcttttctttccacaacaggactaactgatccgattgtactccccattcgcccgcctgagcaaaacaccgccgaagtgttgatggctgagctggataagcttggtcaatcggacggtgatgaagacgtgcacggtggcggaatcagcaaacgcgcgctattgctcagcgagccgattgaagttgttgtcacatgcattgcacctccggttggtgcagcgccacgtttccatcattaccagcattggggctatgatgagcgccatatgattcgcgtaatgaatatggacgacaatttttgcctctttcatgcgctgattgccactcgagcctacacggaccatgagtttttgaagttgtcttcgcgacgggtggctgatgttgacgcggatgatggcacactggctgacgtgccagctgaaatttctcgacgagtgattaccagggcagatttttgtgcaggccacgaggcgctgaaccgacttttgtcaagtcgggaacgcatgaaagcagctgtgacggagctgatgcgcgatgcaggtattccaacaaatgaggacgcttatggtatggagcatatcgagcaaatccagcagctttgggtgggttttataacgcgaacagttatttactccatatgaaaaaacaggaccaaacttacgccggtttgtatcgaattgttctgttcgaggaccgctccgagaaattgctgcgcccaatttggaagggtccgatggggcgtcgcctctgtgtgtcgctgtttgtgtcagaaggacactattatggtatcaaaagaataaactgcttcttcaaacttggcagaaaatattgcctggactgcgaatgtgcctacaaccgtgacactaaacatacaatatcatgcaaaagtcgttgtcctcaatgtgctaaaggtcgtttgtaaattactttaatgcatttaatgattgttatcacatttttgtttcggttaagttggtccccagtatccttgcaatagggtacaaggtgtacaccttcactgccagcaatgtaaccgattctttttctcccaatcatgctttgacggtcatcggcgcagccagacctgcaatttgcttaaacgttgccctaaatgtagccgtaccttccagcaggatccgaaatgtccgcataaatgctacagtactttttgtgcacgctgcagggtatttttttgtcaatattagactgccagaaataaactaactgtcaattaggtataccatgagaaggacgccggttgttacattaagaagattgctgtgccaaaagagaaacaacagtatcgaatagtaatctgggacacggagaccagacttgaacaactcgaagaaatagatcatcaacgccacaaagtgaatcacctttctgcgagggtaacatgcactgaatgttgtgattctgtaaatcgggctcgtgtcaattgccaaatttgcacgaccgtgtatggaaccgtggatcggttaaaaaattggtcagtggtttgttaaattttccgcacaatactattcgaatgtccatcgtcatcattaataggagtgaagcagaaggacatgaaccaatcacagagttttggaatgga

SEQ ID NO: 2123 - DNA, 1706 bp, Heterodera glycines
gaaaaaaaaaatttgcgaaccctgtctatatattttgacacttactcttcgacacattttcgttctgatcagtctcatccttctgctaacagcttatttttatttgcgaataaataaataaataaaatatatttttaaatatttcgtccttctagtggcttagtattatttatctaattgtttctatctgtttttgtcgcctaattaaacctcaaagatataatttaaaattttggcattattatgctatatttcaacagttcataaaatctttaaaattaaaattaaagtcacattcttaaatttaacttctcattcatttataaattttggctttaactatatttaatccgatgatggaaatgaacctcaaattaaataatttatttaaaattaaaataagcatctctttttcaataatcaattatccgcttctgtcatctcgctgcccattttgatgaatgataaggctgcactgtaattaagacattgtttttgtccaatggaacaacaacattttgtgccctcgttgacggcaaaaggcattttggcaaaaaagtgccaattaattggtgccgaaatttgtcgcttgtgcacaacagcagccaactggacaacaccaaagtgcaaagatcggtgacccatgggtattggatgtaaatgatggcactgtactggggataaaatggccagacgaattcgctgacggaaagctgaaattggaataagtttattttgtagttaataaaaatttaaattaaaaatattttaaaatttaaatttacatacaaaaaacaccgccaaaagggcgtggccagcaaaagtaagcagcgagtaaattaacagtttccgctcaatgttatcagtttgttgtgacgtgacagtcgcttttcggtgccgtttataagcaattagtgtcaacaaattgactaagaaacataaaatcagaaaaatgatcgacgtcagagatttcaattgattagaataatccaaaaatgtccttgactgaaattaaatgtcatattcatttttactgggttaaatttttaaaaaagatatttattaaaagggcgcggatttttaagtttttacttattttttctgcggctttaactcgacgagaaatgcacgaaaaccacatttttttttcgaaattttgccttttaacgcccctattcgacccttaaaatccctattttgagtgttcgcccctagggggggcggaagtttgggcaccgggaagtttgggcaccagaaatttgggcaccgggaagtttgggcaccaacttaaagagttaaaaaataaaaatatttttaattgtctatgaattgcaaccatctaatttaaaagcatagaaaatttaatcaagttaggaaatagaaagttctttaacgaatattcattcgattaagcatgcttattttgctaaactcattacaattaattcaatatcaatgccatacatatgtattatttatagcttataacattacaaggctcgatctgtgcaaacacttaaaattttatgagcttaaacagaattagacgggactcttgatatttcggaccccactaagccggtattcaggtataagtccaaacagaaactagcacacgtgtaattatacgtttaaacaaccgtaacaattcgattacataataaaattgccaggttcccctacataaatgttttgattttgaagaa

SEQ ID NO: 2124 - DNA, 5632 bp, Heterodera glycines
attaaagaatacctattttagatactaaatgcataattaaacacccattcaaaaagaaaagttgaactaattaaaaggcaatttctgttaatttgtgcctaaagccagctaatgataaactgtccgaaaaagatttcatttattttacatattcatcacgcacgccccaccacagctggtgatgagtgtgctaaaaataaaaaatagtgtcaaggcaaaaggcaactaaagctcgaaatagagaaaaatgaaatgccaaacttaaccaaaaataagtttttgtgcttcatcacaccgacaaatggtaacacgccttacggacatttgcggatggacatttgcggacaatttcgggaaaaaataaaaaaaatttcgtaaattttttttttatttctgaaatattgaatggagaattgcaaaactaaataaaactttgttttttggggtttaaggcctaatatttagtttcactggtcaaaaagtgcaatgctggtcttccaagtgattaaagtagagttggtcccaatgatcgggggcaaatgtgaatgtcgcctctgttgcactcaaaaattttaaatttttttagggttaaaattttttttgtaattctttatttttttaacatttttatggcagtagaattcgggtgagagtgctatttttatctttagaaaaaattctgagaaatgcttaattgcgaacagaatttgcttgcaatttcaaaatgaacaggctattttataaatgctgaacgccagctgcactaaaatccgattcccgacatttttgggcatcagatttccgatttccttttctgaaaatttttgggcctcgaaatgctttccctgctggtgaacagtaaagcaaggattatcttggcttcttctccaaatcgaacaaataaggaaaagaaaattcagggctcgggtagcaaataccctagtaaaaaaatattaggccttaaaactagagatcggacctgtcgctttttttcggtttttttcggtttcggttttttaaccgaaaccgaccgaccgaaaattttttgagtttttcggtttttttcggtttcggtttttttcggttttataccgaaaccgaccgaccgaccctcttgtccggtctctacttaaaacccaaaaacaaagttttatttagttttgcagtctccattccatattttcagaaagtttttaaaaattttttacgaatttttatttttcccgaaattgtccgcaaatgtccgtccgcaaaatgtcccactgcgggtaacagataaattctagatgagcgttccaaatcagaactataatgatcagagaccggatttttaggcacgaaaatctttcaaatatacacgaaaaagtgaaaaaaggcaaaaaaaaaaaggcaccaaaaagttcaagctagaagcttcaaatcaagttaaaaacacgtttttcgtgcgaaagttagcaaagaaaaaaaggcataagcctcaaagcccggccctctaataatgatagtgatgaaataaggaaaaacttttaaaaatttttgcactttttaagaaggaatttttttaagtgccattcgttctcatataattaattaggcaggctttaacaaacaatggagaaaatgataatagtgccaatggggtgggaaaatctgtgtaacaatgaaaattgactttataaaataatattaaaagaaaaaaaaattatattacaactatcaatgtgacaataaattgctctttccggacaagaaatgcccaggcactccaatccccgaccccgccttttcaccccgaatgttttggtcagtcttccccaaccaatccccttaggggtcccagacattttgtcacattgggataatcggtgttgggacgttactcaaaatcaacaaaatggacgttagtcaaaaaaccatcaaatggaaaatttttgacagaaaattattcataacttcactcaaaataaccaaatttaacatcttgatataagtagatagccctccctatatgttcgctatagctacaattttcaaaaaaatttgttacctttcacaagtatggccagaggaactccaaaaaaccaagtttttttgaacatgtttggtcataatttcttaaaacttcacgaaactttttgatattttgcatgctaatagaaaataataggtctatcgaacgataaaaagaattaaaaatttgtttgcttcagagaaaagttatagcaaaaaaaaacaataacaacaacaacaacaacattcaattgatcgtttttgactaacgtcatactgtaacatcgacaaaccgacctacactaatcatcagggaacggatttatatgtgccaaaaaacacccaaatatgtgctaaaaacgcaacaaaaaaaaggcaaaaatatgtgtcagtaaattaataggaatttatccctttccaaattccggaattacagtatatttcataaaaatgtgcactaaattcttattttagggatatcaattaaaaatgtaatttacgctaatttgtaaggaaaattacttatcaaattcacaagaagccatgtaattggccatgtttccggcgcctttgtaacacctcaattaagtgtcctaatgagttcgtcaaatattacaaaaatgaaaattttcgtgcttaaaaatgtttaaaaaaaaaaagttagggacgaataaaagacaaaacaaaagacacaaaaaagtggtcaaatgataatgaagtcaattaattactaaagaaatgttaatttgaataaagtacaaatgtttagcaattggttaaaagtgaataaaaaaagaaagaaaatacaaaaatttacgaatgaaaagagaaaatgacaaatgaactcttttagaaataaacaaattatgcaaaaaaaaaatcattttgtttagcccaaaataatataataaaattaacaaaagtgggacaatatgaaaaacaaaaacaattagggagaaaataacacaatttaacgaaaaggtcactctcgaaaacgagcaaattggagaaggaattgaatgggaagcagaacagaagcagagaataacggaacacaataagataaagtgaacatttagaaacgaaaaaagcaattagggacaagtaaaatgattaacaaaagttaatgatttaccattaaaagcatttcaattaataataaatttacataagttaccaacatgttcttgtactaatcattactcaaaacgttcacttttagccttaataaatcgtgatcaaaatcaacgaattttgttgtctgtatctaatataactcatcaatcctttaataaagattggattttgtgaatagcattaggggacaaaattaaggtattaaatgaaattaaaaaagttatgactaatttttgttgaacaaaaggacgaataatattgggtaagcctggacctgtgttttctggacaaaaaccatgggaaatataggccccgggaaaaccaggtttccagaaactccaggcctagatcagagaaaatccaagcctggatccaggtacaagccgaattctaatcattcaaaatttttcaaaaaaattttaataccaatttttctgtcttttaaaacagattaatttttaattgatttgcatttttgaactaaataaatcgtttaaaaaagtgaaagaaataaatgctgaagctgtccgtcgtattcgcatcaaaaatatttgaaacaaaaaaattccatgtgggaaaaagtgcatattgtgagaaaaaaattaaattttaaattttaaattaaaatataaatatttaatttaaaaattattattcatttctcatttctttctaataacaaaaacatattattaaattgaaaatttacgattttattaaaattattagaaataataattaatatccattttttttttgcaattaaaatttccaaatagtaggaaattccggtgtccgattttttttgtatgcatttaataaagtgacgggtcagaggccgacgggggggggggggggagacggactcattaggaagaaactcacatcaattagcaatgtaaacatggccaaataagcaaacaaattaccaacacctcagtcaatccattccattccattcattcgttttattagtgtccaatttccaatttttaggcctccgtttgcccatttatttatttaccttcgaattggtgcgcaattattccttaacactcaatttgtcgtcatttcttttatttatggccaagcagtcaatcgatgctcttcacagcataaaattcataaataagtccgtctcatatttttaaaagttggcaaaaaactaaaaaattcctaattttaaacgacattttacaaaacctttttattttaggcataaaacaaaatgatattttcatggatttacacattttatctcatacataaatatcctataaagaaagttgtgtacatatttctgcgttaaaaagtgcaaagttcacatttcagagtggtaaaaaaagatcaaataaatttttaaaatttctatgcccaaaatcaatttacacctttttctcgaaaatgtaagttggattgaaaaaaatgaaatatattttttgcagtgaataaaattacgcaggaaatttttttaatgctttttatccacttttcgaaattttttttcttttccctatttttaaaagctggcaaaaaaaatttagaaaattcttatttgaacaactttttacaaaatcttttatttttaagcataaaacaacgtcagcatttacatttttttgttttccatatttggttctttcatggccatatttttgattttcgtccatgttttatgtccaaatttggtgatttttcgtccataaatattgcttatccaaatcatcaggctaaaaagatgaatttattaaaacatttttggttgtaaattggtaaattatgtaaacgtattttctgcgcagttcaaaaacattctgaaaatcacaaaaaatcttctgctattgatttctacaaatttttagtccacccaaattcttcccttacaaattatagtgatcgctcaagcatgaagctcgtcatattttatttaatctgtcttaattatctgttacttttttgtaaattggagccaattatttgtttcatgcaattctttgctaactgttttctgctggtcacaaaacaactctgattatatcgccacataaatatacaattccaatgacacaaaaatttttctaaaattattgcttttaaatttgcatatttcataagccgaaatttcattggtgtctttggacaattttgcaatacctgaagaagtgcatatattgcaaggcttcttccagggtttctatcggtaaaacccaaaactgggcatacgaattcaaattcaggtaaaaatttaaaaaaaagcaaaagaccgggcgtaaaattcaaaaaatgggcaaaaatcaggcactacgcccaaaactgggataaatttccgatttctcaaaccttaaagaagcccgaattttccccaaatgtttgtgtcccctgctcctcggatgattgggggggggggggggagggcacgaacattgagcactctcctctgacctccttggcgatgccattgcattctgacaacaacttcactcaa

SEQ ID NO: 2125 - DNA, 1911 bp, Heterodera glycines
cccccccccctcgcaccagtacataattgagccacaattgttttgtatgtgtatatatatcaaacaacgaacaaatgaggagggcgggcgggggggggggggggaagcaaaaagaatggagaaagaagcgaagtcagaaaaacgacgaacgaagcgcaaaaacagaaacagccatttgggatcaaaaggaggagatgcttttgcttttatttcgattctttttttgaactcgacgaaacgccaaattgattttgttggatggaattaacgcgcaaaattagtaaattacaaaaaatgttatatacctaaattaattttatttccttttttatacatatttatttgcgtttccgtttttttttcattttattgcggcggtaattccaataattaaagagaaaatcttcatgtttttttctcatttgcgcaaatcttcggctcatttgtttgtgctatgttccaatttaaattgggtctttctcacagctcccacagtcatttcgtgccatccaatcaaaaatatcgctataatcattcaaaacaaattgatggttttatttcgaagagaaaattcatgaaaattcaatattaaattaaatgaaatatttaaatgttttcatattagaatatttgtccacttatttaaaattacgaattttcaaaatgacgccattcaatcgttggagttgcgagatttatttcaattgaaatgccatcggtagtcagccgactttcgtattgccaaaatggcatcaccgagaggagaagacagtcgaatgacagcgacctgacgacgatgatggcacaaaccgggtgccgtcaggtgaacagaaaacgggttaattaattgattaacaataatgtaagatcaaacaatgactaattagttagcaagaagctgagattaatgcttcttctttctccattgttcagctgcatgcgtgggatgtgctgctgtctctgctcggtgccattgacgttggcctcgccggcactcagtttcagccgcgcattggcattgacaaatatcggcaaaaagatttgcgtctatccgcctcgctgctgtgcacactcaccgtaacgggtgggacggagggaatgggtaaataattaattatgtgatggttgcccaaatgatgttgaaatttaaactgactacaatagctgagactatataaattcagcagcaatccgaacccacactcaaccccatggtttccatgttaaccgtccaaataaactcttcgaattattttcagtttagcaaattaaaacatataaatgcttcaaaaatctataacttgcataatatgttatcaacaaattaattaaaaatatttatattttcattattatttaatcggctttttctgcgtcggttgctcgtcgggaaacgtaattagggaagtccagtaggtgccttttatttcaggtctttcaagtgccatgatcggtcttttgctgttcatcggcatcgtcggactgttcgcattggcacttttggacagtctttctgttgtagaaaccccttgtactcagctcaacgggaggaccaactgaggtcaaacttcaaaaactgttggcatgcacagcgctgatcaaaatggccagtcgaattggcagcagttgagctgctcgcgcttatcggtgtcgagtagtgagaaaatcgctggacttttccgtttcgagcagttcaagaattttcaatcactataattccggtgagtattgctttgtccaccgtcgccgcagtttggtcattcaaatcggtcgacaacaacacgtttccatattacaaaatggacatcaaccaataccgaatggccgtcacacatccggtgacattctgttgactagattttttaaaaattgtaattaaaatggctgtaattcaaaatttaaacagagact

SEQ ID NO: 2126 - DNA, 3064 bp, Heterodera glycines
caaggacaagcgctgattttgtgcccaaaaccgtaaaataacaaatctaaaatgcatttacataaatactggtgccatttaactcaggtaatttcaagtgccatgatcggtctttcgctgttcattggcatcgtcggactgttcgccttggcactgttggaccgtctttctgttgttgaacacccctggtactcagctcaacgggaggaccaactgaggtcaaagttcaacaagaaattgttggcatgcacagcgctgatcaaaatggtcagttagagtggccagcagttgagctgcttgagcttatcagtgtcgagttgagaaattgctggaactttccgtttcgagcagttcaggaattttaaatcccaataatagtgtcataatcaatcccctaattgatcctgttaggatacataaaatcaaccgtttacccctggcattgtccatacattttgctcattgtcagctcaccggcattgcctctctcgcacttgcggcttttctcgagttcgagaacgcgcaattggcactccgtcaagagtactatcgcatcgttcttgaccaactcagtgccgtgttggccattggcagcgcaattgccgatttgtacgccggttacaacaaagtgcacggcacattaaatcttaaggtaaacggggtccggacaatgcgtcagtggacgctccgtcaatagacaatccgtcagtaaaagaacaatcagtcagtaatggacaacttgtcagcaaattttattctgtgattgttcattgacggattgacaataactgacggattgtcccggagcctaagagccttcggctcccggacaatccgtcagtaagtggacaatccgtaagcaaatttgttttttaaaacacccaaatttatttaaaatcatgtgaaaattaatttaaatcgctaaaaaagtgaattaatttattttataaaaattatgaaacaataatttttaaaagaattaaatgataatttttcgagatggtcaattaattgaagtataaagtaactagaaatattaagaatgtatgaaattatatttattaaattgaacaatcattttcgcatgatttttgatcattgctcaaaaaaaatttgctgacgaattgtccactgacggattgtccggaccccggagcattccatcttcaaattttttcatctcaatgtttcactgtatatttgcattttatatcacaaataaaatttagaaaattaaaaattaaattgtaaaattcgctttttcaggtgagcattgctttgtccaccctcgccgccgtttggtcattcaaatcagtagacaacaacgcgtttccgttttacaaaatggacatcaaccaataccgagtggccgttcacacatcccgtaaacattttgttgattggtttttgacaaaaaaaaatatattttaaaattggcatttgcatagccgataattcaaattttaaacagagactacttttgctaccatttcgcccccacaatatgccgtggtgatcattcacggcattctgatcggtctgctcgcccttctcgcgttgctatccgcttgcactgcgattcttgcggcaaacgcgctcagagaatgcatcgccaaaagggaagagctgaccgagctggccatgcagaacaggcaagaaaattgccgaatataaacaacgattgccacatttttcaaaaaaaaaatgacggcactggtaaaagcaattctaaactaggcaataattgatagagatttgtccatgagctcttctaattaaccaaaagaacttcttcggtttttaaaggattccccccccccctaccacaatgcccgtagccagaaaattgggcagggcacccgaaattttttttttctccgttgttatttttcaaaattttgagcgctgagcgcgaaaaactggaatttatagcggttttgtgccagaaaaggacccatttttgccattttgggttggggtcaaattttcaataaataatgggttcatttgagttgggcgccgaagggaaatttttgaaaattttaatgatatgtgcctgccctcccccactttaaaatgttgcaaatggcaacactggcttaagtacatttaattcaaatttttcgttaaattttaaagttttgagtgatttaagctaacaatttctttcaagatttctcgccctgctccactccttctgggccatttgtctgctcgttctcgcgctgctcggactcgccgaattgccgtggaatggcgacttcattggtgccgatctcctttggcttgcggtgctcgtgttcggcacgggactgctcggctccgccaacaaacggtcagaacgaatgatcatttttaaaaagcataagtcatgaaataaaaaaattaataaaatgattttaaaaaatctctttttacatagcagctaattcgattccgccagagcatgtggcgatgaaacttagttttcgtctttggtttaaataacaaaatttttttttggcaaatttaataaaaacaattttcctttagttcacattttggttagctgatctaatgaatgtaaatgctttaattattttgggtaaattttttaattagcttctttacttctcttctcctctgtgatcagttgacaccagcaggggtgtgtaaaattcattgttgtccccttttcggcactttttaagttcgttttcgtcagtcaaaaatttttgttttaaaaaaatttcgttttcttttttctatacgaagacgattattatttttagttttcgtttacgtctatcaaaaaatttttgtttggttttatttttcgattttcaaattttattaccgtatcatttttatttttgaatttttttttttttacatttcgggcactctattggcattttactcattcgatgtttttttttttggtttaggatttcaacacttgtcaaattcgtgatgaattgcattacgctatccgtctgtgccgagaaatgcttcctcagcattaatttggtgttccaatctgtcacccattccgacttttttaaccccgccgtgttggacaacc

SEQ ID NO: 2127 - DNA, 927 bp, Heterodera glycines
tcaaaacggttcagaattcaataaaaataacattcacggtgcgaaaaatggggtttgacaagtttattggggaaaaaaagactttacaaaataatacccctgggagaagggagtgggaaacatgatttcaaaattttcaattttttctagtctaatctactcaaaccggttcagaattcaataaaaataacattcacggtgcgaaaaaaggggttttaaaaaaccccccccccccccccctctatttcatgatggataagtggtgattaacacaatagaattttatttgaacattcaattagatctattattattttatgaaaaatattaattcaattgttttaaattcaacaatcaaaaatatcaataggcaaataaatactttttaattaaattttaaaaatatatttattcatttatttttttaatctatctttatgcaattaaattctttttatttgattttaaaaatatatttattcatttccaaaagtgctccactgctgttgcgctctgagtgccctgttctacgcgttcgcgctgctctccagtgaggtgttcttcgagattgacaaatggcgatggtcggaggtgccgttggaacagacggcgcaccaccgaattgggaacggactgctcggagtcaccgttttcattgttcaggtccaaaaatatattttgggaatttctaatccattgccaggagcttatgtataaaaaatattgatgctatagcatctctgtctcgagaaaagtctaggcttttttgatcttcattttcattttcgagaccgagacttttttacaccccttcatgattggattttggtaaacctaaaaaataatgttcattatttgaagatttaatattttcggtaaagaatttcgtgggggagatacatttttaagccagattttgtaccaaaa

SEQ ID NO: 2128 - DNA, 6438 bp, Heterodera glycines
  unsure (1)..(6438): unsure at all n locations
accaaatccgcttccncctcaaaggacagcgccagttgaagcaaatcctcgccacactgaaagagctttgcgcgagccatggggcaacagtggtgacgattaaccatttggtggattggcgcggatatccgaccccggcactgggaaacgcatggatcaaaggcatttcgcatcggatatttttgcaccgacaaaacaatgataatgccgaaacgaacggacgaaccgaattcagtgcattaattttgagcgaaaaggtcgaaaaatgagtcggcagtttatgcatttcaacaaaattagctggacttttaaggttccaagtggaaaatttcgcttctcattgacgaatcgtggatttgattcgaatctttgaataccaaccaacaaaactttatcccccgaaatgatcacaattatgcccaatgccaatttgaatgccgaaagcattactaattttcttgctggtattttcgaaactatgaaacgcgatcttattttattttgaaattttctattttattaattttgattaaaaaatttaattaattttcctattcgaagcacatccggcttgtttaaatgctaaaaacaagcatttgcgcgaaaaggtcttctggcccgcaatatgcactgcatacatatgtatttgggaatgtccaattttattgttcggatttaacatttaactatcgcgctagcatcggaacggataaataatataaagattaaatgaatgtggttctattgcattttatgagtccaaaaactaacaaaaaactaatttgcttaattagtcatcatttcttacgattgccaaaacgcatagcttttgtatattatagctttttagattttgtgttttcaagtgataccaaaaatgtacggttttagttcggatattaaaaaaagttatggtcatagaaactcaggattgatagatgattgggacccataaacttttcattggactcataaattttgattgtactcattaacacggtgtgtgcctaatcaatcaatagtcaatgatatcatcaagcgcctcctgcagcttttcacgcaaatccttgtgatcactgatcggactgttgaatgtgaatggcacttcgatcagccaaagtgccgcgtaaccaacgaggccaaagccggtgatgagcccgctcaggcagccttcgttcggcttaaatttgcttgggcatccgcaacagatgttggcacatgattggaccaggccggccagggagcagatgagggacagcacaaggccggccgcgcctccagtaaaaagggcttaattttttggcaaaattaaaaatggtaaaaacacattaccgtattccttcaaatatgcccccgtcgcccacgaaattactgtaggcccaaaattgagcccctcaagctttggaaaaaaattggaaaaacactcgcccatggctttagaaaatatgtatactaagtgtagcattagagtatttggaattttttggcaaatgctaccgtattccttaaaatagggccttcccccaccgcccgctaaattactgtaagcccaaaaaatgagcccttcttttgaggggctaaaaaatggaaaaatctttgcctatggcttttttgaaaatgtggtatctaagtacagttgttagagggataaatggaaaattcaggctgaagagactgctcgaaaacatggaatgttttttttaaatttaacaatttttaaaaagtgccaaaaacggaatttttcaattttccaacttaatttttaatcctaaactattaatctgttgattttttgtgctgatgataatgatctcttgtccctattttaataataattataaaaattgattttgtaaaagtaattacaaaaattatgcctattaaaacggcaaaaacatgaactgtcagcttgtacatttcgcccgtcttttgaagcataattaatgcgtagcttttcgtttcgccgtcacgccgtgaacgccgccgcggccgacattgttttgcgcaactaataaatttttttgtttgttttctctattggtgtgcaaaatttcaaaaaaaaaattgttactatcaaaaattatggccaaaacatttaatatttattttaattattttggccctaacttaattatttttaatttgcatgctaatcgagagaacacttaggattatccaatgaagaggtcttttttgtctccattttccaaaaatatggtaaaataggggtccggcggtgccactaggcgcctttttggatttcgggaggggggggggggttagccccctcagcccccccctggctacgcctttgaacgatcccggcatcggtaatgatgacatttaatgtaaatttgtgccaatttgaatcacccggcacttttgagcattttgctgaacacttgtgccacttcagcccgatcattctgatcaattttggccgcttcaaagccccgcggggcgcttctcacaatgcctttgtccgccaccaaattttccgccaaatttgtcgccacttccagcgcttccgactcatttttatacgcttttgtcacatattttgccaaaaggtgcactttttctgccggcacatcgatggacgattcgaaaaaaaataattaaaaatttttattaatttttttaaaaaataaaaataaataaatgtaaatactaaaaatatttaaaaaaactctcaacaacaaattaaaaattaaacaaaataaaaatattttaataaaaatttaacaaaaacaaaaatctattaaaatattaaatttaattgaaaaattgaaattttttgcagaaaaaacttaaaaacacaaaattctttttatattttttaattaaagtttttaatatttgtctaaaaaaatattattagaataaattttgttttgactaaaaccttcatgcgtcggtgagctcgtcaccaaattaacggaagcaaataaaaatatttttaaaaatataaacattttggaatgaattttatgaagtaggaaaagtgattttataatgcaaatttataaaacaaatcgatttgaaaatgaaaaaaataaactgcaaataaacagttatacatatgcacatttaatttaatggtcggaaatgaattgaaagattttagaggtcacgcaagcctaaaaaaatgcattttccgatttttaataacaaatatatttaatttattggccggaaatgaatgaaatgcttaaaggtcacgtgagccaaaaaaatgctttttccggtttttaattcaaattatttttgtgaaaaaaattctgaatgctaaatttttgatgctgatcaaaaaagtcgtttacacctacttgatcagacagtaggcctgtcagaaagaggacaaaattctctgccgattgccttttgaatgataggtctacaacttatatacacagagcaagagatggttgaattttgttgattgtaaatatcactaatttctaccgtatttcaagaggaaatgatcaaaaattggtcgttttactgtactcaattttgacaccctcactaactcagcgggtatttgtcgtagacccatcagccaaaaggcaattaagaagagaaatttgtcctctttctaatgggcttttaatgtttcccaaaaacaaattttttccggccctgaggattttttttttgaaattttccggtttcagaccatttaggccattaaataaggattattttagtgatcagtctattttttcttatttaataaaaaaagcattttatttccctcaaataataataaacctcttacaaatttgtgtgacacttgttaattgttttggttacagttgagacacttcgttttttaatttgaatattggcattttgtttatttacgccaaataccaatttttaccgaccatgcctatggctgtactttttctggggccaccaactggaattgtccccaaaattgtgtttatatgagcaccaaatgttaatggagtccaaaaaatgttttttttttcacgttcattcgtttagaattgagcttttactgctaatttgctcaatgtctgccgaatcgttgttggaatttattgccaaattaacgacattgtcaatgacactgacagaggaagaaagcaagaaattggttgaattgacgaagaaatggacagaacaattagacaacatcattgggtaaattaattcaaatgtttgtaattttatggcaatggcaaagttttgtggtttctccgaaaaataaatttaagaagcacatttcctatgctaaaaaatgcgctgatcgcgaatctgagctcggatttcccaatttcggacccgaattcggaccctaacaaaaagaattggattttttccaaaatatgcattaaaaatcaatcaattttgacgaaaattgttcattttttggccttccgctgcctcaactgtaacaccgaccatggcaaataatcggcagtcctcgccgccgcccttctcgtccgccccggtgccgtcgtcgtcaaattctgtccaatcattgccatgtgccaccaccactgccacaaaaaatgccgacccaattgttctgacaccgaagacgacgatgccgacgacgacggcattccctgctgttctgccgatggtcccgcaaaacggattgccaggttttttaaaatatgcacggtctaggctcacattggcaaaaatttacgccgaaaatagacagatttaggcattttgaagggaagggtcccgcaaaacggattgccaggtttattttaataaatgtccatagtctccaaaatgtaatccaaaatttgcatagggatgccgccattgcctgccatgggattgccaaatgtggtgccaaagaatgtggcgaagacgccgaccaacggaattatcgccgtgccgcccattcccgccactgtgccggcggcaaatgtgatggcatttggaatgcgaaattccatcgctcgggtattccatttttttatttgtgaattaaatttcgcaatttcgttaactgaaatttcgtttatgccttggaattcaattcctaacatttttaggccttaaaattccttttcttgaaactttttggagttttgtgttttcccaatttttttgagcctctggtttgaatttcctgatttttaaaaattttttaggccttcaaatttcctttcctggaaatttttgagtttcatgtgattccgatttcccatcgaaaaccccatttttttcttattgttgtttatattgtctggcgtaatcaaggcgtgccgatggctcagttggtttgaacaaaaatactcgtcggtatggaagagcgccatgggttcgagtcccatcggatgaatttcattttccacacaccaaaatgttttgtataccattcacgttggcatccaatgagaattctgatcagttttgcatttgattgcactgcactgatcagatggttacggatgcgcaaattgtacggctgtacttttaccgacgggattttccatgaaattctgttaaaatagcacagaacaattttttaaatattagtgagaccgtcaaaaaaaattttttttgcaatatttcaatgctttcatcaaagcaaaaaatttcaggaattttttttaaccgatttttagaaaaatttttgagaaaaacttgttaataactcatccttgacttatgaaaaaagcattgaaaattttttcaaaatttttttttcttgcaattttcgtataagaaatttcctaaaatgcaccccaaatttgaactctaaagaatttttttattaaaaaaaatttcgggcattgaaccactgcaagtttaaaaaaacgcattttttcttgttgcctcaccctctaatttgaccatcacagaaaggcacaacggcggtgcccggaatggcacagcgccgcggcgcactcaccaaatccgccgcggctgctgcgtgcgcacacggcgtgtgcggcatcaacgtggcccgcgctggcggcggcgccgctgcgcggccggccaacaacggggcggcagccaagacgtggcagatgatgcaccagcggcgtgagcagcggcaggcgttgtcaatgcgtcgtgcggcggcgatccccccaagtgccgcttacttatccgccggttccaagctgtaccagcaacaacagcagcagcagacggtatgatttccccccccccccccctttccgtcaattttcagacataaatttttcaaaaaaagtcagtgaaaattttttcgaaaaaaattttttcttcaatgttttttctaaaaaattccatttgtaaaaaaaaaaataatttttgggggtgaggaatgtagtgtacaccctccagaaagcagctcgtttccctcccacccccgactcttttttttcattgggaccacaattttcttgacaattgccaaaaaataggggcctaccgtagcggaggggggggggg

SEQ ID NO: 2129 - DNA, 2991 bp, Heterodera glycines
atctctttctccccaaattttatattttttattataaattttcttaaatctcccccccccccctctcccccacataaggcccctcaaccgacggcgtgttgttcttccgctgcagacacaaccaacatgatggagacggacacggcggacaaacagtagagacgaagtggggacgacgtccaagctgtacacccaactgaatgaagagtcaaatgtcatgttctgacggaatctcgacgaaaattttcctttttaattttttttatgtataccattttcattgaattctcgacgagcatatattaccccatatacatacttcatgtgcattatctgattatcaaaatctcctattttcctttttccgaataaattttttcccattttttcaataccaattgtgatttgctgatgcgagtcaagttaaagtggtatgcaattcactaaacaattttttttaagtttggcgaattgtttaaattttgagcaaaaattaccccatattttgctcatccaacacaaatgtaatcttttgcgaaacacggatttacacttgcaaatccccggaataaatgaatactaatctccatgtttaattccacgagatcttgttggtccatcttttaggaattttactcgattttttcaaaatttacagccttttatttattgacactcccccggcgcatcacttccaattttaggcccatcatatattttttgataattttccaccaccaccgctgctgctgtttgctgtggtctcctcttcgtgttgtactttcattttgtgccggtgccttcgttgaaatttcattaaaaaaaagacatgaaaaaatcggtgcaacagtcgtgccccgagctgcgcaaggcgcactccgtcacccactcgtccaactactcgctggacaaagtcaagtcgctgcatgagcgctccgcgcgtgcaatgctccactctcacgaggttttttgatgcgttcccattccaaaaaaaggcgcgcatttttcacacattttgcacccctcgtctccgtttgattttctatgtcaattgttttttacgaaatttttaaatttctttcggtttgcagcgggtcgttgatcatgacgaatctgattatttatttgggttaattcaccttattcctaacccgaatccaaataaaatgttaaagtccaagaggggaatcggaattggtcgaaatgagtgtcagattcgagaccagagcgaccccgaaatccaaattttcataaattttcatgacaataaattgcaagctaaagggctcatctctctttggcgtatttaacaaattcaaaaaagacagtttgtaaaacaattttattctgaaattcggaattggcaaaatggatgccatattgtataccggcaaattgttattataactcgaatatatatatatatatatatatatatatatatgtatatatatgtatatagatatatatatgtcgatgcctggagcttgacgacaatcagttgcgcgaaattatggccaggatggagctggacttcaagaaaggccttgacccgttgacaggtggtcgtcgtactcaaaatgttaaaaaattgtcacggtttttgttgggataatttgttttttggagggggggggggaggaaaattttttgaaaatttatttggttttgacataatttgtttttatttggatatacattatcagagatggtcccagtggtgggcaaaatacgcagggtatacccctttaattatttttcctaggaaaatattaaattttttttcagaaatttttggttactgtttttttccgaattcaaatcctgttttttccgtacttctgctgtttgtttcgggtgggtggccgcaaatttttccatttattcccctataaaaattccaaaaaatttcggtaattgtaagtttcaaaaataataattatgagcaataatgctcgaaaaacaagtttttccggtttttttggccgtaactttttttaaatgcacaaaaatttttgtaattttaagactaataaaaaaaaacaattaggggctctcaaaaatgtatagcaaagattgagaaaaattttgtccatttgtatttacttctttttccatttttcagcgccgaccgcttccgtcaaaatgttgcccacttacatccgtgccattgcggtcggtgaggagcacggcgaattcttggcactggacctgggcggcaccaactttcgcgtgctgctcatcacgctggagggcgactgccggtcgacgatgcaaagcaaaatttaccgtgtgcccgaccacatccaaaagggcaccggcacggcggtgagtggggagcggttttgtacaaatttcattaaaattttcaaaaaaaaaattgccgtcgttgcattacggcggggccagcaaaaatctcgccgccgaatttttttttttattttctaacagaaatttttgaagaaaaaaattgaaattttttagcgattttttattaaaatttttgaaaaataagtgagtcaccacaaatctcaaagaaaaaaacgctagataaattttacaaatttcctttttcttgaaaaatttctgttaaattttttttaagtttcgcctgcgagaagtttgccccctcccctatcatcccgaaattaaaaaaaaatttggacacttttctcagtgccttggttcatacgtctgacaaaacgaagtttctgattggagtgcgttgacttttttgggtcttacaattggcaaatccttcccccaccgaaaatttttttttggcacttatccgattttttggaatgcccattttaaatgcagtacgaatgccgtcagcattaattcactcattcattgttttgtcccagctgttcgaccacatagccgcctgcctggccaagtttatggaggagcacaaactgacgggacggccgaagttgccgctcggcttcaccttctccttcccgtgccagcagcacgggctgacca

SEQ ID NO: 2130 - DNA, 2973 bp, Heterodera glycines
aatgagaaatttaacaacatagctttaaatttttttactatttaataaattaatatcaatttttgtatttcgcctcagatgatcatttttaataattttgagaaacgaaatcaaaaaatcagattttaagattattttttgctgcaaattttttcaaaaactttaggggaaccgaggggggggggaggtcggcgctgccgataggcgccgccgggaaaattttgaaaatttgaaatgtaatttgttaacagaatttatacaaaaactgcccatattttgtgattttgaactaatttataagaaaataatgggttcatgggtctggtgatgtccgattggcaccgaaggaaaaatgcgtagacaacaattttattctgattattggacagaattcttagaaatcgttgtgccataaaactacctaataagatttagaataatgttttagaaattaaaaaaaaataattatttttatgaagaaataaaagtcacaaaatgccaacttttgagtcaaattttgaaaattttagtggaattttggagacctgtaaattttttgggatttttaagggattttttaagaaaaattagcaaatgacaatattttttaatttataattcaagatcttaatttaaaaaatggagattttttgaaaaattatcgtgacttcaatcccgcgggattggtaaaatggtcgggagggatcccggttcgggatcccgatgaaatcccgatcccgatcaatccagatgaatttaaaaaatcgctcgggacggatcccgaggtcgggatcccgaatttaatcccgcgggatcccgaagaaatcccgcgggatcccgatccagtccggtctctattttgcagacggaacagctgtggcttcctccataaattgctttacaagcacagcaaaaagactccattgctaaatatatggaatttttcaaatttttcatgtaaaatacagaaattctgtaacaaaaatggattaaaaataattattttttgccgagctgacatttttggcgacatgttcaaaaaaaattcaaaaatttttcactaaacaaatcagtcaaaaataatcccacagtctctattaatcacgcagtctctaattatcccctgtattctgaggaggttgaaaaataatcccccatgggctataattagagcatatacggtatgcagttcaattgtttgcatttagttggtcaggaaagaaagattggggcgtgggagaggcgtcaaaaattcctttccatctctactttcttacttagtcaattattgattgattgtaatatgacaacaaaaatgagaaccaacaaacaacaacgatttattcagcacataaatacacacaccatcccagaaatgagctccaataccaaaaaagattcaaatacagtacctgtctcagtggtctgtgagaaggtcaccaaaatgggggtgtcaggttcgattcccagtgcatgctattgatgtatttcgatgattttaatgtataaataaaaggaaaagtaaccaaaatgatttaaaaattgtttacaaatttttaacattttttatttgtcacgtgtaatgaaaatgaaaaccatcaatcctcgatcagtcaacgacatcgacgtcagcttcttgatcactttcttcattcgttttgtcttcctccgcttgctcccgttgttcctcctcccgcttaattagttggacaaggttttaaagccccttccatcaactcaccagcttcaattcgtcgagtctgccggtgtccagcagccaattcgagacgaaatgatgctccagctgttggcgcatttgttcatcgtccggcatcgtcttccacagttgctcaagtcgccgccacacggagtgcagtgcctcatctcctgaaaatcacaacatttaaaattgaacccccaaaatgttatggcccaaccctgctcatccaaaagccccaaaaattggtgttggcgcgcaaattgaacaaaatggtgcagcagcaaatgggcctttgtcttttttgaaagaaggttttgcaccattggttgttggttgataaatgccttgaactgatcaaccgccgtctccaatccgtccaaatcacctggagacaatggctgggccttaaatttaaaaaaatatttccacaaacaatacaaaaatgaaaccaattactttggtgaaaatttggattttccccaaatgtgccattgtttggcaaattgttttggcccattccgtctcgaaaagggcctccatttgatcggcatggacgaggattttccggatgctgttccccgtcatgtctcgctttctgaacgcttccctccttgcccctatccgtctgaagaattgctgggcgatttcggcattttctccagtttccaactccttgatcaacgcatttccgaggccctggaagacatggaatggggccaacagcatctgctcaaaattgatggacggcagaagaggtgcacaaacaatgcccatcgtcagagcccgagcctctgccgttgctttgtcgccgccttgtgtcagctgctggaactgatctgcctgtctctccaattcttgcacagagcgaagttggcattttgctgaactgatcagatgttctctgcgacagtcacacactggggatgggaacgctgtcattgccgaaccgcaatggccaatgatcgcccacagaaaacacaggtcaccgccaagaaacctggaaatttttcacaaaataaaaaacaaaaattttttcaccatttcactttgcgcccgtcaattgcatcgattcgcccaatttgttcccacaacgatccgcagaaattcttcaaattttttcgagaatcctttgcagggaaaacagccgcaacaaaattgttggaaggcgaatttgggcgcaatgcatgggccaacgaaatggtaactttttaagacaacatttaagcgatgataataaacatagaaatcgatgc

SEQ ID NO: 2131 - DNA, 1912 bp, Heterodera glycines
aacgacaataacacaatggtaattatcctagctcgctttgcatcgaaattaaatatgcccggggcacactttttgttgtttttaatgactaatcactgccccgctgatcagtcaaagtcagaaggggcgctttgttttggtaagcccccgccccccgcttctgctggtcgtatcccattattctttctttgggttttaagctgcaggtttttacacatccaatttaaaacaaaattattattttttacacgatttagcaaataaaataaaataattatttcttttgttctgtgtttttattttattttggatattagtaaagtaaacaaaaaaagataaatgatttgtaatcactttatcattgcaagatttttagtgctgataaccaagaatgtcaacaacggatggaataggtacttacaaatgttaaaaaggcattattaaagaagacaccaataaataaaaattacctattatacctctaaattaaatactttaatattttgaaagaaatattcttaatcgaatccgagagtaattatcagaaatagatgactaattaacctttaaaaatttagcagaaatttattaaataatatattaaatttaaaaaaatctgttgaattggggcgatatgtaattttgatgattttaaattaccaaatatttttttagttaattatgatagaaaataggcgaaaattttttcagcaaaattcatttaatggttaaaagttttctctgtttatcagattgagttaattaattaattaattataaaatatgcttctaattttattatttttgtgtgtaaggattagcaaagtttactatttcaacaagaaaatgaaaaatttacttttgaaagccatgaaaaacattttttaaattcttcgtatttcatgattttttcaatatgaatgctgaaaaaattttgagcaataaaatatggaaaatgataaagatggacctaatgactatgttcttttggaggaagttggagcagcaaacaaaaaacttgacctctgtgaaacgccatcttttttacgttattttcaattcaaaagaggtgatgctagtgccagatgccgaatttgcaaagcccaaatagcgcgaaaagatggaaacacgtcagggatggaccgtcacttgaaacggcacattgagttaattttaatttcgtttctttttatatttttttagaatttacaaggaatttgttttggcaaagtacggcaaaatgcgttcaaaagcgcacttctttttttgatgaatcaacatcacaaaagccaacgaaacaattatgtttagagaatttccgtgagaaagaaaaatggacaaatgcgcatcgtaaatctcagaaaattgattcacttaaattacgctttatctgtttgtctgttgaaccaatccaattgacggaaaagaaaggattttttgagactttataagaagcatgtccaaggtaaaaacaataaagaattaactcttcaaaatcttataatttagctaccaaaacaaagaccgccgctttatgacaaaattgttggaaacaaaatatcaacaaagatagaaacggacactccaataatcaatgcctctaaaaaagtcatttcaaatggtttaaaaattagaatggaaaagtacgagaataaaaggtggtttattctctcacttttatacacaccatcccagaaatgagctccaataccaaaaaagattcaaatacctatctcagtggtctgtgagaaggtcaccaaaaagggggtctcaggttcgattcccagtgcatgctattgatgtatttcgatgattttaatgaataaataaaagtgaaaagtgaccaaaatgatttaaaaattgtttacaaatttaagcattttttatttgtcacgtgtaatgaaaatgaaaa

SEQ ID NO: 2132 - DNA, 5004 bp, Heterodera glycines
gttgaaatgacatcatatttcaaagctgagcaaattcttcgttttatttcgacgacccaaaaaaagttggtaaaacaaaaaaatcaatgaaaaactgcacctttctcagtggtggaaaagtgtcaaagcgcctgtcgatcagccttagagtcgccttcatccgttgtaagccatctgcgtcccgagctgggcaagcagcagaagtccatcctccgcttccattccctcctgcagcttttggccctttggcgtgtagtgcgagaatttgtggcggatttctcggtagattcggtccaaagatgcgcggctcgcggaacgcgagcgatcacgatcgatgacgcccacaatttggtcgacgatgtcgcgcctggcgctgcgctgcagttgatccagtcttttcttcggtcttcctctgtttggtggtgctaaaattgaaaaaatgatcagattttatgaaattaaaaaaggaaaaagttcactcacttttgctggtcgttggtggtgccatcggtggtaccatgtgctcgtccagctgccgacggagatcactgatcagcgcttctcgattgcgcacctgctcgcggagaaatttgatggtgtcgtcccggtccttgaactgcttctccagttgttcgatgcgctctgatcgctcgtcaatggccagcggtggcggggtcgtctctccggtgtccattggcgcagttggtgttgtcgaaaacagcaccaaatcgccgattggtgtgacagatgtcgatggcagcgaaaagccaaattccaaaatttactcgtccatctccggcgttggcactggtcctggagttggtggcggaggctccatcgcttcttccgttgatgcagcagatgttgacggccctgcttcgtcctgcagtgctatttcggcattgggatttggttgtgtagcggctggaatacaaaaaaatgatttttttgagataaaattgatgaaaaaactcacttttcttggcccatcggccttgtctcgccctctgcgtctgcgcttttctctcctcccgcttattctcacgcgtatggcgtgcatttttggtctgtcgcttccgtaataaagttcttttagccattaaatctttaaaaagaataataatttaacttttttatcttataactttttaagacaacatttaagcgatgataataaacatagaaatcgatgcagaatttttttctctatcgatttgcaaaatttggtgtggatctaacatatagaaaagaagctaaacatagcgaagtgaatgttgtttttcctaataatgaaaatattagatagtacgccaaaaggagacaaaaaaattagagaaaaaaagatattgtttttctctggcactctctatttattggtacacttctcgtttttcgggatggtgtgtataacacaattcttttttcaggtttcttatcattgctactttggtcaatccccggtataaaaatcatataaatgtgttcaacttcgaagaccgaattcaaaataaagttttgttggaaacctaaatagaattaaacatcaatccacagcgccgtttttccgaaactgatttggatgatatgaaccaaggaacgcttcaaaccatttctgaaaatcttttatcagattttcttttttctggaacttaaacaggacaaatggcaaactcacaaacctgatattgtaataaaaaatgaaattgattcatattttaaggtagaatttttaacgaatcaaaaattataaaataatattttaagagtccaactctgaacccggatgacgatcctttaaagttttggcaacaatgcacaacgtacccgaacattaaattaattgttccaaattttttgtcaccaccgccgggcactgtcgaatcagaaagaacatttagcaagctgtcagaaattgataatcctaagagatcaaacctttcggaggagcatgcaaaataacaactctttttacatttcaattttgacgagtgatttggttatttttttgattaaaaaactgatttcaattaattccattaagatttctcggttcccgagtcgagaaatttctcgggctttttgggtctcggttctcgtatcggttcccggggtcatttctcggttctcgtatcgtttctcggggtcatttcccggtctcggttcccggcaaaaatcaattctcgcacatccctaataaatggagatatgtgaagaaacattttccaaaatagataaaaggaattttcaagcaataactaactaataaatcgactgtgtttttttttggtttgctaccaaaaaatgctaatgaaaagggtgtttatgctgaatttggttccgaacggtgatgcaatttcgggacgagaagcatccctttcgctttaattgttgcaatttcccgaacagttctcgctgatcaatgctttcccgaactgataagcgccactaatcatctccttttcctgtttgaagatttcctcaatgctcaaaatgatttgattaaccatttacacattgttaattttgcccaactcgttcttctttttttcgagatatttgattgtctgattaatttcgtcgtgtcgaatgccaatgatttgcatttcggtcaacaaattttgaaatgtttttatctgatgatcatcatctaaacaaagagattgatggaattccatgaagatcattcctgctgcacaatttttttatggcccattggacaccgaaaattaggcataataggacaaaaaagattttcacatttaattggaataatatgaataaattttaaattctcgccatataaagttttagcatttaatatgagctatttctcgttatttggcatcactagactgctaatgagtattaataaataaacttatatttgcttattaatagggtgtgaattttttttacgaaatacttaattttaaaaaatggtgcattttgtaattcataaactcgaatgccttacagcatgcatgcttacatagtgtaaactccaaattagtatttttttttgcaaaattttaaccccttctgaaaggttggaatgagttacaaaatccatttaggccttgctgagctcttgtttttcaaaaaattcgacctaatttataaattttcattgatagataatttcataacccaatccaaatttcattttaaagtttctaacctgactcaatttctctttttcctcctattggtttgctttatatcggtcttttaattgctctaagtcatgttttgttttctccaaaatttcatccaatttttgttcaatttttttctgcagcggcacagactgttcccgtgccaaacggacaaaattcaacaactgttatcggatattcatttttgttgttgcatttttccattctttgcacattggcaatttgctccgaaagtttggcaaatgcttcgccgtaaatgcacgggtcagcaaaagcggctattttgtgctgaaattctgcctctaaaatgcccaatttcaaccccgcaacaaattcctccgtggcttctccaatcattgcaattctctcatagttttgtcccagtcagtccttttcaatttgttcggcaaacgaaaggagacgttctcttgcagtttggaaacggtcaatgctacagtatgctgtgctcaccaatgaatgttcaatgttggcacagtgtttcttcagcgatgccaaactttgcggcattgccaacatgtctttagcctccaactgcacacgcaatgtgccaagttctgcaggcagttcactaatagttaactttatccgcaccaattggatgtccaacagttcgtccgttgcttttcgcttaaaatggtcatttccgttcagcaaactgctcacagtaacgcatcgccattttgatcagtttgaccagtcgttggtacaccattgagttgccgatgctcatttcaaacagccagttctctgccaattctttcaaatatgccaattttttcgctaatttggcaagtgtttgttgcgtttgctgttctgcccggtcttcaactaaattaattgaaaaatgctattatagagttcgaaaattaaaaaaaatagcctggtctcatgttttactttaatatttgaccttggcctgtttgtttttgaaaattttgaaacggacaaaaaagccaaactctaaatctttaatcaatgcaaaatccaggcctagctagatccagaccctgattgagacctattaaaatagtaaataatcaattttcgagtttaatcttgaaaaatatgagaatgtgtggaaggcggtgccgaaacaaattactggacttgattttcggatttgctcaagttcggcaaccttttccacaatttcattcaaattcaatggagcggaaactgtgtaaacggaatgccattgaacttgcaaaattaaaaatgcgaaaataatattcatttaatctgaaatacaaataaaaattatgaaaataatgcattttattaaaacattttcaatttttattatacatgcaaagaacaatcaatgcaattccattcagatgattatgctttctgtttcttttatttcatttttaggggctctattatttattcgttggcaggaaaaaattgatcagtgaaaatgagaaaattatccattatttagagaaatgagattctgtaatttgttgagggaaaaattgtaaaataaagggccaattatttgctattaaaaatgagaatagagggaggcactttgcttcaccaacactaaaaatattacaaaggccatgaaatgcgctcaaaaattaattactacaagaatatttagggatccgaaaatattgttgagttttaacaaaaatattttcagttttttttttttttgcatttttgaattaaatattaatatttcggcggttgatgctttaatttctgacttatttgttagtgaagggactggcgaaaaatttggagaaattttaagccaatggaaaaaatccaaaattaaaagagcatatgacacaaa

SEQ ID NO: 2133 - DNA, 1732 bp, Heterodera glycines
ccggcaggcgccgccgggaaaatttttgaaaatttgattaaaatttgcgcggcggtgccgataggcgccgccggggaaaaaattggaaattttgatcgtttataaacaggttttcactgaaaattagccaatttataggtaaaatttttaaaaatttttgggaatttaatccaattcttaggggtgcaaaagtcgcttttcgggccaaaaagcgaaatgcgaaacgccaaaaaatgcgaataatgcgaaaggcgaaatgcgaaacctaggcacatccctgctggacaccctgttcccaaattttttttggaaaattttaccacaaaaaagacagtgtaaaaacaaaaaattcgccgacagggaaaatttaactaaaaaaattcacggtcacggtcacgaaaaccgtgaatttcacgggttttttcagtcacggctcacctctagtatttaatttaaattggaaaaattggcaatgtgacgatagaaccgattataaattttattaaaaattccaaaaatatttacatattttgtacgaatattttttaccactttatgttgaagttcatcagatttttgtcttttcatgagctcccattggcctgaagcgcacgaaaaagctgttggttgataagctattttcgagttattagggcctatgctaggcgtgtccgggttattgctgggcaaagctcggcttagcacaatgctcaacagtaatttctatcagataatattatgtgataaaataatatagttaaaaaaaagatgctgaatggaataatacttagggaaaaaagtcaaataattcaccatctgtcgggcggacacgaacccataaaccgccattttaacataagtaaaaaaagctcatttttaaattatctgctccacatttttaacatattcacaccagaggatttatacaaataatacaaaaggtggcaagcatttggtgaaaacataataccgaaattgtttggaacaaattacgccttaaatgggtcacagttttaatttcaatttggcatttaaaattcattttgattttcaaccggtccaattgttatgtcttgtcacggcattcaatgcaattggttttatgtgctgttgttgttgcgcattgctggcggattttttgatgccaatgctcaccaaaagggcgttaatttcggcacggtataagtggctaaaacaagaaaaataagtatttatgaagcaaataatttattagaaaaataattaaaattataaaaaaaatattattttacaaaatattagtagacaaaaagcaaattaaacgaataaatgtattttaaatcgtaaaatgattattaataaatcattttttagctttacttaaaatagtaaagcgttggcgcatttgccgacgccgtaacgcaggagcaaacggtgctgaacccggcactgatataagtggtcgtaatcggcgaaaattgggcaaattttaaaaattgaggaagataaattgtcggaaaccatccaattgtctccaaaaagacgaggaaaagcaaagagcggaaaatgctttttgagaaatgttgattttctaaaaaacattaaatactggcaattaaagcacctaaaatttggttctgttcggttttaagcgtcccataaccattttcagcattccaatatttaataatataaaaaaaattctttaaagtgttgatttaatatgttgattgtgtggaccccagccaacccg

SEQ ID NO: 2134 - DNA, 1447 bp, Heterodera glycines
tttcaacaatttctctttttcggctccaacaattcgtttcatcttcgaagctcaattcccatcttttatcttctttcttccatctcattaatcaccgccgatattcgtcgcccaaacgtttcgctattcgtttttcggcatttttctctctttttccctccaattttcatttaatttcatcttttaattagtcatcatcaatcgatcaaatcgctttaatatctttaacgctctttcctcatcccgaatatctcgttttcgattaatccaaattctctttctccatcttcgtaaattttcttttcgatttatacccaatttttcgagcaattttcgtttcaattttatttccattcttttcgttgaataattttcttttcccatttgcttaacttttctccttaattttgtgaaactcgtccaccattttctctttttcttttttattcaattcggcatttcgaaaaatcatcagaaagtccattatttggttggaaaactaattatttgtctgggtttttacaaccactgatgttcaagagtctcggtttcacgactcgactcgagaaaagtctcgggtttttttggtctcggtctcgattttcctaactcgagaccgagatcgagacattcacaaaagttcaacgaactataatttgataaatggtgcttattcgtaaaaagaaatttaaatagtaaaatttttgtgagaaaaaaacattttaaaataattgaaaaacaattgcctacaataaaatttacatcggaatatttaatttttttaaatttttaactatataaattttataaaaacttttattactaacaacttttttcatgacaaagtttaaaaaatgaaggcatttttaatgactttcaaccaaatttttttcaaaaatcacaaatttacaattttataaatttaatgagttcctggtaatattttattaaaatatttttccagccttttttttgattcttctttcaaattacaaaaatttatcaaacataacaacacattgactaaaccctgaaaattgaaataaattctcaatcattccgtattcagaacgccttcactttttctcttgaattccgctttatatctttctaaagatctttttgtaatatttaaaatttccgcaattttgcgatcggtaagctttggattttgatttttcaattcaaaatattgtttcatcttctccattttttcgacaattgtataatgcttccgccctttaatatttaaataattaaattaaaaattcttttaaaaaatttcaccttttgaaatattttgtttaatgccgaatttcttgtcccattttttcattgttctataataaatccaaatatttgcttaatgtttgctctaaatctttccattcttttcgtgaatgtttctcattttgcataaattcattttttaatttaaaatattttt

SEQ ID NO: 2135 - DNA, 1515 bp, Heterodera glycines
  unsure (1)..(1515): unsure at all n locations
cattttgcataaattcattttttaatttaaaatatttttcaataatttctcttttttcatcatcaatttgttgatttttcaaaggttttccattttttaattgtttcttccatttataaatactgctgatatttatgcccaaatgttttgctattatttttttgcattttttcttttttccttccaattttccatttaatttcatttttaatttagaatatatttgatcaaattgctttaacattttacgtctttcctcatccgaatgtctgtttttgattaatccaaattctctcttccatttgtaaattttctcttgactgacgcccaatttttttgcaatttttctttcaatttttttccattctttctttgaatatttctttcccatttgcttaactttctcttttattttatggaatttttcaacaatttctctcttctgtttgtcatttaaaattcgaatttgatcataaatttgtccattatttgttggcattggcaattggccgcccaattcatcacaatctgtggacatttcatcactctcttcttctttcacttccaaactttcatcaaatttttgattaatttgtagatcatttggccctgcttgaatattctgatcaacattttgtccttgcattatttcatcaatttgacaaatgttttcttctgttctttcgtcccatttttggccaaatatttcatcaaaacttttttcttgatttattttgccagcctcaatttggtcaattgcattttctaatattaaaacccgtaagaatataaatattaataagattttcattattttttttgtaaaaataaaatgaaaagatttataacaataatattttataaatgaattttgtaattattcattttttcatatggctagattattcgatcaattattaaccacatttagtcatttatatcataatatgatgcatcaattacatatattaatataattaaattatattatatctaatacagctatcaaatatgtcaaattttggaagataaattttttatattttggttcccgtttttgacctagggtaccacaacgaccccccaatatttttgaatttatgattatttcgaattttaataacagtttggcaaagtgtaatgaacataaacccaaaaatattcgcataaaataaggttacgcgggtccggatacccaaccgggtccagacccggatacccggctttttcaagacccggactcggtacccggacccgactttttgattctgttacttctttctcaggttcaattcttccacatgtcggcctcttttaaaaaaattataaggcttttgttgaaaactcttattttatggattcaaacccaggtttaaaaaaaatgaaaatgggcctaaacctacgtaaaaaaagctcaaaattttttaaagaaaaaactttatttttaataaataaaaatgtacaaaaaaaaatttcttatatttttttatagtatccaaataantgcttttgaag

SEQ ID NO: 2136 - DNA, 3497 bp, Heterodera glycines
  unsure (1)..(3497): unsure at all n locations
aatgttttgctattattttttggcattttgtgctttttccttccaatttttcatttaatttcgtttttaatttgccatatatttgatcaaattgctttaacattattcttttttcttcaattgaatgattttttttcgtcatcattccaagttctctcttccatttgtaaattttttctctatttgtacccaatttttttgcaatttttatttcaatttttgtccattcttttcttgtgaatttctttcgcatttgcttaactttctccttaattttatgaaatttttccacagtttctcttttatttttatcaattgcttttgaaaaattatcataaatttgtccattatttgttggcattggcaattggccgcccaattcatcacaatctgtggacatttcatcactctcttcttctttcacttccaaactttcatcaaaattttgattaatttgtagatcatttggccctgcttgaatattctgatcaacattttgtccttgcattatttcatcaatttgacaaatgttttcttctgttctttcgtcccatttttggccaaatatttcatcaaaacttttttcttgatttattttgccagcctcaatttggtcaattgcattttctaatattaaaacccgtaagaatataaatattaataagattttcattattttttttttgtaaaaataaaatgaaaagatttataacaataatattttataaatgaattttgtaattattcattttttcatatggctagattattcgatcaattattaaccacatttagtcatttgtatcataatatgatgcatcaattacatatattaatataattaaattatattatatctaaaacagctatcaaatatgtcaaattttggaagataaattttttatattttggttcccgtttttgaactagggtaccacaacgaccccccaatatttttgaatttgtgattatttcgaattttaataacagtttggcaaagtgtaatgaacgtaaaccgaaaaatattcgcataaaataaggttacacgggtccggatacccgaccgggtccagacccggatacccggctttttcaagacccggactcggtacccggacccgactttttgattctgttacttctttctcaggttcaattcttccacatgtcggcctcttttaaaaaaattataaggcttttgttgaaaactcttattttatggattcaaacccaggtttaaaaaaaatgaaaaaaggggtctaaacctacgtaaaaaaagctcaaaattttttaaagaaaaaactttatttttaataaataaaaatgtacaaaaaaaaatttcttatatttttttatagtatccaaataatgcttttgaagaattgaaccttatgttccttttataaattgtatatttttggtattcaaattcaggtccggggttcggaattcagagcaatgttgttatggaatttctttttcttacaatactttatgccacagaaatttatttcaaaatattattcactgatgtggagaaccccacaaaaaattgcacaaggtagtgccaacggggccccagtcagggatggtcgggctcggtcgttgggtcggaggcaattggtcgaacacacaattcacacaacattataatgctttattgttccctctcaaacttgggtaattaaaccttatttaaatgtgtcataaaagaaatgccgttccggcgatcgattcacttctgcatcagcaagaaagacaagcggggctgctaacggcaaaggaattggaaaatgccgaaacatggattttgttggaaacccaacggcttcactcgcccacagaaacagccacaaacaatttaaaattgtccagctcgagctccatcgagccactgagatgccaagggcgattggaaaacaccgatctgcccaacgaaagcaagcacccgacctttttaccggcagaagcctggaccaccaagctcatcgttatccactacgatcgggcgctgaagcactgcggcccacggacgcttctctcaaaactccgagagaagtattggataccaaaaggccgacagacagtccagcacatcctcaactccaacaaattcggatgtttgaagtgcagacgggagagactcaagccatacgcttatccggacgctcctgacctgccagaggagcgagtcacggaaacacaacccttcaatcataccggagttgactacttcggatcgctgaaagtcaagcaaggaaacacgactgtgaaagtgtatgtggcacttttcacatgccttgtcatcagagcgattcatctcgaggtagtcggggactactcagctgaagcatttctgagagccttccggcgattttctgcacggcgcggcattcaagtttgatgatgtccgaccaagggacaaatgtcaccgccggcgccaaaacgatccaagaaaattggacagcgcaattgttcccaaatgaaatcagtggacaattggcacaccaaggagtcacatggctcttcaacacggcacacgcaccttggcgaggtggtgcctgggaacgacttgttggcataacaaagaatgccttacgacgaagcatcggttgaaatctcctcacgtgggaggaattctgcacactcaccgttttggcgaacaaacaattttttattgggggagaaaaatgggcggacaatttcgcacagttgcgattgcggaggaaaaaagtggggcaatttgcggcggagggaaatttggggaggaacaggatgtggaacgggcggggaagggatttaaaaaaacacgggagggaaatcgatcagtcataccatccccttatcacccacccccttttacatcattttaatgctaaaatcaaattttgattttacgataatttcgacactgacgcattttccactgacgcattttccggtcacgcaattttactaatataacatatatataataatgactgattatttatgatacccaatctttcccaattctccattggaaaattaaaattccaattaattgaattagattattaaaataaaacatgtgtatcatattgatgaggtttagtaactttttgttaaaaaccggaattgattgaatattagccatgttgaaaaataagtaattaattaaataattcattgcaatttacaatggaaataaaaggtgaataaattttaatttataatcgatctttttccatgtgaatatttttagatgaatttactattttaaatttatttactcgaattaaaaaaaacttgtgttgtgtagtgtgaattttttatatatttaaaatttacgccaaaatgatgatcatttattattatgctgtattgcccaagttgtgtgcatttaataggcaaaaaaccctcattttggatcaaaaagcctcatttttacaaaatttattcaaaaaacactcctanaatattcaaatgttatatttttgattgtccatcagtgatgt

SEQ ID NO: 2137 - DNA, 3788 bp, Heterodera glycines
tttttttgtaaaaatataatgaattatttttgtaaaaaaatatttttttcgtaataattttataattattaattttgtatcctggctaaattcttcaatcaataaccacatttagtcatctatcatcaatacgatacaacattttaataataattcaatttattattatattttttttctcagcgaatattggaagtaattaatatgagctaacaataattaagcggggttttaagtctcttatcacaaattaacaattttttctcatctgatgtaatctgatcaaagattcaaccaaatggaaatgaatttgaacagattttatgcaatttattgccataactgatacgtttaatgatttatattttattacgtttaatgatttatattttattttttagtttattttcaaaagcatgtaattatgtcaaatttatgatcaaataaaatcagtgtcaaaataaatgtcattatattagtgatcagcgaccatgaaaatactaattttaaaatttattaaagaaacgagtttttattaagagctttcccatcaatttttgcagaaaataaatgatttaaaattacacataattgtgtcattctgagaattatcaagaatcatgaggtctttctgagctgccgacaggcgccaccggattaaaatttggattttgcaaattttattaattaaattaaaaattaaaagaactaataataaaaaaaatccatattaaaatagagtattgaacttataggatgtgggaattgataaaaaagagttgtattttttttggcaatttcgacgaacacgacaaattgctacaaatgtttcgataaaaattagtcataatttgtagaagaaaaattactcaaaaattatttaattcattagggtaagtaagctaaactctcgaaatgactaaggaagaattgagaacttaagagtttaaaccttaattagatgccaatattgataattttaattccatctacaaaaagtttatttttcacgaccctcaaactgactaccaaataaatcagtattttccattttaattattttaaatttaactacccaaatggtttattgtatatcccgatttatctaatgttatactgtataccattttgcgctttgaattttggcatttatttatgttttgagaaataaaatttaaaacacatttttttctaaaatagtgttgaattttaattaaacaattcatttcctctcgaaaaattgtggtggttttattggccttctgtcgtattcaaaacatttccactttttccttaaattcggatttgtattttattaaggacattagctcaatgttcaacaattcggcgattttcacatcggaaaattttggagtttcctttttcataagataatattgcttcattatttccattttttcgacaattgtgaacctttttcgctctgtaatatatttaaattgaaaaatttattttaaatttaaaaataaaagtttaattgaatttaccttttaaattattttgtttaattcctaatttcttggcccatttttcaatcgtccaataactcacaccaaacatttgtttaatttttgcattaaatgccttccattccttctgcgaatgttttccattttgcataaatttaatttttacttttaaatatttttcaacaatttctcttttttcatcatcagttttttgatttttcaccatttttccaacttttatttctttcttccatctttgaatactgctgatatttgtgcccaaatgttttgctattattttttggcattttcttccttttccttccaattttccatttaatttcatttttaatttgccatatatttgatcaaattgctttaacattattcttttttcttcaactgaataattttttttcgtcatcattccaagttctcttttccatttgtaaattttcatttgatttgcacctaattttgtggcaatttttctttcaattttttgccattctttctttgaatatttctttcccatttgcttaactttctccttaattttatgaaatttttcaacaatttctcttttctttttattaattgcttttgaaaaattatcataaatttgtccattatttgttggcattggcaattggccgcccaattcatcacaatttctggatatttcttcactctgctcttctttcacttccaaatgatcaaattgttgatcatattggttctgatcaactgtttctccatgcattatttgataaatttggcagatgttttcttctgctccgtcgtcccatctttggccaaatatttcatcaaaacttttttcttgacttattttgccagcttcaatttgatcaattgcattttcgaaaattaatgcgcataataataaaaattttagtaacattttcatgatgttttgtaaaaaaataaagaataattttcataaaaaatgtttatttcccaatgaatttgtaattattaattttaagactggctaaattatatattcaatcaattatcaaccacgtttattcattatatcatcaatatgctacaacattttaataataattcaatttatttatattttgcttttctcaacgaattggggagtaattaatacgagataaacaataattaaggaattaagggggtttttcatttttgttctatttgatgtcatctgatcaaagattcaactaaatttaaatgaatttgatcggttttataaaattaattgcatttatgtccacctgcttactgattcgtttcattattttaattttatatatttttgaaatgcatggaattaagtcaaatttatgaacagatgaaatcagtgccaaaataaatgttataatagtgagcagcgaccctgaaaactctaatttgaaaatttattctagaaaacgttttatttgtgtttccattcattttttgcaaaaaaaaagacttaaaattacaaaatcttgtgtaattctaaaaattatcaagaatcataggtctgacggagctgccgacgacagaaaattggaaattttgctaattttgttaattaaattaaaaaaattaaaattaagtaacaataaaaaaccaatattcaaataggttgattgaaatgtcctttgtatgtcactaatttttccactaaaatcctcatggatcggattcggtgatcgcaaaattgtcggggatcgtgggcttggccccggtcggggaatggccaaaaaatatttttcaacaaatttttatatattttttaaaaattttctaggtatagagcagggcatgtccctgctcggcgtattgctttataacagccaggaaattaattacccaattttgccttctcattataaaaatgttaaaaagattttggaaaatttatcaaaaacattagaaaaagttcattgttcatgctaaacttttagagaaacaacaaacatttaaagcatttgttcatatgcataagtggtcaagtggctaaaaccttctgattttattatttctcgcttgggttcaattccccactgggatagaatattcttcatattttctttaccattattttaattgaaatattaattaaaaaaaatattccaactttttttctttcattttaagcatcctaaaaacctaaaaattaatcaattggtctttttttacaaattctgttaacaaatcgcattaaaaaatacaaaatttttcccggcggcgcctatcggcaccgccggccctccttgttccccaaaagtcttgagaaaaacgtgccgcgaaaaa

SEQ ID NO: 2138 - DNA, 2472 bp, Heterodera glycines
ttaaaaaatatagaaataaactaaaaacagtttgaattccctcttgaatggttaaaaatttaaaaatttagcctattaaacattttttaaaaaatttattatatttttttttgaaaaattccgacttccgagttccgacatttttggggtcggaattccgacttccgacttccgaaaatttttgggccatcggaattccgacttccgacttccgaaaatttttagtgcctcggaactccatccctggtaagtaccacgggtaccccctccccctggtattgtccctgcaatgtactaagtaatcaaatcggattaagaagttttaaatttacctaaaaattaataattaatagatcaaaattttccaagaacccttcatttttacggtaaatttaaaaatggcataaaaatacaaaaatttgctaaaatgccgcacatattctgaacaattagcgcagcttcggactgcagttgttgttgttgttgctgttgattttgttgttgcggatcatcaaaatgtacaacaacagcagcagttgaagcagcggcggcggcggtttcgatgacggtggtcgtcggtggtggcggcgaattgcaattattgacgaatggttcttcccccgggggcagcggcgacggcggtgatgggaaataatcctacaaaaaatttgggcgattaaatattttttattcgttgataagcgataagattatgaatgaatgaatgaatgaatgatgtgtatttggtattttataaatgttgctagtgaggaaaaataatgctttttcctattaagaaataatgggtggggcaatgggaaaatgattgaaatttttggaatttttaaaaattaaatcgaacataattcaaatttttggaatttcccaaaaaataatcgtagataatttaattttttggttattaaattaaacgtacatatcaagtagtgatttcacaggactgattgagtgatttctaaggacataattgtcaaaaaaatatttttagaattccttcaaaaattccactaatttctttaaattgtttaatttttcgccaaaatttaatagttttgtattttattgtttgcaagaagcaaatgttcgcgaaatgatcaaatttgttaaaaaaaattccattcacaattcaacatttacaaacacagcagacacagtgctctgcgcacagaagcatgagctatgcatggattttgagaaaagggattaaaatgttcgagactctcggatcaacgaacgcatcattaatgcaattagaaaaaaaatagttcgctgaaaatcaaatggctatggtgggggggggcagcattttaatttataaattcaaatattaatgggcacccttttattattgtaattaaaaaaatgcgacacaacaaaatgaaacaggttcccgtttttaaaggcacgccttttttaagggaaagacggagaaaacaacaagcaaaaaattttgctcacaaaatgtcccctctctcattaatcgcctaattattcaatttccaaccgttttgcgctggctgcaacattaattagtggacaaaatatcgttgacacattgatgagaaatgggggaacgcgaataaatgagaaaagggcggcacataaaaatttgtgcgcatttttgcagcataaaaaattaataaaatcacagcagtggccctctctcattagtgagaaaagaaaagtgaaatttttgagtgtcgttgcaaaaaacaactcgccgctaattgggcaatgtgtgaatggacaattagttttttattttttaaatttaatttaattagtgaacaatttcataaactggaatcaaatttggttgattgcttcggcccacaaaaaattgatgaacaggctttggttgcttaccacgtcaaataaaaataatggactttagtcgccaaaaattatgcgcgatggtaaattaatttggtcatttttaaaaaataattgtaattcaaggaaagggggaaaatctttgatcacaaaaaatggaaagcagcgtataattttgaaaacttacatttggaaaaaaattcaaaatttttgagagattgaagagcgaagtttatgcgttttaccacccaaaaattttcgggtttacgcgcatgggagtgtctaactgtggatagtggacaaccgaagttcgtggtcagtatgttagggcataggatagatatggaccgcgataagccccgaaaaaaagtcgtgtcgggcactccgtctataaattgactaattatttcactgatcggaattcatgatcaatgctctgaccctatgtgcctaaaccatctttaataggatgtgagaattctgagaaagaaatatggtttgtttgcatttcaatgcgaaaccgatgaggaaggcgagggggtgggagaatgggattggatatttgattctgggttgtgctgcgcgtgccgtggcaccccgctgggagatttgtgccct

SEQ ID NO: 2139 - DNA, 1915 bp, Heterodera glycines
tgaggaatgggaggggaaaagggaaggagatgtacatgcacacaaatacaataaaaagacgaaacgatgaaacgatgatgatgctggtgatgatcgggatggagatggatacctatgtgtgtacacactgtacacatacacaaaaggttagagtgtatgacaatgtgtgtgaagaacaacaagaaaaaggaaacgatgtgtgtgtgatcgatcatcattcgtagtttcggaatgggaaaaaatttttgaaaataaaaaattcaagccaaacatttgtgccaaaaccgttaagccccggaattttaaaatgttgggttcaaggtttgagaattgggtcaaaaacgggtatacatatgggatgaaaatgatgattttaagcattcttgggaatcaataaattaatttaagacggatttcttaattgacccgggtgatcaaattgtgaaagtgaaatcaaaatttttttaaaatgaaaaaaaattattagacggtggggacgattctttgaccaattgatttgcataaaatgcaaaaaaataaataaatgacggagatttgaatatggaaaggaaaaaggacagaaaaaaccactgctgaacaacaaaaattgtattaaaaataattatttcatttatttatccacttaattggcatatttttatctcggcagtttattccattgtatgaaagcgccatgggttcgagtctcaccggccgcaaatattttctacgtttaaatacaaaacaaggattttgtaatatgtataagcatcaaatttaaaatccgagttttccaaaaggaaaagcatgaggaataaagcggcgagggaaaacaacatacaattatatattcattcaatttaattggaggacgcgaaaacatcgaggagggggagaaaacaagcaatttgagaaaattagtgtagggaaaaattccaacatccccctcccccaccccggtgcttaaccttagaaaaacaaactcatccccccgcggagtaaagaagaaaattgctgcttatttttgtagcaaaagccgcttcattgccccctctccccccaacttgaagacgctccccccgtcctcccccatatcctataatcgccgccccccccccccggtccgagtgaaaagttttgtgtcacgcgtccacggcgaagcagcattttcggattaaaaaaacatatatgtagaggaggaggggagacttatgttttgtacacggaatttttaaaagccggtctttattaaaattgggcagaaaaatgggataattcgggatcagaattcgggaattttcacccgcagaaaccggattatatgacaaaaattctgttttccggattttttgatccgggtgcttgtttcagaagacaccccgctgatcagtaatcaagacccttggaatagatttcgagctccatttgacagagtcgggacaaggcgggatttttacctgggttagaggtaaaaaaagattttgtaaactggcaaaaatgaacaataaaatatgtaaaaaaaaaatagtaagtaaacagcttgaacttgaatggattgaaaattggagcatcacgatttggcaaaatgccaacatttacaaaaatgtgccaaatcaatatgggagcagtgaaagctgtttccacacattatgtgtgcgtgtgcgtgcacacatatgcacttaaagaagcgcttgatttgatcggacagtgcaaaggcagcaatgaatgaatgaataagaattgaggatggacaacttcgccctttcactctcactgtgtgttgagcgagcattttagagcattttgttggttgacgggcgggcgggataggggggagtggaatggttgttgatcgaggagcaaaatgagtgagtgcgatttgattgggggtaggggaggggggtgaggggggaaa

SEQ ID NO: 2140 - DNA, 5431 bp, Heterodera glycines
aatttttccaacgaaaaaccgcttaaataccatttttttaaataaaaaatcgagccgttttaccgtagtggcaaaaaattccacaccattttcatcttcttggaattgttgttgcattgagtgatggaaatgggaagtgttggcgccatctttgtcaaaaatgttgccgtgattttgctgctgcttttcggacggacgatgatggccccgttggcgatagcgtgccataatgtgtgtaagccaaaaataagacaaaatagggactgtaaaaaagaaaagaaacgggatttactgcttgtaatggctgatcgaaaatagctgtgggagctcaaattgctgtgggagcaaaaagacaggggccaaaatgaaggaaagatggccccataacaacagtcatccctccagtggtggatgtggtctagtggctaagacaacggatccacgtaaggggccccgagcggcggttcaaatccggccttccaccccaatttttcgcctaaataatactgctccgttttagtgtttaggattctcgaccaaaagaatttaaatttaggcccggaattttgaaatgaacgagaccgaaaccaggagtttagaaatggaccgggacgggggtttatcgagacaaaaaaaaacccatttgttagcggcctagtccaggatggtttgcttgcgcgccgggcccccggacccatccaggctgaggtttgttgtaattcaaactttttagaatgaaaatacctaataatagacagtatgttgaacaagagaagaccaaagaaagcgagaagaatagaacgccaaaatgttttcaatttaaatataatttgattgaattttttcattcacaattttttgttttgtgaagacactgtcgccaatctttttatttccgccgcgcgcttggggttgggtgggccaagctgaggcgggatggttcccgctcctcttcaccgctctcgtcccttctctttctgctcactccgctcgctgtgccgtaaagggaatggcgccctttttgccgttcgttttgatgggtctgatgctgctgaccgatccgatcagcgccaaagggggacgagaatgggaggggggaggggtgacaaagttggactggtgcttgagagaattgtgcagcaaatcgctgcttgcttaacggcaccaccgacaaggtttggggaagggcttgtcggccccctataactagacgagcaagagtctcggctagagattcatgcggcggtcactccgcttggcgggagttactctgccgaactacccagtcctgattatgggagggggggggggggggggaagaacatgcttttatgaccccgctgtgctacactgatcatttgtgatcgttgagaattgacgaggtgatccaaaatccgggttcatccataaagtagtaagtggagtccatttgatgaaatatttagtacttaaaggggaagcgtagaggaaaatgctctcgatggtcggagaagtcgagaaattcaaagaaaaatttaaagacaattttggggtcggcgcaataacataagcagtagataaaaattcatggatttaaaaatgtactgtatatacttttggggtactgtagtaagaaagtaaattctcgcttaaaatagaaaataaataaatttattaatttgaaaaaagagtgtactgtagaaaattctcattaaaaaaagaaaaaatggataaatttgtttatttgaaaaagggcactgtatgtactatggggatacagcagtgagatagtaattagaaaacaaaagcaattctcgactcaaaactcccgaacacccctgctggtgaaacctcaccttctgctgctgttgctgctgcatgtgctggctgttgaagaacctgtagcagtacacaccaccgatgcgcagttgaaccccgttttgcagcacgcactccgcatggattgaggcgccgtcaagttcgaccagtgcacttttgtccaacaacgaaatgccgaccaaaccaagctgtttttgttggtgttgtacatcgacagccccttgttgtactgcttcatcttctccttcgtattcttctgctggtgatgagttttgttgtttttgttgtgccgcaggcggaatataacggagcgcacaatggcgtggcaaaacactgggcgcacgcaactgaacgtaacgagtgagggataagtgagcatataaaagagggcacaaaatattgtctgtattttttatgctcgctaatgaccccacgaaattttttttacagtctagaaattttcgtaatttatttaaaaattacctaatttgatttttttgaaaagactagaggggcgatatattgtaaattaatatttcgggaatataaaactggagatcgaatatgggccggacccgtatatgggtttctattggcatgtagccctttttttttactgatacgggtttttacggaccgattgtgtgaacgatcacctccaaaaaagcggcatttattggtgcgcttttcctttgcaataaattagctacaatccttactccaatattagtaattgtctttgtccaagatttccggcatttgttcagaatgaaactcccaaggacatgataagtcgtccagcatttttacctgaatggtacaggaggatgatgagccaatctcggtgacaccgggctgaattgcgacagcacctggtcaagaacagcgaattattattttttgctattaaaattgcatttcattttaaaaaagttttcgccattacagtaattagaaggactgtcttaatatggagcatttcacttttggaaactctatgccgagaccgaggcattatcccgaggccgaaaccaaagaaatgaaagcggagcaggtcatttccccacaaaattttaaaaaaaattgaaattttttaaaaaattttccgtggagaaccggccggagggaatgaaatgcactcggatgaatgaatgacctgcgccaaaattggctgtgctagcgaacgcattgatcggcaccagacatggcaacagcagcagttgttgcaacgatgatgccaacgacggaggagaagaagaggaagcagtacatgaaaacaatgctgagggggagtaggactttgctgctgatggttttggtgttgccgatgccatcgtcgccatggcttttcctccccgctgttcggcatcacaaaattcgactgcttctgttacgagagatgaaacggcgccggtagaagcaacacgatcaacatgcttaatctcctcatccctaatgttgttaacatcattttctgccactgtacggctgttgtgccgttgatgatgatgatgatgcggtggtggcaatggtggcatcagttgtgggcgttgaaatgttgccggagggcgacaccgcaaaaagaacacctgcggagcaaaatttaaacaattaaattttgttttgcaaaaactgtaagtaatctaaacaaaatgacaaaatgtgtgtttggatgggtgagaaattttaaaaaaaattcttggaaatttataagaaatttcaatttcaagaaaaaaattgttgaaaaaattttcaaacgatttttttcaaattttttataataaattattattttttgaaaaaaataaaattttttaattaaattttcaaataaaattttttctaatttgtaagattttttattgagtctattactatagaattaatataatgatgtaaaattcaataaaaatttgttcgtccggaccacgttgttgttggtgttggcggtggtgttggccatgtgctgctccaacagttggagtggtcgttccaccgcgttcagcaaccgctcccgctgcttttcaatgctgcgcaaatcgctgaagctgcgcgacatggcatcggactcccgcaaaaacacctttttggagaattaataaaaattaaattcaattaaaaattaaattgcgttatataaatgggtgcagttttcgtttccactccgtaccgtttacccaccaaaaattaaattaaaaaattgctaaaaaattttcaaatatttttatttaaacttttttttgtacaaatttttttaaagttcaaattgaaaaattacaagtttgagaatttaaaaaatttcttattttttttccttcagtgttcttcttctaaatcgccgtcgggaaaaaactttttttgtaaatttttaattttcagttgccattaaaattttttatttggatagaaaagtgcgcagggcggaagaaatgtatttaaaaatgtaaaaaaatatttatttaattcaactaaaattcaaaaagattggaagaggggtaattgaagcttgcttgcttgtttcccaaaaaataaaaataaaataaaattccattttctaattatttaaatttggaaacgcacttcagcaaggccaaagttggccgtgcccgcctcctccagcccgtacttgtccagcgtggcgcgcacaacctgctccgcggtgtcggtggcgttcaccaacagagtcacatagggccgatgcgggaacagttcgactccgtaaatttgcaaactcccacctgttcagcagggtaaacaaattaattcaattaaaaatgggtaattaaaatttaaaaaaaaaattaatcagtgcccaactacaataattaattattgtaatttacaaatccgttaaagattttaatatatttttaaatcctttctaacattaaaaatttttgaaaaagtataaaaaaaatttaaaaccatttttttgaatagttaaagcaaaacagcgaaaagaacttgaactcacaaataaaccaaaactcactatttgtatttcaaaaaattttattgttagaaaaaaaaatttacaagaaaattcaagaaaaaaaaacttagtaattcataataaaatttaaaaaatcgctaggaaattgtttaaattttttttcttgaaattttcttatatttaaatgtttttattttaatttctcggcgggggggggggggacgagcggcgtcagcagggagggtgcaagccgattccgaattgattccgatttccggctttttttaaaggcttgcggtttcccgatttaggatttggaaacactctttttttctctctctccctctctctctattactctctacccctcctctatctctattactctctctctctctccctttcctctcactctttctctctctattactccctccccctcctctatctctattactctctctctccccctttcctctcactctttctctctctattactctctccccctcctctatctctattactctctctctccccctttcctctcactctttctctctctattactctctccccctcctctatctctattactctctctctccccctttcctctcactctctctattactctctcttccactgaccgctgttcat

SEQ ID NO: 2141 - DNA, 2523 bp, Heterodera glycines
ttttgatgggattgatcaagatacattgattttgtcatgatcaatctatcaggtatgtatcggcatgccatttccgacatttttaggctcagtattaacgactgccgtaatttttgggccgtaggaattttgtttttggaattttttgaggggcatcggcacatatcccctgctggtctagagctgtgttcagaaatccaaaaatttctcgattagagacctaaatatccgagaaatttctcgaatcgtggaacgaacaccgaacaacttaaaaaggcacacatcacgaacacaaacagattcacacacacctttattctgcaacagttgcgctctctttttccctcccccaacactcttcacactgccgcccaatggcggtgccgtcgttggtgtcactgttgctgcttgtcgccgcttggagaagcgtcgcggaacgctgcgcgtgaactcggcactcgccgccgcaggacgcaacacaaagcgaccgttacgcatcggtgacggcggcggcacacagcgctcgctgccgtcgctcctctccttgtcgccgccgttgtaacaacaccagcccagctggaccaacaacggtcgctcgtccgcgtccatgtgccgctcgctaacgccgtcacagttgctgccgcccgtgccatcgtcgtcgtcgtgcacctcccacagcgagtaggaagcgctcgccggcgtcgtcatgtgcatgtcgtccgcctctgcgtggaatttggcgaataacgcgtccaccacatgtgcgacggtgtgcatgctggacactcgcatgcattttgttgccgcggcacccgttgtcgtcgaagcaggggacgactgttgttgttgccgttggtgattttggagttgttcatgaagatggaagcggatcaccccgtggaactccgtgttctgcgagtgcgagcaataaacggttatttttttttagttaattcgatgatgaagccatcggagaagagcaatatgcttttcgtaaataaatcccgccccctcgaccccctcaagaaggggtgggcaaaaaatcacaaaaactcggtactgtaaacaaagaaaggccgaaaaacataatatgaaaatgtatcaatgactcttcagtcatttttttcgggtctcccataatttgccacaaaaagcggcaagttcaaagggtatttttggtttaataaccccccccccccctcccaacggcatgggaacacatgagcaccagcagaaaccacacctcgtcaggcaaactgatcgcgaacatgtccatcattgtggcgttccagcgctcaattgtctcacacagtttttgcctttgatgtgccgccgtcgccattttggacaaaacaaacaaacaattaattaaaagggttttacaggcaagaaaatgtgtcaaaaatttggaaggcaagaagagaattagtcaaaaattaaggcgatgatgatgaaggaagtcaaaaatatgcagaaaatattatgggagatcattgaacaataaggccactgaaaagttaaaaaaacaaataattaaaatacatacagtaacaattattataatagtacagtatctcgcgctgtcggagaattggacaacgaaacaccgcaatttcatggaacttttatatattttttatttcattttgtggaatatttttaatatatatatatatacacacataaaatatatgaattgggaaatgatggatttaaaaaaattgggtcccaattttggaattttttgggagaatttccgacgacgatagccccgcgattgcactactgctgctgtggtggatgatgaccgcataaacgattgtgctccatccacagcagccatgggctgctgctgcttgatgctgtcgatggggcggaatgatgcgcgtgaaatgcccaatttgcgcaatttgtgtctgtctgtacaagggaaaatctatttgaaaattcaaattttctttgtgtctatgcccagtaaaaaatggatgatttgccataaaaatagaggtacttttccgtttgggggccccacatttattttacttaaaaaatgtcaattaaatgcgcaatgaatattcaaaaacaacgcttcagcaatttgggagtcataaaagcaaaaatttaaaaggaaaattaggtgaaattaaaaaaaattgtttaatttctgtaataattttgctatacataattgcaatttccccgtggtgcaatatcaatttaattaacaattatttttgctttggccaacatatcccaactttttgctagccgtaaaaatgattattaaaagaggcgataaataaattgttttctcggggattgacttgttaaacaatgaaaaaattactctccctgaagaaaaaatggtccatcattaatttatttgttcattaaaacattttgtgcaaaataaaactaaataaacgcaaaaaaaaaacgaagattcaaaatgtaaatgaatgggatgggatgggatgacatggtttttaatcttcgctaaaaggaacaaagaaaggggggggg

SEQ ID NO: 2142 - DNA, 1833 bp, Heterodera glycines
aggggggggggggagaagaaataataaaaattcaaataaacaaaaaaaaagggggaggagagagaaagggatatgggtaaaaaagagatgaaaatttaaaaattgtggaggttttttggaacggggcgaagaaagaaaggggtgggcattcgagttcgaggccgacggacagccgatcgacgaaatggcgcactcatcatcattatcgtcatgatcattattatggatcggagagaagcagcaccactcaattaagcgtgcgggggggggggggggtagggaaaggcggcggatgaacgaaaatgagtgaacacggcgaatggagagggacggacggaatgatgggcaaatgtatgccgccctttacgctgaaaaagctgttgtatgccatgccaacaaaaaaaggctcgtcattagcatttgcagtctgtacccaatccaagccctcaaatcctgctgggaccgttcattgtggcaaggcaaaatttaaaacaatttgtattgtttttgtggcattggtagacatatttaattgccattcaatggccaaagaacaagcaaaaaaaagcattcaaaaaaggattaaagcaaaattatgccgaaatttttcagaaaatttggagcaatttgtgtgtagaacaacgatatgcaaatggggaagaaagaaaaaatggtgccatttgttagtttaggctcacaattttttttttaaatcttaggggatagaaaattttttttttttgcacaccaaaaaggacactctttggctattattagaaaaaagttttttaaaaaatgcaaaatccaaactaaaaactagcaaaatttggcatttagttattggtcaccaaaaagtgaaagtattaaatattgggaaaaaagcaggacccacatcaaaaaatggcataattaatggcaaaatttgtttacaatggctcaaaaaaatgcgaaatatcatttaatgaagtgagggcgcgagggaaaaaaacactttagcttgactctctgatccgaaaaattattcaaaaaaaaatcggggtaacttatgtaaatgaaaaaatagccaaatttgcatctattatataattcatcaaaatgtgaaagtgtgaatgggaacggaaagcaggattaagcatcaaaaaattgcctaattaatggcaagggaaattacttttatttgactctctgattcgaaaaactaattgaaaacatttttgtttttatgcaaaaaatttagtgtctgttttttatgttatcaattcctataattgtctattgttagaaaaaaacaccttctcccttctcaagcaatttcgaatgaatgccaaaaaagtgcgtcttattttggcagaaatacataaaaaagggttgactctccgacaaatgatcaaaaattagagcaaaagtttaaaatgttttaaattaaattaaaatgattaaaaattgaaaaaaacagcccaattaatgaaaggccagaggaaccaagcaagcaaggcacatgaagctataaaaaataattggccatcagcgaatttttactttacgctattgggacaaaaaactcaattatacaaaactcgaacgacgtaatatatttccgaatttttattgaaaaataaataaatgaattttaaaaagacattaattaactcacttatttaggtcggtgagaaaaaaattaataattttggaaagcgagaagggattcaggttaaattcaaaaataaataaataaattttcaataaatacctccggtattgcatgactcataatacaaaatacttcaaaatttgctcaaaaattgtcaaaaatgacgatttttagcacaaaaa

SEQ ID NO: 2143 - DNA, 1313 bp, Heterodera glycines
aacgtttttgctgagacttcttggtggttcgccaagagtttgccaaatgaaaagttcgaactttggaggcgaacagtgagcacataaatgatcctgtaacgagaaatacccgaattaaatggataatatttttaaattttactcaattctcaatcatttggctcaaattactaaaaaggcactgccagatccgaatttcttatatttttgccaaaatttggaacaaaatgcctaaatttggcgaaaatggctaaaatttccctttttgaaaatatgaaatttaatccaaaattgtaaattaatttattaaatattttaagattttttttcgaataaggacaattttgaaaataaattattaaaaaaataataataaattaattggaaaattgttccatttcttaggggtgtatttcatttttgttaaagaattttccgaaaattctgaaacaggcattaaaaatggcgaaataggcacaaaaataggcattataattccccgtagacagcccaaatagctaaaaacgcgcttttcgtgctcaattgtgcgtattaaatttaggaatttatcaaaaaaatgacgctctacaataattggccaaaaacgaaataattggccaaaaatgagccttctttttaccttttttgttaatcaaatttcatgtggcaattagagcggagagctcatttatcagcgatcagccaagggatatgaatggctggacgggcgccggacttttcgacagtggacttttcgacagaggacatttcgacagaaggacttttcgacagcaaaggacttttcgacagaaatattttaaatttaaggaggggacttttcgacagtggacttttcgacagtaaaatgtaattaaatttcaaatttaggggtgtaaaatcttaaaattttatccaaaagcaacaaattaagtcaaataattattgagatacataatttttaaattcaaaaattcttttcaagaatgtaaacaaactaccacgtagatgcagttgcttcaatattccatttactgacacgaatacttatgaatctattgatccacgtgtacgggtggggtactccaacaattatggcgagcgataatccaacgcataattaaagtacatgctatagggaagctattcccgaaggattctgtctccccataaatctgggcgcatcggatcggggggactgccccgaaaacaaaaataaatcgattttttcaagtgtccggttggggtactcaaacaattatggggagcaaaaatccaacgcacaattaaagtacaggctatagggaagctattcc

SEQ ID NO: 2144 - DNA, 958 bp, Heterodera glycines
  unsure (1)..(958): unsure at all n locations
atcgttaaagcccaagtggcgaatgttttcagaaaaaattggccaaatttcacgaacaaaaatgtcccaaatcagctgctggccatccgtgttgtgtggtgatgaaagccacaaatataaattggtgcctcttttgtcgaaaatttggtgatttgaacgaagaaaagcgatgacgaagtgatcgatgtaactgtgaaaatggaaggaatgcttttattgccataaagctttgatttttaattactaaatccgaaggtgattaaaacggattttgctggtcaacggataatcgggcaatggaaattccacaattttgtcatccatccacacagatagtttcggttctggtcctttgtccttgcgacgaattgcgattggtctccaaattgtcaattcgcttttgccattgaaatgtttgtccaccaacgcattgaaacgtggcgaaagaagtgccaatttgaggccgagttgaggacggtcaaaggatgggaaaatgtccatccaaacgtcgttgcaaatccaactgaaatggaaaaacagtttagtcaaataaacgacgaatttgtgacttttaatttaattaccgtcggttcatttttggcaattagcacaatttggccgagttccgaatgatgtcacacaaatagcagaagaattaattgcgttggaaactttatttttatataatgagaaaagcggaaaaccaaaaattctaacgaaaatcacattttattcaacaatttttgaattttgtttgccttaaattgttgcaaatgggcccgaggggttggacaatatgccaatggaaggcgaaaaatcattgacaaaaagcgagcagaaaaagggaatggcagtgctttggaatggaaggaacgcaacagaggagaatatattttgcaaatgatgacatttgcccgggcgttttagcccctacccccnaaatcatcatanaaaatca

SEQ ID NO: 2145 - DNA, 1664 bp, Heterodera glycines
  unsure (1)..(1664): unsure at all n locations
ttatagttttttcactatttttttcctgagctcccagtagcctggaatgcacgaaaaacatgttttttcggctgttgttaatctacttttcgagttattagcaactattttctagtttttaatttttatcaactaaaaaactataaaagttttgaaaaaaactattttcagaatcgacttaaaaatttttttcaaaaaatgcacccttaagaacctacccgaaatttttcaaaaatgcacccctaagaaatgaaaaatttctcaaaaattcaactccaaatttattatttttttttgataaaaatttgtgattttaaaaattatttagctcaattttgatttggcttaattttgttacctttttgattggagtccgactttatgaattgtaaaaagcttttcatttttattcctaatagatttgacaaaaaataatgttctgcgcctctgtctctgtccccaatcggatggaattggccaggaaattggagtcaaggggtaattaatttggagttaaatagggtgcatacagtaattaaactaataaatttcaagggatactgtacgttcgtcaccatcagcagttgaaggatgctttgtgtgggcaaatgcattttgtccttttcagcaataaaccgaattccacgcccgacatttttaagcagtttttggtaaatttcatttcacaatcctatcgtatatcgtaattattttttcgtttgtttttcttttagttggctcttcactttttgttcgaattggccgaagcgcgcatgaactgtttgttcgtggatttggagctgttttcggacgggcacaaaaagatggaaatgccgaaagtgatcagcaattcgttggacgtttttccattgattggggtccaactgatcaaaatatgtggtgatcagctggttacagccgattgggtggccaaagaggctgaaacattgggcgtatgcattgcgcgggtgggtgaaaaatatttggacatttttgattttaaatgtttataacgggcatttttgttaattgctattttaaatgttttatacactcttccaggcctctgatgaccctaaaaggatcccttctcctgttgatcaacttttgtggccctgccatttgccgtgtccccgtgccaaaaaatttggcggcaaatgccgagacgacgacaatttttgggggtgtgaacaatgcggacagactttcaaatttgcgaaacagaatgagggcaaagaaccgaatgtgagaaagtgccatcaacgtataagtcaaatgaaccgaaaaaaccgaaacatttggccattttaattagtttatttaaacagttcctcgttacaatggcccattgaaatggccccacttctctcgtgtttaaatcactttaatgccattcaattccatttgatcatttgcttccctctcccaggctccgatcactcatttgttctgcgactgcggtggcactcgcgtcgatcgcttgactttccgttgtgccttttttgctgaccatggcgttcacttccacgcctttacgacgctcgatttgctgaacagagaattggagcggcagagcaaaaaggacatagtgaagaaccttttgctngtgggcaaaaagggcaacgtcnaatcgacactgatcaacgcgatgcattttatgccca

SEQ ID NO: 2146 - DNA, 5659 bp, Heterodera glycines
  unsure (1)..(5659): unsure at all n locations
tttcagcaataanccgaattcccacgcncgacatttntaagcagtttttggtaaatttcatttcacaatcctatcgtatatcgtaattattttttcatttgtttttcttttagttggctcttcactttttgttcgaattggccgaagcgcgcatgaactgtttgttcgtggatttggagctgttttcggacgggcacaaaaagatggaaatgccgaaagtgatcagcaattcgttggacgtttttccattgattggggtccaactgatcaaaatatgtggtgatcagctggttacagccgattgggtggccaaagaggctgaaacattgggcgtttgcattgcgcgggtgggtgaaaaatatttggacatttttgattttaaatgtttataacgggcatttttgttaattgctattttaaatgttttatacactcttccaggcctctgatgaccctaaaaggatcccttctcctgttgatcaacttttgtggccctgccatttgccgtgtccccgtgccaaaaaatttggcggcaaatgccgagacgacgacaatttttgggggtgtgaacaatgcggacagactttcaaatttgcgaaacagaatgagggcaaagaaccgaatgtgagaaagtgccatcaacgtataagtcaaatgaaccgaaacatttggccattttaattagtttatttaaacagttcctggttacaatggcccattgaaatggccccacttctctcgtgtttaaatcactttaatgccattcaattccatttgatcatttgcttccctctcccaggctccgatcactcatttgttctgtgactgcggtggcactcgcgtcgatcacttgactttccgttgtgccttttttgctgtccatggcgttcacttccacgcctttacgacgctcgatttgctgaacagagaattggagcggcagagcaaaaaggacatagtgaagaaccttttgctgttgggcaaaaagggcaacgtcaaatcgacactgatcaacgcgatgcatttttatgcccaatttgagacatttgaagacgcattacaggtgagtagtgagtgatctgttgctgattatggcaatacaatgataccatacaataataccgtaatgtgagaatgggtggggccgagacggtctcgtgactgatcaaaaatgtgaagagaattacggaaaaataagctaaaatgccatcttaaagttatgctggggctatcaatttaatgtaaatacaatttttcatggcttctttatgctctaaataataggaaaatcattttcttttttgtatttactaacaaaaatcggcacttttatttacatattttgtgatttttacatattgttataaatttggtacatattttgtgcattatttttgagagccccatttatgtcttattcaatatctaatggaatataaaatatatttttgtgtaaaaccaataaattgcttggcaattatttttatttgcaaattaagctggccacacttgccgatttcaactccgactctcttgcccctgcctcatactccaaaagcatgctacaaaacggcaaacatgtgaaaattgaggcgaaattgggaggagataccagccgcaaaactggccaatcgcagacccaaatctccgcagcatacgttattcaaccagttgaaggtcgtggtttatgacaattttagctacagtaccctttttgactgtacggagaaacgagcaaaattttactatttgaattgttagcataattttgtttcctattttaagtgtttaggacatgccaaaaattccatctctgtacaattggatttaacagtcttaacagttttttagacggacaaacctgttgtgtcattgacacgcctggcatcgacatggacaaccaaaacatggccaacacgttcggcttcctctgtgagtttgatgtgttgcacggcgtcggcattatgatggaagaaaacgacaaccgtgccactaatccgtttaagtactgtatcaacgacggctttctgtgcaatctccacaaaaatggggcaccggtatgagtttggcacaaatacccaatgaaaaatgccatacaactagcccaccttctaattgcagaacatcgtttttctgatcacccattcgtcgggctcgggaaaggccatcgacgtggtgggcgagctgctggaagaggttgaggaaaagaacggcgtaagtgcagctgtttacagcatttgaacaattttactattcttttgaaaattaagtaatttttcttaaatataaaagaaaactcagaaaaatgctaggggtcttttcttacagattttttatgttttgatttaaaaaaattaaatctctcggcgggacagcgtgcaccccaatcacgccgccgaaatcacgccgctcaattttttaaaaatttttcaaacagaaaattttttatacgaaaatgtcaagaaaaaaaatttaaaaattttctgcgattttttttggaattttatgataaattactaaaatttttttcagaaaatttgccaatttttttttaaattttcgtataaaaaaatttctaagaattttttctagaaaaaattccaggttcgaaaatttttttaaacatttctagtgacgtgatttcggcggcgggattttgtcctgttcctgaaaaacatttgggggaaggaaattatctgttctgcttcataagcgcagcaggtcctcccccccccccctttcacgaaagaaaaaaataaatgtacagtaaatttcaagaaaaaatcgaattattttcagcgatttttagaaaaaattttttgaattttttctaaaaattatcttcttttttttttgaaattctgttatttacggcttcatcccttccgattttctcaaggtgaaaattccactggacgaaagcaacattttatgcttcaacaatgccccgtttgaagcactttgtctgatcaaaatgaagggtgtcacttctaatgaaaaggaaatgagaaaattctccgaagaatgggccgaatcagtgcagcaattcaaacggttgttgaagcatttggccactgtgaagccccatttgactcgggaaacgttgtcggtgtgtgccgcgcgaagtgccatcgtcaacattataccaatcattgcgtcaaacgggaagcaaattcaagtgaatcacacagacagcctagaattatttaaaatgccgaatttcaaatcattcagaaaagcatcgcaaagttggaaatcgaagaattggaaatcgcagaatggacaaaaaccattggcgaggataagaagaaagccgacattatgtttgacaatttcatgaagaaggaacttggtatactccgcatgcttttgcactccggtgagttttggggtgcaccccaaaatcacgccgccgaaatcacgccgctagaaattttaaaaaaattttcgaacctggaattttttctagaaaaaattcttagaaaattttttacaagaaaatttcaaagaaaaaaaaatttttttggaaaatttcaaaaaacttagtaatttatcataaaatttcaaaataaatcgctgaaaatttttcaaaatttttttttcttttaattttcttaaaaaaatttctaagaattttttttagaaaaattctaggtttgaaaattttttaaaaatttctagcggcgtgaatttgtcccggcgtgatttcggcggcgtgattttgtcctgttcccgagttttgtctaatggaaagagggggggggggatgcgatgaagcagccagcaggggtgaatttctactttttgttcaaattcatgttcgtgagccggaattgatacataggaatgggtgtctttggtgatcaacgataatttttctctcatacaacactaaaaagccaaaatttttaaaaacaaattctatattatataaaaattttggtgtttatgcactttatagaccgtaaaaataaaattgttttttaaatcatttacaaaatttctagagcgttttcggggttcttgatcatgaatctgacatccatttcaaccaaattcgaaccccgaacccgtatccgagttattttcacaccataaaatgattttttttatttgaattttcgagtttttgttcgaatacggctccgggttccaaattttgtcgaaatgaatgtcaggtttgtgatcagaaaccccgaaaatctcctaggaatttttaaatgattttttaaaaaattttttattttttatggtctgttaagtgtattagtaccaaaattttcgggtagaggggagggggatacggtaataaaatgaacggatattcattcaataacagacagcatgatgagacgcaatgttgtggaggacccgccattgttggagcgggtcacagaaatgcgcaaggaaatgatcaggaaagaggcagtcatcaaacagcagctgattgaggaactcaacttttgctgcaaagaggcgggtgttactaaaatggagcgaaaaagacaaataagccgatttgatgggattttgattaatgagacccatttttgtaatttttggaaaaccacaaattatcaatgctacacgaaaattcgaaaaaaaacaaaaacatttttttttaatatataccgtattttctcgaaaggccccggggggattatttttcaacctcttcagaaaggggggttaattggagacagggccataattagaaaaaatacggtatatttctcaagtactaaatgcggaaattaataaattcaccgtttaacaaaatgaattgcatgtttaagacagccaaatggatctcctgtttgaagtcaatggcagtgataacggatgatgaccaaatgctgagatacatcgaattgagcatccgagacgccgatggaaagatggccaaattgaagggacagtcgtcccgcgaggagcagcagaagagcatcgatgcactccgagtcagttcaactgcttacaaatagaggaaaaaaacttggaaatacctacgttgttattggatttttaaattcatctatggtcatgcttctccatttttctgtatcggattaactttatccgatggcttccatccacgcttcactttttgtcgattataaaaatcttgaaaattaggggcgtgcgttttcggagttgcagaacacatatgtatgacagggatggcatagaattccggcttcagatgtctggaaaattttttggtgctttggaatgccatccctggtatatgacacgatttcgaccaattcttaagcccaaacacgaattcaaacaaaaaatcgaaaattcaagcccattaaaaaactaatgaaaattcaaatccctttgacgaagtaacaatttatttatttatttacagaaattcaaggaatgttacatcaaagagcgcacactgttcgaaacagcttccggcaatggtggaggagttcaaatttccgaccgaaaatgttgaacaaatttttgacggacttttcgcattggaaaccggcgacaaaatgaaggacaattatgaagtggtaaagaaagcaaagcgagagcatcagaggcaattcactgccgaagaagagaggcgcgcagcgaaacaaaatttggtcaaagccgaaccgacaaaatgccaaagtggtgggttggcgagagt

SEQ ID NO: 2147 - DNA, 1478 bp, Heterodera glycines
aaatagttgttaaaagctttcatatttaggaggaagtaatattgtataattttaccaaaataggtaacaaaattaagtcaaaccagtatgacgataaataattattagagcccggacgggaccgggatcccgccgggatttttccgggactcccggtcccggcttttttggacaaaccaccgggaccgggagtcccggaaaaacggagtcccggtcccgggatcccgtcccggtccattttccaagtcccgatcccggtcccggccatttgggccgggactaaatttcatcagtgaaaataactcagatttgaaaatatttaataatatttaataattattttggcgaaatgtctttaattcgaaattttcagatagaactttggatttcttgaaaatttgggcaatttcaactgttaaaaagatccttgaaacttattaggaccgtgaaatggggtccacttcgtttcggcgccagctcgtttttccactaaacattttttctgagtcatctaaatccaacattgttgatatcattcgaaagcttaacaaaaattttgaagttttttcttaataaattttttcaaggcttgaaaattttgttgctttttgtaaggctaataaagcatgttacgagctttcgaatgacaccaagattgttggatttgggtgcaaagaaaaaacgttaaattgcaacagagtccacgtttttgccatttttatatatccgatttatttatataggatttgagaggtttttcttcataaaattgcatttgatcactgatttgaattatgatcgatcggtcattcttaattaattcatttcttcttcttctgcggctgatcactgtttttgttgttttgtccgtcactcatttggcccttttgtgatgcattgtccggcttcctcttccacttcttctgctggtggcggagacaatggccttaattatgcgcaattttaattatttaaacaaaatcaaatgcttttttaattgctcacccgatgcaattattggcactaaaaagccaaaagtacacattgttacaattgttgtcccaattttcatctttcttctgctgttgcttaaccgccgtggtctccccaattttgcatcgtttcattatccaacttttgtcaaattcatttgctttggccaatgtcagcttttcctttgtccattcgttcaccaattcgaatggcaccatttccattgacggcgcatgaacaggaaaatgaatttcgtaactaacggaagaaatggcattcgcacggagaaaatgctaaacaatttgattggaaaacaacaatcagtgatttgccaaaaatgttggaacacaccagggatggcactgaattccgatatttttgataaattcggaatttttcaaaaattttcgatttataacttttttggggtcgggtttcagaaaataactcagaatgccatccacagaccgggtacgccccaaaaa

SEQ ID NO: 2148 - DNA, 2141 bp, Heterodera glycines
tttatatttttacatatttttttgctgctaattatgccgaaagaagcagctacttttgtttggcgtatattttgacatttttgggtaaaaactataagaaaaataaaagagttccaaatcaatttaaaaatcattgggtttcaatgctgtgctatatttttttgtttttaaaattttttttgtgtcttactttttttttgcaaaagttaaatcatttttttatatatttaattacgaatttataaatatattttttattaaggaaaattggaaattggcacattcattgatttctctgagtgacagcgccaatcggtttaataccttcccctgacttgtgtttccattaatataattaacgcccaaaaaaagaaataggtgctaaaaattgaaaaaatttggagacgaatttatgtgaattattaatttcttaagggtatatttttctgaatttttggggccatttcttagtggtgtatctttcgttttattgcactttcaaaattatttataagaaatattaattaataaaaaagttataaattcctgcctttaataagaaaaatgcatccacaattttgtcacatttaattaactcacaaatggaattgcatttgaaaacggaattgaaaaatggttgaaaataaatattccaaaacaaatagcagaagaataaatcatttgcttcttcttcaaagtagtaatataagagtgctgacgcgtttcttaaaactgccaaatggggttgtgcgtttcttaaaactgccaaaatggggttgcgcgtttcttaaaactgccaaaatggggttgcgcgtttcttaaaactgccaaaatggggttgcgcgtttctaaaaactgcctatcggcgcgtttcttaaaactgccaaaatggggttgcgcgtttcttaaaaaaattgccaaaatggggttgcgcgtttctaaaaactgccaaaatggggttgcgcgtttctaaaaactgccaatcggcgcgtttcataaaactgccaaaatggggttgctcgtttctaaaaactgccaaaatggggttgcgcgtttctaaaaactgccaaaatggggttgcgcgtttctaaaaactgccaaaatggggttgcgcgtttctaaaaactgccaatcggcgcgtttcataaaactgccaaaatggggttgcgcatttcttaaaaactgccaaaatggggttgcgcgtttctaaaaactgccaatcggcgcgtttctaaaaactgccaaaatggggttgcgcgtttctaaaaactgccaaaatggggttgcgcgtttctaaaaactgccaaaatggggttgcgcgtttctaaaaactgccaaaatggggttgcgcgtttctaaaaactgcctatcggcgcgtttcttaaaactgccagtgcgcaaatattataatacaatttaatacatttcatttaatcaaatcaatgcttttattatttattgcacaataataaatttcaagtatattttttttgtttgtgccaacatgtattagctagccctgacgagttagtcaaaattatgaaaaatatttgccaacgttaatctatctattctaagtatttgacaaaattatttctaaataaatgagattaatttgttttagaatttgttatgcttgtcagttcatgtttttggtgaacactttaaagaatagtgaaataataaagaacaataaaaacagatgttgatcagtattggattaattaatgtcataccaagcaatactggcataaaattcgaggaatccatctatagttatatttagggatggtaattatatggaaatccatattttttttcctggaatgtgggaggcctgaaacgcacgaaaaacatgtttttagcttggtttgaagcttctaggaaggatttctatatccatattttccatatttttccatatttcgcgatttatgtccatatttccatatttttccatattttggcattttgtccatattttatgtccatattttggcatttttcaaaaaacctctattagaacggcccccagcagcttaattagcctttttgagcccaaaaaccgaaaaatttttcaaaaaaatcattttttcgccaaaagtctcgagaatattgaataaatttaaattttcttaaaa

SEQ ID NO: 2149 - DNA, 3576 bp, Heterodera glycines
  unsure (1)..(3576): unsure at all n locations
tagagaccggcgcgggacgggatcccgcgcgggattttgcgggatcccagtccgcaatcccgcattttttggaaaatgcgggatttgcgggattgcgggatttgtgggattaatcccgcgggatcccgtcccgcaaagaattttgagttccaatcccgcagcgggatccgcaaatttgactttttgtgcgggattctgcgggatttcattgattttttgaaaattttaaagaatagaatgccaaataaagtgtttaatttgctttataaaatataattaaatattccagtaaaaaaataaagatatatattttttaaatgccataatttaagcaaatatgagccacccaatttggcaaattgggctttttaaacgaactacagaagattcggtcgagtgtttggagtgtaaaagtaaaaacgtcagtaattttactcttaaattgtcacagcggagtgtcaaagggctcaagacccatttgtttgccaagcacaaagacacgccatatgcagaaaaatacttaaaactggatgaaggcaagtcaaagaaggatggtccaaaaatcacagattatacaacacggagttcgggtccaagaataaaattgtgatttaaattaattaccattttaggcaaattaagtgtgatggacaaggacattatcaattttattgcttgttgcaatttgccgttccaaataatcaaccacaaaactttcaaaaaattgctccgaaatccttcggaaaatttacgcgacgaaagccattaccgaaaaaatgtcctgcctgaagtttacaaagttgtcaaacaccagatcaagggagaaattgctgagtttgagcaaatttgttgtacctctgacatttggacttcggatacaactaaggatgccttcataaggtttttattcgtttggtacaaatgaaaatattcaaaaatttagcttgactgctgttggtgttagctcaaaattttcgcgcaaaaatttactctagctattcaaaaatttcatggggcccacacttcggaacgcatctctgaaatcctaaaagctcttctcgaaagttggaatgtaaaagaatgccattgttttgtgacgatttcggcagcaaatntagttaaggttagtttattgaacattttatttcaaatacattttttggaggcattggatttaatgcacattgaaagaatcagctgtgccgctcatgacctcaatttatgtgtaaaggattgcttttcaaaagaaaaagacgaaatggctcaaattttcgaaaaatgtcgaaaaattgttggaactttaaaacattcggcaaaattgatggatgatttaaaagatgttcaaggcgaacttggtctaccgaaagctaaattgcttcaagttgctaattatcaaatactcatttaattttcatttcaaaggacgtaagcacgaggtggaattcgacattacgtatgatcgaacgtatgctggaacaatcggctgctattgatgaatttttggttagaaacaggaaattcgatctgcttctaagtcaagaagaatggtccattctcaagctaattaaggcaatttagtgttcaatattttcttatgttttaaaattttaaggaacttctaaagcccaccgaagaagtctctttacattattgtaaagaaatcctctccgcccgaattccgctcgctcgaactttggtctccactttggaacgagttgatctttcagtgacaattgatggcgaaatcaaaataattaacgaagttgagcaaatgcgtacaaggctgattgaggcggttaaaaagcgttttttacaaaaagaaaataggtatatacttaaaatactattatattttaaattaaacatttagactttgtatgttgagtacttttctcgaccctcgcttcaaggatcgtttttccgacgaaagtgacatattttttgcgcgcgttgcacgttttttgaaggatgaaggaacagaagaaaatgacattttggaaaatttggaggatgaagtgaattcgactcgcattttgccaccagccaagcgcgcttgttccattgtggagataattcagaacatagccagttgtaccaaaaaaggtggtaccaaaattgcaattttgatttaaaaaaattttagctacatcatctcaaaataagggcatgtcggaagaaattctcacatacaaagaggacatttgtgtttccatgaatgttgatccgttgcagtggtggaacagcaatgaaagaaaatttcctaaactttcaaagatttcgagtcgttatttgacaccaccatgcacaagcatttccagtgaacagctttttagtgtggcaagagacgtatatgactaccgtcggtcaaatatctctccagaaacggccgaaatgttgatctttttgcacaattctattcctgatgtgaatttctcatattaatttctatgttcatcagtttttggttttaaaacggcacattcatttattttttgaagaattttttattaatacaatattttttcgaaattcaaaaatcccgcaatcccgcgcgggatcccgcaaattttaaatgcgggatttgcaggattgcgggatttgcgggattaatcccgcgggatcccgtcccgcaaaaaattttgagttccagtcccgcagcgggatccgcaaattgaaaatttccagtctctagataaaattataatatcttcttatgcgattcactaaattcatgtgtaaaatcaataacactcaatattatataatttagcgctgcctcgtaaatgtaaaattaatattcatatgatgaatattttatatattttttgacaagaaaatattggatacctatataattataatattattataatctagaaaaatgaataaccgacggacaactctgtacaaaagttaaaagtttttttatgagaaatttaaaatagcaagttttgtcctgattttttacatttgtttggcaattttttaaatagggaatgtctgattgaattgaaatattctttacctgagaatttatgcttaaaactaaaatttgatttcgccacgtttcggagtttttcgcaaataatgcgagagggccgaaggagagaagccggaaatttcttccaaaattttctataatatttcaaaaatatcttcatttaaaaaattggaagattttgcactgtttttcactttttttctacaaaggctcagaatctttgtcattctttcttaatttttcagactttttcactgctttgtttttcgtcacttatattggtgcaagtgggtttcttaaaaactgccacccatacgcgattcttaaaactgccaaaatatgattaaaaatataactaggactggtaaaaatatggatataaaatcgctaaatatggccgtaaaatatggaccgaaaaatcgcgaaaatatggacgtaaatggcgaaaatgtcgaaatatggacgataaatttttcgaaattgaatgtaaaatttcttcaaatttattggttgaaattgcgtatgagagaagtttccgaaattttttgactacggtaagccgctttgacaaagac

SEQ ID NO: 2150 - DNA, 8102 bp, Heterodera glycines
tattaaattgtattataatatttgcgcactggcagtcttttgaaacgcgccgataggcagtttttagaaacgcgcaaccccattttggcagtttttagaaacgcgcaaccccattttggcagtttttagaaacgcgcaaccccattttggcagtttttagaaacgcgccgattggcagtttttagaaacgcgcaaccccattttggcagtttttaagaaatgcgcaaccccattttggcagttttaagaaacgcgccgattggcagttttaagaaacgcgcaaccccattttggcagttttaagaaacgcgcaaccccattttggcagtttttaagaaatgcgcaaccccattttggcagttttaagaaacgcgccgattggcagttttaagaaacgcgcaaccccattttggcagttttaagaaacgcgcaaccctattttggcagttttaagaaacgcgccgattggcagtttttagaaacgcgcaaccccattttggcagtttttaagaaatgcgcaaccccattttggcagttttaagaaacgcgccgattggcagttttaagaaacgcgcaaccccattttggcagttttaagaaacgcgcaaccccattttggcagttttaagaaacgcgcaaccccattttggcagttttaagaaacgcacaaccccattttggcagttttaagaaacgcgcaaccccattttggcagttttaagaaacgcgcaaccccattttggcagttttaagaaacgcgcaaccccattttggcagttttaagaaacgcgcaaccccattttggcagttttaagaaacgcgtcagcactcttatatttactattttgaagaagaagcaaatgatttattcttctgctatttgttttggaatatttattttcaaccatttttcaattccgttttcaaatgcaattccatttgtgagtcaattaattagggaacttaatttgtttaatcatttttgataggaagacgacaacatgtttaatgcgtttgttcgaaatggtcataaaatgcaaatcaatgaatattcaaagcaaaaatatgagggacattttggcattgtttattttacgagaaagaattggcaatgtgacaaaattgtggatgcatttgaagaatatgaaagggcagaatgccaaaaatatcgaaaatatttggacattttgtacgaatatttatatagagagtacgtcggaattcaaacagtgaagcccaaatttgtgtttaaagaacgaattgaaattgaagggtcaataatttatgcggtgatttgcttggccagaatttcgctattttattttaaattatcttggagtaatgactttaaatataaattaagtgaatttttcatttataattctgaaccaaaattgttgaatgagaagagattaaattttgaagttaaattggttaatgaaaatgaaatgccaattaatgaaatgattttgcaattggcaattgacagagcatatgaatatcaaacaattgaaagtttagacgcaataatccgacaaaaattcaagaaaatgttggaggaaatgttcaaaaaagcggaagaaatggcaaaaaaacataaatggcaaacctttttcgcgattttttatccatattttttaatgccctaatgattagagctcgacaaaacgacttttggggggttttaaatgcatttctttgaaagatttgttcagcttttattaaaaactgtttattaaaagcgcaaattgtgataattatttaaatatatgcaaattttgtaattttttttataaaataggtcttttgcgagtaaaaaataattggcatcatgtcaaaattggctcgcgctgttccaatgcctcccttctgctgtttaaatcatatgatgccaattttacaaatcaatttgccagcactgtttaaaggcatcatgccaaaatttaaaagaaaatgccccaaatcggaacaggacggttcggtgcccgccgtttcggtgccagcccaagttttggacgacaacttttgatgtagactttgattcctccttttattgtcagtgggccgaaataatcgacgccagtcttctcaaatggccttattgtctgtcgtaactcgttcctttggtatgtctagcatttgagggtaagcgtatggcttcagtctctctttgcgacagtttaaacacccatattgctttgactgtatcgtgttttgatgaatcttctgccttttggtatccaaaacttctctcttatttgtgccaacagtgtgttatgatttgggtgtctcattaacaaatgtgcctccatgacattgagttttgttgtccatgattccggtggcaaataaattggaaatttcgtttcctcatttattattgcttctccaattcgtcctctgcatctccagagctctttatcgttgaatagacgaaggtctctttgaagtttttccgatggaggaaattgcttttgtgcctcccaaattattaactgttcagatgcacgtaattctgacacagacagtatacagggacaaagaattgataggcttcctgtaccaataataccctcattgacaagatgcccatgagtataccatcaatacaattttcgaattttatgtttcctgtaccaaggttaccctcatgggtaagatgccaatgaggatatcatccatacaaattttttaattttatttttgttcgaattcgggaatgccggattcgtgatcagcgaccccaaaaaccccttaaaacctattttcattatcggttctggtcggttttatgcgcaatttcaaaccaggtacaagcagctgcatcaaaagcgatcagaatgttgcaggggccattcaatgagctaaattaatgatattttaatttttgatttcggcactttgtaaaataattgaaaaatattcggaaattccttaaaaaataaattttttctattttttcacaaaattaaaattaaaatagcggatttttaaaaaatttcgaattaaaaaaaattctaaaaaatgaaaaatgaaaaataattaattctaacaaataaaaatgatttaatttattttatcattttttattacttggttttgatggtgacgtatactagtgctaagttacatattatcccaattgtggagataaatgttcgtaccgctgttaaagcgataagtgcccatggcaaaccgtcttccgcataaagctcaaaaagctaaaccacaaaatttttattatttttatattatatatttattttaaataccgtttcgttttgattcattttaattgatataataagcaatgaataaatgattctaaaacttaatcaaaaagctaaaaaccaataatttattatttatataataattttttaaataccgttttattttggtccattttaaattgtatatttatgcagtaagtaagtaaaagattctaaaattttaaggaaagacacatttgtgaaagtgtaagtcattgcgaccgctacactcagcgcatttgtgcatcttcccagacgaacaacctgaagagcagccggtcccggacgagcacaatcagaacgaagtccgacggtcgaatcgcaaccgccgtccaccaaaactgctcgacatggacacatcaaaagcacgatatgattacacaaattgattgattcactcaccaacccattttttttctctcattacattccaacttaaagggggaggtgttgtgtatatcactcaatattcaaatgtacgccatttactgtactcaatttcgtgtcaatactcatctcgcagcatcgtccataaatacccatcactttgtcactcaattgcttcttcttccattcattcaacacatcattttattattcatttattcttcatccaccgacacaccaattttattatttattcttttgcctccgacaaataaactatttttattcttcgttgtgttcaccattgaacataacaataagcacaaaaaagagggcttttagcttggcttaaagcttcttggataagttttataatgcatatttttgcctatttttacattttttgtgtttgatgcctagccgcctttttttaaatgcctttttcggcatttttatgtgcctaattctcatcattttatgctaataactcaataagacctaatatttttctatgtatttattaaaatgagagcagtcttattttgtataacacaatataatttaatctccatccacccagttgccctcgggtgcgtaaaaataaagattataataagcggatacggaataaaaataaaactaaaaaatcgcattaaagaatttccaattttttatgaaaaaggcaagcatgaattatagagtgggtgattatttcttaatttgtcatttatttaatcaaattgttttaatatttcacgtttttcctcatccgaatattaatttatattcattccaaattatcttttccattagggtaaattttcagtcgatttgcacacaacttttttttttgcctttttcttttatctgaatacttatttgacatttgattaattatctctttaattttattaaatttttccataatttctcttttcattttatcaaatttatttggaaaatgatcataattttgttcattattttcatctaattgttccaattcataacaattactggacttttcttcactctcctcttctttcacttccataatttcaacaacaatttgataaaattgtcggttatttcgtccaagttgttcactctgatcaaaaatttctgcatgaattatttgatcaattgggcatgcatttcttattgtcgaaaaaggtggcgatcaatggaggggttatcgccggtttcctttgccctccttctcggctttgtcgacccctttccgaattgaatgcccaaggggggccgagaaaggagaatggggagggccgacaaaatggggatgatgtaacggcaccaccactcagttaaggagtgagtgaacctcccaattgcctgccgggatgagccccgactccgatcgctgaggagggaagggcgatgggagggagtgggcaaggatcaggagtgatccaatcccgcaggacaattgctgatcgctccgaatgcgattaggggcgccgaatgccccaaccgaatgaccgaatttggtgattgcccaaagggaagggcaattttcctctgtccaaaggaaaggacaaacacacaaatatttattgccaaagggaagggcacatatttggaggaaaatgtgataagggggagacgaagtgaagggaaggacgaaagaaaagggaaagatgaccgaaggaaataagagtgaacgccggagagattaccggcgggggttaaataggccgggcaataagaaatgcaaatcacgtgaatgggcatttcggacggggacaaagttgggaagaacatttgcccgatgacattggggcccaaggtacaaaatgaattgaattgaatggtgagaaaagacgggcaaaaaattgggacaaaagaagcgatttgagagcagatgccccgcggtggggcaacaaaggaaaacatttcgaaatgaaagtgagcggggggacaaaaatgcaaatgagaaatgctgagaagcaaaaggaagggaaatggtaaacaaattggataagacggaaaaagaggggggggggaggcaaattgttgaagtgaaaggaagggaaaaggaagcaaaaatggtgggggtgatcataaattaatcactgtttggcatcgggccccctgcttccttcagtccgccgggaacaatcccggccatccaaagcccatcctttttctctcgtcctttcgcgacacttatgttctttcgtcccatccttggccaaataactcatcaaaacttatttgttgtgttattttgtcagttattttttcgtctaatggaccaaaaaaaaattattactttatgatttttaattaatttgtatacgaaattatttgattatgtattttttcattatgtattttgtgaataaatctcggtaataatttcacataaattacaaattcattatttgaaaattcgaaaactttttgtctaatcaatataataacaattagctaatcacaaaaaatgcaatattatctcagagattggcaataatttttcttggtaatttttcataaaagcattcaaaatttcttcattcatcatcagcttggtgttaaaattatcagctttaatatttctaattaattaaaaaaatttaaacaatttttcgaaaaaaacgaatagagacgtgatggtttacgcagggcataccttcaaatttatattaattaggtaattagtcaaaaatttcaaaaagataaatttaattggagataatataaaaattattggggaaatataaaaaaataattttgttagacatttaaaatattaaataagacaccaaattgggaagcaaatgctgagaagccgatcaaaagcgatcaacaaagtggcggacattgaagcataaatgccagtaatgaatggtagcaacaggtaaacacagcacagacgtattggcacaaattgttggcccaccaaaatttggaacatgccaatccatgagccaatttcaaaccaggcacaagcagctgcatcaaaagcgatcagaatgttgcaggggccattcaatgagctaaattaatgatattttaatttttgatttcggcactttgtaaaataattgaaaaatattcggaaattccttaaaaaataaattttttctattttttcacaaaattaaaattaaaatagcggatttttaaaaaatttcgaattaaaaaaaattctaaaaaatgaaaaatgaaaaataattaattctaacaaataaaaatgatttaatttattttatcattttttattacttggttttgatggtgacgtatactagtgctaagttacatattatcccaattgtggagataaatgttcgtaccgctgttaaagcgataagtgcccatggcaaaccgtcttccgcataaagctcaaaaagctaaacaccaaaatttttattatttttatattatatatttattttaaataccgtttcgttttgattcattttaattgatataataagcaatgaataaatgattctaaaacttaatcaaaaagctaaaaaccaataatttattatttatataataattttttaaataccgttttattttggtccattttaaattgtatatttatgcagtaagtaagtaaaagattctaaaaattaataatttgaatttctgtaatttttattaatatataattgagattttcaaaaatttcaaataaataaccaaaaatttttgtgattttaataaaataattgactttgccaatataaatgatatggaaatgaaaatcaacaaatttgagacatttgtgttacatattttcacacactttgaaaaaaatttggtgagaaaatgaatgaatgcataagaaagtttttgaaaagaattaaataccaataataaaatttttaaattttttttttgtctttttcacgctttcgtgataatcagggctcccagatgtgaggttttagcctcattttgtggttttttgataggtcaatgaggctaaattttcaaaatgagactttgaggctttttgtggttttttgagaaattttgaggttttttgtggttttttgttaaatatttcataaaaactagaaaataaccaattcttttccgaaaattcacaaaattaagaatttttgcaatgaaaatcagctaaaaatatagtcaaaattcttaatttttccccggcggcgcctatcggaacaccccgagcttaaaaatcctttattttcttaaaaatttgctcaaaaccgtaaaatttggccatttttgtggataaatctgttaacaaatcgtattaaaaatcacaaaattcttcgcggcggcgcctatcggcaccgctggccccccttattcctcaagtttttcggaaaaagcgccgcaaaaaaatcaacttccgtttttcgtgcttagaatttcacaaaatgcttacctatttctaaaaaaaaattgctctaaattgatcatggccaatca

SEQ ID NO: 2151 - DNA, 4537 bp, Heterodera glycines
taaagagctttcgaatgataccaacaatcgttaggatttaggttggcaaagaaaattgttatagtccaaaaacatgtgttcgtacgaaaacggcctggccccagacaaacgtatggacattttccaatttgtagcctcacccaatgccaacccggacaacaacaccagcatcaactccgaagcagcttcagttgaccagaatttgccgcatttgatgcatcgtatggaagaattgcagccgaaattgatgtcattgaacatgaacttggccaatcgcaatcgcgacgaaattgtaaatgatggcaaggaaaaggaggaaccgaagaaaggggacaaggcggaggacgaggccaacaaggaggaggaaattgttgtccttaacccatacctttatctgaccaacgaagcaatggaaaagatggagaaggagcacaaagaaaaggattccgctgaagccaattcggatacggtgaaccatttttgtgattaaattcacggtgttaccatgtctagtaccactaatttgcacttttttaatttaactcatctttatccatataaatgaaaacattttttatgaatttaaatatttttcgattcactttcagaccaatgccaattcgttggacaaagaaaagcagccaacggcacccatccaattgggcaacaagcgcaaattgggagacggagtgaacaaagacaacggcgaagaagaccttatgaagttgagcacgcacaactcggaggaaccagttgacaatggaaatggtataattcacttataaaatcaaaattaaatatatagtaatatcttttgatttttcatgattttggtcgggatacgacggaaaattgtccgctttgccatccatccactcataactcaaaaatctatttatttttagtagcatacgtctcttcgttctcgtcccgctcctccacgactactatgtcttccgttgaggacgaggaggacagtggcaccaacgcgggtgacgacggttggatggtggtgaagaaggagtcgttcaagaagttgtgcgacttctacgagaagcgtcgtcgcgtggagtgcggcggtggcaccgtcgccgctgacccattcgcggaacaattggagcgcgaatttcgcgaggcaacgatggctgacaacaaccgcaccgatgaacgcgtggatgagaaattgacggcggagagtggtgagttgggggagggggataattttcgaagattttttaacttctaagttaggaaattttaaaaaattgcgggattgtgaaaagttcaatttggtctactaaaataactgaatttacggtttataataaatttattagtccaataattgagtctcttgtttaaaatttaaaagatattcacaattttagccgaatatgctcgaactttctacatgacaaagccatttagtgttttatttccctcaaatgcttcattttgattgctgtatttatttgtagaaccgaaaaaggcaggcgaattcgtgaaggaagttggacaagaaccggctgctgcggtttatgtggcacaaattgtggatttgaccaccgaaaaagatggaaagtcagaaaattcggagaaggtggtacataattcttcagtaaaagagggaaaaggaacattttttttagaccattccctgtgtccattcggttgtgatgcgcggcgtatgtgccggatgtggacaggattttcgtcaggtaaatgcaaatacggcaaaccatttattaaaacaattatttgtttttattgttagccaaatgaatttgtcgggaactcggctgccattttcaactttgaacagcaacagcaaaagatgaaccagaccgtgcccatttctggttcctttggtttgccacgatgttttcgcacatttctttttaatcattcatgtaacaggtgttgatgcccaccagaaaactgcaaaaaacatctatccgtctttggaactattggttagtacgatggatttaagggggggggggggtcaaaaagttaaaatcagacacacattttaaaccattctgtgtaaaatacaatcagattttggacgagaaagttttataggttcaaataatggattttttaggaaaaagaaccacgcggagggacactgatgggctgcgtggatggagaggaggtgtgcaccgccggactgccctacccgggctatcagaagccaaagggtcagaagcacagtcgtcactgcgagtggaagcacaaaagtgagcaaacgcaaataataatttttgatataatttttcatattccaattcgtactttgttcattttgccttccgctattccctgataattgccaatataaacagaaaaaaagccctcacgacaatgggttttttctagtaaaaagcgcattttagacttggtcatccagagtttggttgaacagttggtcgggatgggcttcgacaactgcaacggttggctgttccgtgtggcggagaaggaaggcgccgagttggaccgcatttttgtcgcgattgacgaggacaagatgtaccgtgcgcggatcagccttcagtgaagaaagaggcaatggaaaacgaaatgaggaaatttatgatgaggtggataaaagaaaacgatgctttttcggctttggtctttaattttaatgagctaattaattaagcaatgctttggaattaaactataaaatcatctaaatatttgtcccttattccttcgctcctcatttactcattcattttaattagtccatttgtaattgcatacattctgtatgatgggctttttcggcgtctgtatgtgtataatcatttcctttccagctctttgtcgttatttactcttgtcacaatcacatttattatccaataaataaaaccatcatgtataattgtgcggaatacctatcccttaattagggctaatttgcaatttttatatgaccttaaaaatagacaactttttatggtcgtatgaactgcaatagagcctttaatattgaatttcgtgtttgtttacatgtcagttgttttttcataacggcttcagtcgataccagggttgttccgggttacccgatacccgaaacccggcctttttctcgacccgaaacccgacccgatgattttgggtcgggtttcgggtcgaaataagcactggtaagaaaggggtctgggtgaaaattaggtggataaggaaattgagaattttttttgaaacgattgtgttcaatggaatcgaaaattttgtatttgtttttgttcattattatcctttttctaaagatattttgtatgaatttcttgaatttaagcaaagcagatggctgaaaaacctgattccatttggttttatttccatcgtcctataaatggcgcaattcgctgcaaatattgcagtgccatttgatttttaaacaaattaaaaatttgtcaattgacccgaaacccggcctttttctcgacccgaaacccgacccgatgatttttcggccgacccgacccgaaacccgatatttttctcgacccggaacaaccctggtagggacactcgtaaaatattgctatattgtaaatgcaaaaaaatgagcaaatgtgacggacggacttggatgtgctcgttgactttgtgccgacgcattcgagctgaacaaccgtaataggcatttggacaagtgatcagtgtctgttttaaaatttaaaaaaaatgccaattctttttaatggaatgatgacggaccatggcacaaatgcattcgcggtgatccgccaatttacacgagtgcatccgaacaccacaatctgtacaacacaataaaaaacaacatttttttacaaattaagacacaaaatgaccaagactttaaaaaaaggaaattggcaaaaaaataatccaaaaattggcaaaaaataataatcctaaaatggcaaaatagttaaaacaaaaacaaatttgaagttggatgaagaaagatttaaaaaaaaagaataaagaaaaacagaaacgtgaaaacggagaaatgcattatctaccgtatcaaaaaatgcatgcacatacagtatctatccagtaatgaaaatgggaattgaaactttagggcatttgatttcaaagggcttaaaatcctaggaaaaactctatttaatcgaaaatggcaaaaacggaagcggctttaaatcaatcgcaaaatcctcaacaccaaccacccaccaggacagttgatcatggcacattcagtgccgtcggcgaaactgcagcaacccatgaaacatgaagcgcagtgtaattcatggaaggcatctgaggcaaccggcacaacacaataatcagtggcggcaatttgcattatttgcacgaaaaaataataataataataattaattttgctaaagttcaatttatgcgtccaatcaatttttgtgcgtccatcaatcaaatttttttattaaaataatcccttaaatattgattgctctaatccatctaccatgacaaattttggaaaaatatgtcaaaatagactggctac

SEQ ID NO: 2152 - DNA, 3170 bp, Heterodera glycines
cttggctatcgaatgataccaagaatgtaaaatttggttgcctttaagcaaagttatgccatgttttgtcgaaaaattcgctaaaatggcggatttacgaaacgacccagcacgccgaaaatgtttcttaaaaagggagttttttgaaaataagaaatgtttttttgtaagatattcttttgaaaatcttaagaaaaatgagttcttcgtcgccgaaaaaaaagtcaaattcttttttgtattgtggcgcggttgagccaagatttctccaaatggttctgctcctttatgtttaacaaatgcggatcaaatgaatttgtcggtgatttccgtgtgttttatccgttctatagattcataaaacaaatcgcattttgttgatttttaaaaaatacaaatttggcgggcgccacaaaacagaaaaatgccaaaattaatattttcggaggggaggggggcaggacgagctgctcccgtctacaaaatccacaacacaacgcaccagccaaatcctccattcggatgcgctcttgcaagtccgacaacgacttcaccgactgcatggacatgtccaaaatgttggtttcgtcgtttttgttgctgccgctactgttggtgttgttgccaaccatggacaatggtgttgatgatgatgatggcatcatggtcttctgttgccaagtctgaacaccaccagcagtgccattgttgttgccgttttgttgcggcggtgatggcactgccgccgattggcgccgtcgaattttgagcaaatggacaagctgttcacgacgccggtcagaaatggcatcaccgagcacgcccaaaagcctaacaaattccaattattactattgtgttcactgtttgctaaacatttatagtgagtaaaaacgaggaaaaagagaaaattccataaaatctttaaaagtacattcaatctggtaagaacaattttttaaaagacctcaaaaaatggcaaattgccagcaaaaaaatgtgacaaattcgggacgtaccaggccgttttcacgtggcccaagttcgggatgctaaaatttcggacattggatcgatttaattgttttttttatattcctttggcatcatttattttagcggtgttacagttacagtgagtgtacagacagagtgaacccgaagtgtagaaaatgataattttttgtttttgatttgctgttgctgacttgtcaatgagatcatccttgaagaattgaggtgatagaaccgtgtgtttgagaatgagacgccaattctgcgtggacaccgaatcgggggtctgttagtgaataaatgaaaatgattaagtgacgcattaaggaactaattaggcattgcattgtctaattattaagcaaatgatgagagaaagaatggagagatagcgagaggaaagcagagagtatacgagtaagaaagcggcggaagagagagaaaaagagagatggggagagagatagaggggggagcaaagagaagagaggaggataaagaaagaagcgacgggtgggttaataaaagtaacatagtacccgcaattttcacttaaactggtaccggtaaaactggaaatattttctgaggcataaaattttggacaggattttttttttaatttttcgtggcgaatttataccagtactgggaaccgtgttactctaatttaattactgtatttgataattaagtattaataatcatgttaaaagtggtgtgcctccaggtaggcgtgcaacaacaggttggcccacccggccaaacgacgcaactcgccaaattccagcccatcttcgccctgggacaccaggcgggtgagctcgaccagcagacgttgaagacagccttggtaaggttgaacaaaataaataatcgggacattttaaaacattttataacggaaatttaaatatttttcaatacaaacatttaaaaaagatgaaagatgcgctgaaaagcaggaaatcttggtaaaattttttattttatttttttgaatgaaaactaatgaatgggctggcttctttgtttaatagtgatggtactcgagaacgagaatttcccgattagtaaagaccgtcgacgccgatacacaaaaactcgagacttttcttggttcgagactctcgagcatcattattgtttaagtatgcccacctttgttgttgatcagtatgagaatgggccggtaataattctgctccatgacagtgatttcgtcaataaacttttcacgcgagaaaactataaaaaaaaaattgtattgaaaattttttatatgtagagtagtatttatttttccttcattcgtcatgtcccttgatttttgttttgaaaatgatttgcattttttcttaaattactctattggagagggataaaacagcgtctgtttgtaccattggtggttggccgaatcgtcaagccccgaggggctaaacttctcaaaaattcaggaaaaaaaattgtttttttgaaaaaatcgtcgggctatttcttgcccccacttgtccaaaaattgggctcgtccttgcggaaatactaaaaaaaaagcgatcgaatcttttatgaaaaaattttctagtaatttttaaattactacgccccgcccctcacccccttcacccaagaaaatgagcaaaaacaaacatttcaaatgtgtactaccgtcacatttgaacaacggaagccctcctcctcctccatcatcaacaacaacaacaaccacttcattatcatcatcatcattatcgtcaccatccccatcatcagcaatttcaccatcactcatcatcgacgagagattgttgttgatgccgctggttgttgctgtcgttgttgttgccaccaacgtctcgtcctcctcgtcaatgcagaacagtgaactcggcatttcatcgttgaagtcattggcaacaacggcattggcattatcaccacaaccattttccacatcggcttcttcctcctctgggatttggtgctgttgttggacatttgactttttgggagaggaggacgacgaaccaccggtgctggtggaggaggaggcgacagatgacggggccagacaggatttggccaaaaacaggaggaattctctgtgagattggggggggtgttttttcagggcaataaaaggcgacgggaaa

SEQ ID NO: 2153 - DNA, 1590 bp, Heterodera glycines
tttcaaaaataaattttctaggaatttttagaaaaaatttaaaaatttagcaattcatcataaaattcgaaaatgttacaatttaaaaaaaatttttttattttttgggtgggggggggggcccaattatttttaaagttgtgcataaatttcctcactcgggacattgttcaagcagtctttcaatgcccatgcacacacttttcatcgggcgtccctcaacattgggatggaactcgtccaggttgcgaaactgaaaatgcgacttttcggttggtgtttgcactgcactcactcgctcttctcctctctttcttcctaattttctctctctctctctctctcattttctgtctctcactctctcttcccctctctctctctcttcctgtctctcactcgctcttcttcctcttttctctctgttttcccgctctaccacgctctttccttttctctctccctctcgctacccccccccttctcactattttccatctctttccacactctctttctgtctctcacttgctcttccgcttctctctgatttccagctctcccacactctttcctccttctctccgttttccctctcgctcagtctctctttccactctctctctctctctctaatcaacccacttttctgcgccattcccgaaagcggttcatcacggtgatcagctgatgtccggtcattgctttgaatgcttcttgctgcttttcaacagtttcgcttgacaaattctccttgatcgcctcattgaatgggagggcccaatattgtcgctaaaacaattttttcataaatcttgatttttgtctagacgcctagaaggaaaaattgtgaattttagtgaaaagtataaaaatttcaaataattatagcgctgaatggaaaattcaaaaatccaaaaaaaaaaaaattgtggcattgtgttacaaatacataaaatgcgcacccaaagccaccgacggatgaacaaatttgcctgccgcatcaagtccaacggcggcatttggccatgggtcgccgcatgccgaagatcgaccacccaagacggaatggcaaactttaagcatggacgggggacaattagaattaaagcgcattggagaattgaaccgataaattaagtggtgccaaaccccggaaaaattttgaattttgtgtgtgatttggtaacatatttcaccaaaaatgaccaatttaagcggttttaacacaattattcaagaaaattgggagttttagggaagggggtggcggtgctaatagacatcaccgggacaattttttttggaatttttaatgattctaataaaattccaacatttgcgacccgaccccccaccccctaaaattgtatgaaaatgatgcacataacacactttgctaacggcagccgcaatgctcacattttggaccgcgtcttggcatacttcgttcagataattgatgactctggtgaaaaatggctggtaagtaaaaaacattttaaaaatggcgaaggccgatggaaattttgcaaaaaaatgaaaaaagttaaattaggggcaaatgcaaaaaaaatagtaaaatgggaa

SEQ ID NO: 2154 - DNA, 3134 bp, Heterodera glycines
  unsure (1)..(3134): unsure at all n locations
atcaatgattttntgtgtgataacaaaattatttgaaaaacctcccttaattaattatttaattaattcattaatgattttgtttattttttaatcgcatatttccacatacaaattaaacataattaaatcaatttcattatgacaaagcaacaatatttggcaccaattctcttgaatattgtctttgttcatgcacggcattttgtgccatgagtgaaatcgctgctgaattcaatgcctccgcacaatccaaacgcgtgttatgccatcaacaatccgccaatcccaagagcaacaacttcgctgagtaacagcaccaatccgtcgaacatcaacaaccaaaacaatatcagcaacggaaacggaatggctggaggcgtacaacagcagcaacaacagcaggtaaaaacatcagtttaatgggttggactggtcgagagtcttggtctcaagccgggaaatttctcggatttttggaatattgagaatttgaaattttcgagtgtctctaacagtacaattttctgaaaaaatgatctgtctgtatgtaacccattgattggtgtctgatcagaagacactttggtcatattaatgtaggcttatctgaaatttccagcaaaaattatttaatgagtcacaaacaatttaatttaatttaattttgttttttttaatatttctctctaattgactattgttttttgaaaattttgattgactaaaaatttattttaaattgaggcctatgaaaaaaagctcttgaagggacacctgactgccctcgtaatgtccgtcgtctaatgttatacccatgaccctgaaaatctaatgatcaaaaaatagcacggcttttcaaactttaaaatttgcagcaaaagaatccgaagctgtacaaaacggagctgtgtcggtcatggatggaacacggacggtgcaattacggggaaaggtctgactgaacatgaggccgtgacattttgacaacccgttgaacaggtgccaatatgcgcatggtgagagggaaaagcggccggtgccgcggcacccaaaatacaaaacggaggcatgccaatcctaccacaaaacaggtgatgccggattttggtgtgttggcacaaaatttagtttgtccgttttgtaggttactgtccgtatggaccacgctgccatttcgttcgtttttcaaattgttttttctgcgtttggcattttacccaagtgccaaatttagattcacaacgagaacccgtcgcagctgaaggctctgattgatcagaatgaaaaggcgttgcgactggtgcaggaattggccgtcataccgatcagtgagtcgtttaactgctctgatgagtcactttcggcacttttactctcattaagcgtaattaggacgccctatcaatgagagaagggtttttaaatctcttatctttattttagaaaaataaatcctttatttttgtgctgatatttgcgaatcttcaggtggttccgcttctgaaatcccccgaaaatcgctaatcgtttcttcgtcgagcgcttcgctgggcaattcgccatttggctgcgttttgcagaaaaacaattccgtgcacacttttagcaagtaatttgcatcttttttacaaaaattattttattatatttttattttacttatttattcatttgtaattttttaaattattaattatttttgtttttttaataaaattattttttaaataattattttcttttctttgttataattttggcaaaactttgaatcctgtccccatattttttttacatttaaataatttaaacccattatattcatcatttttatatttagttaaatttatcgttattttaaataatatttctaaaaataaaatgtatttttaagctttcacggtcaatatttggagaagactcagagcaataatgctctacaacaacaacagctgcagcagcaagaaaactgtgcacatttcttccagtttaataacgcatcccaacaaaatcatcagcacaaccaccaacaacaactgccaattggggtgggactgaatttgatggggcacagtaacatcgtacagtaccagcagcagcaacagcaacaggacattacagtactgggaaaagaataaggaattaattgaaattttaatcacttggaaattataaattaaatttaaatgatatttattaattattcattttaaattatttattatttcattatctttttataaattattttaaattttgatctcttaacggtggtgagtcattatttaaaaaacatcataaagggcgttatttaaacaccatcaatttgaaaaaaaagagattcataacttagctccaaagcaacaaattaatcattcgatagccctaataaaattttaaaaaatttcgttaaatttcaaaaaaaaattatgaccaaaatactcagaaaaccttcgcattcgaacatttttggtcataactttcttgaaacaacaaaaattttttgcaatatttcatgctaatagaaaacacttattgttcgggctatcgaatggtatcaaggattaaaatttgggtgctttaaagcaaagttaaaagcaatatttttttattttgatggttttttaaataacgcccattagcagcaccctcttaaagattacacaaatataattttaaattctttattaattattcgaaatttttacatttttctcttctaaatttagttcttcgcctctcctcaacaatgttcgccagagaatcaaaatgcgcagcagtcgccgctttcgtccgcatcttatgaaatgttcggcggcatttcgcccaaaaaccaacaacaaatgacgacggaactgttcgatcacggggaaatgagctcaccacagcccaacaacactcacaatcagctccaccaccaccaccagcagcagcacttcaatcagcaccatcagcagaggtggccaattgatttatttacaattttacatttaaatataaaattttaattaggaataaaaggttgaaaaatttgcgattaatttgattctctacgagaaagaaatattgcgatncaattttggcttgcttaatcccactgtccataagtgttctttattcttaagattttc

SEQ ID NO: 2155 - DNA, 5451 bp, Heterodera glycines
aatttcagaattttttatgcaatttcatgtttttagcatatttaaatctgttctatggttataatcttaggcttgtgaagcatatttttattgcaaacactaattgttaatcccatgaaaagataaaaattggagaataaattaaaaaaaaaattccagtcgattgggccaccccgcaagtcagccgttgtccccattcggcaaggaacagcatcatcagcaacaacagtttggccacaacgctcaagaatggcatttggccaagcaaatgcaagagatttacagcaacggcaaaaatggcacaaaggccgcgagcggtgccaacaatcgcaacaaaaacggcaacagcgagttggacccgcaaaatatgctcgccaatctgtgctcaagcgatggtaaagaaatcatggaagctcgggatttttggctctcgaattgagcaattctgattggattttggagttaaatttcgactctattgcttcattttcgaaccccgtctcggaaaaatttcgaggaattttttgaatgaaaatgagtccttcatagattttgctccaaggtgttattttataacatttggctttttaaaaaattttacggttttaaaaaatcattttttataataaaaattctcggagagaaaagttcccgccccctattaattaattaccttgctaaaattgttctaagcactaataggggccggcttcaccttaataaatccaatatccaattgaactctgccgttattactttggtatatcattcaaaaaacaaatttgttcattttgtcagatgactattcacgctcttctctcctgtcctcaactgctgactcgggcacggagtctccgccaatgactttggcatttgatgacgatgtaaaattgataagtttaagtcattcattttatcaaataattttggccattaaggcattcattcggataattatcaatcaattagcgtttcaattaagaaaaaattactttgccaatcgataggctccgatggggaaaaatttgaaaatttttgttctaaaattattcaaaggcaatgaaaatttttaattttcatttcagacattgaccaaatcaaagggtgaaagcaaaaaattggccagccctcaactgattggacaaatcacgaatttatctgacgccgaaagcgatgcgcaaaatcgacggagcagtgacggagacactgtgaaaggtcagtggtagtttttgacgaacaatggcacaatggcttctcatttgggcatttggccaaagtaaaagatcggaaaatgaaaattgacttttcatagagcataagcatgtgaagtgaattataaaaaggatatcttattgggaaaggatcagctgttctattaattaaaattcatgttataaatccgttgggatttctttcaaattaaatgggataaccaagggctagcgccagacccttggcttcgggggggggggggctcaagtaaaaaattcgatttttaggaggtgtatttttctttttcattcgatttttaggggtgtattttttttttagttttttgaattcccgaattaggggggtgtattttacaaaatttttagtcgttttttcgccaaaaattactattttccattttggtctcaatttttcaaaaacatggcaaaatgggggtccggcggtgttgttaggcgccgccgggaaaattttttttttgaaatttttaatgcaatttgttaagaaattgcttgaaattacaaaaaattagctgaaaatttttacttttttggatttcgggagggctttagccccctcggccccccaggctacgcccttggggataccgtacttcttcgattatatccccccctcgattagaacctcctctcgaataaagccccccttctgaggggagttgagcaatagagcccccgggggctataatcgaagaagtacggtaactccgtcaattaacccaatcattgctgatcagcagtcccctttctttgttcagctaatttggtgatcaatggccccaacaaatccgcggacctccgccgccacaaccattcgaccgcctcgtcctccctggcctcgctgctctcctcctcctcctcttccaatgctcaccaccatctccagctgagcagcaacggcaaatcgtccgcgacggtgccaagtgcggcgctggcggtgtcctccaaaattcggttgcccgtctttgagcgtctttccctgaaccaataaatttaacaattaattgtccacaaatgcctgccccacaaaatgccaattcattttggcactttttttttaattttgtgccaacttcaaacaccgatagaaaggcaaaatctctcagccatggctagtacttaaatacttaattctttccttcacatttttgtgcttttgtatcatggaagagtccggagcaaagtttttttgtgccgcgagcctgggcattcttagacacggcacggcacggttatacaaattaaaaattatgacaaatgccgatttttcacaaaatttaatttaaaaaatgttaaaattgctccgaaattcaatgatacaacaattaataatcaatcattcattcattactcatcgtagaacaacacccattaatctctgcattagctctcttgaaattacaatcaccacaaaaaaagttgaaaaattggaaagggacgagcaaaataaatttgaaatttgattgaatgtttctttgtcttttttgtccctgccaatttttcgccgttttcattcaatcgccggtgtttcgtctgctaattgtgttcattatcgactcattaatcatttacttaattatgcgcttcacatttcactaattaatctctctcctctcttccatccgcttcttctccttcttcatcatctacttcagtgtccaataaatcattttgtccgtgtgcctttcattttctcatttaaacaccattacttacttatacaaaaggacaaaaagtgtgaattttgtttatttgtgtctgtgttaaattgatttttgttttatttaatttattattattttttttgaaaaaatatttattttattttatttttttctaaatttgaccaacatttctctgaatattgaacataaaaataaatattttctcgcttctttttcatctttttcttcatttttcatttttcaatttcattttttatctgaacctcaaagaccccaaaacacattttgatggtaaaatttgctctttttttttctaatttatcactctctatcaattaatcaattaattaattatcatccatcccttttttaaatttatttcaattattaatttattattattcatttctttctttctctgtcctccttttgctgctgctgatagaccagtgttagacacccctttcccctcattttcatttttttttaaatttatttttatttaaatttaatttaatcctccgatattattcatattaataataaataaatgcttattctttaaaaaactcacacacatgacaaatgtgttgttggccttctgaatctgtgcgttacacagctttttgtctaaagtctttcgcgacgctataaggtgtaaatattattattaattattttattaaaccaccaaagctggcattttctattggcatagttaacacaccaaacgacagagtttttgaagcggaaatgccattgaaaaatcaagaaaatgcaatccgtaaaaactcttgtcaatggtacaatcttcataacatgaaaatattcgcgtgtgtcacttcattttttggttgggcctgatcattgaaacactaattaaagtttaattaacttaattaatgcccgattaaataggcattaattagctttaattcatttcccaatctaattaccaccgagcaattgatcagaaggcccaactttgacttttcgattggctatttatagcacctttttattgatgtctctcaaattagattgaacgaaaattttgcgaaaatttatttgcattttttaattattattataattaaattttcgttccttttaaacaaattaactacggtttacattttgctgcgcattatcaccgattatagaacttaaatattgtctagatgttctttgatctgctagaactggtgtccaacaaattaatatattaatattccattagaatatatttgcatcattttttgtatttgtaaattttcatttaattgtaaattatttttaaattatttttgtgttcatcttagataaacgttagactgatgttctttggcatttacacataataataataataaaatttgcgcatttttcttatcatctttcattaaaattttcaaaatttttccgggcagatcctattggtactgccggaccatcattttacctcgtttttgaaaatttgaccccaaaatggcaaaaaatagtttgtttttttttggcgcaaaaacagctgcaaatccatgttttttgctctctggcgctgaaattttaaaaatgactggagaaaaaatttctttggcccaaagagcaaaaaaaaaaggtcttctgattccccccttttctggctacgggcttgatcatttcaaaccattttagacaaatttaatgaaaaattattattaaagctaaattaacaggattttttttcaatttaatggtggagaaaaacattgttatcatgaacattaatgaagtgtttacattaaagcgcgtgaagcgtgtaatgcttattgtagtatcgcgaggcgttggcatggcatggcattggcattggcacactgggtggcgggcgtattggcattggcatgcccaaccccaacagtcattactccattaagtggagcgcaatttgataattattcttgcctttttaatgcattatcacttttatctgagaccgaaacgggttgcacccgtatacgcgttcttcggaccctttggcgctataagccgtatatttttcaactgatatgggttttacgagttattgagcccgtagtccggaccccgtataggtaaccagcgcgtaattaattttataactgttgttattggttcttaatagcgatttttcgacgaaattacggaaacaaattaaattttgaaggggtcccagttcaaatgttttaccgtttgaaggcaaaacaaaaaaaaaggggggggggggaaattttcaaggtttgccaatataaaatgctgtttcgaccggtgtacttaagcatttttgaattcgaaactccctgaaaaagtgacaatggaaaagccaaataccggcggaaaatccgacggcgttgagaacagtttacaaaatgagaaaatgcgacaccgcgaaaataaaacaccgaatgatccagattaataaatttattctatgtacatatgttattaaatgaatatacataaaggagtttacagaacttttaattagggtaggtcgg

SEQ ID NO: 2156 - DNA, 1770 bp, Heterodera glycines
tagttaataaataggtatgttaaaactctctccgaaaattttgatttgatggatgcataaggaaagctttatctagcgcctattgtgtatgattatgaatagtgataaggaaagaaaacaaattgatacgggcctagaatagcaatacaaaattaacacatttatttcaactattgcagaagatctcttttttattcgttaggcaaaatctttagatcctcagaggatgaggatgggtggtagttcgatcctaaagaagtatcaatgataatgaataattagattaattataattcaatggaataatatttaagcagataataataattattttaaacatgttatattattattacatcagaaacgataatcaatgctgtcaatcttatttgccatattaataaaaattttcaatttataaaatatcgtccccttcagtgttaaaatcattattgtcatatattgacataaaaaatgaaaatattttttaaatagctctgttattctctggttcctgtctaattaggtggaagccggcaaatctggattcgaatgaacgagtgttagtgccggtcccaacctaccctacttcttaatatatataattgccaaaagcccccaaaatataaaaggtcaaaaaattgtctcattttttaacttttttcgctagcacaatgctaattaaaagcatttcaatgcttttaggggttaaattttatgaaactttgaaatccagtggttgaataaaatagaatttagtttgggagttttaggcatctgtaagaataaatagtaagtattatgttcggctcaattgtgcattaattttttaatttcaacatgttaccgatgccggtaagagcaatgtcattttgccaagaatttgattgccaaaaaagcttttttgcagagaaaaagacctaattaaaaaaaaaaatttaaaaaatataaatccgggccatgttcattaatcatagattaagtaattaaataaacgcctactcgttttagtattttttcctcaagtttttcccgaaataaaaaaatcattatgatagtttaattagcttggcaattcgcctttagaaaatagcgtgaagcataaagagcacattcattcacacatcgtagtacagcacgaagttatggcattacaccgacgaaggcggcggaatgccaaaaaatgcctcattaaaatggcatatctcaacctttttgacgtaacggaaataattttgaattttatgaattacaaaattttcgtcatcactaattgctctcatgaagggcgaaatgaccgtcaaatgcttagaaatgttgttaattagtatctgttttaaaaattgtattcagatacatatgatgggttaggacaatcattcaaaatatctttcttcatttttgataaaaattaattatttctatgtaattgtcaattaaaaatggcacagatggacggacgggcgacataatctggcactatgccataaggtgtccagcagaattgcgaattcccggcatatttaagcatggcaaattgcctcgaaatataatttgtttataattagggttagacagggattcggcactgagttcgacctgggtttaatggccaagtccgaaagtttcctaaaacaaaaagtaatttttttttatctgtttacgtctcattggttttacacatgaatgaaataaactcacaaatgcacaaattcaaattaatatttccacggcatgcaattcattcatatttattgcctttcattttaa

SEQ ID NO: 2157 - DNA, 1942 bp, Heterodera glycines
aaaatttttttcggaacaaatttttttttctagcttaatgatctaaaatttaaatcattcaatttgtttgttcgttttttaaaatttaattttattattatttactcaaaaggtacatggtgcatagcaattacattgacttcttcagccaaattgccaaaggcattgccaaatttggcattaaagtggcaccgaaagagcgcgaaactgtcgcaacatttgagcaggcatattatggacaatttatgaatttggatcaagcagacgatttgattgcattggtaattaaaatatttaaaaaatatatattttataaaataaattatttttaatttgagatacgcactttcctcgagttcgcttgtgtgaaggaagtgatcaacgaacggctgaacgagcttgatgtgccagacaacacagaatagtgaggggcaaacaaacatttaagaaaatatgggttcaaaagtcatgagtagggaacgaattttgaggcataccgtatatgctcaaattatagcccagtctctattaatcccgcagtctccaattatcccccagtctacgaggtgttttgaaaaataatccctctatcataatcccccagtctctaattatcgccccttttatggggaggttgaaaaataatcccccatgggctataattagagcatatacggtatgccttttttttttgctcattagttacgatacattaagcataaataaaatgcaataaaaaaatatatacccctaagaaatgaaaaattttctcaaaaattggtcgccaaaatttaatttaatttttttgataaaaaattttctgtttaaaaatattccttattcaaaaaaaattataaactatttaataatcatttaaatgagcaaaattaaaattttttgattaagttttacgtgttttgctccataaaaatccttaataaaaatttttaaatgacttttttatgcctatttgaggatttttatgccttttttgcatatttttggtacctattacagtgcctttttcgcgatttttagtgccttttttcgttctctagtcatgagacaaataaaaaattaaaatttggtaattttagggcaatttgggggcaatttattgacaaatttcgccaacaatttcaattcttaattaaaatgcattaagtcttttggaaaatgcgcaaaggattctgacggagcattactcgccaacccatgacgacataatccacgcgagagcagccacaaaaggcatttacgaaatcattttcgcattccgggaattcaaaataaggtaaaggaagaagacaaagcaaagggggttattaaaaagtgcagattttaatttagccactaattattattttcagactaattgatgagggtggacagaaaacggagagacgcaaatggatccattgctttggtaatgaatgaatgaaccgggcaatgtcatccccctgaaatttttttcaaataatttttttaggctgatttaaggtgctgatgtgggacgccgaaattgagggagggcgactacacacaccaataccccagggagaagggaggggcgaacgtgatttccaaataatcgatttcttctagtctaatctagtcaaaccggtgcgagaattcgatagaaataacattcacggtgcgaaaaatggggtttgacaagtctattggggaaaaaagactttactaaataatacccctgggagaagggagtgggaaacatgatttcaaaattttcaattttttatagtctaatctactcaaaacggttcagaattcaataaaaataacattcacggtgcgaaaaatggggtttgacaagtttattggggagaaaaagactttacaaaataatacccctgcgagaagggagtgggaaacatgatttcaaaattttcaattttttctagtctaatctactcaaacc

SEQ ID NO: 2158 - DNA, 2581 bp, Heterodera glycines
ggaattcaaaataaggtaaaggaagaagacaaagcaaagggggttataaaaagtgcagattttaatttagccactaattattattttcagactaattgatgtgggtggacagaaaacggagagacgcaaatggatccattgctttggtaatgaatgaatgaaccgggcaatgtcatccccctgaaatttttttcaaataatttttttaggctgatttaaggtgctgatcacgaatctgacgttaatttaggcctatcccgaacccccggacccgaactcggacaaaaaggtcgcacaaactcgacataaaatcgatttctaaaaattcgaatttgcgacttgtttgggttcgggtccgggattcgaaataggcaaaaatggatgccatattcgtgatcagcaaccccaaaaaaccattggtatatatattacctgttcgttttcacatcatgtgaattttcacctaactcgctggaaacatgttatagctaaaaataaacgtcagattcgtgatcagcacattaattcagcttagaaaaattaaaaaaaaaatttcagggggggggggtgacaaaacctacaagtaccgcaaaatggatccatttttaatttatttttatttttttattattattatcagaggatgttgctgcaatccttttcattgtgtcattgtcctgctacaaccaagtgatggaggaggacagccaaatcgtaaattaatttttgaaaatattttaattgatttaaactcttaggaaaaaaaaattaaatagttaattaatttcagaatcaaatgtcggactccatcgaaatgttcaagacaatgtaccgcaacagattcctccgttcttcgtccttcatcatgtttctgaacaagaaagacatcttcgccaaaaagattcatcaaattccaatggaacaatttttgcccaatttgggggtaattaaactaattaattggttaattttgttgttcccatctaatcgtcgtcgtttttatagacaaaatgaaagcaaatccaaatctgagcggtgatgagctttactcggcggcacttgagttcgtcaagcaaatgttcagttcggtgagttaattaattgtttaattattaaattactattttaaattttattttatttaaatattttactaaaaaatttaaaaaattctccttttttctaggttagaaggcaagacaaacggcaaatttacacacatgtgaccaatgcgacaggttgaaaaaagcatttaatttttttcctaatatttttaattttattcaatttcagatacaaggaacattggcaagtttaaaaataataataataataataatgtataattattagaataaatagctgataatgagtctgaaatttatataaaaaaaataaataaaatttctaaatggactcgaattccctgtaaatggcattaatcccttgaaatctcgttaaatctctgtccctgacccatttccaattgttcgatttcagctacaaagatttaataaataattgattttgaactttggtcataaacaattaacaagccaaattaacaaattcttgccatttttcagactttgtgttcaatgccacctgcgacattattctcgcaaagaatataaagtcagctggcatgaactaacaacagacagcttaagatgagaatctgccaatatttatttgaacaatttgctaatttatcaaattaaatttaataatatttgaatgtaaattgtgccgttgattgccataataggtatcaaattaaaaatgctttattttacataataaattcatcaacgtataaaaatattttcccaagaaaatccaatcattggcatcataattattaatttgataaatatttgaatattttctcatattaatatggaataatataacatcacctaaatttatctttatttagcggatttattttttatctatttaaatttaaatacttaatataggtaatcagtgactaaatgttgtgattaatgattaatttttaattatctttcttattttttctgtttctggttaaaattattttgtagttttgcaaaccaaaaataaaaaaatatatttaattattctaataaattatatttttccatcctaatcaaaaattccgtaacgattgaatgtttaccaagaaatttcacaaattagtaaacaattttttcatatgtaaacattttctcaaaaaattgacatttaaaaaataaatccgcttcttaaatcgttacataattaagaagtaattgtcctcgatcgatcaatagtagcggaaccaattgtcgtagggataataccagcggaaatgcggtaaactgttacttaaaaaatcattattgaactaagcgcattaaaatcattaattaaatttacgttttgtgcatttgcccagggaccatccatttccacaaatccaacgttacgtcctggtgggcatatttggaacggtgctaaacattcacagaaattgattaaattaattaaaaaaaattaatccacaaaaatattagttatttttttacttggattattaattaaatttaaataaatt

SEQ ID NO: 2159 - DNA, 10657 bp, Heterodera glycines
atattttattagcttggtccttctttaaacaaaaatatgttaaaaactattccaaattttcaagaaaaaattctttgccgccggccccccccgccgttctccaaaaaattttggtttggaagaatccgccgcaaaaaaatggttaaaacctgattttttgattccgattgcactgaaatatacgatcgatttgtaatttattccccaaattcaatatttggtaagtttttgaaaatccaacattcttgagtatcatccgaaagctcttcacatgctctattagctttaaaaaagcaaaaagattttttggcttcttaaaaaattattaagaaaaaatttcgactttttcgcaattttcatgtttaactttctcggtaattgaatctaatcgctatgcaatagcttagaaaaagattctaaacatgttaagctttcgaatgatataaaaaatattggattttgaagaacaaaaaaaagttataatggaaaaatatgctgggcccaaccgtgccggtccaactgaggtaaaccgaaaaaaacttgaaacaattttgcaaatgctttggttttcgaccccaatatctgattttttaagccctgttctgattttgaaaatatttcgatagcaaccctggtttagacatgtacaatatagaaaatttaattactcaattaggaggaaatggaaacgaattttgctgtgcagcggacggtcgggcaacggaaatggcacagaattagtaggatacttagtaaacacggatagtttcggcactgttcccattttgtcaattcctatccatttccaaattgtcaattcccttttaccattgaaatatttgtcaattaaaacattgaaacgtggcgaaattagtgccaatttgaggccgagttgaggacggtcaaaaaatgggaacatgtccatccaaacgtcaaagcaaatccagctaaaatgccggggaaaaataattgaatgattttaaaaaatgtttaattttaacccaataaattctcacattttcctcaaaattcgtttattcattttctttggcacgtgaacttttcgccgttttccaaatgatgtcacaactgaacccattatttgttgttcatattcaccaatttcggtggaagtttcatcggtggaggaatgcttttgcttttttctgggcgatgccattaaaaaaataataatttgcctaaatgaaagatattgtaataaattttaatttaaatattttggatgcaattataaaaatataaggcctaaatatgttcatggaatgggagatccgacgtttaataatgccgacaacattaatgagcaaaaatggacccacggacaaaggatcagtcaaataataatttaattaagaatatatttaaaatgggaaaataaaaaaatatactaaatttaaaatttgtactttcgttcagcttttatagcacttatttcaggcatcggcgaaatctaatcctaatttgttcagattagagattttttggtcaattaagtcatatacatagcatttttctcacagtccaaattgagtaaattagtcacaggaattctctcagcttatttttaatcttttttaaaattcaaactattattttatggattctttgtctgtgggtcctttgtctctgtgggtcctttgtctagatattttgaatgggggtgctgataggcgccgctgggaaaattcttgaaaatttgagtccaatttgttactaaaattacccataaaatccaaaatttttcgtttgcggaggattaaaaatttttttccattattcgcttgaaaatttttaaagttttcatttcggggagggggggggggggaattcttcccctagctacgcccttggctacgataaaagaaaagttttgggttattatgaaaaagcgccggggaacgacctactttgagaggaaggggaggagcagtggcgttgccaacttggcgcctcaaagacaatagtgtaataaattgttcaatttccagcttatccggaacttgtggcacttctgggccgaaccgaacacgtgccagccacctccacagttacttgtgagtaaaaataataattgactttgaaaaaagaaaaaaaccaataatttttcttatctttttcgaataaactggtcaaaataatttatctttagtcacattaaatgattaaatagaaaattgtttttttttcagtgacgtctgccgagttacgcgatttggtgacaagtgcccttgatgccaatatgcgcgcggcggtcaaccaaacgggtaattttatttgaaaaattgaaaaaaaaaattgagtttccgtgtgaaaagggaggggtttgagatttcaacggtcaaaacccctgcatttttacttttaaaatgatatttttataaaaaaaaatttttttgctttttttttatttttatgtaaatgagcatttttcaaaaaataaaaaaggaaaacttgagaaattcttttaaaaaatagtcattaaaattttgggaggaaacgatgcgtggggggtggggcatttcccgccaaaacatatggttggtgctggaacttttactcatcaaaagaaataacaaagtgaaaaaaatttttcaaatttttatgctgactaaattttttcaaaatccaaaaatcgtttggaattttttttgaaaaaactttattttatgtggtattgaaattccctgtttttcagtcagaaacacggtggctgaagaatctcacaatcagcaacaactcattaatcggatcagcgaattggaaaatcaagttcggcagctgcaaattcttggccctcaacctggtgagtagaggaatggtccaacagattctgacattcttcaaattccaaaaacactgttttttaaactttttagagtgccctttcaggggagggggcatcggaagtggggagatcgcagaggagggaaaccgagaaaaatttcttggaaattttggcttattgaaaagaatttggtttttttagtgtatttttgcttcttttgcgtccgattctacccccttttttcatgatcgaaaaaaatcacatcttttttgtttgtttcccgggagtagtgaatgaaacaaaatgcacataaataaagcaataaacattttcagtgacgacttcgaacggaacctccggaattcgcggtaaacatttctttttattttcggtttgtggcattgcaaagccaacaattattttgattatagtataaaaacatagtaccatttggtgtgtatgcttcatccctcccccccccccccctcgagaaaatttttgaaagacaacgcggaattcttagaacttctttaaatcaaaaaatctatgaaagggacgacatggagggaaggaaaaatttgatccgtcactcgaaaggctgaagcatattatagaaacaaaaaattttcactgagaaattctcaaaaaaagtcttggctatttttttataaaaaaatcctcggaaaaaaccaaaaaatttcttgcgcttttttgaaaatctaattcgataaattttcttataaaaaattttcctaaaacctttttttgaaaaatttctgtatgaaaatttttttaatttggggttcgacttggcgccaaccaactgggcaccagcccggttttttggagaataacttttttgttattcgaattgaattaaattaatagcattcggtagccctaggtattttctatatgccaaaaatcgaaaaatttgtttgagtttcggaaaagtatttccaaaaaacctagcaaactttgttttccgaaaatttttggccataaatttctgaaacttaacgaaatttttcaaaatttagcatgctaatataaaatacataggttataagaaaatttaaagaaaaaattattgaaaatttttcagcaattgatggttcaatgggttccggcggtgccggatggcgctgcagggaataattttttgaaattttatgtactttaataagaaattatgcaattttatacaaaaaattgtttcttgaagcatttttcatttcatgtggcacgtgccccccccttttcccccctggatacgggcctgattcggctgagtgtctgtcattcgagccgtgttccaaaataagctgaccaaatttaattgagacattccaaaattttcttcttttttttgcatatattaattttcggttcaaatgtaacagtgattcgttattaagctcgtttcactgccttttgccagcaacggattacgtcattggaagcagcagaaaatgccctctccaatgctgaagtggttagactgttcaatgtgacgccggccaatgcgaacttgcttacatcctttttgcgcgaggaaatccaaagatctcttaaattttataacacaattttatattcacttgtctttgttgatgcactccttgtgcagttgtctgatccggtctattttgctcttgctttgttgtcatttgtcgcgttggtttatcgcttcgccggcttttctgtttacactgccgctgctctattgctttctctatttctttcattttaccgcatttattgttatttttaccgtaaataattatgtttgcccatttttgtgaagtgtggaacgattgggcatttcacgtttacaatatttttccaaaaattttttaaaattttcattctccaatttttggaaaggaatgttagctgagacaaaagcttcgcataaatcgaggttaaattggttttgaacatcttttagtgttgtcaaaaattgctgctgttgtcctcctctgttccgttccaattttgccttgtgttttgccgtttcgttatgttgtttgagatgcgcgaattgcgtacaagaaatctgtgatttttttctttgttgttgttatcgaacgggtgttgccgcagttacctgttgctcgcataattgacaataaattattttgccagttgttgaatagaagtcagttgcaccgatccgtcgtatccattcccgaaaatttgccgattttgattttatttttggcatatccaaagtctaatataaaagaagaaaaatatattgtgatatttatttttgttgagcaattttcccaaaaatgtcaaaaaagtgaaaaaatagtgacaaaatgccaaaaaaagtgaattttcactattttaagtgacgaaacgctaaaatagtgatttctagtgacgaaaagtgacgtccaaagaaaaaatttaatgtagaaatgcgtttttgagctcctttcttcaaaacaattgagcgaaaaaaagttttttcactagaaatcccgaccctactaatgtgcgaagggggagggaccggagggcctttcagtgcagcacccctcacatttgctcatcccggccgttcccccatctcatttatgcaacatttctccagcgaagcgacgccactattttttcagcgctcattccccatcccatttaatttgcatttatgcgtttttacgatttaaaaatatttttaaatatttatgtaatattttaaatatttatgtaccaaaattttattaattgaaactgatcagaaaagcgcctgattaaacatttattgcgttttcccctttaatcttttgcttcaaatatggtgattttccaaatatatttattctccaaaaataataataataattgggttatggcccagacaaaacggcattatttttccccactcaaatttaccgatcactataccgtatccttttttgggttttcaaatgataattttggatcatttttactcaatcaatttccaattttatttggacttatttttaattcgttttccctttacgtgtattacaattcaataaacaattgcttattttcgttaaatttaatttccatttgtttttttccattgtttattgccgtttttattttcaatgcgctgttcctggtttgatcagccgatttggcatttacctccaaacatttttcacttttggccgacacttatttatgtatttttatttttttttatttccccattggacgtttgtttgaattttgtcattgccaatgcattttttggcatgctttgttgaccaccttttccctacatttctttttgcatttcttttatgccgattccataaaggcatatattaattgcttattacaaatgctgataaagtaaagtagttaacccctttatcgtgcatggtcaaaggttgggccaaggcccaaaagagttgtgaatggaatcaatcgcaaagtataattattaatagagcccggacgggaccgggatcccgccgggattttgccgggactcccggtccctgcttttttggacaaaccaccgggaccgggagtcccggaaaaacgggagtcccagtcccgggatcccgtcccggtccattttccaagtcccggtcccggccatttcaaaattccgggctctaattattaattaagtcaatcaataattgattgggtgaatcaaaataaaagtattattaattataattcaaataattatggtacaccaccaaaggggaccatggtccgaaatattacagaaatccataatgaacactctatttctacagtattgcattgagtctacagtatctatacttttatgatactgtagcatttaaataatacgaaccaaaataaataataatgacaataatcaataccataaataacaaaataaataaataaaaataataataataaaaagaaaacgaagtgtaaagtacaattttttttctttctcacaatcctgtgttttctccgacattctctaatggtgtaaaattggtgaccgatgacttttgtaactttgtacactaatgcttactgtaatcagaggtcgtttcccacgctaatgcatttccgattgtgcattgactattgtgttttcaattcaatacacattgtctaattagtctttcactttcacaaattaatcataaaatgtactcactattttctattactcattatcatcattcagctattccaaatcccaaatccgttccaattgtcttttcctctcattgttcattgccaacacctatgacctcagggtcaactggtgcgattggagaaagtggttgggccatggcccaaaatcataatgatgatgaaatggtagcagtcagagtgtttaataaaaatgtatttaactctccctctcttttctctccccctctctctccttttttctctccccctccctctctttctccttctctctttatctttccctctctaattttttattttgaattactcaatccgaaggtaattaaagcgaattttattgggcagcggatattttggcagaccaaaatgtggcaaaatgtccatccaaacatcgctacaaatccaactgaaattgttaaaatatgttgagcggtcttaaaaatgaatttcataaattgttaacccaatacattctcacattttcttcaaaattcgatggttctttttcattgccacgcggagacttcgccgtttgccaaattctgtcacaaatgagcccatcggttgctgttcatgttcactaattgcagcagaagaaaatgccgggcccagtggacagcgcatgaaaaagtgaaagaataattggggaattagaaattctgatcgattattatgaatggaaattgataggataattgcatatcatatttatttgttactatcatgtgcgcttcttcgttcctgttttccgtcctccttttggatactttcctgtttttaaggcacacccattttttaaaatgcacaaaagcgttcaatattaatagacttacatattttggaggcataaaagcaaaacaatttctgccaaaattacatcaaatacaaattttttggttattttattttaagctgtgatcattcgttcgttaatttattctcttactcttctatgagtacattttctgtgatcagtcatcagagtaagtgatccccgcccttcttctgttggcaatttttctttaccgataaataaataaaattggagtgtgccttcaaaacaggaaaatgctctgcttttggtgtattcccccgtttccgaaaaaaatcacccaactctatttctaaccaatttaaaactgcgaaaaccaaatgttcctatttaaacttctgcatatttgacgctatttgcaaagagtaaccttttgaaatttttttcacttttttttgacacatttttttttgtttaaattggctgagcaaaaaaggtttcgttccatgacacagagaactccaagtttgttcctttgtcgaacatttgctgattggcacggataaatgcgatgaaagaatggtcgatgtagctgaaaataggaacattgtatccgttaatccatgtcggaatttgaattaccaaatccgaagatgcttaaaacgaattttcttgggcagcgaatggtcgggcaccggaaagggcacataattggcattgtcaataaacacgcgcaattctggcaccgctgtcactttgttcttgcgcaatacgatatttttcaaaattggcaattcgcttgtgccatcgaaatgtttgtcgaccaaaaattcgaaacgtggcgaaagaagtgccaatttgagtccgagttgaagacggtcaaaaaatgggaacatgtccatccacacgtcggtgtaaagccaactgaaattgtggaaaatcaaatcagggcaatggaaaactttgtctaaatattattttaccggcggttcattttgttggaaattagcacaattacgaagaacgtcacaaaggggcacaataataattatgttagaaatatttttacacaatgagaaaccaatcgaaaaaacaaacatttttatagtcacgaaaaacgaaaatgaaaacgtagaagcaaatgcttaaatctttactctttctctctttataaatgtattaaaatcgaccaatgccttcagtctccctaagtatcctctaattagcctgcaaaagtgatgcaatcagccgcttgcaattctgatctcccaattttggtatttagcatttattcagagaaatacaataatacaattataacgcggacaaacatccaatacaatacacatataatggtgtcctcatgccaaatattcatacaaatcgcgatcctcctccgagcgcttcaaatattctttctcaatcagcgagtcgatgcacttcttgatgatcggcaccttaaaaggaaaggaaaggcattcatttgcacccaaaatcattctcccccacctttggctggaaacgcgttgtcaattggttgagcacctcggccaccaacagctgatgcttcaacgatttgcgcattttcataatacggacaatggcagccttaatgagggagaagaaaggggtcattaaaattgatttgtcaattttctcacctggatgaccaacttcctgtcctcgtccaccgtcttctgcacgtcctcactctccttgtttgtctccctggcagaggacatggcacggaccaagtcgactttgagcttgcggctgaaaagacgggaaattgaaaaataatttagaactaacggtattttacattcatttttaaaatttaattacccccgttcattttcaaattcacctctggaattccgagttaaaggtgaatttctgctcgttgtcattgagtttcgtctcggtcaaagctgtcccatcggcgctggtgagcttcagcagattcgtcttgaccaaggattgaacaacggcgcacagctgatcagcgggaaagtcggtgccaagagtgacgtgcagctcgccaagtgtgtacgtgttgcgttcgttgtactgcatgaggatgacaatttgttgcgtgttgcactggaaaagaaaaacatttatttttacgaggaaacccaacttttaatgtcggaattgcttaccaaaaatgagtatttgaacgggaaagtgttgctcgtcgtcaccacttcaccgcggcataagccacctgcttatggcaacggcagcaccattaaattcattccggcctcaatcgccgctagggcaagcctgaagccaaaaaattaagggagggtgagtaggggttgttttaaattgcggaccttggcaaggagttcagcggttcatcaaccaaatggttaaattcgtaattatggagggggtggggctcgtgtcgtcctcccagaaaaaaatagaaattttttttatttttgtaagtcatgcgggagatgacgtaaaagacgaaaaaaacatttaaaaattgcggtgtttttttgttttttgcaaatgtcacgtagaataaactaacaaaacgcactaaaccattgctattggtttgaaggcaccaaatgccacaatttgatcgtttacttatgcaaaaacaaaaacgtcctttgttgtttttttgaaaaaaagatttaggtaaggactgactgtgagacctaaaaaccaagacaaaacaattggtattataacaacttgtgtaaatcagggaggacaattttttcagaaacgtaaccatccccgataaaaaatccgtttcggcaccaacctttttgggtttattgagagcaataaacgggtcaattctgtcgccgtcttcttcttgaagtcgcccagcaacttctcgcagtgctccccgcgcgaaatgctgtccatctgaaaatgggttg

SEQ ID NO: 2160 - DNA, 1408 bp, Heterodera glycines
tactttcgagttcttgtctggcattcgaaattggtcacactgaatggcattttcgagatcaacgtccctaaaaccccaataacatgttttcaaaacctttttttccaaaaaggggtggggaccatctgcagtattaccagatcagaaatcctctaacgtcgtctaaaatctgtgaaaattggataaaaaattcctatgctttttttaatgcgcgattcgcgtactgctaccgcggcacccttaaccttcactaaatgaacggatggatgaaatggataagatattccttttttttctaaaattcatatttatagaaaatttgttttgtcaaaatgtcgtcaaaacccgaaactttggtggagcggatgaagcatttgttgagctcgggcgatgacgcggacgttctctttttggtgggggaaggagagggaaaggaggcgagttttaaggggaaattgttacaaatttaaatgcttaattaatttaaattaattttaatttaatattgttttctttaagcatgtgcccgcgcacagagcgattctgaattcggcttcggacgtttttgaagcgatgttccgttttgacaccacaaaaaatgcgactgactatgaatcagcggctggagaaggtgtgaaaaaacaacaaaaaattttgtatttaaaaaaaaaaaatttaatttgaagcgaagggtcccgtagaagtcactgacatcgatgcgcatgtgttcaaagtgatgctcaacttcatttatgcggatgatttaagtgaattgaatggagacaacgcaatggcagtgctttacacgggccagaaaattagtttttaattatgttaaacagggacggtcccgggattttggcttgggagtgtcccttttttctaacaggttttcactaaagattgataattttttggattttcgaaagaactgctttgtaaattttgatgaggggggtaccaacaagaaaaaccgatatttttccataaaattagggtgcggaggggagtttttttttggggccccccaacctgagacttaccgttcctgggtatgcggggcatttttgcaagaggttttccttattgacacccactccagggacggtcccagggcgacgaccttttttttttgtggaacaggggtccggcggtgccgataggcgccgccgggaaaatttttcattttataatgaattccaaaaaatggcaacttttgccatttttagcagattttcattaaaaaattgtggattttttgataaatttagcgaaattttttggaaaatttgggtgaggctaagtctggggggagggtaccagcaaggaaaatctgaaattttcagcaaaaatactaaattttccttaaaaatttcgggtgcggaggggccttggggggggggggggg

SEQ ID NO: 2161 - DNA, 1331 bp, Heterodera glycines
catatatttatttttttatgtttagccaaaaagtataatcctaatgcattggccaaagcgtgttgaaatgttcccatttccgagctcggcaatgtgtttctcgcttatgaccaatctcgccttctcagcgaaaaagcatgaaattttgtttccattttatcattaaattaaaatcaatcaataatttttgtcatatacaaattttaattttttctttgaagtttggtacaaaaaatcagatcaaatcgatctcttattttttttcttttttttgaggatttctcttgtcgctgcttggattacattgaccaaaatgcggaatcgctgatccaatcggatgcctttttggaaatggaacaaaatttgctgtatgaaattatcgaacgtgaccagttgaaaatcatcagcggcgaactcattatttggaatgctgtactaataatgtacaaatttttgaatgaaattcattttcaggcactccgttgggctgacgcgcaatgccttcaaaatggcaccgaatgttcggcagagaatcgtcgtgttgtcctcggcctggcactgtccaaaattcgttttccgctcatctctctttcggatttctctgaccatgttggtaggtcgtccgtcaatacaatattttaaataatatttattttaaaattcctatttttgttagtgccatccggcgtgttgaccagtgacgagttggtcggcgtcttcctgacccacgcccacgcggaccgtcgtgccaactccgagttgtaccccaaccaatttcccacccaccatcgcactctgctcagcgcttttttcaacgaaaaattgattagtcgataaagctattttgcaaattgttctgatttttaaccaaaaaattcattaaatttatatcttttctttcttttgtcgctttaagttttgacttttgaaattaacaacaatgaaagatcgaactttttttggcattttttgcgatttaaatttgatttttgacaattttattgcacatcaacattatttaatgtgcaagaaaaatttacgcatttttcccctgaacatttcggcgacgggatcgaaagtttaaaattaactttttttttcagtatatcatacatatactgtacccaaagcaaagtagtttttgaaaatttttcaggcaaatgaccttatcaaaaaagtttttgccaagaccatacgtttcggcatcggtaagggcaaatctattggatttattggtcataaatctgcggattatttttcttccacggaaatatgtattgaaaaaatgaaatttatctttctatatttaaagcaaaaaaaaatgttggata

SEQ ID NO: 2162 - DNA, 6499 bp, Heterodera glycines
cgcccaaaatggttacaatcaatttctaattaccttttatcatcataaaaatcactcctgaggtgcggaaatggcaaaaaactggtttttgaaccggtttaaaacttgaaaatttgagtgaaaaggggggctcctgaccctttaaaacggtcaaattcggacaaatttggtatcattcgaaagctcttgatgagctaagtttaaaaaacaaggttataaattcggaccgatgccatctaagcactgggacaactgagtcccagtgaaaatcgacacttcagtaccaaaaacataaaataagttttcttatataatgcacgaaaatcgtttagccttgaatatcgagtattgcgctaaaaaaccgccgcacactcgatgctccgtcttcgcatgctcccttttgcggttgtaggtaatcctggaaaaaaataaatttttttaaaaacacatttccgcacctcgggactattttttatactcattagaggtcataagagatcgattggaacaagttttgggcgttttttaacggggccacttctaaagtacacccaatagtttttgccatatacaaattttaattttttctttgaagtttggtacaaaaaatcagatcaaatcgatctcttatttttttttctttttttgaggatttctctcgtcgctgcttggattacattgaccaaaatgcggaatcgctgatccaatcggatgcctttttggaaatggaacaaaatttgctgtatgaaattctcgaacgtgaccagttgaaaatcatcagcggcgaactcattatttggaatgctgtactaataatgtacaaatttttgaatgaaattcattttcaggcactccgttgggctgacgcgcaatgccttcaaaatggcaccgaatgttcggcagagaatcgtcgtgttgtcctcggcctggcactgtccaaaattcgttttccgctcatctctctttcggatttctctgaccatgttggtaggtcgtccgtcaatacaatattttaaataatatttattttaaaattcctatttttgttagtgccttccggcgtgttgaccagtgacgagttggtcggcatttttctgacccatgcccacgcggaccgtcgtgccaactgcgagttgtaccccaaccaatttcccacccaccatcgcactctgatcgggaaccggcttttttttctacgaaaaattgattagtcgataaagctattttgcaaattgttctgatttttaaccaaaaaattcattaaatttatatcttttctttcttttgtcgctttaagttttgacttttgaaattaacaacaatgaaagatcaaacaaactttttttggcattttttgcgatttaaatttttgacaattttattgcacatcaacattatttaatgtgcaagaaaaatttacgcatttttcccctgaacatttcggcgacgggatcgaaagtttaaaattaacttttttttttcagtatatcatacgtatactgtacccaaagcaaagtagtttttgaaaatttttcaggcaaatgaccttatcaaaaaagtttttgccaagaccatacgtttcggcatcggtaagggcaaatctattggatttattggtcataaatctgcggattatttttcttcaacggaaatatgtattgaaaaaatgaaattttatctttctatatttaaaaagcaaaaaaaaaaaaatgttggataatctgttaccttcagaggcagtaagggaacgaacctgagagtaaaaagtgttgaggaattaatttttaaaaatgagagcatacatgtacaaggggtgcgccagtcagacccccataccgtcggacgtttggcgcagggggggtgcgcccgacgcaccccccttgtccatgtatgaatgagagaatgccaaaataaaaagaattgctacacatgacatcatacaattgacatgaattagtagaaaaaaagaaagctggggtcgggaattaaaaatatgaatgaattttactgatccgacaatttgcgcttcgtcccttttttctcctcttccacagtgatgtcaacggccaatgtcactttgtccccgtctttgtcataaaatcctctgcttgggtccattaattgcttaattatgctcatttattaaatgagggtttacgaatggaaaaagctcaccgcaaaagtgatgaaagtggggaatcccaaattgttcaatttattgttgaaaattcggccattgaattgcccaattaaattcaccgccccgcccttttgtgagacaatttgaattgtggccgaacatttgcaactccaattttcaccttaattgccaatttaaataatgggataaatccatattttgtgcccactttttgagccggcacacaaaaggtaaaatgccaaacacttttcgctgcttttattattctgattgattatcagtgccaatatcttccacgaaagtccctttatttgtttgatttcgctgctccgttcactcaaacaaatctctcgcgaaaactcagtcaatttgccaatttccatcacaattttcccgtttgttttgtttggatttgaataatccaatttatccgctttttcttccttcacaataacatcgatggccaatgtcactttgtccccgtctttgtcataaaatcctttgtccttttccatcaattccttaattatggtcaattataaaaaaagacatctcttaattgtttcttacagaaaaagtgatgaaatttgagaaacccaaagtgttcattttgttgttaaaaatgtgatcattgcgttttccaattaaatgctccgtgccgcgcttttgagaaatgattcgaaatgtcgctgaacatttgcaactccatttcgggtcttataataaaataaaaaataattaattagaattaaaacaccattaattatcattatcccaccttctcttggcgcggtgcactgaaggaaaaagcccaaacacttttcggtggtgccattttcgtttttcgtcgtatttattttggcacatattttccacggaagtgcctttatgtgcactttgcctttgctaagtcggcactttccctcgtcccttcgcgcaaattgagaaaatttcgtaatttccattgcgagtgttcccgcatttcccctgggggtattattccacgcggaaatccgtgcatggcttggaaatgccaccggagataaaagcccaggcaaatgaaactgacaaatgccgacagattcctctgatgttaaaacgccagaaggaactgcgaaaaaaaaattatatttgtacatatttcgcgatttatgcttttttgtgcttatttggacatttttccaaaaaatcccttttaattagagtgccacgggaccgggaattttgggcaaacccgggaccgtgaccttttcgggttgaaaaaccgggaatttttggctgggaaaaccgggactagtcccggtcccggtcaaaaccgagaccttggtactcagttgtccgctaccaggtcccggtcccgtggcactctacttttaatccctttattttttactattttttttaaataatcagttttagtcttattttggttttcatatttagaatatttattatctaccaatattcgtggaaaattctctttgcgggatgagtgggaaacgaattttgaacagtgccgggccaagcgcagaacgacgattcgcagcagaacattcgatggcattttgacgacacttttcgtcggcccaacggagtgcctaaatgagtcaaatgatttgaacaataatttttattctatttttaaacattaattattacgctattccaaattgtgagctcgtcgctgattctcaactgatcactttcgagtatttcacacaacatattctggtcaatttgtgcaaattcctccgattgcaataaaattttcgtattttggtcaatgaaatccaagcagcgaagagcaaaatccttaaaaaaggcaatttaaaatacattaaattcatttacaaaaaattcctcaaaattcagtgcaaaaactttactttttcgctgagaaaacgagcatggtcaatgacaaggaaaacattggacaattgaccaattagactgaagcagccaaattcaaatttaagccctttcttcggatgttcaaaaatttaggaattgatggacccgaacagaggattatatgaccaaaatgaggacaaagtgacattggccatcgatgtcattgtggaagaacaaataacggagcgattcatcatttccgaaccaaacaaatccaacgggacaattgaaatggaaattgacaaattgtcggaatttgcgcgagaagtttcacagagtgaacggagcagcgaaaccatacaaataatgggattgtcatggaaaatagtgacagaaattaatacgaaaaatgacagaaatggaaaatgtttgtgctttttcctgtgtggcacttaaatacataattgaggttttttttgctcaaatcgactaaattgattcccccaccgccggcgggactcaacttgagacttgagcatacatttttgcggggggggggtcacaaattttagaaaatttctcaactagcacaaggttgtctatggcgcccagttggcgtaggttcggcagcgcccagtttgccccgatctcgcaattgtctccccctccgtcctaatttttatctcattaagatgaaaattggagccgcaaatgtatggcaacatttcgaattgtttctcaaatgatcgaccttggggacttctcaagaaaatttgatgaaaagagaatttttagtgctgggaataagaaccgaggatttactaatttcatcacttttgcggtgagtgataattaaaatttaaaagttcattttctcaataaaatgctcaaaattaaagaattgatggacccggagaagggattttatgacaaaaatgaggacaaagtgactttggtcgtttattttactgtggaggaaccataatttggagcataaatgacaatatttgatgaaaaaaccattcaatttttgattgcgtgtaacttttaataaaattttcatttagcttatttaaaagaattgtttgtgaatttttccagttttttctctggctgtgaacttattgctttttacaccatctttaaaattaaggtcaaacgatgccgcctaagttaaattttgcgtgagttatgcaaaatttacggttacccggcatttgcggaaaacgacattttgcggaccgacatttgcgggtttctaaaagtcgacatttgcagacaaatttttagaataaacatttataaaaaaaatttcaaacttagaaatttttcaaggaaaaattcttagaattttttataaagttttaagaaaaaaaattatttgttaagtttttcttgaaaattttttgaaatttatcataaaaattcaaaaaaaaaattactgaaaacaaaaattttttttctttcaatttcttataaaaaaactttctaagatttttttcctgaaaaatttctaagtttgaaattcgcaaatgtcgcgacacgaaatttacatttaaaattgtaaattttctttggtctcccaaattgccttcatctttaaaaaatggtttctttgttattatatttttgaatctaatccgaaaactgattttttttttattataacataaaattttatgagtgatttatttttaagaaatacaaaattagatttattattttttgaaaaaattaatcctctaaatttaaaagttttgtatttaatttcaattcaaaaaaaaattttcttttttcataatacggtacttctgcttgaaattaaatggaattgaggggtcgccaatgccaacaggcgccgctagtgaaaattttttggaattagctgaaagtgtatgaaaaatgattcgttaacactcaaaactaaatgctttattgtataaaaatttttaaaaaaatgaaagtgagtgattgattgtatgggtgaaagtgagtgattgattgtatgggcttattaatcgttcaatttgcgctttgtccctttttttcttccactgcaaaatcaatgactaatgtgactttgtcctcattttggtcatacactcctattgctactttaatttgaatttttttttataactttttgaattttttaaaattttttagtcaaaaatttttcttaaaaaaattaaatcgatttagcaacatagcgagcgatctttaaatattaatggattttatttttaaaattaaaaaaacataattttgccagacaatcgctttgtgcagcaggacagcacacggcaaatgatgcgcaaccggcgggaatgggctgtccaacggttgttcaggcattatgccaatgtcggtgtgccgtaactcaacgcgtacggttgggcgtaaattctgctgttgctgcctgagttggaggtgttacaatatggggactgcaatgtgggaattacgatcaaatatcgacccacaaaa

SEQ ID NO: 2163 - DNA, 1352 bp, Heterodera glycines
gggaaaaacaagcactggtttttttattttgtatactcgtgggtttcctataaagaaaatatgattcctcatagttttttttaaattgatacatattttatcattttttaaatgaaaatcctagcaattgagcttaataatcgtaaaaaccaacctttttttgttgaaaatctgttaacaaattgcacccaaatttttaaaatttcacccggcggcgcctatcggcaccgccggaccccttctttcccaaagttttttgaaaaagcgctccgaaaaaaagtgatgtgaaaatcaaatctgaatttctattaatattcgatgatttagtccaaaaatgattaattgtttgaaataattgaagaaaatttgtttgaaaattttcattaatttaatttattataaaaaaccaaataattttgtattattttcacttgatataaattaaaatttgaatttttttttaaatttttaaaatttttttgaatttttaaaatttcccggttggtccctgttcccggtcccggacaaaaaccgaggtcccggtcccggcttctcaggtcccggcaagtcccggtcccggtttgcccaaaattcccggtcccgctctactctaattttaatgaaccgcgacaaataacataatgccaatttttttaattttgttttttgttagtaatttcgtttttgttttagtttaattaatactttatcaaatttttgtttttattttctaaaccaagaatatattatttattctaattcttttcaatttgattttaaatttttgtctttttattttaatgaatgtatttgtttttttgatttcttttcttaagttattttttgaaataaaaacctttgcaaaaacaaatatggaaacaagggaagaaagaaagagagagacataaagagagatggagagagagagagagagagaagagtgatagagagagaaagagggaggtgtagagagagagataaggagagatggagagagagaaacagagagaaagagatagagagagagggaaaggagaaaagagagagagagagagaagttggagagaaaggaagaaagagatggagagagtgagagagagagagagggaaatgggagagaattgagaaagagagagcgagagagagaagagtgatagagagagaaaagtggagggttgagagaggggcaatgagaggtaatgatagagagagagtgagggagaaagggagatagagggagggaaaggagaagagagagagagagaagttggagagaaaggattgaagagatggggagagagaaacagagagtgagagagggaaacgggagagagtgagaaagagagaaaaga

SEQ ID NO: 2164 - DNA, 1581 bp, Heterodera glycines
taatgatagagagagagtgagggagaaagagataaagatagatggatcgagagagagagggaaagagatggagaaaagaattatagtgagaaagagaaggagggagagagaggtgggatgagagagagagagagaagagtgattcagagagaaagagggagggagagagagagaagagtgattcagaaagaaaaagagatggagagagagagatagagagagagagagagagagataaagagagatggagagagagagacaggggaaaaggagaagagagagagagagagagaagttggagagaaaggaagaaagagatggagagagtgagagagagaaaaaaagagagagagagtgaaaggcgagagagttgagaaagagatgagtgacggagagagaaagagaaggaggcagatagagagagaaagagagggagagagagtgagggggaatgagagagagagaaaaagaaaagtcatagagagagaaagagggaggtgtagagagagataaggagagatggagagagagaaacagagagaaagagatagagagagagggaaaggagaaaaaagagagagagagagagaagttggagagaaaggaagaaagagatggagagagtgagagagagagagagggaaatgggagagaattgagaaagagagagcgagagatagaagagtgatagagagagaaacgtggagggttgagagaggggcaatgagaggtaatgatagagagagtgagggagaaagggagatagagggagggaaaggagaagagagagagagagaagttggagagaaaggattgaagagatggggagagagaaacagagagtgagagagggaaacgggagagagttgagaaagagagagaagagtgatagagagagaaaagtggagggttgagagagggggaatgagagataatgatagagagagagtgagggagaaagagataaagagagatggatcgagagagagagggaaagagatggagaaaataattatagagagaaagagaaggagggagagagaggtgggatgagagagagagagagagaagagtgattcagagagaaagagggagggagagagagaagagtgattcagaaagaaaaagagatggagagagagagatagagagagagagagagataaagagagatggagagagagagacaggggaaaaggagaagagagagagagagagagagagaagttggagagaaaggaagaaagagatggagagagtgagagagagaaaaaaagagagagagagtgaaaggcgagagagttgagaaagagatgagtggcggagagagaaagagaaggagggagatagagagagaaagagagggagagagagtgagggggaatgaaagagagagaaaaagaaaagtcatagagggagagaaagagggagggtgagagagagagacaaagagagatggggagagagagagagataaagagagatggagagagagagagggataaaggggagaggagagaaatgaaacttggatgaaaaaatagtaataaactattaaaatttatttttaaatatttaaaa

SEQ ID NO: 2165 - DNA, 3603 bp, Heterodera glycines
  unsure (1)..(3603): unsure at all n locations
tcttttaaagtagattttttcgctgaaaatgagtaaatttaagctttatctttgttttttcttctaaaatggtttttaataccatatttagccatttttgaaacttttactttatatttagggatttagagaaattttggtaaataaactctaaatttggaaaaatttatgtccatatttttgcattttatgttcatattttgcgatttttggtcaatattttatggccatattctgcgattttatatccatataattataagccctagtaataaatgtttctttgatgcggataaaaattttaaataaaagtttcgcgatcaaaattttatatttttaaggtagtccttacaacctcgtatccgaacgtgccgtggaacgctacgacctcgaaggactagtgaatcgaaacaatatttaccggttaagcggcgtcggggggacgcccgtgactacatgcgggaggtcattttattcttattaattttgtgaaatatatttatagttattttttttatcttaaaaatgccttttaattaatttaaaaaatgaactccgctttaaggtgtttaccctccgcagtcccacccttgaccctatttcctcattaaaatccgactttaatgatgaataaggacaaattagcaagcactaagggttcattaagatattaaatatgaattaagacataatttagtcgtatcgaaatacatcaccactgttgaaaactaacagctttttatttatcattaaaattctaaaccagttgaattattattttttgctcttccacaatttgcagcggtcgcattcatgcgaatttctaagatttttacttattttggcctacaatgctttttcaactttgggtattattatgaaaatgaagtaaaaataatttttaatttttttgttattggagtaatctattcactataaaatttatttcaggccgattccaatgcccaacaacgatttgatgagtggaaagacctttatttatgggaaaataactaataaaattatgttttatcctcagagacaaggtattccaaaagatcatagtctcgcttagaatccggtcggctaacacttttattgccttctcacattggacttttggcgttgtttattgtccatttgttatttggtcctttatcttttaatctccacaaacataaagcacatttgtttagtattttgcggatttttagagtgactaatttgcatttgttttggttaaatgcaaaaaaaaataaatattgaaaatattcactactataaacggtgatgaataaagtttatatttacgtttatgatttaatggatttgtgaatggaaaataataataatatttccagtatctgttttttaatttggtctcttcgcctgatgaatgctttaatcttttttttttgggtgataaataaattctttggagctctttagtgaatttatctctccgcctaataaagataacataaaagattttttatcctaaattatacaatgatttactgtaacagaaaaatgacataacataaaattattggaaaatgaatcttcagctaaattgaggttaattgtaaacctcttcgcctgctacataaaattgttgaccaaacgccaattattgctcgagtgaaaggcacagtacggaatcccaagcgagattttgcggaatatccgtcctgcagcatttgatcaccgcatcaccattgatcagacttgtttgatcggagtacgaccgtagtgtcagtcgacttgatatttaagtgtcaaaagtgatcagaaaaaatatccggaaatacatataaaatttgaaaaatttccaaaattttcctcacaaatttataacagattaattattatgagttcaaataagcccgactttggaaaaatttaaattttataaacaaccgcttaagaaagtgaattgttttaataaaagtttaagagatttcttccaactcgactatcaatttctcaaaagttttaaaaaatagcgctgaaaatatgaaaaggaaaagtaactaatttgaatgaacaaatctgacacccccccccccattaggcgacgacctttctttgctatcttcacactgtttttttacggacgcattttttcctaaaaactattggaaccaaggcagggggccaatcacattttacgaacgacaagcgacaaaaacggacgacaaacgaacaaatnttggcatatgtcattacgacaaaaaattatgtccgtttgaataagccgtttttccgtttgtcgttcgtaattgtgattggccccagggggaggagtcccggcgttgccagctttcagtgacggtctcatcttcaagtctaatttcaaaaaattttcagcggcacctaccagcactgccggaccctcctgttttccaaaagttttattgaaaaaatgcgccggtgttcaactcaaaaaacagctcgtcgtctaacatttattttaaaagttattaaataataaaaatattaataataccaaaagatgttcgtcatatgacaaaaattcccatttaaaattatatatgaaaataaaaattattaatacttttatttaaatttttcttttttctgcacatcactgttgtcttaaaacgtaaagttttcaaccaatcaaaaatataaagactgagaagcaacttgtattattaaaaaagagaggattgctaaaatgtcttttttctccatcatttccaatcaaagaacaattcaatttttattgcttatggttttattaaaaatgacttaaatcgctaaatttggtcatttttggacaaatttgtttttattatgttttatgttttttgaaaaatttccgagttccgaattgcgatttccgacttccgaaaaatttttgggcctcggaattctgatttccgatttccgaaaaattttggacccccggaattccgatttccgaaaatttttggggcctcggaatgccatccctgctatgtaccttaaaaagttacaggctatttgtactccctcgtctttgtcctaaaagcctttgcttgggtccatcaattccttaattgcacaaattgattggtcaattaatgcttctggtcaattaattgtcacacgccgtaaaagtggtaaagtgtgggaatcccgagctgttcgacgtgttgttaaaaacttcgccattaaaatctaaaatctctattcaaatccgccacttcgctctttaataaattgccaatgtcactttgtcctctttttaactcagtaaattattgtttgcgttttgcttcagacggtgactggacaatcggacagtggacaatcggacagtggacaatcggacagtggacaatcggacagtggacaatccgacagtgaggacaatcggacagaagtggacaatcggacagtggacaatccgacagtggacaatccgacagtgaggacaatcggacagaagtggacaatcggacagtcaaatataaaatagataagaaaataccggtcgccttgtactcaaaaccgtccgccaaaagaacagcccggcgctgtgttgtttcagcaacaaaaaacattttttcatttggttgaaggttcgggaggggg

SEQ ID NO: 2166 - DNA, 4035 bp, Heterodera glycines
aaattaaattaataaaaattttcaaacaaatttctttaattatttcaaacaattaatattttttggactaaatgattgatattattataaattaatatttgcttttcacataacattttttcggcgcgctatttcaaaaaatctttgggaaagaaggggtccggcggtgccgataggcgccgccggggaaaattttgaaatttgggtgtaatttgttaacagattttcaacaaaaaaggttaaaatgtggttgaaaaatgcgccgtaaagacccctaaagattgaccaaaatttcaattaagggaggtttcaatcagaatatcaaattgattatcatttgtcctccatttttgcttctttcacagtgaaatcgatggccaatttcacgttgtcttcgcctttgtcgtagaaaccgttgcttgggtccatcaattccttgattgtcataattggaacaattaagggaatgtttaattgtcacttacagcaattgaaataaaattaaagtatccccagcctctgtttttattgttaaaagtatcttcattagtaaatcttttgtaatcctttacgccgctcttttgcgaaacaactcgaaatgttcccaaacatttgcaactccaattttctgctcaatatcaattaattaattgttgttaatatatatattaattattagtaattttgcaccttcttcagaagcatcacacaaaagggaaatgcctaaccatttctcatttttgtcagtgctttcatctttcttttttatttctgcccatattttccatggcattcctttgatgtgcacagtttcgcttttacgttcactctcaaagatttctcgcgcaaattccgacactttttcaatttccataaagagtgtgcctttcgaattgctttgatccaaattgaatttgtccacttttggttcatcaacagttgtgagatcgatggtcaatttcactttgtcttcttccctgtcgtaaaaaccattgttaaggtccatcaattccttaatttaaatcatctaatttaatttttgtttatgcgtggtcaattggttatgttttagaaattaatttattttgttatgatttctttacaccaggcaaataaataaatgaacttcaatattggctggtccacgaatgtcaaatttaaatatttgtttgaattggcacttaccgcaaacgaaacgaaattagggaatcccaaattggtcaatttattgtccaacacaaagttactaagtgtcccaacgcaattctccgtcccatttttttgcgagataattcgaaaagttgccgaacgaacgcagcagcgccaaagcgaatcttaatggagtattaattattgctgttaattagtactaattaacaattaattgttgttaatatatatattaactattagtaattttgcaccttttttcgaagtatcgcaacaaatgaaaatgcccaaccatttctcattgtcagtgcctccatttttcgtttttatttttgcccatatattccatggcaatccatttatgtacactttttcgctgtaccgactgctctcaacctcctctcgtgcaaattctgacactttttcaatgtcaattaaaagtgtgcctttttccgatcggaaatccgtccattagtcggaaattgcattgggaaaaatccgtcggaaatcccatgataatttggaaggaatttgaactgataaacggcgatcacttcatcttttgacaaaacaccgaagggaactgtaaatatgtattaacttattgaaaaataaatttttaaaaacattttaaaaaatcgccacaaaaacaatgaatattttacggcatctcatcagagaatgagtttgaaattttgacttattttttaccaattttcctcgtaaattcctcatttgacaaaagcggaaagcgaattttgaacagtgccgggccaagcatttgacggcgattctctgctgaacaatcaatgccataatggataaaaattaaaattattgaaaaaattttaattaataatttgatattagttattttaccaattttcttcgaaaatttctcaattgagaaaagcggaaagcgaattttgaacagtgccgggccgagaacggcacgacgattctttgccgagcattcaattccattttgatggcattttgcatcggcccaacggagtgccgaaaaataaataggaaataatggttaatttaaaaaataaataaatgaataataaaatttagagttttaatttatttgtaaaataatttcagcgttccaaattgaaatttctccattgatttgcaattcgtcacgcgacaaaatttcacacaatgttttttggtcaatttgtaaaaattcctccgatttgatcaaatcgtccgcattttcatacaaaaaaaagtctctaaagccaagggtttttcgatctcacaatcagacagcaacaattaattggtcttaaagtagcttggttccacggtcctcactagggctgggatttttaggcaaaagcctattttttcctgagctccccgtggcctgaaacgcactaaaacatggttttttgggatgttgttaagctacttttcgagttattagagcctattttctaggtttttatttttagagcctaaaagcctaaaaattttttgaaagaacctatttttgccttttgtccaaaattataataaaaatgcaataaaaacgaaaaatacacccctaagaatcgacctaaaattttttttcaaaaaatagacccctaagaatcgacccaaaaaagcaaaattttaaatttttacaaaatgcaaaaatttacggcattccatatggcaatttcttggcttacaaccaactgatcccggcacagaattttgaacaataatttctggtcaatttgcaaaaatgcctctgatttgaacaaggtgtccgcattccgatcaatgtaagccaaacaacggtcggcaaaatcatgaaatgagggaaaaaattgaactgtaaatttgttagtttatgttatactttttcggtcagaagcgagctttggcaaaagagatgaacacattgcccagcttcgcaataggaatgccaacacatgctttgaccaatggttggggtaaaacagatttatgaggtgaggcacaagtttattttcgttaacttcctgacaatgactctcctaaaagttacagagcaacatccaattgaaaggtgtcgcgactgaacgtcagccgcgaatgtccgttgagcggacaaatgaggagaacggggaggaatgaacgaagcagcaaacgaggagtgatgaatggatggaaagatgggaaaaatagggcaaacgggaaatgatgaagggaagggaggacaaaaagggggcgaagggagggacggcagcaggcgagcacgtgaattaggggaaggaaagcgataaaaagcggatgtggcgccttctccgcgtgaaggacgcccgaggcagtgcaaaaacgccgatcggaccatcgcggtgcgacgggcgaaacaaaacatcaccaaggcggacagccgatgaaaatcggcgatcatttgatggaaaattgcgaatttgcgggagatcaaattcgcccggacccttccccccccccgcttttctccggtgatgtgcccccttccccgcgactcaccccacctttgtgccccccaattgtgccatttttccctttgcatttcccctcgcattttgtccccattgtcacaattttcccccctttgtatttctcacacatttcttatgtatgggtttaattacccaagtttgagtttgagataaacttgcggagtaattttggtgcaaattcttggggcggcaaattggcaattggcggcagcaaatcggaacaaacggcgcggacccctcccccatccgcgtcaagtggcgaccctggcacttcaacggaccgtgcgtggacaaaaagtggccgacagacattgcacacaggagcatttgggattagtgagtaaattgggggaagaggaaattttgagattgggcaggg

SEQ ID NO: 2167 - DNA, 4431 bp, Heterodera glycines
aaacaacttgacataaaaattttattaaaaaggaaagatatattttcgaaatttttgctttgcagttttaggaaacgcccatggtggcggtttttaggaaacgcccacttggcgggttttaggaaacgcccatggtggcggtttttaggaaacgcccacttggcggtttttaggaaatgcccatggtggcggtttttaggaaacgcccacttggcggtttttaggaaacgcccatggtggcggtttttaggaaacgcccatttggcggtttttaggaaacgcccaatgtggcggtttttaggaaacgcccacttggcggtttttaggaaacgcccatttggcggtttttaggaaacgcccaatgtggcggtttttaggaaacgacctagcacccctctaaggaagctggatgaacaaaaatgaaaaataaaaaacaaaaatcaaagggattcaaaaggacatggaaaatgcagaagtaaaagaaatacacagtttgatgaacaattaaaattttattgcttcttaaattgatttttgttttgtgattttgacttaaaaaagttgtagaaaaaatttcgctttcgagtttcttggaatttcgcgtttcgcattttatttttcgatttggcccatccctgatgctcaatctaaagcccggaaaaaactccaaaaaaaagaaaggagtggtcaaattttaaatgggatgaatccataaaatttgacgattatatatatatttcatatcaatttgtccgccttggtttttcagattttttgtgggattggaactcaaaatttttggggatccctcgagattaatcccgcggatccagcaaaactcaactctgaaattcatggtcacgatcacgaaaaccgtgaatttcacggtttttggatcatggttacggttacgattcacgatgcacaggtttttttcaatcacggcacacctctactcatgctggagcgcggacagaaaaatcccgcggtcgcggatggcgcatcgcggattcaatttgccgcggtcgtggatcgcggtcgcgctccactcctgacctctactaaccacctctaggccattataacaacaatagaaatgctttttcctaaatttaagctcattgtcagaccaagtcttagaaatgtgtgttattttcaatctatagttcccattcggatttaaaagtcaagatcgagattggagttttgaaaaccggtgtcgaaatcgagatctgcttccgaaaaagtcgggattccgaccaaaaatcagtcgggatctcaatgccgtgcaactccactaaaaatcaaccgtaaaaaataacagcataactgtttgagtgaaaaaaattattttaaaaaataaaataatgttcccgggttattttaatttttttttccaatttgctattaaaaaaataattattttgctgctcgtggctgtgcaaagaaagaactgggaaaactctaataagcccaactttatcaccagacaatgaaaataagaaataatttaattcacattttaatttaaattgtattttataatataattttaattttataatattattcgcttatttccttcataaccattctacgattaacaatttaaaaatctttgttaattaattgcattcccttttaattttcgtttgttttttagcttccttactaaataatttttcttaaaaacatggcaattaattgtgctcctctcacccgttttccctatgacataatgatgtttttcataagacatttaataaatcataattaattggactaaagaacaagtttaatttgtgtcaaatcattccatataaatgcattatttgtcgtcattattttattttactttacatttttattcttttaaatgtcgctatttaaataatcatttcaatttaatgtcttttttaatataactttaattgctaattaatttatttttaatgtttcagttaaaatgaacaagatcccttttttatttattgctctttttgttgtgcaaattattgccgcttatgagccaagttgcaaagtttgtgatcaaaaaaataataaattcaataaataacaaattttagtgccccgaaaatgaggagccgggccaaaagagttgcaacggatgtgagccaagttgtgacaatccgaagccggagatttgcactgcgcgcttttgtgactgttcatgcgactgtgtgaagggattgttccgcgacaaaacgaaaaaatgtgtgcccaaatgcccgtattgaggaaggaaattgatactaacgatgtaataatatcaaattatttaatcattcattaggaattatttaaaaattgaaaagaattagaatttgttagttttcaataaatccgttaattatgtgtgtaaaagtcaacacaaagcattcttagtgaatcattaagcaacaattgtaattgattcaaaaatgattcattccctggaccatatgaacgcatttcactatcccaatttatcagtattttgctgaattttttgaggaaatttgctgatttatgctgatttttagaaaaaactcaccaaaaatggccatttctatgtaaaactgttaccgaaaagttttcaaaatttacttaaaatttactaattttttcatataaattagctcaaaatcgcaaaaattgatcatttttggtcaactctaattaacaatggcattaaaatttttctcagcggcgcctgccgatgccgccggccccctgttcccaaaaaaaagtttaggaaacgcgtgccgtaaaaaacatttttttttttgtttttttatttggaataaaattttccaaaatggggattttgaaaattttcatctagcagccctgtttagatattcatttcgaaaatccatcgttttagctatttttcgacaaaatatgatattattttgctagaaaatttccagaatgggcctaaaagggggtgaaaatatttgtgctcatttgtgagtactaatttgttctgtaagttttggagttttaaaattttttaaatttttttggcccttgggaattttgtttaatttttgaaaatgcatctcatttctttgctgtcattttttgtgtaattttaaagaattaatgctttttatttagaatttctatcttcaaaaggaaaaaagttattccagagacttggaaaatttcgatttttcaaaaaattcataacacccttccgaataagtctttgtaaaataaaaatactaaaaaaattggcatctgtgaaaaattgctttaatttatttataaaaagagtgttcactaactacttgatgtccaactacaaataaatatcaaaaataataataatcttctcaattcatcatctaatttcaagcaatgttatttcggttcagcattcattgggtgtgtgagccggccaatccaggcatagaaatcacactttccgagttgggcacattttgaacatggacaccttaagagattaaatggatttgattattcctttcttaattgactttacccttgggaccgttgatgggcactttgccaatgctaataccaaactctgcacatttcgagtcaatttcagtgactttctgaccaaactgtgtactcaatgcctgccattcgctgttgttgctggcatgggaagaagcggaggcggcaatggcgaacatggcacggacgaagccgaggctgagggcacactcatctaaaaggggaaagagatatttaaaaatgatttaaaaataaataaataattattaggcaattgcccattaattggttattaccagcagaatgagtggcaagggatgcttcgatttcggccaaaagagttcgatcaccgccattcgagcagccgatcagttggcctttcaacgcgtccgcaacattttgggcatccgaacaaagcgatgacttggaaatggaattggcaaaagtgccaacgtaattggacataagtgaaaccactttttggctgccgggacagcacggatctgtcggaaaacaacaaattagtaaattaaaataataaattaaaaataatacgcggtgccgaaaagcaacattggcacatcaaacagacaattgcgacgatggcgagcacagagacggacggggaagaagacatttttggagggatttcttcggatttatgaaattaatggtattggttggtttggatgttggaattggatatttttttggagccttaaatacatttttattgtaaaatggaagccaaagtgaaagaaaaattgacgttggcatttgccgacaaaaattttttgtaaaaaagcacatttaattttgaaaggaaggaaattgttgtaatttgcaggtgttttttttcaatgtttgtcggcaaatgccaacatcaatttgccatctttagggagtgccgttttacaataaaaatgtatttaagctcatagt

SEQ ID NO: 2168 - DNA, 2137 bp, Heterodera glycines
agcaacaacaatgaatggcaggcattgagtacacagtttggtcagaaaatcactgaaaatgactcgaaatgtgcagagtttggtattagcattggcaaagtgcccatcaacggtcgcaagggtaaagtcaattaagaaaggaataatcaaatccatttaatctcttaaggtgtccatgttcaaaatgtgcccaactcggaaagtgtgatttctattcctggattggccgcgctcacacacccccaagataaaaaatgcatcactgaaaagatttggtaccttatgattattgtgcattaattagctgtggattttgtaaatttaggtaattatatgtaaataaatattaattcgttggagaaacaagattatttttcagaaatattttcttaaagaataatgtggaaattttgagaattataaaaaaatataattgtaaaatgacgataataaatgagaaaaccaactcggatcttactgctgtaaaattagtttttactctttttaactcaattttccaatgttttttttttaaaaaatgttggccaaaaaccggaagattaaaaatggcatcttttgtgttttgtcggcattatttgaaaacccaaagggaaattgagtgggcattaaaattgttggcacaaaatcaattacaaaaatgcgataaacttttattggaattttccaaattatttttatgtaaaacattaagtttaataaatttttcttctctttgatcaaatatttttacataaacaatagaatttttcatctgttgacaaatccgaatatgaattttaaaactaattaaattttttgagtttttctcaaaattggtgacacataataatataagcaatttattttttattgtgcatcttttttgagttaaacattaaaaaaagctgaaaaaaatcatttccgaagtaaccttatgttgctgatattcaatgttgttagcaaattaaatttttaataatttttcaagcaaatatatttgagaaaaatttaagtttgccaaaaatggacaaaatttatgttaccgtttattcttatttcattgaaatatgtattatgatgtttattcatttgattttttattgtttagctaattgatcatattttatcgtttatttcgatattttgttttttttcttcaaccccagcatttgtaatcgcaatcggcggagcattcgtcgaatgccgaaaggcatttcatgtggcattcggtggcaacaccgtggcacttggacaagcatttcacattttgcgcgttgcatccggtgcagcaactgaaaagcaatttgaataaacaattatatccacttccattagattagcataaatattttcataagatgtaatatatgaaaaaaaaatactctttttcttcagcaaatgatgaaaatgggaccaaaagcagtgccaaaagtgaaagccaacgcagaaacattggccaatatcaattctttgagaaagtctttataaacaaattaataaaaatttgtctttaatcttttttgattgcttattaattttttttagtccgtccaattaaatcgtaattatataaaaaaaattccaaaagtgaagccatattaatttttcacaattttgatcgggaatttataattttctttaagctgagtggttttaaaaattctatctgtgtggcgagcgaaaataaaatgcttattatggaatgtgaaaaggaaaaaaaggagtttgcgaagaatttattaatataattatattttgcctacaaattcttatggagaaaaatgatatcactaaaatattgaattaaacaaattaaaaacaatttaaaatacagaaataaaccgattaaaattattatatatacgaaataacagagagtaacgaaataaaaaggccaacattttgttaagacagctaattttcttcccgatttcaagttcttcggggcgtaatgggacattgcgggccgacatttcgggaatcggattcaagttattttttctcgtggttggtcgaccgcgaaaagtgcaaaaatcaaacacttgataagcacatgatttttcatctaattatttgataatttcattcaaaattaaaagttatcttatatataaagtaaaattaatttttgctattt

SEQ ID NO: 2169 - DNA, 4988 bp, Heterodera glycines
atttgattttttattgtttagctaattgatcatatttccttataatttcgatattttgttttttttcttcaaccccaccatttgtaatcgcaatcggcggagcattcgtcgaatgccgaaaggcatttcatgtggcattcggtggcaacaccgtggcacttggacaagcatttcacattttgcgcgttgcatccggtgcagcaactgaaaagcaatttgaataaacaattatatccacttccattagattagcataaatattttcataagatgtaatatatgaaaaaaaaaactctttttcttcagcaaatgatgaaaatgggaacaaaagcagtgccaaaagggaaagccaaagcagaaacattggccaatatcaattctttgagaaagtctttataaacaaattaataaaaatttgtctttaatcttttttgattgcttattaatttttttagtccgtccaattaaatcgtaattatataaaaaaaatccaaaagtgaagccatattaatttttcacaatttttgatcgggaatttataattttctttaagctgtgtggttttaaaaattctctctgtgtggcgagcgaaaataaaatgctttttatggaatgtgaaaaggaaaaaaaggagtttgcgaagaatttattaatataattatattttgcctacaaattcttatggagaaaaatgatatcactaaaatattgaattaaacaaattaaaaacaatttaaaatacagaaataaaccgattaaaattattatacatacgaaataacagagagtaacgaaataaaaaggccaacattttgttaagacagctaattttcttcccgatttcaagttattcggggcgttgcgggccgacatttcgggaatcggattcaagttattttttctcgtggttggtcgaccgcgaaaagtgcaaaaatcaaacacctgataagcacatgatttttcatctaattatttgataatttcattcaaaattaaaagttatcttatatataaagtaaaattaatttttgctattttgcaaacgaagcaaaagaaaaaaacttattaataataattcaattaaataaaaaattacttttttcaattttcccgatttttagttgtaaaaatattgaaacactttgacgaagaccaataaaaaaaatacaatttaccatgatgttaaattgtgtcatggtgaaacatacaaaggaaaacgtacataggcatgctaggcttaggctatggctgagttttaggctaggcataggataattttactatatataatatatatagtaactttttgaattcaaatataatataatttttgtaatttctttaactttaatctaataattagatgaaaaatcatatgcagaaatcaaggacttggtttttgcacttttcgtcggtcgacatagcaccatttttccttgatgaccattgtgcgtggcgtgcacttggcggccaaaaaacagaaatgcaatttgtgaaacttttatatatatataaaaatttttttctttatttttaacaatttttagcaacaaaatttattaaaagctattcgaaacttttgtaaattaaaaattttccggagtttttattttaaaacttaaaacgctaaaaatattttagattttgacaaaaaaataaacaaaaaaattttcataccttttttatattacggaaatctccatattcatcgtgaatttttattatttttacataatatattttataaaacatttatgcgtgagaaataaaataaggcttatatctcattaaaacattgattatcttagtgtatggcatgcgtttcatcttctagaagagattgccaatatttacaatgacttcaccctactattcataaaaatgcatttttaaatattataaaaccataaatattatataatttaaagttaaaataataataataatcatttttattgttttaaattacctatttttaacgttgtaattacttatttttgatgtgtcttcaaccgcattgcctcatttacactattatcttcttcctccaaatagaaatatcaaatgcatatccaggcgaagaaattgctcatggtaaaagattagtttgtggggactgctggatggaaattctcaatatttcaagctcagcttccagatcaatttaatccttcatgcattttttcgctaaattttctaatttatttattttggtcttgctttttttgatgtcaaataagcgagatatctcaggttaatcctatctgctgaaggattaaatgattttttacttaaaaaagctttttctgtcgggaaattctcgactttcccgcgtcatattcctcggcccctttttcttcatgcctctcaggccattaaagtgccgatcccgtcaactttagtaaaaattaccaatttaggatttcattttatgtacaccatccttcgctttccattttggccttacgatggggcacaacacattttgttggacaacagctatttgcactatttcaaaacaacgtccgaagaatatacagaagggttggctctgaaaattgcaatttacacccatttttacatgctcaagtggaaaacggaacagaacaaagaaatattggagcagaggagaatatccggctcggaaaactcattatacacggaaatcaacaaccatttgaaaacgtaaataatttataattaattacatttttaataattagatgaaaatttttaggtattaaagtgcaaaatatgcttcgaaatgccaaacaaattttaaaaaaattaggaaaaaaatagtaaacaaatgttccatttgtaaatgaaaaagattaaataaagtgaaaaaaaatattagaaacacaaaatttttaattggaattttcaaaaatcccaaaaataggtaccaaaaatcctgaaatagatacgatttttgcaacccaattttttaaacggtaagattagaaatccgagcatttggtattttgtcgactcattaaaacattgctcataatttttttttttagaatttccataggtagtgcgcttaaaagtctcaatattgcgacagtttgtttactgttaagagaaaaatatactcttttgagtacattaaatggtgccgaattcaaacggcaaaatccgccgtgcccatcgtgtgaaacccaagagaaagcgcaacagacagtgaaagatcattttgaggaaatggcagaatggatgctcagcgatctgctcaaatcatttcactcgagaaaaagattaataaaatatttgaaatggtcattaaaattgtgaaacaataaaattattttttaaaaattcaaaaaacaattatttttcagcgaaattgcagcaaaaaataaccaatacgaaattgaaaaggcgtggaaaaagctggtcaatctgttcggatttgcacgtgctctacttctttgtagaacatttcggcaggaatttggcattttgtgtaagcgaaattagtggttcatttaaaattattcgtcaattatttactagggatgtcaattttatgtaaatacatatttttcctggcttctccatgctttgaatagtaggaaaaacactttcttttttgtgtcttcgaacaaaaaccgggacttttatttacatatttcggggttttattcatattttacttacattaaagacttattgttagaaaaattaattgctatatttttgagagattcgtgcgttttaagccattgaacggttagtagttaaccgccccggtgcgtagtttgggcgggaaaatttcccgcacaaacgccagcctattgggcggttttaggctttgaagttgccgccacctgtcaatcaaaaggtggcgggggaggggaggggtcgagagtgagtgatcggtggagagggtgcgcgggagggggtgttgggtttaagcctaaacctattgcgtagtttggggaggagtcccgtaggtgttgatgggtgggtcgggattttttttgaaactgagggggtcaagaggtcaatgaccaggtgtgaaattcacacctggttttggatgaagtggtgatgaatcggtgagggaggagggggacggatgagttaaggtgtgaaattcacaccttttttttgaacggtgacaaaagttggttggggggggcgttcggacagtttaaggtgtgaagttcacaccttgttctgagaaaggagggaaggggcgatgaaatatgttaaaattctcactaatctgacatttgagatcgcgtaattgatgctttatctgttgaaattaaaataaatgattataatttgtgtgaaagttcatcaatatgaatctgtcactcattagatttttttatttttggtggggccagcaaatcggtggcaaaaatgttctttcgggcgcaatcttcgcacatctcaaagttcacagagaagtgctgatgatccacagcgcgcagcacctttcctttattgaagtacagctaaatgcaaagtgtgcgacgaatgccgtcgaaaacaacggctgtatgaaattagtgcgcggaaaaaaattattgcaagctgcggtggcgaccaccactatataaaaatgattgaactacggatgcgcgacttaaaattatataagcgagcttataggcgaattaaatctgtcatcgaccaagtggtggagggtttgtaatgtgtgggggagggtaaaaattttaaaaaatttagggccattccatgtaaagtgcacttcaaagtgccaggaggaattcacctattatttaattaaatgggaatgttgcagtgaggattttgggtggggagttggctgcacatatgcagaaattagtgatatagtaagaaaaaatataataattaaaataatatttaattggtagagtcaaaatgagttgttggcatattgcaatcgccaacgcatgcagggcaatatcgatgcgccgttggctatggatggaattatagccgagttgcggggtgaaaatttg

SEQ ID NO: 2170 - DNA, 11807 bp, Heterodera glycines
  unsure (1)..(11807): unsure at all n locations
gggctggcccacctgttcgtttattttcgattgtaaccattccactgcccgcttgtcaagacgcgccatattcacatttccactgccaagttccaccgccacgtcggatggggcataaattctggctgagtctgcagcggaatcccgatgccgcgaagaggagcgagacctcaaaaaaggatatttggacagtcattagaagggatattccagaatagaaatgaaatgcttcattgtacataccgatctcttcgcctatctttatgagacgaacgcgacgccttttgacgcttttcgctgcttcgctcacgcgaacgtttccggttggagcgatgcgaacggtcgcggttagtattaggagttgtagaacgagaatggggcattgcgctaaacaaaattaattttaaggcaggtggagcaaaaaaagtgtaaattacaaattgacaaattaaatttttcgttaaaaaattcctattccagacggatttccgttaaaattgacaggatcgggaatcctttttccgttcgctttttctttattcccgtttccgtaaattttttaccgggctctattttaataaaaataaattggcattttgtttcatataattctgttggtggttgagctgacactaatgattggatcagcccatttaagttctcaattcgtttcacttcattcactttagcattcacattcgtccttttcaaaatcttcttctctcagtattcttattattaaattttttttgtactgtcggtggtaggctccttttgaattttttttttttgttttcaaaagacatcctagggttttcggggtcgttcgaaaatttgaattttcgaacttttgttcgaattcaggtccggggttcgaaattggtcgaaatagatgccagattcgtgacagcggccccgaaaaccctaggaagcttaacaaaaaaaatttaaaaaaaaggggggggggtaccatcgacagtattaccgaaatgcctattgtaagtttatcaatctttatttggcctcatttgatcagaggcccaggcatacaaaaaaaaatccgatacaaaagtggcatttaatcatagtaatattctagttatattcagatatatgccaccggaaattgtacgtcggcaacccgaagtaaaaaactaatttcaagaaaatctcaaaatttcaaaaaaatttccagggctacggccaatgcgcggattggtggagcttcggtgtcattgcgtttgaactgctcaccggctgttccccgtttacggttgacggcaaccagaactcaacggaggacattgcacgacgcattttgaccaaaaaagtgccatacccaaaatggatggaccgaacggcgcgcgacttcatcggccaactgttgaacagggacccgaagttgaggtgtgatcaccgattaagtctgatctgtcattgatcaagaatgatcaaccactgatcaacaaatgattactcattgatcaaagcatgatcagtcactgataaataaggatcagccacagaccaataatgatcagccattgataaataatgaacactcactgttcaagtataatcagtcactgattactgaagtttgagacatttatggttcggatatttgtcccggtcaatttcctcaaaatttaaaacataattaaatgcaaatggggctcaaatgccaagggctggtttgatctgaaagaatattgaaaaaatgatcagaaatgttttttacaaccttagttatacattgaattgaagagtattaatgttttttttaaattcatttatttatcctaaatttcattataattttttatatacttccatattttaatcaaatgtaaaaaattcatattccccacagacttggcgcccggggcgctgccgaagtgaagaagcatcacttttttgacggcaccgattgggaggcggtggaacggcgtcagacaaccgggcccatcaagccgagcatggccggctgtgttgcggacgtggaaaactttgccacaggcaataaaaattattttttgaaattttcaaagaaaattttacagaatttactgcccaagcaccgctgttctcgcctgcggataaaccaccaccggaatgccacacattcttcagcggctactcctttgtgtcgccgtcagtgatttttgccagcgacaatgtgatcgggcaggagtgcctggagtcaaggtggcctccggggaattttttttaaatttttgatttgatttacatttcaaaaaattttcttaaaaattaatttcattttttaaattcaaaaattttaacttttaaattcttacatatcggcccgattaggagaattaaatttttgaattgattgtttaaaatttaaaaaaaaatttaaaaattttcttgtcagggattattccatttttatagtaaaattaattctttttttcaatacattataagccctaaatgtttgggaaatttttttaaatgaaaattggaaatagaaggaatttttcgacaggctttgaaaattaaaaaatgatttttttttttttttacaaaaaaattcacccattaaaaatttattcaattttttaaattcaaaaattaaaaattctaacatctcggcggaacaattcatgttattttaagaaataccgtaaccgaatgagttttataaccgtcactaccgggtgctttttttaccataataaatttcttaccgtaccattaaaatactaaaaatatttaaaattttgtcacagtgttcgcctcctgtccgcccagtcgtccccattttttgccaattatcggctggacatcacggcacagggactgctcggcaaaggctcattttcaatttgtcgcaaatgcgaacgcatcgcggacggacgacaatttgctgtcaaaattgtgtcgcaacgtttcgcgcaccaagcacgacgagaggtgattaaataaaaaagcaaaaggagataaaatttgaatttattattattattttttaaatagcaaattttaattaattttttaaccctcttgtaaaagaaggttttaaaaatttttgttccactttttattgattattcatttttttaacttaatttattgatcactcatatcacttttaaaagtgatcagtagtccgcaaaattttgcatgtgtacgaaaaaaagtgataattgtttatcccaaattaatttaaaaaatcataaaaaaaaaaaaattaaaaaaaaaatgcaatatgcaaaaaggaaaagctacatttagcgatttttgaattatccgattcgttaaaatttttattttttgtgtattttagaaaaaaaaaatgtttaatggataaaaacccaataatttaagcgcataaatccaacgggcaaatacaagattatgtatgtaaaatccattctcaaaggatatctccaatacaaatttggtgtgatgggagccaaaatttataggaattacattggcaaatactcttgcccattttgtgccaggtccgcgtgctggaggcgttgcaaccgcactcgcacattgtgccgttggtagacgccatgtcggacgcctttcaccattacattgtgcttgaactgcttgacggcggtgaactgttgcaacggttgcgacgcatggaaaagttcacggaattgcaagcggccgaaatcatggcacaacttgttgctgctgtcaagcacatgcacgaccgagacattgtgcacaggtagaaggaagaagcattgaaaatttaatcaatcagaactggtcaatttttttaaatcttttttttgatgggattaggaaaccccgtcaaaaagtataatttaaaaaatatataanatatttactattcattattgtcctaatataataattaaatataagtctgattagagtaaaatcacatcagcattttgatcattttccgatcatggtcaatagtttggaatctttcttttatatagattttagcggaattggaaatcggagttccaatgccttaaaaaaaatatcgggaatttttttgaaattttaatcaattttcttaacaaattgcattaaaattctcaaaaattttcccggcggcgcctaccggcaccgccggaccaccattttaccatatttttgaaaaatggagaccaaaatggcaaaaaatagtaattttttggcaaaaaaaaacggctaaaaattttgtaaaatacacccccccccctaatttgggatttcaaaaaacgaaaaatacacccctaaaaatcgactgaaaaaagaaaaatacacccctaaaaaaccaaatttttgactttagccccccccccccctctgaagccaagggtctggctacgccttttggttggataagactgatcagggagctctatcatttcagcagctcaaattttgctgtgttaatttctaaaagttagaatttataattaaacattaagctcatcagcattaagctatcctgttttaaataataaatatatttgataacattttcagggacctgaaaccggaaaacattctgtttgaacgtgatgggcccgacgacgcaaagccaagacttcgccttgtggacttcggttttgctcgcattttgccacggcctgccgccatcggctcaacaatgggctcccaatcgctgatcaccccgttgtgcggcacgcttcactacgcggcacccgaagtgttggacattgaagacgaattaccccaatacaacgaggtgggcgggtgcgaaaagtgatttgatcaaatgaaaagataaactttgaacaacaacttgatcaaaatgagtgaaaaattaatcaagggtttgatcaaaatgagcgaaaatagattagcgacttgatcaaattaagcgacaaaatcgatcaatggcttgatcaaaacaaacgctaaattggttaatgatttgatcaaaatgagcgtcaaattgaacagaacttggccatcattaaatcttttttactcgtaaatggatgatttttaaaaaatttaggtatttatttttcatttttaaatattataaaataaattaaatttttactcaaagccaaactatggcgattaaattttatttgtatgttgggattttttggatttttgtcagaaaatttttttataattttcttcattaccaaatgtttagcaatgcgacctgtggagccttggcgttgttttgttcacaatgctttctggcaaagtgccgttccatgcgaaaagccaagccgagtcagcggcggaaattattgcgcgcatccgtgccgcggatttctcattttcggaccccgtctggtcaatggtttcacaatcggccaaggatttgagtgagatttttggccaattatttaagtgttttattttggttggaatataaacaacattttgttggaaaagaaaagttacttagagaaataaaaatcacacccacacaacggtctcgtggtgtagttggttatcacgtcagtctaacacactgaaggtcgccggttcgaacccggccgagatcatttcttttttcaatttttttgttttttgtttggaaaagcggaaatgcaatttataattatttttttaaaaaacttattttgttatttgagcttaataaaaaaaagaataggtattagcatatgatatttttttctcctaacgaaatacaaaatttattaaataaaaaattttttaatattttttgttatttcttacaaaagaaattttaagtttttgagtcgtaaactatttttttaaaattacagtttgaaccaacaaaagctttaagcctaatgggaagaataggtggtggtacctcgttctcaaaataaaatacacaatattttttccggcgataaggaaaaaattagagtcgagcaataccggtctcgtggtgtagttggttatcacgtcagtctaacacactgaaggtcgccggttcgaacccggccgagatcatttcttttttaattttattttaatacgctaatttttatttcctaataaaaaaagccaatttaaatttgccactttttttacagtcaccggactgctaacagtggaccccacgcggcgcttgtcgttggcccaactcggtgcccatccctggctacaatcggtctcaacaaccaccgatgacggcactgtgccggacggcggtgccggtggtggcggtggcaccgaattgccaacaccgaccattttgccgtccagcgctgacgccacatttaatgccactctgtccgcctttttgcatgccaatcgggacggctttcaactaatggatgtgcagaccgcaccgctgctggtcaaacggcgtggcatgaagcggcaacgcggtccggacacaacagcaacaacagcatcgggaagcggaggaaccgcggcaggtggcgtggcattaataaggaaaaaaagctgcgggtgggaagacggaattttctcgaaaaatttcttttttaggcgtatttagaaaagttaattttttaaaaattatatagaaaaataattctctgctcggggtaacctgaaatttttaaaaaaattacataattctttttcaaaaaaaaaattttttttttgttctcaagaaaattcaaaaaaaaatttattaaattttttatcaattacaaggtttttcctgaattctcttattttttaaaaaatcattaatttttttctttttttgattttttcttttacttttcctaagaaaaaatgtattgtattgttaaagaatcaaaaaataaatttaaaaaatttacaaatttggcaaaaattgactcaaaaaaagaggaaaacagttcatctcatcaatgcatataatgtttaggtgccaacgacggcggtggcattggtgccgagagaatggagcagtgcgcggcgaacaacaccaacaacaacagcatgacaacggcgacgacactttgcactgtgtcagaatgtccagaactgacaatgaatatgaacagcagcggcggtgatcagcaccaccagcaacaaaaatttaaacgacgtccaacaacgctgaatttgttcggcaccatcggggaggtggagcagcaacagcaacaacatgaacaccaacaaccgcagggcacgccaaactcggcggcatttaccgagtatcgggtaaataattaatgggcgggcgaataatcagatttttatttaaatttatatttaatcgcattaaaattagttttttttggagggctaggttgtttcgtgaaaagtgccaattttacagattttagcgagaaaacttgtcaaattattcgtataataaatacgataccttttggatgctttcttagcatgaaaaatttaaaaaaacaaattaattacattttcaaaaaaattatgactaaaaatgctcaaaaaatgacatattatttcctcgattttttaaccagattttcagcaaaaaaaaaactagttttggtgaattttcggaaaaatttcgtgaatttctgaatttttttggggaattttagtggtagaccttggaggagatagtaccaagaagaaaaccgaaaaatttttagcaaaaaaattttttcctttaaaatattattttttttttaatttataattgtttaatcgtatttaaatattaactttttgtataggacaccaagccgccctatttgaagtacagtcgtgacgattttacgcgtgccgaatgtggcggaagtggcgccactgttgaacagcagcagcacattggcggcggcacacccggcatggccaatgatcagtcaagcgggtgctcatcactgtctggtgcatcgacaatccgactgtccaacgattcgaatgagtcccaatgatcagcagctgatcagtgatcatgatggactgtttatttttaagtgatcagaaaaatttcctttgggccaaaggggctttgatttgacattcactgatcagaaaaatatttgttggcgtaatgaagaaaatactaatttgtttttctatttaaatatatttgttaaatttttattttttaatatattgacaaaaattgcatcccattttttttttgttttcttcacaaatataatcaaattaatgtaatgatcgcaaatttggcattttctgggtctcattttatgcaatattgcctagaaatctggcaaaaaatctgaagaaatcaacgattaaattggaaaaatataattgggacttggatccaagaaagtgccaaagtcgaaatcatcattacaaatcatgcaagtctccatttacatgccccgtgaaaagaaaaatgcagtatttgtttgtttgcttgttcattttgttcatttgagattcgaaatttatcattattagacacatttaaacaatgccaaacccaattaacaaaatgatgtgatgatgccttatcaattaattacccacccattattaattagttgacgctccattgttttttgccatccaaaacgaacaattttattttttgtaatggattgattgtttgatattatgtgctaaacgagaataaagtgagaaaagcgatttctgttgattgttttttttataacaaatgatatcatagtgaaatagcgaataaattaatttttatttaattaatttgcatttgtttaaacgatttctcgacaattttggcactgaattttcgtccattttaaaatgccaatctcgcagttgttgtgtgtcttggtctcacaaattgattttcatctcctgcactgagtaataatggtgtgccggcgccgtttggtgctggtggtaaaaggttccgtccgccgatgggggtaaaagaggcgccgggggcaaaggtcgtcgcctaattaggcaagtaattaattaattaattaatgagacaactgacaaagaaattttattaccgtttaatccaaagggaaattaaaatccatcctttttcttttgccatcatatttttttaaaaaaacttagtaatccatcataaaattttttagtaatcgttaggaaatttaaaaaatttttcatgaaatttaaaaaaattctatgatttttgaaaaatattaccaaattttggcaatgcttttctgtgagttgtgtgaggaggaaggcgttggaggcgaaggaaaaaataaatatcctaaccgggtctaccgaaaaaaagtcggggcggcaaagaagctttgaattcgggccagaaaatgccgaaaaagtcaagagaaagtttggcaaaaaaaaatcaggatgaatttcgggtcagaaaaatattagaccagatgggattgagccaaaaacggcttgaaacccgcacgaatcatcacccgactgactcggcatgcgcagaagcggcacggatgttgccagccgccagtgccaatcgcttctccgcctcaaagcgacgccggtgttggcacagcaaaacgccaaccgttgtgccgacggcgaaaaacagtgcgccaaagatcagtgccaaggcgagcaaaagttggccaaatgtcgttggacgcggcgccgccgttgggcccaattttgttgggcgattagcgcccaaaaattcggcgccgccctttgcccaagacgaagaagccacaaacaaattctgtttttgggaagaaaaaagaatgtgcgccaaattttaaatttacaaatttaaataacaaaaatgtgaaaaaatagttaaattaatactaagaataggcaaattataaaatttaattatgtatgggaatttatttaatatatgcaaaaaaatttataataaactaataaattaggaatatatgcccaagacgaagaagccacaaacaaattctgtttttgggaagaaaaagtgcgttaatttgaaatttaaataattatttacaataaaataaataatggataaaagcgggtttttaaattttttaaaaatttcttttaaaatttaaatgagataacctcccaactctcgaatgcttttcctgctttgtaaagtactgcttccccttgcccacctgttcaaacccgtcgatgccctccaccgtgtccgcgtcgcgcagcgtgcgctccaccgcctcatacggcaccacgtgcgtgccgttcacgaaacacacttgcatcactacctttgcggcttgcgatggtgacgcgtcgcttggtccggatgcagtcgcggtgccggcggggtaatggcgcaacgcgtgcagaaccgggcgtgcgggacgcgtgcgcaaggaaatcgcactaattttttaaattaataaataattaatattaatttaatttagttttaataattttttaaaaatccattttttggcaccttaggaatgtggacagtgtggcggcgttcatttccgcggcatttcgcgcgaccagcaccgacacaatgtccgactcgtcgcacacccacacccaaaattaattaaaatttataaatggatagttttatttttgtcatttttaattattttatttattcatctcttaattttttcaataaataattaataaaatcattgttgaattaaaagcaataaaataatatttaaacttttgatttcgatcgtttgttgttttttaaactaatttaatttataattatttgcaattattttaattttaaaattttataaaaagagagtatttcgcgagagagtgccaaaaacataaaaaatgtcattattggcattacatttgctgtggcattgtgtcccgctgctttgccatccaatgcgaaaaatgtcaagcgaaagagcgcccccggcgttcggtccaccggcgtgcgcaaccaaatgctaccgtagttgtcggttaccgtagtgtcgagtttgaatgcgagttcgggcgggttaacatgtctcacttcccgcgcataatgaaagtcgcaggagagcaaatgcagggatgggaagcctgacaaaacacaaataccataggtgaatatggtaatcgttgggacaaaagtgggagtggccaacgtttattgtcaatttcatcgctgcttattttctacagaatataattaggaaagttgacgaaaatgggcgtggccaacacttattggtcaatttcatacactggtaaaaatcgggtgacctatgccacagcgtgtgtctaccgtatatcaaaagaaaggggcgtggccggccaacgccgccgcctattggtcattcggttgacttacactcatcgccgttgttttcgtcgcaggcgtccgcgtcccgaacattcacacgcccaactaccgtacccacgggtgcagttcgctccactacaaattcatagttggactgatcaaaaacgggcgcattgtcattgctgtagggggggggggaattattttaatttaatttttaatttttttgaattttaaagttacaatttttaatttaaaataaattttgatttttaatttaaattaattgattgaatttttatttaatttttattcacatgtcatggatcctcagctgtacgtccaacacagcagcactttggtgttggtccatcgtatcgccgtccctttgagctttgattgaaaaattcaaaattgccaaatcgttggccaaatgtttgttgtccattggcaatgcttcgaagtccggcgaatgcaataaacgcaacttaattcacatctttttaagtggttaaaataatatttgagctaaaaagattcctattgagagaattaatttaaaatacaaaattaaatccgaaatagggattaattaatcaattaattaaaaattttgactaaagcgagtaaataaattcaattttttacattttatttattcagaaaaatattgcgagatttaaatttatcatatttttttcgtaaaaatttttgaggcacttaaatt

SEQ ID NO: 2171 - DNA, 2850 bp, Heterodera glycines
  unsure (1)..(2850): unsure at all n locations
tagtaagacgtgaggatccatgccagagcgggatgggaggagacggattgtcccaggactgaagggtcttaatcttaggaatcgggccctgatccccaagaagtccaaagggtccaatcgttcgtatggctcttttattatgtcggattaaatgcgcgaataaataaatgattaataaataattaatttgtctttgatcgctccgacgtccgactctcatctccttcgactcgactgactgattggtgggggaaacaattgaacggaaaaggggcggggatttgcggggatttgtgagagttagagaaaagagaaatagtgaataaaatggtgaacggggggaatgtggaaaagatgaataacatcgattggccaaaaagggaaatgtgtgaagggttcgtcttcgctcatgggtgataattagaatatgttacacctcccttcccaatgaaaatggccccccatttttaattcacaaccaaagcttggatggctgttgctcttttctgtcccttttattttatttttgtttttttttattgtttttttttttaaatttttttgatgacattttctttttttttatcatccttccctcttaattattgtccatttgttgtccctctgctctttttttttgttgcttcctctttttgttgtccgctgtttcaaatgttgtaattgacggaagagttgctctgttgtcagagttctcttttcgaagctaacttggtgttgctcaaattgtccaaatgtccatcaattgagccgacttttctgaatgacggtccttctgtcgtttctgtctttctcttctgttgtcctttctctctctcttggcgggctgttgaccacaaatggcgatgctgttgatgtttcccgtcgtttgctgtgctgttccgcggtttgtactgctcgaagttgaagaaattgtcgtttggacttacgtgaggggaaaattttttttgttttttttatgggcagtgtccaagagcattggttatggattaaaaataaataaattttgcccgggtaaagaggtgtaagataagttaaaattaaaaaatagagcaaagacgaaatgaaagaaaatgtgaaaatttaaatgaagaaaagtgagggaaagaaagggagaaaatggcagggagttcagtcgtttcgtttcgtctgcctcttccatcatttgtgcgattggtccattgattcgagtggtctgctgttgaacggttcatgtttcgtgatgcgccggggcggtcaggacagtcgcgaaggaagtgaccagggcgcaggcagtaatggcacagaccagcgggcatgttcggatgagctgaaccaggttgacgtgctgactgctgctgcctcgaagtgccagcgaataacatgcgcggaggtctaattgacctaggcagaaagggaccatcagagccttgccaatcatcgtaaaagtcgaatgctttcactgatccgttgggggtggcaattacgccatccacaaattgtggatgcggatccatcatcgcatggatgtactccggagtcacagcaatggccttgtccagagctctgcgcaggaatcgccgccaaatgccgccagctgaccacaacagcttcaaatcgccgacaaccatcatgccgaacttgctgcggctgagggccacgttaacacgccgttcatcgttccaaaaggcgccgctgttgtcattcgagctcaggccgctttttgttgtgacaacgaagacgaattcggcctcgtgcccctggcaaccatcaactgttgttaccattacgttcggcatgttgagcgcagacacttcggttccaatttccttcgcttggccagcgtaaaagcagacaacgcgaatcaatccgttgaaacatggccgtaggaaagtcaagcacttcatgacagtccgggtttgcattggattcgttgccgaaaatgaggtcgggtcctcttgcattcgatcaatttgatggacaaaaatgatgggacactgcggcactggaagtgaaatgggagtttttgatgttaattggtccatctgtttgatggttcgtccagtggtcagaatttcgttgtgcgcggcatatactccggcagaaatgcattccgtgatgaatgggtgtgatcgaaagttgacagtcaaagtcgtccgatcaacgcccgccgctgcgtcaagatttaaaatggcggtgtccaatccatagccattttgtacagcttccggcacatctttcaaattcacactcagctgccaacggtcacctgctaccaacaatttgttcaaattgggaaaattggtgagcatggataacagttggacataagaggcttgcccactctcgtccacaatgatcatgtcggtgtcgtcaaagagtgtgccaatctgttcagcaagtaaagagtgcagaagatgatccgtcgcttttccttgctcaaaaggatttgtgcagcttttccctcgttcgctgtcttggcgacgtctcacaggccttgatgtagcggagcactgtgcgtttctgatcatccttcagctattcaaacaaatgaggcgcgcgcaaagcggctgccaacaaatgaggaccaattttcttgagctccagcatgtacttctttttgccggatcctgaaaataaggccaacatgtcctcccgccatcccactcgttccatcgttttggccatctcttcgactgctttcacaacggcaacgttcaacggggccacaaagagcacatgcgcgtcgggattggtgcgcagatgggcggcgattatgtcaacagacacttttgttttgcctgtgcncgggtggtgcctgcatgaacacgatgcgtgggactgaatcaagca

SEQ ID NO: 2172 - DNA, 5871 bp, Heterodera glycines
  unsure (1)..(5871): unsure at all n locations
agcatggataagagttggacgtatgaagcttgcccactctcgtccacgatgatcatgtcggtttcatcaaagattgtgccaatctgttcagccaaggaaagtgtgcagaagatgatccgtcgcttttccttgctcaaaaggatttgcgcagcttttccctcgttcgcagttcttggcgacgtctcacaggctttgatgtagcggagcactgtgcgtttctgatcatccttcagctcttcaaacaattggggtgcgcgcaacgctgcagccaacaaatgagggccaattttgttcagctccagcatgtatttctttttgccggatcctgaaaataaggccaacatgtcctctcgccatcccattcgttccatcgttttggccatctcttcgactgctttcacaacggcaacgttcagcggggccacaaaaagcacatgtgcgtccggattggtgcgcagatgggcggcgattatgtcaacagacacttttgttttgcctgtgccgggtggtgcctgcatgaacacgacgcgggggactgaatcaagcattagcctagccgtctctcgctgtcctccaatcaaatcatttaatgctggttgtttagctacgaatagctcatcccatgaattttgtggaggtgttcattccccttggcgtgccattagaatggacataattgtgccgagtcccgtcgttgtgtttttcgccatttcagtgaataaattaactgaaaatttttcggccctttgcattaggattttcctagaatgcaaaggctcaatttcggtcaattccccgtccattattcggtcccatgcctcctcacaatcgtagttcttggcttcttggtacgctaggaagagtttggcgacaatgctgagtcccgtttccgattcctgtcgttcaacattcatgatgaagccggtggcacatggtttggcccctttggctgccacacgcacatggattggctggtcttcagtccacattttcgacatgtcgaccatttcctgcttgttgtctaagcgatgtcgaatggtgattatggcagtgtcggcttccgctccatattccacttgaggttcggcagtgatggtaaaccgcaggatgtcctcctccagcttgtccaaacatgctgtgactgccgcggcaattgcttgttcgccttgcgcaatggtggcatccaaatcccctcttctgaatggaaatttgtgcaaaattggggattgatcaatgccaacagccacaaaaggatggtaggctttccgatcattcacttggccaaacgggcaattgagcggcagtgcataaatttgattgactttccacaaattaggtctcattaattcaaccgtttcgacaagcacagcttgcccggttctaaaccaatccttctcaccaagagcccagcctggtaagctttgtgcaactttcatgccgggtgccacaaccgttaggctttggatgacgttcgttttgcgcattccacggcgtttgacattaagcacaatcccgattttgggaacgatgttcgtcggattggcgatgttggctttgattgccgttgcttggatgttgatgtttccggcattgagccatggaggagaagtgccgtcctggtcgaaatgccgcaggacttcgtagccacttttccaggcgaagttgacaatgtcgacttcgtcgcccaatcggagacggcgatcactccctgtcggagttccgttggaaatgccgaaaaaccaagggcaattcttggtgaatcgcttcagcattgcgacagccatggatgattgcacttggacaatggcacatcgaagatgagaagtcccaaatccggcggtgtcgttgctttcgtcgatgttgtccaatgcctgatgcatttcatcatctaaaataaacccaaaacccgccttttgagctttctctggcatttccgtgccactcatttcattaaccacattcaggatttctgccacgaatggcattccctcatttttctctccttcttctgtctccatgagatcatttgtcccggcacttttttcacttccttcaccacttttctcaggattattcgtcacgaatgacgctccttccaattcaagcattttggcccccagcgtggccattgggtccacgcttgtctccaaaatcattgcctcaagggcactcactcggccggcgctgacggctagggggtctgtgcgcgggagtttctctcccgtccctcgggcccaattcactcaaattgccgaatttgctgctgccgtcgggtccgtgcccaagggagtgaactggggagggggtggggaggacaaacaagatggggttggctgttgttgctgtaacggcaccaccgactttttgaagagctgccggcgctcccggttgaggttcgggagaagagttggacttccggccgcgaactgcgtcaaccgccgggaactggctcccgtccttgtttgctgctgctctgcgggggattgtcccccgcttcgattctcggggctttggctccccttcggtcacttcgttcccgagcgatgattatatgcgagatgttgatggattatatggtgaaaattggaggaagggaagggcgataaggattattgaggggggtcaaaaattgggaatgattcttaaggactacagaagagcaagaagtgaatgtgtgtggaaaattagacgataaacaatacttaagtaccaaaccatttcccccgggggggggcaaagattaagatgcaaaaaggcggcgccgaagggtacaaaaatcggcggggagaaaaaatgccaaacaaagggaaaaatgagatgaatgaatggccaaatggaaaaatgtgatctgagaaagtgtgaacaaagagacaaaaaattcggaggcagatgtgaatggcagaaaaattgaaaagaaaaggcaaatggtggagttgaagaaaacattatgtaaatgagaaaaaatgaagagaaatggaaagtttaaataaagagagaaataaagaggggtgaaaatgtcgacaaataaaaaagggatcgttccctcctcgcgcactctcgtcggcaacaaaattgccgacagaaacaattaattaattggagacggcaaattaatggagactggcattaaaaagagaaactatggtaaatagttgtttgatgtctaaatttaaaatgaaaacctaaatttgcgacataaaatatggtaacgttaatgcacaagactttttctagaagcatccaaattaagcatgcttagtacatatcattcaataggcccaataatcctctattagtctgcaaaattaaaaaaaaaattagttttttgaagttttcaggccatgactttgttgaaacataatattttttgaatttttcaggattttaagcgcgagtccgtgttctccgctctgctcgagatggtgccgtccagcatcaacaagcagttgatcaccaccgacacgctgcgcgacgtttacattcgcattctggtaaacgtcacggtggtgaaggtgagcgcgagttgagtggcaattggtgtgccatggcatggcgactagggcatgggcccttacgaattttgggcatggctgacgatgcctcaccaactttgagaaaattttcatgaaatattttgtcagcggttcgggaggggaaatattcggaatggatgaaatacccttctcccacccttttcgtgtgcttcatccaacttcccccgtcctcccccctcccgaaaaatagtaaagaaaattcaaacaatttttttttgtcagcggatcgggggggggggaagatgcggaatagatgaaatgccacttttgccaccggtttcactggcgtaactgttactgtagtggtttttctagcttaagctgagggtgttgagaaattggatggatcatttagacgaatttaaaaaatttcatgattggaaaatatgtatatccgaaaatgtttagtgtctgtaagtgatataaaaaaaggaatatgattcgcggagacaatcaacctattcttgagtccttggaaaccatgaatatttttgaaataaatttttattcaatagtgggaaaaaactttctttttttgtttgcgtataaaaatcgcgacttttgtttgcatattttggggcatattttgcaaattttgggtttttctgcaattttcatgcatattttgacatttttcgaaaatttgcttaatcgtattgtgtgaacgatgaaacgaaagggaaaaaatagcacaagggaatgagaaagaaaggaatttgtatgaccattccgccattccctgctcattcggctatttaacatgcacagaaaaaaacattattcactaacaaagttggtgggcagaaggtgagacagatatcgattgattgaccaaaagagcaattgggcacagaagaagcagtagcaagtacatacgcatacgtgtgtatgtattttgaacattgttttggtgtttttggaaataaagggctccaaattcccaggcctatgtaaccaattgctgctccacaacgacagcactcagctcagtgggggatggcggtgccacggtcgaatttgccacttaaatggataaaataagttaaatgtaaataggtgcaaatcaataaaaaaaagtcttcaccttgcttggtggaagtgaagagaccacggcaccaatgtccaacagaacgtgcccaatcgataaaccatcaccggacgacttgcaccacatttttatgatcgccgtgtgcagctggatcttcagtgtagggaagttctgcagtttcctctcaaaaaatattaaaataaaaatttgtttgaatgttttaaaaaacaatataaaattgtgaaaaatcgctaaaaaaatttccttgaaacttttcttcatctaacaataaattgtaaaccgttggttgttttgagtacataaaaaagttttaaccttcaccagtgcacgaacagaagcgaagaccaaaacggcggcaccaattcccaaacgaacgaggaattttaatatgggggaagagggtccgacggtgccgatatgcgccacctatatcaaaatagtttatattttataccaatttattgcactttgggtcaaattgttaattatatgtttcgggaaaaatttgtagatttattgctacttaatagttgtcaaaaattaaccaaatttaatgcttttaagcatcgcttcctgtgaataataccgccgacaaacaaacccattgagcccatttacattgaaggtgccaacacttatctttgaaatcggtgaaaaataaatcatttcatgaccaaatcgaaatttataagaccctaatgctgtctgtacacgtgcacgaacccggacacattactcagaattgcgaccagcgttgatcccggacgagtgaatgggaagaaatgttgatcaacagatgagagagaatggacgaaatttatttggtaaatgatacataatcgaactgtttacaattgtgcctaaaatatttttttcttccaatttttggtgtaaacgtcaatcgtttagcctgagcaaatttttttccaagggatattcaaatcggaaaatatttgatgaaaaatgtcaaaatatgcatgaaaattgcagaaaaacccaaaatttgcaaaatatgccccaaaatatgcaaacaaaagtcgcgatttttatacgcaaacaaaaaaagaaagttttttcccactattgaataaaatttatttcaaaaatattcatgggttccnagggactcagaaataggtgattgtctccgcgaatcatattcccttttttatatcacttacagacactanacattttcggatatacatattttccnatcatgaaatttttttaattcgtctaaatgat

SEQ ID NO: 2173 - DNA, 5455 bp, Heterodera glycines
  unsure (1)..(5455): unsure at all n locations
ttgctgatcactccagcacatttgatatccgctgactcattatttaagtctttttgttccactaacaaaggaaggtccccaggtgtccgtgggatttccgaatgaaatttggtgggtgcatagagcacccacaggttcttaagaaaagtgattttattttttgcggaatgaactcgagtgccgagttatgacgtgccaaagttttttagtgaataaataaattaaaatttatttgcgccttcatcaggtctctaatggcgcagcggtagtgagctagtcctcgttttttaagcccacaggttcggatccctgacatgcaaactcattttttaattttatttttgcctttttatgcaaaagtaaataatcaaatatgtttttttatgaactaaatttttttaccattttaacatataagatattcaataaaaatttaacagaaaggtgtgtatcttttaaattaaattattacgtctttatctttaatgatttttttgggtgttaatgaaataaaattaaaataactatttcataaaaaatatttttaataatagactgcaccagaaaagcaaaaataaaaattgtaaaatgtattagcatgcagaggattcgaatctgagacacaaaataaatttgactaacgcactacctctacaccaatagatgcttgttgcgtagcgaagtaattatttcttttctttaattagaaaacaccaaaaactttggcacgtcataactcggcactcgagttcattccgcaaaaaataaaatcacttttcttaagaacctgtgggtgctctatccacccaccaaatttcattcggaaatcccacggacacctggggaccttcctttgtaagtaattttgcctgagaaaatttcgcgattgcgtattttgtgggcgttgcggatttgcattgttcggttcgggtttataagcgggactttggcttgggtacaaggacaacggggttttatttgaacccgtcacattatgattttgttgcgaattatgattctgattgccttcttccgcctgacgccggaaacaatttcgcgcaatatgaccctctttttcacagtaaaaacattttggacggtttccagtggaatgttgaaaattggttttcggttcaggaccttgccgtgttagagttgctccaaagttcgtttttccataagcattatttgatgcaatgcgacgcgttgctttctgcgttgcctcggcgcgcgcagccatccccacaaattgatcgaatgtcattcccggccttctgcccatttccaaacttaaagctaactcagagctttcaaaggtcctgatcaaatgctttattgcatagtcatcaacgagatggtcagttaatccggggtaggcacgtctgactaaagtaattacgcgatcagccaaatcatccaaatcttctccattttttcgccgaatgcctgacatcaactgatcaaatgcattccattcgcgtgcatcggtctcctctaattgccgcaacatttcacgtttgattaactcatagcggaaaggtactgtcgaacatgccgacctaaaggccctctcggctcgtccaaaaactttggactcgagcgaacttatccttttcgcatttgtccattcgccagtattcgaatcaaaacgcttgaaaaattcacggaacttttccgcaccttcattgccttttagagcggggatttgactcattatgagtgcgtatgctacttggtccattcccggttctcttccccgttcaatgacattctcaattggacgattttcgaaattttggcgagccaaattttgagcggcattaatttgttgctgttgtggttgcgaaattggctgaacaacttgcggaatgtgtgcttggtttatcatgccaaattggtggttcccttggggcaaatacggctgttggaattgcgggttataagcattttgcatttgtggtggattttgcgcatttgtgctcataaaaccaatcatttgttggtttggaagctgcatgggtaatggtgctagctggtaaaatggatttattgccgggtaattcaaaaagggccctggaactgcttgctgaaccggcgggaaaaatgctattggttgctgaacgacttgtggttgcggcattgcggttttaggaataccatgctgttggtttttgtcacccatattttgtctgtttggcaaattttggtgtacagactgatgcacgttttgaatgagtaattccggaaatattgggccacttataggcgtggatgttcgaggcaacaagttttggttgagattgcgatgaccatcatttctattttcgtctccaaccaaccaattttctcttccgtcgtttgttcccacatttcggaatctcattcgcaaacctccgcgttgttcttcgtttccattgttttccgctccgttctcttgtccttcattttgtctgttcggttgagccaactcaagaagagcatttcgaatttgtgccgagtccatatttccgttcgtccttaaaatttctccatcaacaacagaattttcaagaacattttcggtgttagcggtgttatgcggtctttgtgtgttttggtgttcgttttgttgctgctgctggatatttcgtgcacgttggcgagtcaatggaggtgagcgtggaatgaacatcactttttcccaagcacgagagaaatttaacttgtttcaaacaacacgagtttattgtatgcctttaaatctaggctcagtacaacacgagtacttttaaacaattgtcgagcagaagttgtacagtcccacacgaggacaaaatcaaatcaacaaaatgcgccaacacgagggcttttttcaaatttcttcaaccgtcggttttcaagcaattttatgaccgcgtttatccccgtttaatgaaaatgtcactgagccagaccttggtcgtccaggagcgccaagttacactttttgaacaattaggctttggctttattttccaaattggcaagcgaaggcaacgaaagcaattcgatcaatttaaatttgttgatcagtcaaaggtgcttgccctgtctcaaaataaatcgaaacgataaaattatgctttatgcaaaacgaattaaagacacgaataaccaaaacaaacacaatttcaaacaaacttgaaaatcggcgagaattaggcacagacgaaaataaatcaatcacacaattaacttttatttttcaaacataaacactaattaataatgaaaccaaaacaaattatttaaggtcaatttgaataatcggaacgccaaaacaaacataataaattaaataattaatgaagtccaaaaatgatatcacaccccgaccctttatgagaagacggtccctcgtctaagcaattaattgggatgagagacagaaataaagagaattagaaatccgattggtggtggtccaaggcacatggctcagtgacgacgacgattctcaaagactctcccatctctgcgcccgcgagaattgtgaaatgattggcgaatagggtacgggtgaacacgaacatctcgagaatgagtatgagaacgagtgattgacaattccgacaattgagtagagacagaagaggaaacagaacgtgatggacggcgaattccaagggaattatcatcaggaaattgaggaatttgggtaaagatccaggcacggagacacttcagaccttcgggcaacatttttccgtctgctcgcacccgcgacatgtcgaatgtgtcgccgaacctccacagttcaaccagactacgcccgtgctctctgtaaattgactgtgaaaagtaaaacgtttttcacaaacattgcggcccaaatttctttattttaatgaggatttacaaaattacatatattttttgaagaatttaggtaaattttttggaaaatttgggtgaggctaagtctggggaggggaatctaaaattttcagcaaaaatactattttggggtacgtaccccgcgtcccccccccccccccctctgggaccaggggtgggcgaaacttcggcttcgaaaacttcgaaaacttcgggttttttgagcttcgaacttcgtgcttcggctattttacccgaagtttcgggaaaaatacacccctaaagattgagtttttaatgtgaaaatgcacccttagtgatgggcttttgataaacttaaattaatatatatttattaattttttgtttttatttttttgttcacacgcatggtcgagtggtagtgctctttgctcttttcattatgtttctttggatcagttcccatccaagtactttcttttcttctaatttttcaaaagtattcttttttcgacggaaatttaatataaatttaacaattaaaatcgcaaaatcttttcatttttgaactaaatctgtcactaaaatttcaaatttttcccgtcggcgcctatcggcaccgccggagttccaaaattccctttattttttaaattgactcaaaaactgtgagtattctaagaattataaaaatttagaaaatacattgttaaaaaaaatcattatatttatttatcgaaaggggttgttggttggtctatttgatatttaaccgaaattttgggatgaaaaaattttttggaattaaaaaaaaaattttgaaaaaacttcggcttcggcttcgaaaacttcgaaaacttcgggttttttgggcttcgagcttcggacttcggcttcgaataaaaattgggcttcgccttcggcttcgagtactaagccgagcttcgcccacccctgtctgggaccgtccctggattcgtccacgtgaaaaaacaccgtacaattcaagaaatcatggcttatttaaatataaaaaacaagatgccaaattttgagcatttaagtttttttttaaagaaaaaaattaaatttcgtaaaaaattgtaattaaacaaacttgttcaaataagtgtaattaagtcattaaatcgcatcatatatattagtcatttcttgcaatcattgcatgacctaagacaatatttactagatgcacccacaacaaacgacacaccgtgggcctggcattaagcaatggcggctgatcattcggaatttgtcgtttaatgtaaaaaatatttaagatatttttaatttaatgtttttttagacaactgtaaatgagttaaggcaacgagttgaaacattcggacatattcttgaaattattctgcccaaatgcaaagacaaacgctttcccaattcgtccgctgggttttgctttgtgcaattttcgcgacggaaagatgccgaagaagccaaaaatggattgaactttactgaattaaatgggcggaaagtggcggtcgattgggcaatagacaaagacaattacataacgaaattgcaatagtggggatgagtgtttgatttagaaaaatgtacaaaanttatttag

SEQ ID NO: 2174 - DNA, 3176 bp, Heterodera glycines
  unsure (1)..(3176): unsure at all n locations
ctgaattaaatgtgcggaaagtggcggtcgattgggccttcacgagagacaattacataacgaaattgnaagaaggntttctttgtttgatttagaaaaatgtcaaaattatttagagaaaaaacattcgaaaagnagtgaaatggtcgtaaaaacggaaccaaaaattgaatctgaggaagaaagtgatggtgaattggaaataaacaatgaaaaagacgaagaaaagtcagaaggggaagaaaatgaaagtgagttaattgagtggacagttaacagtcactgaattaattaaaatagcaaatgataccaccgaaagcattaccaatggaaaaacggacaaaaaaccgacgaaaaaagaagcgaacagagaggtgactcgaaaaaaaactgggaaaatactgtaaagtttaagacaaaaaccaaaacggagaataagaaacaaatgacggaggacagtgcagtcacagaaggacgagtcgtttttttaaggcaaatggtggggggggggaaagctccgattaaaacatttccgaattttcaggaatatgccctttaccgtggacaatgaaaagctcaaaaatctttccgcggagtttggcgcaattcgattggcaatttgctgcagaaacaaagacaccggcgacccctcgggcaccgcctttgtccattttcaacagaaggagggagcagacaatttcctggacaaattgacggcggtgtcttttttgatttggttttgaaataaaatatccaatttatggcaggaagacggtgtccttttggatggtcggcgaatttacggacatcgcgcggtccaacgaaatgaggcaaaaaagttcaatgtgacagacaaaaagccggtgaaggacaaacgcaatttgtacctaatgagggcgtcgttgttacggcccggcacagcgctggcgaagggaatgtcggaagaggacgcgaaattgagacaacggatgctggaagtggccaagaccaaactcaaaaacttgacgatgttcgtctcaccaaatcgacttgtggtcagccaaaaggggcaaatcagcggagaaacgtttaaagtttttactgctttctcagatacacaacattcccttctcgtggaaggacgaccaactgaaaagcgtttgttcggaagcggccggcgattgtcccgcgacggccatctcagagtgccggataatgcggcaactgaagggccaaaacgaaaagggacgcgccattttgggaaaatccagcggattcggctttgtcaccttcaccgaacacactttggcgctgaactgcctgaggaagttgaacaacaatccgacgacattctctgacgaaagggttggtgaacgattggaatgccaacttggagaaaacatttttaattaaagaggccaatcgtcgaattttcaattgaaaatttgaatgcgttgagagtgaaggaaagacggcagcaaaaagaaacgaaaagcgaagaaaatgaggaggaaaaacaacaaacaaagaatagagtcggaaatgccgaggcattggagaaaacgaagcgcgaaatgatggccggcgggaagaaatggctgccgaaaaaattagggacgaaaattcggcacaaaaagccgcagaatggactcagcacgacgcctggcaaacgccgaggacagttcgtcgaacaaagggcggggatggtttaagaaaaaaacaattgagtctctaaaaaggaatccattaactgattcaatctctgcttcatcctctgctgcttcatcttgtcgttctaccccttttcccgtttaggacaaaaaataaaccaggaagtgtgaaaacgcaaagaaagagaaagacgagccgagggacagagacggagaaacgcgcgaaaaggaaaaggacggacaaatcgcaatgaaatgaaatcatttgttcaattctgatgctcaattcagttcgatattcttcggaagagtaaacataagatttcttcactcatttggttgggaaaaagtcagtgttggcaattgtcatttgccgggcaaatccgttggccaacattcttctgttggacggtgaccgccttggctcttccaccggcatagtcgggctttgactgttgcgaaacagtgaatttgctcgcgacagagaaggtgaagtgcggggcgacttgaacagggcgctcttcacttccctttccacgacgaacacattttgccgtgtttccaattcgccgattctgaaaatgtcgccttggggttaattgattttcaaatgcaagaaataaaatattgggctgacaattcaaaaatgaatttgcgcatttcacctgtcgtaaataattgcgtccacattttgccgtctgaaatatgcgacgtgttccaatttgtccaagtcctctccccagacaaaagtgatcagtttcattgcaacggcccttttcagggatgacgggtcggagagcaattcttcgctgtgcaaattgatgccctaaggggcggtgggaggcggagcaatttcaaagaatggcattttagccttgccaaaaggttggagcaggcggcaaagttggtgcccactctcgtcactttgctccgttcatccagaaatggcacatatctatgtaacaattaaaacagagttcaattgaaataggacatttaaaatatgtcagtcaattaatcgttaattgcctgtcggtttggcccacacaaaggaacagcaccgggtacttattctgtttgacggacagtctaaaaaggaactgagcaaattcattttgacattttttatatgcgtacagcgtgcaaatgtccgggtcaaatgacgaaaaaacaatgcgtcttttgccggcgtgtctgaacacgtccaccagcagttggtccatgtactggttgcgctcgaagtaattctcacattcgtgcgacccatccttcaattganaggggggagggcattcaattcgaaaacgttaagaaaatgctattctcgactccccccccccccggtgcccaattaccttcattctcattgngtatttgatctccacattgaatcccgcgtgttcatccactcgttgtaatgcctcgaccaaagtgggaaatgatcgcaattcgtctctttcgtccgcttctcccggtcatcagtgaccgcggttctgctgctgcccatttcgctttatgtctctgctt

SEQ ID NO: 2175 - DNA, 914 bp, Heterodera glycines
cgtggaaaacaaccaccgatcggtcgcggctcagctgcacgtcgaactcgacgaagtcggcgcccctttgggcggcgttattcagcgagaaaattgtgttttcccgcgcggttgcgaatctgacgcggcagaattgggaaaacaaaggcgaggctccgtcgctcactttgtgaaagattcgccgctgccgcggtggcccacctccaaagtgcgtcgcttcttccaatgcttcacaaaggtcgtctccattctgtccgtcaattggcactttcactttttcaattggctcacctcgtggcatgcttttcctcctcctcctcttcccagtccactgaggttgccaacaaatagtcaacttttatttggcccatcggcttctgcgttttcacagcgaccaatggcagggaaagggagccaattgtgtccggcattgaggagggcatgccttaagggacagcagacaatgatggcacccgacccgatagcagcagacggacaataagcaagcgcaaatcgggacggagttaggccaatctttgattctgtcgaagcccaattccgttgctggagcataaataattcaattcgaaatgcctaaaacgaaaaagaaaaatgtagataaaaacagtttatttgtgcaaaatcaccaaaaactcaatggccactgaagttgtgcggaacacaaagtaatcttcgccgtcgtttcggaagggttcgccattttcggactgttctctaaagaatgggtcggcatcggacagcaaattctgaagcggaacggaccgataaaaattgaggaaaatactgtaaaaccgcaaattctgtgaaggaatgacttggcaagggaatgtgtgccgattgtggagcagcttagaattgttgcggatggtcttcctcttctgccagcgaatcca

SEQ ID NO: 2176 - DNA, 1866 bp, Heterodera glycines
tcatgtatacgggctgcaaattttatgtaaatacattttttttcctggcttttccttgctctaaatagcaggaaaaacactttcttttttgtgtttgcgaacaaaaaccgggacttttatttacatatttttacatatttcgggattttcttacatatttgtacatattttggatttttttcatatatattttcatttttttttacatattttgagtattttttacggaaatttttggaaatatcaaaaaaaaaaatccaaaatttcggcaaatattttgggtacatattttcatttttttacatattttgaaaatttataaaaaaaaaaaaagtttgaaaatgttgcctaaaaataccaaaaaaaaaaagtaatttttatgtcattttgtggctatttcatactttacggggattttctttcccaaaaaataccattaaaaaaaattttatttacatatttggggttttttttgtacatattttgggatttttcttacatatttatgtacatatttggaccactttttgtacatattttttgcagccctagtcatgtaatctaaaatttgatggcggactaaacacgcaaaaatatttgcataaatttaatgaattaatttggaaattgttgaggaattaaaattttaaaatgttttttttaatttttgactccattttgggcctcaactatttaccaatcttttcttaaatattatttttaattatctccattccaaagctaagatcccaatttatttgggatttttttgtgctggatgaatctcgagccaaattttgcgagaaaaaaattttttttttttgaaaattttcaccgaaacgcttattgaaaaataccgactgatttacggcaaattttttcgatttatcctaatcattacttctcttctgatcagatattatttgagtcaaaaaatgattaatttttgaaatatttgaagtaaatttgatttcaaaatattaattaatatattataattataatttagttttgctttaacttttggattttataaaataaaaaacaaaagaaaaatttatttttcagccaccaacggacagacgatcatggaaaggaaatagtgcacagctaatggaaaagaaacgagtgggtttggggagagagtgccttctctttccactctgtctctccatctctcccctattttccaccccatctctcctttcttctttcaatggcctgtcagttggactggttgctgctctctaaacttacctggctggggagttcctgcgatcacaaaggcagggctcctgtggcgaggctccaccattgcactttcggtcggggctgacccgcagggcggtcccgaactgggataggcccacagctaaatttttgagtgcgggggacggcgttcgcgcctcccctttaaaagatttgcttggatttggaatttggatgttcaaaacctcttcttgtcctttaatttgtgagtccaatttaaatgcgatttttagggggtgtattttctgacatgtttttttggtagattctttgggtgtgtttttggtttttattgcgtgggttttacgaaaatcttgacaataagcgccaaaaagccggaaataggcaaaaatgagcattataaaatccgccgtagaaaccctaaaccaagctgaaagcgcattttgcatgcttaagtatctgtgtgtatcaattgcgcagaaatgttaggcatttgcataaaatgaaagtcctaattatcacatattctatttgaatccgacattttcctgataatttatttatcaatttttatttgttcaatataaatcaatacaataattataattatataaaaaaattaaaaataaacaaaaa

SEQ ID NO: 2177 - DNA, 3306 bp, Heterodera glycines
  unsure (1)..(3306): unsure at all n locations
aaacgagtgtgcctgggagagagtgtcctctctttccacaatcctctccatctctcaccactttccaccccatctctcatttcttctntaatttgcctgtcaattggactgcttgctgctttctaaacttacctggctggggagttcctgcgatcacaaaggcagggctcctgtggcgaggctccaccattgcactttcggtcggggctgacccgcagggcggtcccgaactgggataggcccacagctaaatttttgagtgcgggggacggcgttcgcgcctcccctttaaaaaatttgctttggattttggattttgaaatttgggctgttcaaaattgtcttggttggtttaattctctaagctagagttgagcgggaccgggaaatttgacaaaaaccgggaccgggacttaccgggaccagaaaagtcgggaccgggaccaagtttttcgaccgggaccgcgaaaaaacccgggaccaatcgggacttttcccaagtgaaaattttttttgaaaaaaattgaaaatttaagtgcactttgttacgaaaattgccaatattcaaaaatgcacccataaaattttgtatttacgttttgggggacgagttcgaggaaaatttttaaaaattttgttttcagggggggttcttggaattttctgagtcccaaaattctgtattttttaaaaataaatttacaatcttttaaattttttgcttttaatggttaatttatgggtttttaggctattaaaaatgaaaaaaataataattttaaattaaaatattttttattaattaaattgcataaaatgaaagtcctaattatcacatattatatttgattccgacattttcctgataatttatttatcaacttttatttgttctaaataaatcaatacaataattatatttatataaaacaaattaaaaataaacaaaaaaaaatggcaacgtctcataaaataataaagagaaaatggaatgatttttacaacaatttgaaaaaatggtgtaaaaaagatcgaaaaacaccaaaaacattggcggcggagtgaaagtgaatggcaattggcaaaaagtgccgagtctggccgatcagtagtgatcaaagcgaagtgagcgagcatttgcagttcagacaatgcattggggctgagaagcgagcagcgactcgcggtgactcatttcctccaattcgatggcctaaaaattgggcaaaaaaatgaggaatttttgcaaaaaaatggaaattattttttgtttacacatctccaagctgggcagcccatttaaaagcagacagaaaatgattacaaatttgtaaaaaatttaccaattttatttaaaaattttcattttatagataaaaaaaatgttttccaatttttattgacgaaatttactaaaaaaattgcatagttttgatggatttattgttagatttcgggattttcaaattatttatgtaacggaaaatttttaattttcttagttctttttgatggaaaatctaaaatttcttttccatccttgagctgatcatacagtacagggcccatgatcccatgattcacatttccccctgcttggacatgtgttgccaagaaaagaaatttgtgccaaaatcggactttggccgcctccatttccagctgatgactctgctcactgtgccgtttgctcagctgttcctcgtgtctgccacatctgacatttgattgatcatttcatattattatcatttctgatcacacaattggccattttaattgcatttatcattttttttgtttaattttgtatttttgtaattctattaaaaagtttacaatttttgtaacattaatttttgataatgaattatttcacaatgtttaccctaatttttggggcggaaactctggaattttataaaatcctctccaaaatctaatccccgaaatcttaaaacccccgaaattggattgtatatatccacaagattaggggtgaggggagtggagtttcccgtaaatttttattaaatcaaaaacaattcatttttactcggccaacagtcgttttagcagtgcattttcctcttgaatttgttctttgtgctgctcaaattcctcctgctcaagtcgcctcaacagctgtgaccattcgtccgtttgaatttgcaccaatgagcgcatctgaacaaaacaaacaaaacggaaaagggtgctaattaggtaattagtcattcaactcattagatgctaattagctaattagtcattcaactcattagatgctaattagctaattagtcattcaactcattagatgctaattagctaattagtcaatcaaaagcactattatgaatgataattaaaatgggactgaatctacaataattagcaaattagacagtaactcactcacaaacgccaattcataaatgataattatttaattatacatagtacactaatgtcttatcatttaaaaactgagttaaatttgtttctcatgaattatagaaaacaagaaacaaatactagaaacacaaaatattgaaggtgtagaagagatttatcattatgttataataagaaattaaacagaaaaatttatttaaaaagagaaatttttcaagccctaaatcaaacaaaaaaattaacaaatggatgttttttaaattgggcaaaataaggcttttcgatgttgttatgtgccactttcctcttttttttcttgcgtttttgtcagctcacaataaaaaccagcgtgcttttttggaaaattttttgaaaaccctaacaattcagcataatattttgaaaaaatcgcaataaaatatttcaagaaattaaaaataaattctaagatttttttgaccgtattaatatgaaccctcgtaaatttatattggctaccacaaaaattttttttatattaatttgatttttttttttactaattttatcgagcaaaattttctgaaaacattctaaaacatcttttttatttttttatttaattttttatttttactcctaatatgccataaaatgtacctcaattcaatttcagcatttttatataataattggcttgaaaaattctttaattcacaaagcatagtaaataaaaatgtgccatgccattgtggttggtggtggtgaattaccacatttacggatgctttatcttcccccccccccctactcgctgtcgctgcttttctttcttccccggtgaaatttattcaattttctcggcccattttgggggttttccccgcatcgaatgagcccccccccccc

SEQ ID NO: 2178 - DNA, 2573 bp, Heterodera glycines
tttataatattgttcgtttcaaataaccaattgattttttctaaatttgcagaattttaaggggtgccgttaccgtagttatatcctcgcccatacggtgggactcttcttggcacaacccccataacggcactcggttactgtagttataccccctccccatacggtgggactcttttggcaaccccaaaaacggtacttcacttgccttcacacttttgtcctgctgaatggccctgctgtcctccatgctcttcttggcttgtgcctggttcagttccttcttctccgcatcaaatttcgcccgaacagtgatgatttgttgtcgttgccgtcttgaagaaaaaaaaattttttttttgttttttgaatttttaatggcacggggaagcggggaccccgcaacattttcttcggggacgggaaataatacagaaaaaattacaaaaaattgaataaatttgccaatgaagaaatggggtcttgataaggaagcattttccgattacaaaatgatttaatttatattaaaaatttagaaaattcaaaaaatcaaaattttgtattttttgtaattctattaaaaagtttacaatttttgtaacattaatttttgataatgaattatttcacaatgtttaccctaatttttggggcggaaactctggaattttataaaatcctctccaaaatctaatccccgaaatcttaaaacccccgaaattggattgtatatatccacaagattaggggtgaggggagtggagtttcccgtaaatttttattaaatcaaaaacaattcatttttactcggccaacagtcgttttagcagtgcattttcctcttgaatttgttctttgtgctgctcaaattcctcctgctcaagtcgcctcaacagctgtgaccattcgtccgtttgaatttgcaccaatgaacgcatctgaaacaaacaagcaaacagttatgggttctaattagctaattagtcaatcagctcattaggtgctaattagctaattagtcattcaactcattagatgctaattagctaattagtcactcagcttattaaatgataatagctaattagtcaatcagctcattaggtgctaattagctaattagtcatacaggctatagtgttgatcacaaatactgatttatataaaaaatatatattcacttgcattcattaattaaacaattttcatattttcgaagaactgattgcaaaaatattataaaaagcgaaaaatacatcccctaaaggtcaattaaaaaaaaactcccctaaaaatgggaaaagtctttaaaaatttatttgttcatttttttttttttgcaaaatcccggtaaccgaccgacccgtttctggtccccggtcaattccaccgttgttacggtatgtgccggatccgaaattcgtagtgccaatgaattgtgttgttgttggttttgttggcaattgttgtccttgttgtccccgtcattgctggcctgcttctcccccagactggtgctgttcaaatggttacgctttttcagcgacattttgtgactttggtcaacgagtcgttccacaacgcattgctgaaggcggggtgaggaaaataacataaaatttagggtggaaatgcgtgcatagaattttccgagagtttcgagaattgagtcagggtgggagtcaagaataggatataataaaacagccgcataatatagagccgagaatttcgaaaaagtcgggaacaggatcgggagattacatgtcatgctgggattggaatcctgacgtttccgaattgtgatcaggaccggttctgactaggataggattatcggaattcaaagctcgattattcgggatcctggccccgacatgttttcaaaaaaattcaaaagcaggatcctgggaaaatctcgattctctccgagctcaactaatcgaaaaacgagtttttcttgctcgcccacctgttgtttttgcactgattcgcgcattttctgatgcctgcgctttatctcttcccattccttggcgtgccgtttctgcaacttcaaaaatggcttctcacgtcgcaaatcagcaacattgatccattccacttgctgttgtttgaaaaggttgggtttaaattttaacgtttttttccgaatgattttaaatggggaaaaaaaggggagaaaaaacgggaaaatatttaggacaaaatacataattggacaataaatggtataaaaacgggtcgaaaaattgttaaacaatacatacatataaaaaaataaaatcaaaatggggaaaatagaatgaaaataataataattttaaaaggaaaataaaaaaataaattaacaaaactgagggaataaaattgatttctcgattccttctcgagaatgacaagaaaaggtgaagaagtaacattgacaaaaatgggatgaaaaaagtggacaaataaatatttatggggaaaataaacataaaataaatgttttaaatgggcgaaattttaataaataagtctttgccaattttgtggattaaacaatttttgtgaaaatgtaaaaaaca

SEQ ID NO: 2179 - DNA, 4526 bp, Heterodera glycines
ttttatgaaattactaatttcataaaattattaatttcactgcagaccggttgcgccggggaaaaggccgcatcgcttcgcacctccacaaagtggcacgcatggaaaaagcccgctgattggccaagccttttcaagctcctcgctcagttgatgttgtttgcaggcaacagcatcatcctgggcttcttcatccaggtgagtgtggcaaattgttgttatggctttaagccgtcgttgtgctctttaaattgccgtggtggtgttcgggcacgcaaccgaggctgtccaaatcggagctgttgcggcggttgctgctgctgcgattgctgctgctgcgattggtgctgcggcggttgctgctgctgcgattgctgctgctgcgattggtgctgcggcggttgctgctgctatgcaaaaaagtatttaaaaaaatttggtatgattttttgcataactcattttcgaaaaccccgaaacaggcaaattttataaaaattccaatttctcgctcatttatcctctctccacctctctctctctctctctcatttctcctctctctctctctccctgtcactctctacagccctctctctctctctctctctttcgctctctaattcacgctatctttctctaatttctctctctcttgcattttctttctctctctctctctcgttctctctcatttcatctttatttctctcccccctctctctctctctctctcgttctctggcacaaattgttccaatatttttgcaactgactgtaaattgaccaaattcttgccaaaatatttccaatttcgtttttaccagtgtttttttaattttccaggaaaaattgtcgaaactgcctcggggcccagtacattttacaaaatttcccccacttgacccccaccccccccttgccaatcctatttttttcgaaattgaattcatacctcccagcccggcttgtatccaagcccgggtctttgataatttgagcacgacaaaaagtaagagtgttcttcgatgggtgttggccgtccagttccatatttgccaagagcaggtttgctgatcccgagcatttccattgcataaactaaacattccggttgctgctgctgcgattgctgctgcggcggttgctgctgcggcggttgctgctgcggcggttgctgctgctggaaacttgctgcgtcgaacgaagcaagatacggtcggttctcccgtttccgtccatgaatgggtggatcttaatctgagaagatggaagaaattgtttccacttttgatgtcttttcggttcaaataaaaaaattttattatcaaaggattaagcctaagttctaagagtctaggccttagcaagcctaagataaggcccaagctttaggtttcttaaatggttactttattaaaaggtttactgattcatactaattatttatttatttatcgagcaaaccaacggcacattagtgctcttacatggtgcaaaaatgaaaacaaacaaataaatttgatcaaataaaaaatacaaaatgaataccgtcataaaaatgaataaaaataaatcaaaggttaaaaattcacaggcgattaaaatatagtgtaaatgtggcacagaacagaaaatctcctactcagaactcattgcttttagcaaacccctgaattcctttgccttattaatttgcaccgctaccagtggaagattattcagttttttactattctattgaaaaaattattttgagttttggccgtggggcgctttactcgcaaaagtaaaggcctcctgcgcctttccgagaaaaagaaacttttcccagcatcgaggctggtgaaccctttaattattttaaaagctgttgttaaataattgatttttcttctttcttctaatttgtgtaaatcagtgatttttagtctttccccatattttttgtacacaaagccacattttctaaatgcttttctcgtgaaaaacttttgaacgcgttcaattttatctatatctttttttaagttagggttccaaacttctgtagcatattctaattgaggtcgtacaaaagttttataggctgctgttagagtctttatttccctgctttttaacactctcaaaatttggaaagttctaagatatgcatttcgtacaattttgctaatatgttctgaagatttaataaataaaaaaaattattttatttggcaattctagttttttatttcttcatacaaaaaccatgaaagattaaaagtttttaaaaaggctagatttttggaaaatttaagaaattttcatagaaaattttcagttctaaaccccaaagcgacaaaggctcttgagtttttcagttcattaaaggcatgtccggcaaatgggaattacccaatctgcccagcctaactaacactaagccactctcgcttgccaaagaagcctctcgtaataatctccgcacaattatataattaattaccccgcctcttcagctggggcggaaaaaaacaaagaaatattcaattgttcaaacgtaacgacgatatggggggttaactacttcaatgaacctcaaaaattaaaatattttaaaatacttaacggtttttgaatcattattgtttttgaatcattatattttcttgaaaactctaattcatttttctatctcattttttctttctctacctctctttctcatgtcagatctctctctctctctgatttttttaaatttttactctatttatttttcaagtgaaagtattatattttaaaaggtttgagtctacgtaaaaaattaaaattgttttggacaaaaattgaattttcggaattttttagtttaaaaatatgaaggttacacccttttcaacggtattggcaaaaactggtaattttctgttctaaaatttttaaaaatttatagttcataattttggttaaaattgtctattatttttaaaataagaaaaaataactttaaagttggaatttttttattaattaagtttcaatcgaaataatttaaagaaaaatggaaatatttcacattacaatgaggaattaaaacgaagccgcaaataatgaaagacaaaaggcttaagcattaggcttttcatgcggatcccattcccaccgttctttagtacatatttttaattttttttatccgttgataatgggtataggtgcgccgtgactcacggtcacggttatagtgaatttcacggtttttgggtcatggtcatggtcacaattcactttttccgtgaataatttacaagggataaaattaaaacttcaggattccatattaattgcatataaaaatttagtcatttttcgggcaaagcttgttaggaaatagtgaaaatttctaaaatttccccgatgacttgaatatattttttaaatgtctattttataattaactaaattggatggggcgcgtaaaatgccatgggacgcttaaatttttgttgggacgcgtaaaacgtcatgggaccgtaaactgtttttgggatcaaagaatttgatgggacgcataaaatgtgaacggacgcgtaaaacgccatggaacaattaaaatgccacgggacaattaaaatctatgtcatggaacgcttaaatgtcatgggacgcttaaaatgccacgggacaattaaaatgccacgggacaattaaaatgccacgggacaattaaaatctatgtcatggaacgcttaaatgtcatgggacgcttaaaatgtcatgggacgcttaaaatgccatgggacaattaaaatgccatgggacaattaaaatgccacgggacaattaaaatctatgtcatggaacgcttaaatgtcatgggacgcttaaaatgccatgggacaattaaaatgccacgggacaattaaaatctatgtcatggaacgcttaaatgtcatgggacgctttgtttccgatcaatggccaaatgttgcgcaaaaagaattgcaccccaaaatgcgcaaagcgatggcattgcggtcaattgagaattctaagaattggattaattcttctaaaatttttcaaatttttacctataaattggctaattttcagtgaaaacttgtttataaatgatcaaaatttccaatttttcccccggcggcgcctatcggcaccgccgcgccccaaaagctcttctattttttcttagaaaaatagcacaaaaatcggaaaatttggtaattttttggtgaaaatctgttcccaacggcgcctatcggcacctccgcgccccaaaactcttatttttccttagaaaaatgatacaaaaatcgcaaaatttgatcattttttagtgaaaaaatgtcaacaaattttattaaaattttcaaaaattttcccggctgcgcctaccggcaccgcctgcctcctcttcccaaaaagttttttggaaaaagcgcccctcaaaaaagctttttattgatttttaaaatttgcaataaaattttacaaaaaataattttttctttatgatt

SEQ ID NO: 2180 - DNA, 2594 bp, Heterodera glycines
  unsure (1)..(2594): unsure at all n locations
tgattaaaggcaaaaatttaatttaaaaatgacaaaaataagnnccatactaaaacttgcaaaaacaaagggtttcggatcaattccggcgttatatttccccatntattaaaatntcggtttttgagtttgaggatcagaactcctgccccacttcctggctaagtctaagaccattagatatgacaattaaattaaaattccgaaaaatttggactccccgtggcacacaccttccaatgccgccattttcgtccgcttcctgcgcgacggcaaagagtgcgaacggttgtcgctgctgaaagggctgaaacgcggcatcgtcaaccccgtcgatgggaatggcatcggtgccgaaaattgacaggcagaggaaaagcggcgaaacaattagtggcaaaatgccaaaatgagaacgatggtgatgagccagtgatgatgaagaagaaacagaagaagccatttcgtaatactgaaatacgacaaatttaaattggcattgttactcatttaaaaaatttattaattgaaaaattttaaggttaacttttttggcattttatttagcctacccataaaattaagcatttttaaattatttgtggttatttgacaacaaaaaatggctatcttttctgataaaataataaatatttttcttgtttatgatttcccattaccgtatctctttttcgtttgttttcccgataataactgatgggcaatgggaaaaaatgttttattttttcactgaaataataagcggttgtgtgttgtggccgaatgctttttatagtgcaaaatgatagcctggaaaaatttttaattaaaaatctgtgaaaatatttgccaaattttgagacgattaattttttaaggaaagttttggacaaatattgcctgaggcaatgtgcgaaaatgaaaatatttttcagacaatgggcaaaaaaagaataataatattcgtatagtgtgcggaaatgacgcaattgcttaaaaatatatttatgaaattccaacaaattttttttcaatttttttgattgcttaaatataattcggaattataagttacataaatacgtagaaatattttatcaatttcaaatttcacccattaaattcaagtgtaaaagaacaaatttcccaaatatgatttaaaaattataaataattaaattatagtgaacgaatataaaaattgtgatttggatgtacaagaagttcaaaattagcatggtatgtttaaatttcaaaataatattcacaaaggttaaactaaagattttaaaattttaatatttagtaatttaaatgcccaaaaataatgtttgaaatattggaaatcagaaattattagcctaaacgaaaaaaaaaattaactataaattgaaccccataaaaaatcgagaatttacctgagttaatccaaatagtttcttttaaaattgaaatttcaaaactgaaaaaattatttttcgtttggcgcaaaagtcaatctctaaaattgcaatgaatgcaaatgggaaagagctgcaaaaataatcaaaattacaatcaccaaaagaattaatctaatttttcccctatttaaattgataattttgttttggcccttgctgcacaaaaaatggtgcacaatgccataatatgggttaagcaaatttaaacaatttaccaatactcaaactctccccactcattcactcacatctcattactaatgccaaatgccaatgtcattcatacaattcgttcattcattgtgtggcactaccaaaatcccccccccccacttaaatatgccaaaattgttttgtgccgtccaaaaatagtgcccgtttttgatggcaatttttcggcacaatttgggtttttgtgtgattggttaataatatttattaactcaattttttcgctgcaaggctgtaagtaataataatgttgtgccgctttgtttattatagcgcataattgcaatttatcaagtgttgtgaaatgtcagtaaaattaaatttaggcgggaaatgttggcgcattttgccatttttggaaataattaaattaaaaattgttcatatatttccaggccaataatatgtaaaacattaatagaaacttaataaaaacaaattaattcagggccagtggaaagaaattgggcacaaaacggtcattaaaataaaaatggccgataaaataaaatggcaaaaaaacaaaaacaccaacatgcttagaacatgtgtaaaattttcctttagtcctttgtatggaattgtccttaaattttttttttaatttcaagaatttacccgctacgcagcccagcgatctttcaaaaattgacatgaaaaattccgtgaaaatttttaatgaaaatgattggtaacagaacactaaattttcaaaatttccatacaaaattcatttccgtttttgtttttattgttttagcgtcgttgggtgcacttaattttcaggaactcccaccccatttaatttccgtcaatcattgatctgagatgtggcgtcataagtccatcagctgaaaagcatctgagaaagatgcggacaaagaattgccgtgggacgag

SEQ ID NO: 2181 - DNA, 7351 bp, Heterodera glycines
  unsure (1)..(7351): unsure at all n locations
gccaaatgccaaagccattcatacaattggttcattcatggggggcattcccaaaatccccccccccacttaaatatccaaaattgttttgtgcgtccaaaaaatagtgccggtttttgatggcaattttcggggcacaattggggttnttgtgtgatgngttaataatatttattaactcattttttcgctgcaaggctgtaagtaataataatgttgtgccgctttgtttattatagcgcataattgcaatttatcaagtgttgtgaaatgtcagtaaaattaaatttaggcgggaaatgttggcgcattttgccatttttggaaataattaaattaaaaattgttcatatatttccaggccaataatatgtaaaaaattaatagaaacttaataaaaacaaattaattcagggccagtggaaagaaattggacacaaaacggtcattaaaataaaaatggccgataaaataaaaatggcaaaaaaacaaaaacaccaacaggcttagaccatgtgtaaaattttcctttagtcctttgtatggaattgtccttaaatttttttaaaaatttcaagaatttacccgctacgcagcccagcgatctttcaaaaattgacatgaaaaattccgtgaaaatttttaatgaaaatgattggtaacagaacactaaattttcaaaatttccatacaaaattcatttccgtttttgtttttattgttttagcgccgttgggtgcacttaattttcaggaactcccaccccatttaatttccgtcaatcattgatctgagatgtggcgtcatagttccatcagctgaaaagcatctgagaaagatgcggacaaagattgccgtgggacgagaaaaaaaaagtcgggattcgggatgggacggccaaaatgttttgtgtcaggattcgggatgaaaaaattccgagacttggggttcgggacaatttcaaaaactgatgctgacaaaaattatgcaaaataaatcgtggaaatattttctccgcgttatgattttgcgggaaaacgccgcatattcgcggcggttatcctctccaaaacactgacaagttgtgatgctcgagagttatgatctcgagtcgaaaaaaaactcacatgttattatttatttttttttgagtcgtgggccccggacaaagagtttctattctcaaaaaagctccacagaagagtgccagggatatggtgattggcctctctctatataacaaaacaaaaaatgtattaataaaatttggtgcgcaaaattgttttgaggtgtatatgatgtcattgaatgtgccagaaaataaacacaatgccacaaaaacgtcataatttttcgaccgcccatttgaacggtggcaatctttttaggcatttgttgtttttgtacacagacacaggagcaaggcgagtttattttaagaaaagcatcgaaataatttgtttagggtaaccgaaaataaaaaaataattaatttaaattattttgtgcccggtttcaagctttttttgtcattgtgttaaaattggaagctcaaagcatcgccgcttaaatctgccaaaacaccagcagcagcagggaaagggttgttttgtcaccacccaacaagcatcagcaagaaattttcaatttcaaatatttttaaatattataaaaaaaagaagaaaatttatattttttcgcaattttatgaaacattccaagggcaattcggtagcgaattttgtgttctttctaagtcagttttgcgaacagactccgccgggataatttttaaatttttcttaaattattaatttatcaaaaaaataattttaagttattttgataaaattttgttatttttttaatgaagtgggtaggattggagaaaaaacagcataactttcctcaaatccaaatgcaaaaaagccgaaaaagtattattctttcaaaaaaaatcacaagtcgctaattaattctataattttaaaataaacaataaatatttccaaaagttaatttctaattttgaacagttcaataacttccgaattgaatggaacgtttgctaaacaaattgtagaattattaaatagagaacagtttggtgggtacaattaataataaatgagaaaaattttgggccacgaagatttgttgttgttttaaaaaaattgcgaaatttaaaacaaaattggtgcaataattttacaaattccacagaaaagccaaaaaaggtaaaagtgccgccgccgccgccgccctccgaattcgctaaattttatcacatgaattcactaattatatataatttttcaaatgttcctttaaatttttacatgaggaagtttatttatatgggtaagaaataatttttaattacaaaattttagagtgaaaaccggcgaaaaaaattttaaattgaaaatttttacacaaagccataaacattcaatgagtgatggtgggatcacaaagtttaccaatttggacagaatattgaaaattggtttctttttaattatttttcttttatttttggacacagagattttgattgaagacttaaatttaaaaaaaaacgtaggaccaggcaggatagtactggaatttgtcaaaatcgtccagaagtcttgattaacatggccaaaaatcccggataagaggcggaccttatcaaaattagccaaggttttccggtctgcaaatctttgctcgggcactgactggatatgtgcaatagtctcagttattggctctcgggttttctgtgatttctcgggctccaatttttggtctcgaaaagtgagattaaccgagaattttcaaagattcaacaattaaaaaaaatttataattgacataaagccagttcgtcaatggccatgcagaaacattgaaagagtgaccaaatttcgcggaatattaaataaaaatgtatgattttgttcaaatgggaatcgaaaagccaagaaaagcgtttgaccgcatttatacatggactagagttaatcgatgggcaattattaactaattaattaattaatacccaaattttgcgttcaaaataaataaatttgtggaacgggaggaaagggtaattaataattatttaataattttaaattatgtacctttcttaaatatgaagatgaaaagtgaactctctaagaatagatttttactgatcaaaaaccaaaacatatttcaattctcattaataattattcagtaatttgcagttttgcaacaaccgcaaaagaccaatatttttttaactttcactttcaaattaattaatttattgaacttttagcgtctgatatcttagaagaaatttatttaactaattaatgttattgcaattagacattgtaagaacaaagcaatactgctgattaaataaagttataaataggattataattaaatggactaaaaaagagaaaaatatggacataacatttatgggttaaaaggcctgaaatatggactaaaaactgccataatatactcaatatttgtttcaattaacttaaaaaatacattgaaatttacgaaaaatggttaaacattaaaaaatgccaaatttttcaaattctagctcacattgcaaaccaaatacatctcaagattttttggtaataatctcattcttttgtcagcaaaaattttcgggtgcgaataaaatacctaaaaaatttaccaaaatttcaaaaaatctctttttaggggtgtatttttaaaaatttccagtatatcttttggggtttttcgctttttttctcatttttcttttaaaatttcataaaaatggcagaaataggactgaaacacaaaaaatggcgaaatatgaatttattcccgaacaaatgtaatacaattaaggtatcaccagttgtttgtttttttgaattttcttcggtaatccggtgccatccctgatagggaccgccggaccccctgttcctagttttttgaaaaattgcaccgcaaaaaaatgggttttaaaagaaaaaaatagtcaaatttatgaaccgttaataatttgatttccgatcaacattttaccgtcggatccaatcgaaaaatcttagtcgacccatcagccccttttaatgcatcccgccagcccttaaaaatttatttttcagcattttttgatttttggaaattttttgaagttaattgaaattttttcgaattttccaaaatcccgcaatcccgcacgggatcccgcaaattttaaatgcgggatttgcgggattaatcccgcgggatcccgtcccgcaaaaaattttgagttccagtcccgcagcgggatccgcaaatttgaaatttccggtctctagtaaaaacaattaaaatcaaaaattaattgatatataatattgatttgtaagcatattttctgtttccgatagatagcaccccccccccccccatgggtcggggagcaaccctagtttataagaagaatcaggaagctaacaaacgttttttggctacctttttcaattattttcccaacttttacaccattgatagagcttcaatagctctacaattttactcagaggtgatctttcgctttttctattgataaaaatggtttaggtattgtttttttttgggaaaagataaaaaaattcaaaaaaaccgaaacggtataccgaaaatttttcttcggttttttcggtttcggtttttttcggtttttataccgaaaccgaccgaccgaaaatgaaaaatttgtcgccgctgggacaaattcaatgagatttgttaatagatttttaactcaaagtttctttgaaacaaagcgtggaatggggggggcgagaagccctgcattaattaaatggagtccctaataagtatttgtccaaattttcacgattaaaaaattctcataaaatgccatatttaagaactttttatccaaactggcaaatttcaataaatacttttaatgatggcttcgcctccatgttgcttaaaaatatgtttgaaaaaaagaagatatttttactcactgcttgtcatcttttgttttttaagcaatggattcaaatggacaaaaaagcaccgataaattccgtcgaaaaggccaatttttcgaacgcacttcgaacccacaaatttgaggctgttcaggcataaaatgttaatgtttggttatcatcccataaaatgtcatttctcctccgctttatccttcagctcggtttggcccttttccatcgttgcacttttggcattggcacttggagtggccctttccttttcgtcgattgcctcaaagtccgttcgatttgtcgccgccgtgggattgttaggcaaatggcgaaggaaatgatcagagtaatttgaaaacgaaaataaatcactgaggggataaatctattaaattttgagttggcatcactctttaatttaattcttttttagatcgccgccaaatcgaatgatccactgatcggatggattgccaaagaggacgcgaccacggatgccttcttccaatccgttttttaatacgaaataaatttttatcttttatttaaattttaaattggagcgaccaattgagcgacaaggaaaacactcattgtttattcataatgggagtgattaatggtcgcaaaaggaattaattaattgaaaggagttaattaattgatgagtttgttgatttatttatttccaagaaatttcatttaattactgttaaatttattttttattcaacattaatggtttggatcgcagaatactgaatgatttctaaaatttggtgccattttcggttccgtttttcattttttcattcggcgcccgccgagaaagagcggcttaaccgtgcctttgtccgacgatgctttttcctctcccttttgcgctgcctcggcttttccttcgtttttagctttaaacgacaaattaattagtaaattagtgagaaattggttgggcccggcaccctcaaggccggactccgaccgtttatttttggattttctgatttatctgtacattcatgttgtgtgactataagccaaaattttaaaaaatcagcaaaaaacacttacaaaattcaccttcccacccaaaaacagcgaaatgtccctcaattttattttcttagcaaatttgtagccgaattagtgaagaaattgcgcgatctttgttgattttttaaaatttaggcttatagtcacacaaaatcagatttttaaacaattttttgcggcgcattaagcccattgttttaaagttttttttcaaataaggacaatttttaaagcaaaagaataacaaaaaattaaattttgagtatcaatttttgagaaaatttttcataggggtgtatttttcattttttagcatttttattaaggatttttccgaaaatcccgaaaaaggcgacaaaaatggcgaaataggcaaaaaaatagacatttaggcattaagcacaaaaagctgaaaataggcaaagttcggcattataaaagtcatcgtagacaccctaaaccaagcggaaaatgcgtttttcgtgcttaactgtgcgtattaggtcgtagaaattttaggatttgcctaaaaaacgaatccctaatcatcatcattttgtgtacatagttctttttcagaatattttccctttactaaagtaaatttcgatttgagtcttttgtttcaataaaaaggtggtggctttcggggtcgaatttagcggtttcaaaattttttttaaataattgaaaaaaaatatacaaatttacaaaaaagaaaaagaaaaaagcaataaattaaaaaagaaattctctattttaaacaaacaaaaaaataatgattaattattattttgcactcgacagaagaggctttagataaggggtccaagccaaggaaaagtcaaaaattttcattttctaataaaatactaaataaaataatatttataaataaattctaatattaattttagtcttatttaaatacaataatttcgttttacagctttttcacttccctttccaatttatcatcgatggaatgcttctgattgccatccaaaaattgtgatcaatgaaagcacaaatgccattcagcgcaatacgacggggacagaaggtgataaaattatcaatgaaatttcgatattttctcaattttaatttttttttaagaatttcttggtggtgatggccttctaattcctcgttcatgccgagcagggccaattcaaatgtcatatgcttctgctggtcgcattggcattatttatgcggaatatcgaattcttgctggaaatggcccgtgagttaaatagcaaaaataaacaaaa

SEQ ID NO: 2182 - DNA, 3245 bp, Heterodera glycines
  unsure (1)..(3245): unsure at all n locations
cttcggtcacaatttcaaatacgatctgtctaaggaattttaagactttggaaatgtttgtttatacaaaccaactgaaatgttttttttctgattatcactgaatatttgagattgaattttctaagtgatcagtcagaagctccccaaattttaaaattttccgttatctttttcatttagtaaaaactagagaccggcgcgggacgggatcccgcgcgggattttgcgggatcccagtccgcaatcccgcattttttggaaaatgcgggattgcgggatttgcgggattaatcccgcgggatcccgtcccgcaaagaattttgagttccaatcccgcagtgggatccgcaaatttgattttttgtgcgggattatgcgggattttattgatttttttgaaaatttttctaagacagaatgccaaatatttttaaataaattaaataataaatttaattaaagttaactcatttttcgtcgcaaatttcattcaaaatttgtgaaattttcccggcggcgcctatcggcaccgccgtaccctcctccaagttcccaaaaagtttttgaaaaaatcgcgctgtaaaaaacatgtaaatagtcactcctttttccaaaaatgttctaaaataatgaaaaatgacaaaaagaaatgattaattttaaaaaacaatattttaagccgaaaaagggggaaaaaaatattaacgaaattttgggacatttttttttgcagaatacagagaacatatagagcaatcgctatctgtgactttgttttaattcgagcaactatacaaacgaattatgcactagaaaaccgtgccatcgaccattatctgccaccggtccgggttatcccccctcccaaaaaaaaaaatcaaaaaattgcttatttgcagagaagcgtgtttactgcgcaagtgttcgaggtgccctgctttgctgtgccaatgacatccttgaggaaaatattgcgcgcaattggattgaggcggaggaaaagaacgtggacataatcatttccgcccgaattgccaccactgttgaaacggaattatttgcactgacctatgagactggtgagtgagtgggggctgccgagaaaaattttggaaaattaggggtatgttatattttcatcaaaaaatgacccaaaaattttgtgatttgagcaataaaccacccccccccccctccccacctaaaaagtgtataaaaatctcgtcccgcaaaaaatgttgtaattttttgaataatttgtggacaccatgtgccataccatatacacttacgcatatttacggacaaaaaatcattgcgtatttaaaacgaaattttaattcatatttgatgcttaatgtaatggtgccaacaatttcaatcgcccaaaaacagcagaaattaatttaattaattatcattttaatagacggcgccaaactgttgccctcttgcgactgtaccgaccctcacttgctttttgatgggaaaagaagtcttagccactattgcaagcttccttgtaaggccgactcgacatgcaaaatattttccctttactaaagtaaatttcgatttgagtcttttgtttcaataaaaaggtggtggctttcgggggtcgctgatcacgaatattcattgatttttttgaaaaaaccgattttttatcgatatattttcaaaaatttttttattattttcacaagaatttttaccaaatcttaaaaatctcaaaaaataatgtataaaaaccgccaaaaatcaaaaatatgtaattgtgggatgatttttagacgatccccgacttttttatgcacgatctttggttttgattagattttcagaaattgtttaccatttctttttgcttttgtgtaattttctttccctcgtccttttttcgtccgtttgattttgctccgtccaattgatcacaatcattcacttaacacttctctgatcaacacttcattcctcctcatcccccttttttgttcattcattcacttctcattaaacttttttgttgcgataaaatggcaacgaaaaattaatttttgattaagaaaaaggaatgaaatgaaaattatttcacaaataatttttcatttttatatttgttgaattttgaattctttttagcttttagaatacatcaaaatgcaattgcttaagtatttcatggcctcttttctttgccttttctttgtttttggaatttctttcggcgcttctaatggtaaaaaatgaattatttctattgacgggaagaaaatgctaagtttttgaggttaagattaagaaatttttaagggaatggcatgcgttgtcggcactttccttttgtgtgactataagcctaaattttaaaaaatcaacaaagatcgcgcaatttcttcactaattcggctacaaatttgctaagaaaataaaattgagggacatttcgctgtttttgggtgggaaggtgaattttgtaagtgttttttgctgattttttaaaattttggcttatagtcacacaacatgaatgtacagataaatcagaaaatccaaaaataaacggtcggagtccggccttgagggtgccgggcccaaccaatttctcactaatttactaattaatttgtcgtttaaagctaaaaacgaaggaaaagccgaggcagcgcaaaagggagaggaaaaagcctcgtcggacaaaggcacggttaagccgctctttctcggcgggcgccgaatgaaaaaatgaaaaacggaaccgaaaatggcaccaaattttaggaatcattcagtattctgcgatccaaaccattaatgttgaataaaaaataaatttaacagtaattaaatgaaatttcttggaaataaataaatcaacaaactcatcaattaattaactcctttcaattaattaattccttttgcgaccattaatcactcccattatgaataaacaatgagtgttttccttgtcgctcaattggtcgctccaatttaaaatttaaataaaagataaaaatttatttcgtattaaaaaacggattgggagaaggcatccgtggtcgcgtcctctttggcatccatccgatcagtggatcattcgattggncggcgatctaaaaaagaattaaattaaagagtgatgccaactcaaattttaatagatttatcccctcagngattttattttttgttttcaaattactctgatcatttccctccgccatttgcctaacaatccc

SEQ ID NO: 2183 - DNA, 4873 bp, Heterodera glycines
acattttatcctcaccctcgaaaaaacatacaatacacacatacgcacacgcatagacacgcacacacgcgcacatgcatacatacgcatacacacgcaaatgcatacatacgcaatacacacacaccccatgtgtgtaatttttacacatttttgagtaattccttcatttaatcattatttttcttaatttttgctaaattatatcttctattccttaataatttacaaattgtaacttctttcgcttaattctgcacttttctacctaaaaacgacgttcccaaatgtttaataattttcaaattgtgtcttccgttgcttaattctgcatacatgttaatgtgtttaattatgcacttttctacctagaaatgacaggttcgtgcacataataaaaattgtatcttccactccttaataatttacaaattgtgtcttcttgctcttaattatgcatttttctacctaaaaatgacgttcccaattgcttaataattttcaaattgtatcttccattgcttaattctgcatacatgttaatgtttaattatgcacttttctacctaaaaacgacaagttcgtgtattttttaaaattgtatcttctattccttaataatttacaaattgtgttacaaaaccctgactatttttctcgttaaatacctttttaatttataccttttaatattagtaatgacacatttttcaattttatttctgaataaacattcaaatgaaaaatacaagtgtaaaatagagaataaagagaaatgataaaaagaaagtatacaactcttttgatagatttgaaggaatatcagaattcttagagttccctttgaaaaaagtgagcaaacacacccagggaacggcttcacccttcggtccccaacccaaacactcacgcaccaggctgcgcattacaataatgagcagctcgtccaccttcatctcagatggatggcctggagtgatggggaggatcaaccaggggtcattccgtcccacatgagtgatataaacagagagaaagaaaagaagggaacaataagaaaactaatatacagaaaatttaattgagaatgcatacttatcatttgcgataaccaaattcgaggacttggaatgaatcattaataataccttttgtgaagacaggttgataatgcttagttagagattgagtgtacactttgccttggataaggttgggacgaataaaatggggatatgttacaatgatagggtcaggggggtcttcggagccatagcgtaagatttggtccttaacagtatcgtaatgaattttttgaatagtttgtgcatcaagggtgaaccctcttattttcaaatcgtgttctatttcaccggtgtccttgcgttgcagcttcatcccataattcttgcagccagcgctgatgaactccaagatattgtggtcggggttttcgtctgttagttctccaaggtgtccctttcctgtcgggagtgggtcgttgtcctcggggtgcacgtagatgacgctgtcggtgtcgtaataaaggatttcgcagtcgggggtgtcggcaacttttttgagggcatcgtagaggtagaggcgagctgcagatgtcgtgaagagggagatgacaacattggagtatttattttcgtcgacaaattcttcttttggtcggtaagtcagcataaaaacatcgttgtcgtcgtccatcatttccaagtccactaattcgattttcttgtcgtcggtatattggcgaatcaggctttcgtcgttgttgattattgcttttgagagtagatttcgcatcgagaagcggccccagagtgagttgaggcaaagtttggcgatgtaccgcttccctggttcagccttcatcttttcgttgtctaacaaaattccaaatcgctgacggttctcctcaatgtattccttcttctcctcttcgttgctgcaccatgaagggaagccggttgcgtggatcttcagggccatcatttcgctaacgtaagatttgaagatgttgtcgctccattggtcgtattgcaggacatggaagagttttctgacggtgtagccgacctccaaggcagcattcaattcaaggtgagtgcaggtagagacaaaggcacggtcattgggattgaagtgtggacacgagtagttgtcgtctttgaggccattcgggtgttcattggtgatgtgtttggcacatttttcgcagagtggaaagaggagtcgctcatcaaattttacgggcattacggtcacattgatattcctgtttgggggtaaaagtaaaacttttaaaagtcccttgtatggattgtcggatggagctcgccagttgacagtttgctcatttaatctaaagttgataatttttgggtgaccgagtggataacttgtagaaaagttggtccatggataaaggctggtgaagtccttgtagctgattttttgtcccggctttgctgtgtggagtagcttcattggtccagtccgtcctccatgaaatgcgtctctgattttaattggtgagcggtccttccaattgtcaaagtagcccctcattgttgcgtccttttttagctgctcattgatttcatgttcccatacaacttccaagtcgacgtaccggcgaataatctcgtgcttccttacctccctctctcttatctcacgcagtgtcttcccatttggcatcctcgtctcttcgtccaagtcctcaaaacattccccacacccatgccacagacaaccatttacctcaataattttatccctcttcccattagtcccttttatataaccatccacttgatacacctgaccctcacgtttaaagacatattcaccatagcgggagtgtgctgtttggatgttgacgttgttaatatgtgagtaccaatccaagtatttgatggcaagggcactttggttctgttgaggtgtatagcctttttccgggacgatggcaagcgagttaggcttcagatgattgagtgcaaagttcttgacgcatgcgctggcgatggtcattgcttgccacaggatgtcaattcctccgtgttttccatctcttttggtgagttgcttgaattcacgtctaagttccactagggcatgggtgagtatttgtacgtcgttgcaacaatattcagggagtttttccttaaggttaaaaggttggttgtaattactattgtaccaattgtcaaatttctgttgatcggggattttcatttgatcaggacagtattcttcacgtggaggaagatgggaaaggacattatcatagtttgatgctttgttgaacatgtgtggaaaatgttgtttatcctaataattaaaaattaattgaattttaaagaatattattcacctgtattttgagaccaaaggatttgatgaggccagataatttgatgggcataaggttgtagctgtcgcgaagtatggtttgaggcccgtgttcattttgattaattttgagttcgtagagtcggttcccttgtttgatgatgtcggggttgtgaattccttgattgataaaaattaattaaatatttaataaatttttaccttgcgaaatgacttccttgataaccatggtcatgtcgtagcggcccccaaaatgtgcaaaggcaaccgtgggaaattttttgttgtggtcgaagagtagccattggacaaagtcgcgcagcgggtgcctagtggtgactttttggtccactatcgtgtttgagaagtcgaatggtgcgaaggtgattgtgcggtggggtccacaaattttgcaagaggatcctttaagtgagtccttccaatttccattgatgcaatcggtacaaattatggtagccgacacaaagtttacctcgtgttcgaatttattacctacttttttatcctgtgtcgcttcaaaatcataagcgatgatcctgtatggtttaagtttatggggttttaggggttggataaaacagctactgcacggattatcctcatcatcctcttttacatggaattgcttgcaaagtcgacaaaacttttccccgcattggtgacctgttttaccgtgatactttacattataaattaccccacagtcctcgcatcgctgaaatttggtgcatagatccttgtgtaggtgacgttcatagcagaccttgttgtagaaattgttgttgcagtgctcacattttttgaagtatccctgttgtggctcgcatgggtagtcgacgccaacctcccgacatccatggcagagtgaagagcaattcattgaatgttgagatttgcgctcgtagacgctttcacaagagaggcaatagtaacgtttattgaagaatttggacagggttttgatgccgtcaaagtggttgttgttgtggtagagaagaatggggaattggtagtcggtgacatcagatttggtgattggtcgtatctggtaatcgttaaatatgaaaattttgtactcaccgggatatttgacgttccataacccttgcacttgatggatgtatatttctgcatcgtattccggttcagttgtcggaatcccggcatcgcggagtaaaagtagtactttttgacgaagaacagtagtttggttattgttcatccatctccatcttttttcagatataattccgcgtttatacaaagagtagaagcgcattaattccagagcataaaagaggcaatagttgtcgttgttgttgactttgaagatgtgtgattgggaagagaagattggaggggcacttcctttgattgtccgtaggcggggaagtccgacagtgtttagaacagttacgcttgggaggatggggccccgtaaaaattgacgtatttgcttttg

SEQ ID NO: 2184 - DNA, 1661 bp, Heterodera glycines
  unsure (1)..(1661): unsure at all n locations
cccacagtcctcgcatcgctgaaattggtgcatagatcctgntgtaggtgaagttcatagcagaccttgttgtagaaattgttgttacattgatcacattttttgaagtatccctgttgtggctcgcatgggtagtcaacgcccacctcccgacatccatggcagagtgaagagcaattcattgaatgttgagatttgcgctcgtagacgctttcacaagagaggcaataataatttttattgaagaatttggaaagtgttttgatgccgtcgaaatgtttgtcgtggtggtagagaataatagagaattggtattcattgacgtcagactttgtgatgggtcgggtttggtagtcattaaagatgaatattttatactcgcctgtaacaaataatgtaatttatttcattaataaaaatcaatataaaaagtaaaataatcaccgggatattttgtgctccataatccttgcacttggtggatgtatatttctgcatcgtattccggttcagttgtcggaatcccggcatcgcggagtaaaagtagtactttttgacgaagaacagttgtttgattatctttgagccatctaaattgtttccttgaaattactcccctgatatataatgagtagtagcgcatcagttccagtgcataaaaaaggcaataattgtcgttgttgttaattttgaagatgtgtgattgggaagagtgaattggaggggcacttcctttggtcgttcgtcgtcgtggtaggccttcagtgtttagaacagttacggtgacaacaaaaggggccccatataagttgacgtgtttggacttgctctgctccactttacaaaactggttgaaaatggcgtccacgacatttgatgtaattggagttataggcatgatgatgtctccctggtctaaaagctccgaagaaataattacacctactttatttgctcctccaatggtgttttgtgcattctgaatggcctcttcaacagattggtgtacacatgaacggaattcggtaagaggatcagcacacttttgaatttcactaataacaaattttgatttagagcggatgaaatgatgtttaagacttttggaagtaaattggtcaattttacgaatgcatttattagtttgagatttttttggggagggagaagattgagtgtttgaagctctcttcattataatattgagtattatttatgagatttgtattaaaataattaatattttaattaaagtgcacaattttatatttaaatagtgatataagggtttatttttaggataatggtcaggaatgtaagcaaattctgacgaaagatgaattgggctctggaggatgtttttaagagcagagcgctgcggagactttttggttagaagagagagctgtgggcgctgcaggaattgcaaatgactgcaagaaaggggcttttcgctgngaatggtcggctatttataccctcacaagtgngcggagcttgaccttcactncagcatgtggtcatttggcacattgccaactaaattgttcatgtcatggcatatgcgctcaaatggcccctgcgtgncgtcaaatggcacgcgcgagcgctcaaatgcctgccattccttcctccccaaaggcacgacagctgatgtccgt

SEQ ID NO: 2185 - DNA, 5724 bp, Heterodera glycines
  unsure (1)..(5724): unsure at all n locations
aaaactggttgaaaacggcgtccacgacgtttgacgtaattggtgtatggggcagtatgatgtcacctggtctaaagtcagaaaagaaattatgacacctaccttattngcagcgccaagtgtgttttgtccatctaaaattgcttcctcgatcgaatggtgcacacatgagcgtagctccgcagcggggtcagcacatttgtcaatttcctcaatgacgaacttggattttgagcgcaccagttgatattttttactttttgaagtgaggttatcaattttacgaatgcatttatttggttgggattttttggggaaggaggaggaagaattttgagagagggaaaaacgtttcattttatttgaataatatatgaataaaaactttatgatttatagatgatataagataatatgaaagaatattttgaattagaaaaatgtaaattttatagttgtaatagaaaattattgaaaaatttttttttttttataagttgaatattggtaaaatattggatgaaagggtaatgtagttgcaaatttgttagtttaaatattttttgacggagcgcacaagcaaagaatgttggtagaattttcgcgaatgaatgggagaagttgaattttgctagtaatagccggctatttataccctcacaagtgggcggagcttgaccttcactcaagcatgtggtcatttggcacattggcaactaaattgttcatgtcatggcatatgcgctcaaatggcctctgcgtgcggtcaaatggcacgcgcgagcgctcaaatggcctggcatcccttcactccctaaaaggcacgacagctgatgtccgtccatccaatacgatttgactttaataattatttaattaattaattttatatttttttcatttatttttaaatttttatctattattttaaatttatttaggtaataattttttaactattattattttaacaatttaattttaattaaatttaattttttaattaatttattattattattatttatattttaataatataacaattttaattttactcttaccttattttaattttatttattttaaccataattaattttaatttaattttgaattatttgaattttatttcaactttaattataataattcatttaactaaaattttaaatttatcacaatcgggctctcaaatagcccctgcgggcgctcaagtggtagcatacctacactcaatagaatttgagttacctctgaccaacagctggtgctttccattatcaccagcgagcgctcaaatggtccctacgtgcgctcaaatggcatacgcgagcgcttaaatggcacacacgcgggcgctcaggtggcatgcgtcccttcccttccctataaggcatgacagctgacgcccatcctctgcctccctttccttctctaataggatttggcgttgggttttatccttcagatgttttttcaattatttacctcttctgggattggatatatttattataggtgttttttaaaggtttaaatttggtactgaaacgtccctttccattgggactgaaatggcggggctgaaaattaagggccaaaatcttggggggtaactactaatattaaccatttttcattgcatataataaaaattttaaatgtccttggatttcatgaattttccccactatgtccttgaaaatcggcatacccgtccttggaaacggaggatggacgatggcagccctgtattagatgatgtcatattcgtgatcagcgtccccgataacccccgagtagaacaaaatatcataaaaacgcctttttttcttttttttagggaccagtaaaagtaaccattaccatcataattatcattagattgttgactgtaacttacaccctaatttttaggtatttactcctaattttgattacttttacaaattgcctccttttccgatgacttttgctttgtctgtgttcggcttcaaccaaccgttctttttcactttgatagggttttcaaaccttattttttctagtctaacttccccaattttcagtattattttggttttgcttcttacccttgcgctggtgggcagtgatcagtcgtcagacgacgaaaatgatacaggtttttgtggaagtgacgacagacccgaagtgacaattggtggaattttgaatcgccgttcgactggcgttagtttcttacacccatttaaattttagtgagacaaatgaggaaattattcgggtttaggagcattaaaatcaaaagaggaactcacttttatatttccaaacttattttagactggtaatatggttgtctccctttttcaacatttattcaaatttgctttcggggttttacattggtcaaaataggtgcccgtatttatcttcagccaagccgatagaaaaccctccaaaaaagctttcacaactaatttgatatttttacaattagtcaaatttgactgacccccatttatgttgtggttttgggtaattgcataaattggttttggacaattaaaacaaaattcgaaaaattagtttttggaaaaataattccccatttggttttcgttaccatgctataagaacataaataagattatcactgctattgaaatatccgacgcttttacaaaagtgctttctcaattacagttgctcaacagacggcatccatcccatgaacaattgttggacaaacggtcgccgacatggaagaaaagcataaacgaagtgatcgactgctgacaaccagcaaattgtaattttaaattctagtcatttctcttttttatgttatcttctattgtactatatttatcattttaccattcatttagccatttttattgggatctcataaaataaattttaaggtttggactttcttaactaatttttgaggattaaggtaaaatcaaaaattaattaggtatctccaagcattcagagatttttctttcaataaataagaaattgtctaatttataacaaacaaaattaaggttggcttcttcgcccttttagttttcttttctttcgcttcattccaattttttggccccttccgtcgtcgttttcgaacttttccctcctccgccgagcaccttcttccgctggatgaacatgtacctgaaaaagcagaattcacattttttaaaaagattaaattcacaattaaattacccgtaaagttttggaaaacccggcaaataaatgagacacagagcgatgataatgtagtaaaagttgaagctcatgttccacgaattgggctaaagccaaaaaagataatgtgaattaataaataaacaaatataaaagcaaagaattcttattttgaggacaataaataatttctagagcccgacctgcggacccacgcctgggcttttccagtccatttttcaacaatttgaattttgtccgggaaatccagttccaacagggaatccgggtccatgcttttttcaaaagcgtttgctgaccatttcaattgtaaaatgtttgcgtcgtgcaatttcgcccaatgcggcgaccattgtcagcacttctccgccggcacccatcggataaagcgcaatgaaaaaagtgtacctgaaaggacagatgggatgtaattcggataaatataaaacttaagaaggcagaattttatggaatttattcaattttttttttaaatggccaaatgtgagcaaaatcaaccatagttaggcattcttggaaaaacagaaacattctaaggagttcgcaaaatggcgtaccttttgccccccccatgtgaatggtccacgaaattacggcattttttttttttttttgctttttaattcacacctcatccacgtcaatgcgtagggcacagcgttcagcaaattgagcgcatagaacgaatagcggacaacttcagtgatggaccaggcgagcaaaagcattggcacaccaaaactgagacgggcctaaaatgggaaataaattgaaaaaccaaaagggctcttatgcagtttcatccccacaatttttccccacttttttcaaaattaaaaacgccaattttttgggggtttcatggnccgctgcccacgaatccgacattcatcttgaccacttttttctcaagattcgtgtttttttctgttattctcctcattcgttacgaatttcgcgcattcgaaaatggtcaaagatggatgcctaattcgtgatcagtggccatgaaaacccaaaaattggcattataaacatgtggtgggggtgaagagccgaaaattaaatcaaaaatttgctttccccccccctccatcggtcactaattctttaaatgcaattgtaataaatcataccgaggcaactttgtgcaaaatcatccaaacaacagtgacacgggagaaaacctggacaaaaaaggattgatttatgagcagaaagtagcaattgctttgatgtatgaccgacacagaaataacgaaggaggaatttgggagaacggaggggtttgaacaaaaagagaaaatcataaattgccgaaatttaaaaaagatcatttttatcgaaaaatttctaaaatttttcgaaaaattattccgaaaaattatcgacagtcacttagctgtacaatgaaaagattgaaaaccaatgacaacagggaacagttctttgaaaaattttgatggagaatatttggacaaaattttttttaaatgattaaaaaattcttacgaaattgcaaattattacttttttaggctcaattccactatttgtgctataaatttgtttctggggccttaagcaaaaaaaaaagtgccgacaacaaaacaataaacgaattaattcccagcatttcttggcattggaagccaaatgctggtaattgtaagcttacctggacaattgtggtgaacaccggcgaacggaccaaaccgacgacactgtgaacaatctgaaaaacaaacagaagaaataattggtgccaaagtcaatgcaaaaagccgacagaacccccaaaagcggtaaatgccaaccctcacattttcactgagaaaactcacttccaaaatggcagccgtttggaagattttcaattccatctccacgttttggtacagttcgggaaaggagtgtccgctggccaaccaaagcacagtcttcacaagaatggaaccccatcttgaaaagggattaattacttcaaatttaggattgccaatttttaatgataaaacttttaaacaaaaggcaagaaaaccaaaacagaaatcacaggcaaaggatgggaaaaaagaattggaaaaggcaaaaaaaatttcttccagactgaatgttttgaccaaaatattaattttttaaatttaaataaaaacaaaccccaaaaattggatggcattgtacgccagcaaataaacatctcctggtttcatgtttcaattaaattataaagtatataaaatcgtaattatacaaatattattctaaagatgtaataattaactaattgatacatgtcaatttctgatagaacagcaacgacacaaaagtgaagcgcaacgaattttgggctcctaggaaaaccccaaaaaaaagacataagcaggaggngatctgtgttgaaaaccagctagctaacttattgttttagtattttaatgatttttcttaaagtcttttcactttttttaaaaagga

SEQ ID NO: 2186 - DNA, 3847 bp, Heterodera glycines
gagaatgaaagagcgtacggagtcacaaccgtcgtattgtgatttctaaaaatatgcaattcgtcccaattttccatgatatcatagatagcggcattagccctctctcatttaatcacctttcttaccccccccccccccccttgagtttaacccattttaccccctttttgagttttggcaatattttaagaggaattcgataaaattttgaaatatttaatatttggcatttgttttcgtatttttaactaaattttcttacaaaatcgactaaaaacacaaaaaattttcccggcggcgcctgtcggcgtcgtcgtacataaaaattcctttaaaaattttaattgttaccttaaaatctagaaaaatgcccattttttgttaaagttttgtgaacaaataccactttaaattctatttttcccctatggcgccaagcccatcccctattttttaaaaactgtacgcaaaatttcaaccaggaagttactttttggacaaaatttttttggtcaaatctggccaaaaaaaagttatttggacaattttttagctatttataggcttttttactcaaatgccatctttttgtgtgctgacgccccacttttttttacccttatggtgggttgtcgcccctttttgatgttatgctatatataccctgtattcaacataaattaatatgtattcttctctagaatctattgtttttcttctctagaatacatttttttaacatttccgtgttttcattaattctttataagctttatttttgatactgtgtgctgaggtgcgtgacgtcaataggctcctggcttttatttaaataataactaaaaacgaaaacaaagatattaataaattgaatttttgtaatagatttgtatacaataccgcgctggaataaaaaatacgatcaaactcctaccaatctcaataacgtagtaaaaaataacgtttttttaattcatgtaatttttaaaaataatcatataaataacagtttatttgagcataaaataaagttttaataataattgttgtgaaatcttttaataacattgtctttttaatctacaaagacaccaatgttaaaaaatttaagatttccaaccgtaaaatgaaacgctctgcttctgcttcttcgaaaaaacaactgattgataaaaaatatttaattaatgttattgacgacattttttgcttcttttatgccttggaattgatgcgctactactcattacacaaacgtggaataattaccgaaaagcgatggcgatggattaacaacaaccaaacaacggttttacgacaaaaggtgctgcaactactccgcgatgccgggattccgacaactgaaccgaattacgaccctaaaatatatatacatcaagtgcaaggcctttggagcgtcaaatatccaggcgaatacaaaatattcattttcaacgactaccagacacggcctattattaaatcagatgtagtagactaccaattcccaattctactctaccacaaaaacaaccacttcgacgggattaaaaccatctccaaatttttcaacaaacattactattgtctctcttgtgaagctccgtatgactctaaatcaacacatacaatgaaatgcacttctttatgtctcggctgccgggaggtgggggtcgactatccttgtgaaactcaacagggatactacaaaaaatgtgaatactgcgtcaatatattctacaactacaattgttatgagcgccatcttcaaaaagacttgtgcaccaaattccaacgctgtgaagattgtggggtcatttacaacattaacgttcatggtagagaaggaagaaatgcgcaccaatgcggagagaaattttgtaaactttgcaagcaatttcacgtaaaggacgacgacgagatgaacccctgcagtagctgcttcatacaaccgctgaaacaacataaaatcaaaccgtaccgaatcatagcatacgactttgaggccacgcaggacaagaaggtggagaacaaattcgaacacgaggtcaacttcgcagcggctaccatcatctgcaccgattgtatcaacaatagcagttggaactactctctgaaagggaaaaactgtgcgatttgtggcccccaccgcacaataacattttcgccttttgactacactaaaacaacaatcgacaaaaaaatcgtcacacaaaaaccactgcgcgaattcgttcactggttattcgttgaacacaacaaaaagtttccaacagtcgcctttgcacactttggtggccgttatgatataacattgtacatcaaggaaattattaaacaaggtaataaatttttaataaataattatttagtttattcatataggaatgcgtaatcctcaaatcatcaaacaaggcaaccgaatttatgaacttaaattaaaagaaaatgattgcggacctctcacgattctgcgcgacagctacaatcatatgcccatcaaattatctggcttaatcaaatcgttcggacttaaaattcaggtgattaatagtacattttttaaactataattatcaacactttaaaacaaaaaaaatttgcaaaagtttaggtaatcattttctttgtacaaaaaaatttctttgacaataatttattactagggttggagaaagtatggatttctatatttttctgggtgtttattttaggctaataaacatataatagtatttgtagtttagtttgaaggttctaggacatattttttatttccatattccatatttttgtcaatatttcacagttttgtccatattttatccatatttcaacattttttttcggaaagtatctaaaaaaattcccaacttaatcaattttttcaattttcaaaatgcataatttcttaataatgccaaaaaaaacgtcaaaatagcactaaaacctcgagatgtatttgatctgtcaacaagagaaggaaaattattgattttatgattaaaaataaatgtttttatgtaattttacccatgaattttacataaatattttggcaatttcgtccatatttttagagttcttcgtccatataatccatatttttaatcgtttttgtaatccaggaaaagcttgagatgttttgatctgtctataagagaagaaaaaaagttaattattttattgaaataaatatttaaaatgagtctacttgtccatatttcttagaactctatttattacttatattaatgcataaaaaattttttgatctaaatataattttaggataaacagtacttcccacatatgttcaacaaatcggctaactacttcaacgtcctaccacacctccctccacgtgaagactactgtcctgatcaaatgaaaaaagccgatttacagaaatttgataattggtataactacaatcgcagtcaaccattcgaccttaaagagaaactacctgaatactgctgcaatgacgtccaaatccttacccacgccctcgtcgaactacgccgggaattcaaacaacttacacaaagggacggaaaacacggtggaatcgacattttgtggcaagccatgaccatcgccagtgcctgcgtcaaaatttttgccctcaatcatctaaagcccaactcacttgccatcgtcccggagaaaggctacacccctcaacaaaatcaaagcgcactcgccgtcaaatacctcgactggtactcccacatcaacaatgtcaatatccagacggcacactctcggtacggcgaatatgtctttaaacgcgaaggggaggtttaccaagtcgacggatacatcaaaggcacgaatggaa

SEQ ID NO: 2187 - DNA, 2766 bp, Heterodera glycines
  unsure (1)..(2766): unsure at all n locations
acaacaaaaaaatcgaagtttcgggcgtcgaggaaatggatgaagaaaacgaggtgtatctgataagctacaaagagaaggaagaatttgtcgaggaaaataaatattctaatgttgtcatctccctctttacaacatctgcagcacgactacatctctatggaattttaaagaaagtggcagacacaccgaaatgtgaagttctatattttgatacggtaatttgacaatttaaaaaatatttaaattttatgaatttttattttaggacagtatcatctacgtccatcctgaggacaacgaccctctgccaaccggaaagggccacctcggtgagctgaccgacgagaaaccggaccacgacattttggaattcatcagcgcagggtgtaagaactacgggatgaaggtgagacgaaaggaaaccggtgaaattgaatatgacttaaaaataagagggttcaccctcgatgaaaaaacaacacaacgtattcattatgatagtgttaaaaaccaaataatcaaatatgtatctggctcacccgcatcaccaatttctgtcaattacccccattccattcgccctaatttgattcaaggcaaagtgtttacccaatccctcactaaactttatcaaccctctttcactaaaggaattgtaaataattcttatcatgttcatgattatggctatcgcaaataattgtctattttttcattttatttgtaagagaattaatttcaaaatattaaaaaattaattctcatttgttttgattctcgtttggtttgtgtatctaatttttattgtttgccttctatgtacaaaaatataaatatgtttgctcagagatacgaaacttagacttgggtgtagtaaagtatttaaagaaattgaaaaggaaaaaaacaatatgtttgctcagagatacgaaacttagacttgggtgtagtaaagtatttaaagaaattgaaaaggaaaaaaacttaggaagatatataataaaaaatgaaacggtctacgagaaattcgtcaaaaaaagaaaataaaaaatcccgaagttcggattcgctaagacaagaaaaacaacaagaaaaaagtcaaaattgtatcaaaaaaatagatgaatatacaactagtagtaaaaagtttcaactattaaggtcaaaatcaaaatttgtcgttcaaaatatagaccaatgtgataatcccactaaggagttagaagaatgtataaaatcgtcaattaatgaagctatcgaagatgctaagagaactttgggtggcgcggataaagccggagtagttatttcttcagaaatgttagatcaaggagacataattgtgccgataacacctattagctcaaatgtggcatacgcggtcttcaatcaatttatcaaagtagaacaaagtgtagcaagaaaaagtcttaacatttatggaacaccttttgtcattactgtaacagttcttaacattaatggattaagaaaaaataaagaataaattattgtttttttttaaatttataaaaaatgtgaataaaatattaaaaaatttaatggtgtattttattaaaaaccctagagaaaccggaataaaaaacatctttaagattagttggtgaccataaacttgtttgtcatgcatttgtggatttatatttatgggtttcgacattgggctagatatggtaacgctatatttgtgacacttgtgtacactaaatttgggggaccagacacttgggggtggggccgtgactcgacacttggggaccatacagttggggaccctacactttgggatcgtacagttggggaccctacgttaagggacccgacaattggggacctatacatttgggggaccgtacatttgagggtttatcatttgatgacttgactcttggtgacccgacatttggagatttcaaacagaaaaaataaaaatgatattacactttaggtgggacagctcatctttagaaaatgacaaaaaaatacaataatcattgaaaaattgactcacatccttagaaaatatcgtaattttcaatccaattttaaaaatactccgacacccattttttttcatgtaaaataaccaacatccccaggaaatacgataaaaaccaatgatttattcgaaattcaccccggtaattaattaacaaaaaatcatttgcagtcaagggggctcgaacttaggggccgaaatcttctggactaactacttgttttgttaccccaccccaaaatttaaatcgattccaaagtccatttcacctagtttcaacattaaaaaacggacatggacaagccagtcgacgagaatttgccgcattcgtccgtcaatggttttgtgcacggacagaaagtcgaagtccagcggggtgcgtctttcgagttgtcgcaagtagaggtcaacgtcgtcggcgtattcagcggggaacaatgttgcgccaccaccgaatttcaaggaggacaccggtttctcaatgtcatggtgttgaggctaaaagactgggaaatgacacgtgctaattggttgtttttttatttaatctccaaaactaatttttcaaattctttcaccaaacctcggcctttgcgatcttctccggaatgtttgattcattgccgctgagtactgtcgaatgcttttcgaattcggttcatttgtttttgtgggttaagtgttgaaggtccacggaaaatgcaagagaataaagaactttattgatttgaaaaaatgnggga

SEQ ID NO: 2188 - DNA, 4147 bp, Heterodera glycines
  unsure (1)..(4147): unsure at all n locations
tttcncggattcccataataatgccgtggctttgataggagttgtacatttgataaccgcggcattgaattttctagggttatacttaaattcgcattcggtgatcgtcagagagtttagtttaattccggtaccgagattagcgagagcaattatatttacgattatcggtttttgcatttttgatacaatgtatcaatcaaatggtcctttcactccctttatataccccttctataaatagcaacccaaaataaaattaaattgaaaaatgaactgcccacataaaattaagtgttgtcattactgtccctgtcattacgagatttgtagcaggtgtaaaaagcacagtcttttgcatttcggtacatcattatttgataatttctggctatgccccaaatgcgcgaaacatgttccctatgaaaatataaataggtcaaataaataagaggaattaaaaatgtttcgcggtccgttcactctaattctctcgggggctaccgggagtggtaagacccgttggctattacggtttttaaaacaccataagaatctaattgaaccatcgcccaccaaaattctttattgttacggtgagatgaatgatagtattttaggattaatcggggagggtgtcgagacttttaacgggattccggacatgaataagattaaagaacaagaaaaacccctcttactgatacttgacgatttaatgcttaacatgcagaacaattttcttgatttactctttaccaggggctcccataattggaacgtaagcgtaatttttgtaacccagagtctctacggtcgggacattaaaacggcaagagctaacgcccattatctgattttaatgcgtaccccttcagggacattacaaagtggtttgatgagcaagctgatcagaatgtttcgtctgctgatcatagcaattcttcagatgatgaggatttctttaaaatttcgtgcaatttgttacagatttcgcccaaaaatgaataatttttgcgaattgggacaaaaaacttttttgattaaatctcttttttgcggcttgccttttacaaaatcttttgtggtacagggaggttaaattttgaaatttttagtgaaatttgttaacagattatgtccaaaaaatgaactataattggttaatttgtgggtttatggctgttgcaaaaataaagaaaaatattttttaaggttagaaaaagtttcttattaattaaatttcaattaaaataatttaaagaaaatataaaaatctcatattctaatgtggaattgaacccaagcgacaaataataaaagactagagtcttaaccactaggctacacatacatatgcacatttatttaattttttctaaaaaatttctcgtttcccaccaatttccttcaaaaattttcactcagacccccattcttaccagtgtacttttattcccgttttgagaaaaaagtaaataaggacataaataaggacacaaagattgaactgatcgaaaatttgataaaataagaaagaaaaaatttgtgggtttaaatatgacaaaaagaaaagaaacaaaattgagcacgaaattgccaatgaattgagagttcaattcaataaaatttaccagagaagaagtatttggtaagaaaataataaaaaaattaattatacttattatctcattgagatataattcaaatgaataaaaaacagaaaaatttgaacaatttgaaaatttccacgccaataataaccaagtcttaaaacttatgacggtatttagttttttggagttaggtatattattctacaacatttataaaagagaaagggaaattaacaatcatttttgaatttaaatcaattattcactcattaaaagttaataattatttaataattttcgcgtaaaaaattataagcaacatgttaatataaaaaatcaatactgatgcaattattggtgggggaaaatgaaaaaaatatttttaaaataatttttgtcaaatcataaaattaatatatgcagaaattctaaataatttaattttgaaaatactttgactcaaaaaatgttgaaaattatttttgagattattttcttcttattcattatcgtactaattgatggaattgatgaagatttatttgatgatttgtggaaaaatcttaagccatcaacctcaaaaaaagtttggcacatggcgaactgttgcaaattctctctgagccagtgccaaaaatggaaatttttgcaatttttttttgcggtgtgtaaaattttatttgtgggccaaaactctttcctcaaccgagtaatatttcttaaatttaccatatataaaattttttggaattccataattgtttttcaagggtttactatacggaaacggaaatttacatgtaaatgaaattattttttaatcaattatttacgattaaaaacaagataaattgcaattaatttgataatttctactttatgaaaaaattttttttataaattacataatatatatatatctatctataataaatataagctgaaaacaaaaatcatttgatttttttgactcaaaaaaatggaaattaattttgtaattattttcatcttatttctaatcgtactaattgacggaattgatgaagatttgtttaatgatttgtggaaaaatcttaagccatcgacctcaaaaaacatcaaaaaaccgatatttggagaaattaatgcgataaaggaagaaatagttgttaaaaatgaaaatgatgaacaaggaaatgccaatcaaattgaaacggaagacataaagccaaaattattacaaaagattaaaaaggaaaaaacattggaagaacaaactaataatttaaaaataaaaataaaaatgccaaaaattgaattggacaaattgagcgaagaatcatttggaaatgagtttaatgaggaagctgatcagaatgtttcgtctgctgatcacaacgattctgttgatgaagcgtattataatattatggtaattcaacaatcctgtaaaaaattatttaaaaattcattggttctaagttttgcatttctaaaaattttaatgatttaattaggagtctgaaacaagaaatgaaatggaaattttgaataaatttaatttaatcaaaacggaattgcgaaaagaaagtgtttataaaaatttgacaaatgttcaatttgagtgcgaaattgcgaaaaaattgggcacaaatcgaaacaaaatttctaaattgaagaaaaaattaggacaaaaaagagagaagagaacggaggaaagtgaagaaacaaaaatggaactgattagaaaatttgatcaaatgagaaaagaaaaaatttgtgggcttaaatatgacgagaagaaaagatcagtaattgaacgtgaaattgctaaagaattgggaacaaatcggaataaaatttataaattgaagaaaaaattaggacaaaaaagagagaagagaacggaggaaagtgaagaaacaaaaatggaactgattagaaaatttgatcaaatgagaaaagaaaaaatttgtgggcttaaatatgacgagaagaaaagatcagtaattgaacgtgaaattgctaatgaattgggaattaatcgtcataaaatttaccaatggaagaggaaatttggtaaaaaaaaacaataacaaattcactttatacttactgtctcattaaggtataataaagaaatttttatttacaaacgaagaaaaaatggaaaaacttgagcaatttgaaagaataaaagaagaatttaaaaaaaaattcaatttcgaacccaatagaaaaattgaatcaaaaatagcggaaaaaattggggttgtgtttgtaacaatttttaaatggaagaaaaaattcggtttaaccactcgtaatattttaattatttatatttaaaaaaaataaattaaattgcttttattttaaggaaagtccaaaatttattcggatgctgaaaaattggaatatgtgaaaagaagtgaggaaatgacagaaagaaaaccaatgatatgtgagaaaaaaattgccgaaactttgggcattccatataccaacttaaaacgatggatgaagaaattttgcagcaaatagattcatta

SEQ ID NO: 2189 - DNA, 3417 bp, Heterodera glycines
aggacaagaaaagaatgaagttgatgcctcatgaaactcgtgaattggttatgttttgtcgaaaatatccttacataatactcataaaaaatacaaataattcaacccacctattctatgaccacattctgaaaaaaatcccagaaatacgaggaaagatatgcttggtcacaataaaataaaaaatggctagtatgtaaaaatttgcggtcacaaataaaataaaaaatggctaatatgtaaaattggcgtccagaaatttttagactaatccgaagcaaagcacgaatgaattaaagaggcgaaagaattcacagtatcgtttctaatagggaaatattgacagaatattcggctaaaaacgggtttgatcatttttagcgcatttttaaaatgccgatgagtcgggttgccgctcgctgagctcgccgaccgtgctgccgcgtctgtcgtctgacccgttgaaccccgagttcgaggcgttcggcaacaagctctcggtcttctcgtgtccatggtcggccggcgatgaagaacgctagtcgtagaggccaggagaggaggagtgcggtgagtcggtagccgagatttaacaccacccgggcagaggagcagaaacagacgacccacccgatcagacaactgatcaacgacccggtgatgaagagcaagaccagggagagccgggggttacatctccaattagcaagctgatcgacgcagagggagcaacctatcaattcgcattcgtctatggctgggcaggcgatttcggcggtgcaactatgggtcgatgaaaggccgaaagttgcggaacagccgtaatcgttgacgataagatcggagggcagttcgtaattgatgttagacgcggctaaccgatcgaaacacgagttggagcagcagatcgttatcttttggacgacgggattagaggaaattttgacgcctcgtcgagtgcagttaagatggtttccgacacaatcggatttgggggttgattcggtatggtctgggtcaaatggccaaatcccgtgtgctggggaggcttgggcccacactaaaatgatggaaatgatggtgatcatcattgtggttggagcaatcccgagaagtcgcgccttgcgtcgtgtaagcatgccggggaggatccttggttctccggaaggtggtgggacaggcggcatctcttgcgcgtgcgattcggcggttttagggtctttgccgctttgatcagtcgggatagacacggtggcgtccggggcgggttccgggatctggttttcggtctccaaagggcaaagacggctgattggtcgcgtgacggtttgtccatttggcattcgcaactggacgcttctcacgttagggagtgagccgtttagtgcaacgacgatgcccatcggccataaattccggggcggaggtcctcttcgacgatgaccaattggccgatgtggggggcggtgggagttcgaaggcggggacctttatgagtccatccggcgcgctctctgatggcgaggaggtactcgtgactccatttgagccagaaatggtcggcggcctcccggtaagctttccaaagtgctgcgagacgcgcgggaccggagaggcaatcgtcgtagtcgagatcagagtcgacgatctccaagtcgttggggaggccgggctggataaggtctttcggagtgaggggcttcgatgagtccggttgatctgacacccatgtgatcgggcggctgttgacgctggcctcaatttcggcaaggaatgcgctcaaatcgtcgtagtcgagaattcgtcgaccgatcgtccttttgatgcaggatttgacgaggccgattagtcgctcgtagcaagcccccatccatggactataggcgggaatgaagtcccactggatgcctcggcgcgcggcaaaggtgacggcgtcggtttcgggcggagggccggtcagaatgtcgagagccttgctcgtttgaacgaatgtcggggcgttgtcactcagaattcgctttggtcggccgcgccgactgatgaaccgtcgtaagacattgatgaagctcggggctgacagatcggtggttgcctctagatatactgcccgggtgacaaaacaggtgacgatgaccaagtaggtcttggcgagcgatccgtcgcttagtcgagatgaggtaggcccagcaaagtcgaggccgacgaattcaaagggattagccggtttgacgcgcatagagggcaaagggggcatggttggcctcgcaaaagggggtgccgtgattcgccggcaggacgggcaacctcggaggataccacgaatggttcgtcgtgcttgaggcatccaataacggccaaggaactcagtcagagtccagtcaacgccggcgtgtctgaggtcggcgtggatttcttggacaattagccgagtcagggatgagtggcggtcgagaaggacgggagaggcgagagtgggcggaccgttcgcgtgcaagagccgggttttgaggcacaaaaggccatcctcattgaaaacagtggggtgtttgtcgtagccgtcgagcgagcttcgttggtcttgtcggatgaggaaagtcctggctgctctgaacgaatcgcccgtcggagggccaccccgtgggattgacgaggtgccgattttgagccattttggtcgacgacgcccgatgaattggaggacgagaatggtcgttccgagaagggtcagcatagtactgaaacgagccggatcaatgaggggagggggcagcggactttgtttggccatgagggtcttggtctccgatttttcaaacgggggatcggcagaaggggagtcggctggcgttgcgaacgttaactcgtcgggccattccgtttccggattcgtgagccactccggccctttccaccacatttgacgagtgcagagctcggccggagtacagcctctcgtcgctatgtcagcgggattttggtcggttctgacgaaatggaaggtggtggttggtccttgccgaatctcgacgagtcgtcgctgttcgaattgagctttgggctcctcggacttcacccatgagagggcaatttgggagtcggaccataaatgtcgctcttcgatcggacggcggagctctttctcggcgaaacgcatggcgcggatgccgacgaggattgcgaggagttcgagccgagggatggtgaagcgctggtttgctgttcgtggccggaggcggtttttggcgaaaattaggttcgcttgggagttgtcagcagtctcgcttcggatgtagacggcagcggcaaaggtgtgttcggaagcgtcgcaaaacacgtggagttgcaggcggctttgcttgtcgagaatggaatgccgcgggaccacaatcgtttggttttgcccataaggacagggtt

SEQ ID NO: 2190 - DNA, 6997 bp, Heterodera glycines
ttttagggtctttgccgctttgatcagtcgggatagacacggtggcgtccggggcgggttccgggatctggttttcggtctccaaagggcaaagacggctgattggtcgcgtgacggtttgtccatttggcattcgcaactggacgcttctcacgttagggggtgagccgtttagtgcaacgacgatgcccatcggccataaattccgggggcggaggtcctcttcgacgatgaccacttggccgatgcggggggcggtgggagttcgaaggcggggacctttatgagtccatccggcgcgctctctgatggcgaggaggtactcatgactccatttgagccagaaatggtcggcggcctcccggtaagctttccaaagtgctgcgagacgcgcgggaccggagaggcaatcgtcgtagtcgagatcagagtcgacgatctccaagtcgttggggaggccgggctggataaggtctttcggagtgaggggcttcgatgagtccggttgatctgacacccatgtgatcgggcggctgttgacgctggcctcaatttcggcaaggaatgcgctcaaatcgtcgtagtcgagaattcgtcgaccgatcgtccttttgatgcaggatttgacgaggccgattagtcgctcgtagcaagcccccatccatggactataggcgggaatgaagtcccattggatgcctcggcgcgcggcaaaggtgacggcgtcggtttcggacggagggccggtcagaatgtcgagagccttgctcgtttgaacgaatgtcggggcgttgtcactcagaattcgctttggtcggccgcgacgactgatgaatcgtcgtaagacattgatgaagctcggggctgacagatcggtggttgcctctagatatactgcccgggtgacaaaacaggtgacgatgaccaagtaggtcttggtgagcgatccgtcgcttagtcgagaggaggtaggcccagcaaagtcgagaccgacgaattcaaagggattagccggtttgacgcgcatagagggcaaagggggcattgttggcctcgcaaaagggggtgccgtgattcgccggcaggacgggcaacctcggaggataccacgaatggttcgtcgtgcttgaggcatccaataacggccaaggaactcagtcagagtccagtcaacgccggcgtgtctgaggtcggcgtggatttcttggacaattagccgagtcagagatgagtggcggtcgagaaggacgggagaggcgagagtgggcggaccgttcgcgtgcaggagccgggttttgaggcacaaaaggccatcctcattgaaaacagtggggtgtttgtcgtagccgtcgagcgagcttcgttggtcttgtcggatgaggaaagtcctggctgctctgaacgaatcgcccgtcggagggccactccgtgggattgacgaggtgccgattttgagccattttggtcgacgacgcccgatgaattggaggacgagaatggtcgttccgagaagggtcaggatagtgctgaaacgagccggatcaatgaggggagggggcagcggactttgtttggccatgagggtcttggtctccgatttttcaaacgggggatcggcggaaggggagtcggctggcgttgcgaacgttaactcgtcgggccattccgtttccggactcgtgagccactcaggccctttccaccacatgtagcgagttcggagctccgccggtgtgcagcctctcgtggctacgtcggcgggattttggtcggttctgatgaaatgaaaagtggtgggcggcccttgtcggatctcgacgagtcttcgctgttcaaactgggctttgggttcgtcggacttcacccatgagagggcaatttgggagtcggaccataagtgccgctcgtcgatcggacgtcggagctctttctcggcgaagcgcatggcgcgaattccgacgagaatggcgaggagttcgagtcgagggatggtgaagcgctggttcgcggttcgtggccggaggcggtttttggcgaagattaggttcgcttcggagctatcggcagcctcgcttcggatgtagacggcagcggcgaatgtgtgctcggacgcgtcgcaaaacacgtggagttggaggcggctttggttgccgagaatggagtgtcgagggacgaaaattgtttggtcttgccagagggagagggtttggctccaagtttgcgcctcggtgtcggggaggggggcgtcccaggcggttccttctccccatagccgttggaaaagccgtttggcgggcagaagacatggcccgacgagtccgagcgggtcgaacgtgctggcgatgatgctcaggactgagcgccttgtagcagtggcgtctgtgtcttttgggagactgaaagtgatgcggtcgcttagggtgtcccacgtcaggcccaaaactttggccggtgttttgtcgagtcggtcgtcctcgggaatttgcttcatgacgtttggggagtggctgaggaactccctgaggttcatgtcggcgtctttgaggatttgtttggcgatggacgacttgtcgattgcttcctcctccgtctcgcactcgatgaggagattgtcgacgtacatattcgcggccaacgcttgggcgaatgggtgctcgtgcttgtcgaagtgttggaggagaacagcggcgaggataaagggggaacatgtcgcgccgaaaactagccgtttgtagcggtagatcaagagattgtcgcctgagacgggacgggcagggtttttcagccaaagcattttgcagaagcgcctgtcctcgggttcgacttcgatggcatgaaaggcgccctgaacgtcggccaacacaggaattgtcgctgaacggaagcggaggagaatcccgcaaaggtcggggagcaacactggcccgcggtgaagacagtcgttgaggcttggggtgcccttggcacgagcactggcgtcaatgacgatccgcagtttctttggattgatgacggcgtggtgaggcaagaaatgctcgtcgttgtctcgcccggtcaactcaataatgtcggcgtccatttgccgtgtcagttcggcggagtaacggtcgagaagctcaggagagcattgcagacgcttggtcgttgagaggagccggcgatatgcgatggcccaattcgaggggaggggaggccgaggttcccgccaagtgaggcgaacggagtaacggccagacggcaattggcggacggtattgccaaattgctgcatggcaacttggtcgtcgttctgattggggtcgtcggtgattccaatcgcctcgagactccaaaagtcattgacggcgcgggatgaggggaacgactcgacgttactggggtgggacgtcagcatggcaattgtcggggtgtgccgtggggtctcgggaaactccgcttcaccaccaaccattgggccgaaaattgtttggatgaggtgaagcccggagtgaagcgttgaacggccaataaagaattgccaaaattcccggatgccgatcaaaatgtccggcgccttttcgacgaccttgaggacggcatttggggggaggggtccatcggtggtgtcccactggagggccttgattttggtcgtgatctcgtcgattacgttgagctcgagggtctcccagcctccgtccaggcgctgcagttgaatggcgaattttgctgatcggacggtcttagggcgggagtctccgaaggtgtgaattcggaggaggtgctctgagagtcgagggggtcggagcttctctgtcattgcccggcttatgtagccggactggctgccagggtcgtggaagacaaaagcaggaattccgtcgggtgggcccccttggcatgacgccttaagggtctgagtcatcaaatgagctactctcgtcgatttggggacgggaaaactgccgctgtcgacggggagggggtcaaaggcggcggcgcataccgcctcgggaatgctttcgccctcgtcgcacacgagcagtgcggttgtggtgggagtcgctctcggtcggaccggttcggcgttggctcccgtggcacgactgacgttgcgggacgcatttccattccgctcttgattctcttgtcgatggttggttcgccccggggggtcgattgacgggcagaggaggaagtgatggtcgttcgcctgacatttcgaacatcgatcttgacgagagcaatcgcgagtgacgtggtcttgacggaggcaacgcaggcagcgcccctgttcctcaagtcgtcgccggcgttgaatgacggtggtgtatcgctggcacgcactcggacggtgtccctcctgctcacaaagggagcaactgatgccattggcagagacgggttgggcgagagcaggaaaggcccgagtgttctccaaataacgtcgctccggcgctggtggtcgaaaagaacgaccacccggacgagagggggcccgttcgggaggacgttcgcggggctggatgtccatgtcctggaatgtgcggacgcacaagtccacctgctctttgtcggtgacgattgtcgcaaatccctcacgccaatttcgagccgtccaggaagtgtagctctcgcgctccattcggatcaggtcaagcagtactggtggtggaagtttgcttttgatgagattggtgaccagcgagctgttggcgattggcgagagctccccctcgggctcgaggctgcaaagttgggtgcagatccgctcgatctcttgctggagttggcgcaactccttgaggttgttccgggcaggtttgaggtggagaagctgggcattgagttggtctcgtcggttgccgacgtcgccgtagcggtctcgtagaatgctcacgactgtgctgtaattggcgtctgacggtgggtaaccttcaatcatccgtcgtggtggcgatcccttctcgaggtactgtaggaggaggaggtgcttttggaaggcggggtattggcgtgagtggacggcaaagtcaaaggcggcccaaaatgtgatccattcttctgccgatccgctgaacctcgggatttcgattcggctgacccgaagtgcgtcgtcgtcattggtcgactgtcggaagtggccatggtgaggttccgatcgatgggtggggcgattcgatgctcggggaaatgtgagattaagcgggaatgccggggttcgctggttgaataggttttgatcggctcgagccgaattggacggctgatgtgcattcgctggctgtgcctgagtcggtgggtcggtggattgccgttggcggtggatccggttttcgtcgtcggccccgtgatcagaaacacgactgctgctgcgagaagagatggcgtccgtcgtgtcgaatcgagcctcgatgtagacttggaggccgtcgaggatgagctgggctttagagagaagagtgatgactggccattcttcgacatttgggtcggcttgctcgtcgtcgaaggtcgggagtgcggccaggaggtcctcctccgcctgcttcagaaacgggtcgcctagcagctgaatatggtcaaaacattctcgtagcatgccattgacgcggtcgatgcttctctgtagcaattgtcggtcagttcgtacgcccttggcgagtttggtctcctcggcgagcgggatttcctctggcgccatcctggtgaattcagtgagcctcccgaccctttgtcggaggcgcttgacgaggtccgaaagggttcggacttcggcggtgagacgttgacgaatgagttccgacatttccgaaagtctaggattggcggctggacgcaagagtcgggcttggttggtcgagagcctagagaaggcggctgtcggttggtgggttgagtggagattagccgagagcccgagagggacggctgacgataagagttgagtggtgaaagccgggagccttaaaaggacggctgacgactcaattgagggcttgtcggaagcctaaaggggggctggcgacaaagagttgagtgatgaaagccgggagcctgaaagggcggctggcggctgagagaagagtgatgaatggtcgaaagcctgaaatgggcggctgacaactcggtgagggtttgtcgggagcctaagagggggcggctggcgacttgagttgagtgatgagtgccggaggcctaagatggtcggcgtacagcgaagggttgagttgccgggagcctaaagggtcggctggcggcagagagaagagtgatggatggtcgaaagtgaattgaagggtgaagggtttgtgttcccgggtcgtggcaccaaaaagtttgtcgaggaaggggggggacaaactggggggatggaagggaaggaggagattcgagactcgctcaaaagagcggcgacgcagattggcgatggagaaggcgagagaaagggtgtgccgctcgttcgattttgggggggtttctcgccgtctgtgtccacatttcccgtgtttcccgacccctacccaaaggcacctctttcaacaacaatttatttgaagcaaaaaaagggggaggaggcggttaggattaaaaaattgacgcagagcaaggcaacggttggaaaaaaaggagtgattatatgatgtggaagtgaagccccccgggggagacagaaacacttaaatagaccaacagaacggggagggagcaaagtattatgagatgggccgtgattatgcaaaaaagaaaggaaaaagggtgcgagcagcagatgccaacgaaagttgtccaatgaatacaaagagaaagaaaaagggaacaaagggacgaaatcggagagagaaggcgaagagaaatcggtgcagattttgaatggacggaggatggcgggtgaattagcacaaaggggggaaagaattggcaaactagaagagggggaaacggttggggtgaaggacagagaagaatggggggggggacgttaggaaagagaaaaaacattcaaaattaggaggaa

SEQ ID NO: 2191 - DNA, 1824 bp, Heterodera glycines
  unsure (1)..(1824): unsure at all n locations
accaaagtcaattatgatctttcttgcccacaaatgtaccaaatgctcatttccaatcacaaattgtcagagaaaataggcggatgggaaaaatacttttgatgatcaattttaattgtttttacgctaataaaatattgttttaagtcaatttttcatgtttttattgcgtttccttcacgcaaatattagttttagaaaaatcttatttttggggtcagaatcttagtttttgggtcattttgtcttattttgaaaaaaaaaacttgggaactctgttttatatccatatttttaccagtcctacttataatccagtccttgtttcctgtttcttttttattttcttattaagaacaaagctcaaacgtaaaatgaattttgccgccatttttcatgagcttctgccggcttatccaatttctgttgtcttggtcattattatcgctgccatatttattgtcagccaatgcgccataggcggtaagaaggaacgcatcgaggcgagtttttgaccccattcgcccgcacaacccaattaaacttggtttttcaggaagtccgcgcaccagtcggcttgggagggggatctcccccgtacgtaattccgggtgagtggttaattagagtgagggatgcgcactgtgccccccagaccaaccgcaccgtctatcccggatggaacatgggagggaatggggaaagccatggccagtgactaagccccaaaatcccaacgactcattgactgtcgatatatttattcactcgttgttggatttacacgaagcgagaaaaggaataataattgaagtctgttccatcacaactaactgactaactgatcactgggggaaggagaaatgcgaagagaatgggcggagaaacattacagcgagaaaagaaacgtgtgaacggataaaatgtgattgaattgataatggccaatgggaaataattaagaaataattaaatgagggaaatgcgtcgaataacccttacaacttcccccttcccataggatcgtccccgatcctaaatgaaaaatgaaatgaaaatgaatgagacggatccaaactctcggcttcgcccttcgtctttccaatccgaacttcctcggcaagttgcgcattgcaataatgagcagcgcagtctaccttcatctcagatggatggcatgggaaatcgaagaaaagcaaccaggggtcattccggtttggggacgaaattaaaagcatgatgagaggaaagaaagaatggtccgagaaagtgtgaggaaaccgacgcattttaattaattttgagttttagggaattataaaaaaggccatttaacaattcgaaataaaaggaaaataaatgaatatttggaaaatgaattggacagtagagagagacaaagcagaaaatgaaattgataaaagatggggaaaggaaaagaaggaagtccatgcgcatttgtagttcatggctgaagtcgtacagcttggccttctttattcatctgcgcgcatcagaagttgaggcccgttcacgagtgccaccttgagagagataaggttagtatctgttctccgctcccttgacttaccagagttgttgcaccacacatttttaccatattttctgtaagtgcttttaccgtaccgcaccgctcttggctgagatcagctgttcattcctgtcgtaatagttgtctggattgttgaactgctcggtcgaagtactccgagccaaccattgtcgtctccgccgtcgcttggtacaatatcgtcgccacgtctcgggtccggntgagcagcaatcgccgaagatgatcattcc

SEQ ID NO: 2192 - DNA, 6928 bp, Heterodera glycines
cattgaaataatgagcagcgcagtccaccttcatctcagatgatgcatggaaatcgaagaaaagcaaccaggggtcattccggtttggggacgaaattaaaagcatgatgagaggaaagaaagaatgggtccgagaaagtgtgaggaaaccgacgcattttaattaattttgagtttgagggaattataaaaaaggccatttaacaattcgaaataaaaggaaaataaatgaatatttggaaaataaattggacagtagagagagacaaagcagaaaatgaaattgacaaaagatggggaaaggaaaagaaggaagtccatgcgcatttgtcgttcatggctgaagtcgtacagcttggccttctttattcatctgcgcgcaccagaagttgaagcccgttcacgagtgccaccttgagaaagataagattagtatctgttctccgcccccttgactcaccagagttgttgcaccacacatttttaccgtattagctgtaaaagagctttgaccgtactgcaccgcccttggccgagatcacctgtccatccttgtcttaatagttgccggggttgttgaactgctcggtcaagtactccgggccaaccattgtcgtctccgccgtcgcttggtccaaatatcgtcgccacgtctcggtccggttgagcagcagcacgtcgccgaagatgatcattctgtggctagcctctacttatgggttcaggctcagacttacaactgtccaagttcaagcagttcactttcactgctctcactttccacctcttcttccattcctccacttacccctttttctttttccacttcaacctattcctccttttctttttcacatcatccgtttccatcactatcgctaaaaacagcacatggagcgagttcgtttcactctcacaaacttttttttcaagcccgcaggcaaaggtttagaggcagaagaatcagaatgtttcgaaggagaaggctttttgcctaaaaatgaaaaacctaaatggaaaaactaaataaagatgggaagcggagggactggagatgttttttgggggaaattgcgaagttaagaaaaagataaagtggagaagaaaatgtttaaaataaagaatttttattatttggcatttaacctggtttttgtttggttaaaaatgaaaaaaaaataaatttcaggatttggatctggaaacaatgattacacctaaaagggacccaaaatgccaatgagaatcaaaggtcaagaaaaaaaaaattttccaattaattgtaattcgacccgttttctcaatttaccagttccagatttttaaataatcggaattattttccgttacaaataattcatcttcaacttacttttgctttatttcttgcccgcaggcaaaggagtttaagtgaattattggagttatttgtttttcgatagtttaagagaaaaaggtacatatatgagcaaaataaaagacagaaatgaaaatgaataactgtgaaaagaatttatgcaccgatcatggagaaaagggtgagacaatgtacacaaaactagtttaacagagagcagatgtaagcataaatggatgcaagagaaacgatttgagagacaaataaaataagtcaataaattggaatattttaattattattattttcgtttaaatttagacttaatactggcttttattttgttatttttccaaaacaaatattaaaaacctatgaaatataattattttatcaaaattattgttttcatatcgttaggatcgaatttaacgtaatgatgaacacttagaatattatttgcataatttggaacaaaatctcggccgacacgctatttaaaatagtactattatataattattggcgaaatgtatttaaattaaataatataattaagactgagtaccaagtaattattttattggctgtctatccttatttttagttaattttatgtgcttgtgcatttaaattatttttttaaaactttttgtcaattaaaaaatgttaaagggtgttgaaaaacatataaaccatcatttcagctttttctcggccgacatggtgtttgaaatagcggggattttacattaataaataatttatggcgtaatgtatttaataatatatacgattcaaaaaaacgtttgttgattgtaaacacaataaataatttgaatatttgctatgtaagctaattaaaataaaacattttttgcgatatttttatgcaaattttattaatatatttgtctaattcaattcttttttagcattgtatttttaaagtcgcaaaatctggaagtgagccgacaatttcaaaaatttcgttcgtcaaaattattgacaaattgcaacaattttaccaaatcaggtttattttttaattaactttttttccagcccttaggcttgggtaatgatttatgagagatgtagagagtaaaaaaaattgatttaaattaactgtttctcatcccttttttttgatacagcaacaaaattcgatttgtcgctggccagttggaccttggtaacaaaaagatgacgcgcctgtggacattcagtcgggcgctgcactgaaagatgcgacgtccgctttggtcggcatcggcgtaatattcgccgtcattagattgtacgaaaggcactataaactcaggtaaaatgcctaaaaattaagttttacggggaatgggaccaaaaaaaaaaaaatttataaaaagaaaaatgctgctaaatttcttgcgaatttcaggcaccacaaagcaatgaccgcttcctaaccaactcggactctccaaaatgtgtatccacataattctcttccagagcctctcagtttgctgctgtgcaattacagcgacattttgatgtgaaaatgatttttaagcgattataaaatttgatttgaaattctaccatttttgtgtttgattcaaatataacgtaaaaaaggcatatattcaagagcggaaaaaaactttgtaaattgaacgacccaaaagacttaaaacaataaaatgaaaataggagtactaaaaaggaaaaaaacaattttttttttgtttttttgctagagctatgtggggcaaaagcaatggggtgctagcgctctgaggggcaaaggcaatggggtgctagcgctccaaggggcaaaggcaatggggtgctagcgctccgagggccactatgtgtaagttggattaatcaaaataaaaaaaataaaatatgaaaaggaagaaaaattttggccctcaggcgggttatattgtaatgtttgactgagaaatagtaaagataattgggtctttaaatcaggtaaaatgcaattgtccggaaattcgagcaatcgcccaattttgtcagactaagaactttttcaaacattctttggtcacttcaaatttttgtatgcgttttttcctgcccacaggcatgggtgtattgggagtttttgataattaatgacattatttgagtataaacaaaatgattctaataacgtgttaaatattcatttccattagtgttcgagcgaattcggagtgtgctcacatttggaccatggctgagcttggtgttttggcccaccagcttggaataaagtggacattgaaaattagaagtgttattacctcttttttacaattatattttacaaaattcaaaatgaatgtgcaaaggagttgaatacaaaaaccatagcaaaattactaagataaatctctaaaaaggttcactaccgccactttgatttgtttctgacccgcaggtgagacattgctaatcactaatagtctctttaaattttatttgggcaatttctctatgacatcagaaccaacaattacattgtaatcctgggccccagtttgaattcggaatcattcacaaaaaaaaattaaataatgaattctaaatcaagcaatgttcaaattcacatgaacatatttcttaaagcgaagggcatggattgaataacttattacctacaaatcggtattagagcaccagtaaattgccagacttttgctatagacaaggagacatcggcagattaggcctaacagcagcagtgagtggcaaagtcattccaataagcattaatgaaattgcattaaggaggcgactttcgaacgcacatttggccgttcccagtttgctgttttaagacggtttgcttttgtttccggcccacaggcttgggattttttttgacagttcttcaccaacttgacacttttttacttccgtttcgggtttaatgtgtgtaagtgcattcattgctccggatctcggctcttcgtctttgtaattgcgacgctcctgaattttaagatctagcaaagcctgagccaagtttttgaaaaattcagctgaagcattcgaggaacttgggacatccatcatgttaacggaactctgcctattttgccattgtccttgcgattgctgtggctgttggttggaccatcttccttgactgaaattggcacggcgttgatagcagttgtaagccacatgtccaacgcggtcacaataatcgcatctgggattgcttgaccaatttctttgactaaattgttcttgatggctttctccccagttgcgagatcgattttgtccttctcctcccccttgttgctgggtttgttcatccgatcctgaaaaagaactgaatcctctgacattgttacctgatgcccactgtccagcaaagtcattgttcaggttcgcttctgtaaaccaacgggactgtgatgactgattgtttagcgcgttgactacgtcagagaggcgcactgtctcatcacccttgctcatcagcagtaaagcctccaactcctcagcttgtgctcttaccaagtccaaatcttttgctcgtgacaatcccaccaaacgaatgagaaagcttatatttggtttcaatctatccaaaaattcttcgcaaattttttcttttcgcgaattaccggtcaatgacgaatttgtcgcatccaccaacggagttaaacgcctcagaaattgtgccactgtctcatcttccctttgcttgcacaatgataatgttcgctttgtaatttcccgacgttgaggggagtccaatttccgtcgaagttcactcagtgctgtgtcgagagtgtccgtttgtgctggtaataattctttaaacaatgccagtggcgtgtccttcagagccaatttgagtctggtgactttttcgcgctcagtgtaagccttgcctgacacagaaaggtagtccttaaaacgttcagcccaatcgtcaaatgcaaaaactgactcttctctgaacatttccaaacctgaccctactgccggtccactcattagcatgttcaggccaaaaagagtcggcccgtcatcttcgtcttcgcttgacagttgctggattggcacttgattcggcatgagttggttgggctgtgcattgcccattggcatcacaaacggtgcgagcgatgctctgttttgattattaagactaaaagttccacctgaagtcgccccatcattgtcacgttccaaaatatcgactctttcggttagggtctcgaattgtaccttcagcgtttcaaaattggcatttgtattagccacaacatcattcacccaagtgactttttggtttaaggaacggttcaagtggcgaaaagctctattcactccatcttccaatttccccatgtcattttgaactttttctaagtcagaaatttttacagtgacctttccttgccaaagttttctatcaatagccgtaatcgaggactcatcatcctttccactcaaaaacatttttgtttcctgcccgaaggcttgggatgtaccgaaggagaactcatttgacgagccccctgatgtagacattcgaagtcgttcagttcgtaataagattttattattttgctaaaaaaattggtaatcccattatgcattaaggagaaaaaaaaattaatgaatgacagcggataaacgaatggatgcgaacgccttccaggaatggcttttatctgctccatctccgcttaaactccgcttaacgagagcaattaaacttctcaggcgctgcaaaagtgtgtaaagtaaaataatatcgctgactaaagtgcggcggcacgtgatcacgtgaatattcttatggcgtgagaaacgaaagaaaaatgaataaagtgaactttggaactctgaaaattgtaactcatacgataaacaaaataaatagggcctaattttcattttcagttggttcccttatttttagtcagttaaaatagcgcccctttgattggttaccagcccgggcttttttttgctttaccgaagcaaaagcgtgtgaaatggataaatgtgattgaattgataatggccaatggggattaattaaatgagggaaatgcgtcgaataatccttacaatattttgaccactttttgtacatattttttacatccctagttattacaaaaatgttggagagagtgcccgtagctcagttggttagagcacggcacggattgctggagtcgtgggttcgagtctcaccgggcgagttaccttttatgttctacacaaaaaaattcttcattcttatagccctaaaattgtacacattacgaaaaatataataagaattaattatatttctaaaatattaaaaatgaatcaataaacgtaaaaattttaattgtttaaagtgcatctatatattgtgtttggcattttctcaatgtgggcccaaaatattctgatcatttcagcgttggaaaatctgccaacgtgagtgggccagctgcatagaaatagttaagcaagcagtaatcaatgtctataaccttacaaaaaatagagaaaccacttaaaaaatattaatcgataaaaacactg

SEQ ID NO: 2193 - DNA, 2833 bp, Heterodera glycines
  unsure (1)..(2833): unsure at all n locations
gatgacaaatcncaaacaaaaaagagaagtacgtgaaaagcgtgaagaaaggacagcgtgaaaagnccggacaaaagacgacgaaaacgatgacaaagcccaaacaaaatgagaaggacgggaaaagcgtgaagaaaggacagcgtgaaaaggccggacaaaagacgacgaaaacgatgacaaagcccaaacaaaatgagaaggacgggaaaagcgtgaagaaaggacagcgtgaaaaggccggacaaaagacgacgaaaacgatgacaaagcccaaacaaaatgagaaggacgggaaaagcgtgaagaaaggacagcgtgaaaaggccggtggacatggcgagaaggccggcggagatggcgacaaggccggcggagatggcgcgaaggctggcggacatggcgagaaggccggtgaacagagcgagaaggccggtgaacagagcgagaagactggcggacagggcgagaaaaaggccgatcaaaaggaggaatgggcgcatcaaacacgatctccgattgggtacagcccaaaatctagcaactaaataaaatgttttcttttcaggctgttccaaatacgattgttgcaactacgcctgctgcaaatatgccaaaaaaaggtggcaaataaaagcgcccatgaaggatgaatacgtatattaacatcaaaatacaattgatttgcatccatttgatgctcactcacacttttgttcaactctgatctgatcggactgcgtttttgtttccatttattgggccgaccctccgctgctccattttgatcaccagcactcgtgagttttttgctccgtttatgttgccagggcttcattaaattcgcattcttaataaaaataataattaccactgctaattgctttttgcctttgttcagttttactcgtttctctcttcttccggatttgtgcctttgctcgtcattctgatcactattcgtactctgatcgcttccgttggcattgtgtggaatttgcttttggtttttgtcacaatttcaaatcggtccgtatctttgctaaaatttcaaaacaatttaattattttcctcatttttagcaatttgcacggctccactaatgttttgattgccattgattctctttcgcttgccatttaccataccaattcggctttttcccaagtttttcattgttttgactggccaaaatctgattcgcttggaccaatgcttctctccgtttttgcctaagaatgtttctgccgctttgatggttgccatcggattggaccgacttaaatttgttattttcccacggtaatttggcactttttaatgtttcattttatatattttttacttttcattttaattcctttttcctcttttaagcatttcttcgcatctccaaaaatattttgctgttttatggcttcttttgtctgctcttctatccctttcattagctatcgaattatgcggcgaattctccaaaagtaagggccgattaattaattattagattatttaattaatgtatttgccatttccactgatttgtcccttttaatttggttttagtcttgtaatgtgtgccgcttcggatgtcactcagcaaaaagcggcctttgtttccttttattcaactttaacctcttatacgtccgaaggccaagtcagctcaaaaatataattaaataagtaagctctcccattccttttcaagaaaacaaaactcaaagtttgtctctcagtcagctgagtctgttccgctccatcttcgtgctgatgctcctccaactcctcggctggacttccaattccctttcgttgcttttcttccagaatttgttcgccatcatttcgctctccgatctgacaaaatgggcaattgtgtgtttagttacatttttgatcatcgcaaccgtccatcaatggcccattttgtatttttgcaggtgaaaattgaagaattacaatttgacaataattagagcaataattaattagataattaaataacgagggtaccctgagtatttttattcacttgctaatttaattcaataaattctcccccaatttttagttttgactacaaaaaagccattcaaaaacaattccgtgcgttttgcgaagcattggcaacatcaacagaagcaaaaagtcgcgggtggtggtgatcaaaattgagcagcggagggtcggcccaatgaacggaaacaaaaacacagtccgatcagatcagagttgaacaataagtgtgattgacctcccattgatacaaatcaattgtattttgatgttaatatgtaataaattattcactcctaattctgatatggcaagtattcctttttttgaaaaatatgcccttaaatggttaccgtattttctctaattaaggccctgtctgaagcaaaaaaattctaaagttatatccaagtaatcattttggtttttttcacatggcttagaacaaaatccaggaaaatccaagtccaggaaaaaaaagcttgaatccgtccaggtccaggtctagctcaagtaaggaatcatacatgaaataggcgggggtcgaccccccctgacttcgttcgtatgcggggccgaaagaggggggggggggacttcgtattggttgggacaaaaatgtgaaaaaatgtggggaaaagtcggagacgaaggaaaagagagaagagacttcgtaaaggcaaaaaaatgtaaataatttaacaaaatccttttaaatttagtcaattttgtacaaaaaatgcaaaaaatttacgaaattgagtaatacttgatttttttttaatcaaataggacttcgttttttaacaaatt

SEQ ID NO: 2194 - DNA, 1539 bp, Heterodera glycines
ttttttgtgagttggaccacttctcatgaaccgaacgagctgaaattttaactgtacgtatcaattctgaaaatattaagattctgaaagtgagaagacgaaatgatgacggaaaaaaatttgacgaatttttatccgaaaaaggggtgttaatttaaaatagacgcactttttcagaaggctgtaactttttgagttgagcattaaaaaatctgaaaaaatcatttaagcttagttttcgaaatgatgacggaaaaaaatttgacgaatttttatccgaaaaaggggtgttaatttaaaatagacgcactttttcagaaggctgtaactttttgagttgagcattaaaaaatctgaaaaaatcatttaagcttagttttcgaaatgatgacggaaaaaaatttgacgaatttttttccgaaaaaggggtgttaatttaaaatagacgcactttttcagaaggctgtaactttttgagttgagcatcaggggtggggcgcgcacagaaaaatcccgcggtcgcggatcgcgcatcgcggattcaatttgccgcggtcgcggatcgcggatcgcgcaaaaaaaatcccgcagtcgcggatcgcggattcaatttgccgcggtcgcggatcgcgcaaaaaaaatcccgcggtcgcggatcgcgcattttttccaatttttgaaaccattttttacatttttttttgaatttttccttattataaaaattaattaaatcccgatgcatataaaagtgttaaaatttgcgaaggagttccagtcatggaaactagagagcgggtacggaccggatccgtatacggatttttacggatccgtagtccgtaatccataaaaccctatgattttttgtttttcagaaagctttttttcggcgcgattttctaaaaattttaggaactgatgggaggggggtggatccggcggtgccgataggcgccgccgggaaaatttttaaaaatttgaatacgttacgatttggctaaagttttgtaaaaaatgacctattttgtgatttagaaccaatttttttaaaagaaaaatttaagattctgtcagctgtgacggggaaaaattggaattttgaaaagatttttgaaaaaaataaaccaatttttcaaaaaaaaaaaatttaaattttgaatattcaaaaaaacaatcgcttaaaaaaatttttattataaaaatttacaaccaaaaaatgcgcggcacgccgcgcaaaaaaaatcccgcggtcgcggatcgcgcatcgcggattcaaaatgccgcggtcgcggatcgcgcaaaaaaaacgccgcgaatcgcggatcgcggatcgcggtcgcgtcccagccctgttgagcattaaaaaatctgaaaaaatcatttaagcttagttttcgaaatgatgacggaaaaaaatttgacgaatttttatccgaaaaaggggtgttaatttaaaatagacgcactttttcagaaggctgtaactttttgagttgagcattaaaaaatctgaaaaaatcatttaagcttagtttt

SEQ ID NO: 2195 - DNA, 6123 bp, Heterodera glycines
ctgttgccgcagctatttgggacgtcacacggttggcctcccgtatgacggcagcggtatgttgttgctgcagtcgcccgctctccccaccatcactgaacatgcttcggattttagtgtgttcgttgttgttgttgttgatctgacgttgagacgatgttggcgtcgacgagtgtggcgacgacggtggcatgagaccggagtgacgaagccagcgtacaaccgacaaccaacaaatgatgaacaacggcagtatgatggcgtagttggtgaacaggagcagtgcggaccaaatctgcacagacatgactggggctgctgctgttgggcccacaccatctgcgctcatcgtaacgttcatctcaacggcagatggcacacttttgctcgtcagtgcaattccttaaatttacaaatgtctttgctggggggtggcggtggacataatgcttgaaggtaatttcacgctgaccgctgtgcaatggcgaaatgagtggcgcactgtcaatcacccgtgctcacttcaggtctggcattgaacaggggatgtggcgccaccagtccgtcccctcgtggctcatacaaaatcacccagcttaggtttggcatgtttatcttgggcagacaatatatgtttatgtttgtgtgaggtttatgaataagacactttgttgataggtacaaatttgaagcgttgagcaatgtgttgtttattattcataatatgggctcctttttatgcaatttttgagtcggatacaatatggcggttgtagtcgatcatgatcaactgatcgaattccccgagcacgaccatctcaacgccgcctgccggtatcgcttcgttgaacgcgagccgaatgctggtggtgccggagcggagcagttcaaagccgcaactatcgtccagcgtcgatgtcattggcaccacgaagatggtccatccgtcgtggaactgctccagcgtgatgtccatagagcgctccgagttggccatgcccaacgcctcgtacatgtcaacaaatggtcgaatgtaggcacagccggagaagtccatgcggtgtggcactgctggatacacatgaccggcagcgtgcacgctgatctcacggatcgcgtaaggcttgaagttgaacggtgacaatgccagctggccgttgaacgctccgttcgccaccaatgcaattgtcagccggcgcgggatggcggcggaaaatatgttgtggtccatctcggtacggccggcggtcagaaacacggacttcacctccgtcttccgtaccgcgtaggtggccggctgcttttccagcgtcttgtagatggacaggttcagcgacggttgcacctcaaccatcttcacgtacagctttatgtcgtgtaggtacagcgcgtaatgttgggccgccgctgctgctgctgccgccgccgctagactttgtaacaggaacgcatcttttgcccgatagatggtgaacaggacgtccatgttgttcaacagatacagctcctggttgcccaggtcgaagtccagccgggaaaggaagcgtgctttacgaccgcccgcgaagcgcgcacagcgtgccagaaaaccggcgtccgtcgcgtcgtcgtgcttccttgatgggtggtagcccgcgctggccataaagtgtccctttgcactgttcggaaaggacagttcgttggtcaagtacgccttgtaggggtagagggttccgctgtcgtataactccgtgttttgaacctcaacctgattaaatttggtgctggttattgcaatcatgaggactatgggacatcaaccttgagttgttgtacaaatgtctgtcctacgcattgggcgggcgcgacgagttgatcggcggccactgcagcttcaatgggcacccaacgtccgccgccatcctccttttggatggacagctcgaggaacaggtagacgcgcgacatgtccgcccacaggttgtcattgaacaagcggaacaggtagggcccctcctggctgatagtggacaatggcaacagttctcggaagaaggaacgcgacaccgacacatttgtgggcggaacggtgaacacgttcagcgcactgttgaacgcaagcgcactctgctcgctgatcttttttggacaactcattattggtgttgttggtgttgttgtttgtttttgtttgtttgccacttcgttttgatgtttattgtggctattgtctagtaggtgcccaaggtatcaaaacggagtcgtttgctgctgctgctgctgctgttgatattgctgctcgaacctggtttcttcactgacagtgggccaactgttgattgcaatggttttcgcttgcgcagatgcctttttatgcttttctcgttgcccagtgtgggctgtttatgatttctgttgccgcttttttgtcccctttttgtcgctgtagttgttgttaaacagcagctgtcattgttgttcaccatttgctttcgatagcgcttaaaatcaaagttgccaccggcgccgccccgttgtctgctcagattatcggccgccttctcgagcaaattttttagccccgcgcgtccctcgtccaccattgcatctttcacattgcgcccctctaacacttgggagagcatgcgcgagccgctctccaatccttggcgcccgatcgcagcaccggcttgccgaccgattggaaccaagaagcgcaaaaagctgcgaaacatggacccaattccgcctgctccccgttgatagggcagtccggtaaacactgggtatgacgcacccgctcctccgccaccgccgccacccattgcgctcccgccgccgctcattcctatcgccatcatcgccgagtccaaacgctgggccggccctgtgaagtgggaccagtccaccgacagagggtcaaagtcaacgtgcatttaaaaaacaaaaaagttatgctgctgcctttttttagtttacttatttatgctttttttattctcacatgctcaatttgcttcatccccaaacacatgggcacgtacaaaagcgctgaccaatcggtcgggctccgtcttttgggcattaatatggtcaacaatttgccgcaggctccagccctggcaacgatggtacaagaagtagaccacgtgctttccacaactgatggaccgttccgattgtaggcagcgactgttgtgctgcacggtgttgaaatggcgctccaaaaaaatgtgaatgggctccgacacgggtggccagtcggcgaacgagtcaaagtagtcggcgctgtgctccgacttaacatagatggccacccagtgtgttccaccgcctgtcgcctggtccgtgttcaccaccatgcagtgcggcatcggcgcggacagagagggaattcggtcggacggaaagcagccaacgtactgcccgcgcgtcgcatcacaccgtgtcaaaattttgtttatctcgtcactattcatattttattaagtgcaaaaaataggaataaacaacaaaacaacaataacaaatagcaccacaatatatgcactcagaaatagtgtgattttctaaaatgtagtgtgagtgtacaggtgccatactggaagggcataagggcgccggtgggggtccgtatctcgatgaaaatctcggcaatctcttttgtgatcagctgatggtattgtacagtggtgtatgcctcttcgatcatgtcgtccggttgggcgccacgaatgcagaccatgcgcagcactggggcgcacacgttgccgatgatcaccggctcaatgagtcccggcgcgtacacgtaaaaggatgagacaccgcctttcatgtccggctggtagcgcgccacgttcagcggtgcagacaggtggcgcttgtggaagccaaggatgtaggccagttgatccgacagctccacctgtctgatccgtgactggtcaagctccaggcggaagcgctgctgctccacgtcaaagttgaagcggcaagacaggcgtgccttgcggtaggactgcacccacagctccagccccactggcaggtgtcgttgaagctgcacacgctccgcctcactcattcggtccacaaccaatttgtcgagcgattgacggtaaagactgttgtacgcggcacgcttccattcctcttcctctttatcatcatcatcatcttttcctttctcgttaggcttaggttttgcactttcacgcttttccaattgcttcttctccgtcgcattctcctgttgttgtttttgttgttgctgttgctgctgttttttacggtcacgtattgccgcttccagttgtgttttggcacttgactcggcttcgctgatcagctggtggtaggtgagctggatttggcgcagctcagtggccaatttctcactgccttcacccaatgcgcgatgcaaactggtgagcagttcgctggggtttcgcactgtgctggccgggacggggatgcgcacctgttccccggtctgccattcgacccgcacaaattgctcctccgttgtgcccagagagggccaagagtgcgggtacagcagcactgccaaccccacgctccactgtgagccgaactgtagcttgcgtggcaaacgtacgcggaaggagttggtccggttgccctcaacctgtgtgtttgacggtaagacaatgtagaaggaggatgatgaggacatttgtgctctccctttctacctttttttgttgttgctgtgccctcggtttccctccccctttttatatgattgatgtagcagggatccagctgttgtgcgctgcggagtagcccttccacttgacaaggcaatgctccacaccatttcgtccttgccgtcgtcttttcagcacccgttcaatgtcataaacgggaccgacgacggcggctgcggcggcagcagcagcagatgcctctgccccttgttgtgttgggcgctgtggtggggctgggggcgggagcacaaggcacaagtcttgtgcgtagaaccagccggtgagcagctccccggtgtcgtcgcgcaatttatacgtggtaggcgtacgtgagtctcgcacctctgtcacagtgaacacctcatcggtgaagcgtggcaagtagccctttttgaacacatgcttgtgcttctcaattcgcacacggtctccagcgtggaagcgaggaggccgcggattccgtccccgcacctgcctgctatttttgcgtacgttgttggctaaccgctgcagttgttggcgtcgaatttgctccgcgtttgcaaaattgacgtcccggggccgtagcccagacagggcacgatgcggtgacgcattcagcgccgacaccaactgctgtatcacaccggtccagcactgggtgccacggtgggtgaagtatcgatacagtcgctcctatgaatagtaaaagtaaataacaattctttttttgtctagtctataccaccttgatgctgcggattgcccgttccgcaatcccggcgtgccactggggtgaggtgtgcatgcaatggtgttgcacctcttttttgttgaaaaagcgctgcactggggcggcggtgaactctttgccctggtccgtcatcagcttccatggcacgtagccggcccgtttgaatatgtggtcaaaagcgcggatcatgtccactgactgcttgctcttcaccggctccacaaacagctggcggctcagcgtgtcggcacacaccagcagataggcattgccacggttgttgcgccgaagcgagacgaaatcggccaggtcagcctgccagtcggtgtgcaggccggacgccagcgtgggcaggcgacggaaccgacgaacggcacgccggtgcagcgtgtacactcgctgtcgcgccagatagcgacgcacctccgcccgtcgtatgccccttgttggatgtactcgctgtgcctcacgcagtagcggctccacactggtgaaggcggcggccgaccttgtgtccttgtacagcgggtccagcagttgttcaaccacaatttcgcgcacttcttggggttgttgttgttgttgttgttgctgtagtcgtcgcatcaccataacatgggtttaaacaaaaaagtttagttgttggtagtgctgttggaccgtttcgtgtaatcagca

SEQ ID NO: 2196 - DNA, 4440 bp, Heterodera glycines
tgttgccgaacagcatccgtaccatgcgcgggtcttgtcgagcattgccaataaatgttttgtacccaggcggtgccttctccggtttgggctcagcaaaatgaaaagtgagtaaagcatccaaatcgctgttcttgatcggacggtacgcgccttgcatcagccggtacacctgctgtccatctccgatgcccagcgtgcccgcgttgcgtaacgcatagtcaatggcttgtcgtttcctctgctcagtgtcacgtaagactgctgctgctgctggtgctgttgatgttgatggatgcagttgcacgtccgcttcttcccgctgtcctttccttgcggggtcaactgccgccacattttggggtcggtcgtcgttggggctgtcttcacgctcagtcgtctcagctcctcctcctcctcctccattatcagtgcgtgtcaacaatgagacggcagatgacgatgacgggaagcggctagcttcggcgccatccgtagaggctgatgtcgtacggtgtgtccttttggctggtcgttgtctgcgacgtggaggctgcctcattgttgacgaatcagactgcgacgactgctgttgttgttggtgcagcgccggctgttttggttgaggttgttgttgttgaattgttcgcgccgcctcggaaagtgcatcgcgcagcagccccttcgaggcttcgtcggtgggcagttgggtgagacgaacaggcgctggacgctcctgctcatcctccagcaattttttgaacctcttgaactcctgttggtaatggatcaaccgttcgtcatcgttcagaaggtgttgttgtttcgatgccggagatacgccatccgtgctctgggtgatgccgccgctgtgtgcagcgcgcgccatgcgctttgccgtgtgctcaattggcgtggtatgctgcggtaagccgcccctcgcagaggatgcgtcggcaacaggagccgagctcctggccaacaaggagcggtacagttcctccggcactagcagcatgcgggttgtgtgcttcatgtttgtgtgctgtcttggcggttcataaacctatctgccagcagtggaagcacaacgctggccaccaagccagccaaggccgggacgccgcgcccggtctgctgtctcagcaacagtcgacgtgccccgtggccgcttctcgcacggcccaacgcacgcacgtgttgggcctgagcgcgcaagtgctgaagatgagtgctccggagcgggacgcgtgcacggagaatgttcaacgcactttccaccagacacaacagctgctcactgctcgcccccctcaccagctgacggtaggcacgtgcgcgtgccgagcgacagttgctcagttgcttgaaaaagctagtgttccgttgaatgtattgacttggtttcggccttttcttcgcttgcttttgttgttgttgttgttgttgtctcttttcttgttgtattgtttctggtctgtcgctgctgctgttaccgttgttgtttccgctcttatgcttcttctgcattgaacattgctgcccggtctcgtggtgcgtacacaacggtcagctcgcccggatatatatgagttttgaggcgcatctgtggtcgggtggtcgggtgcatgtccaccaacaggtaaccaaacgggtccgctgtcgcgtcatcgtacgcctcgaggaagtggcgcagcgcacccgggaacagctggacgcccaacgagcgtacctgaagtgcgcccgacgggttgcgcatcagcaccaggtagtgtgcattgttacgtgcaatgcgcagctcgcggatgaacaaatgctgcgtgatcaataccacactgacgccccagttgtgtgagccacgtgtgaacaacgtgtccaggaagggagcgcgcatgccaaccatcagatcgtccaacaccagcagcagtcggccattgcactcgcttgccgcccgcttcactccctcctcgtcaggcagcgcgtgacagacacgaacccatcgattaccaccactgctgctgttgctgctgctgctgctttttttgacaacattagttgaggttgttgttgttagagtgctgtcaacgctttccagctgttgcaagcgcagcacgtcctcattcacttccccgaaacagtaaagcactccatcaatgtgggcggggccaaccagtgcgtctaggttggccagcagacggagcacccatttagtcttcccactacccgtacacccggacacacacattgtgaacggatgtacaaacacgggttttgcgtgcgcaagctgctctgactgtgccatctccaacctccttttcatttagccccgatgacccacttttttatatatgctctcaaatttagtatcacattttaacaatttttgagccacacaaatttaatataaataagtttatgttgaaactgtttattgttcattctctaattattttgtcaatggacacgtcgtcacacgaatctgatcgcaaggccggcgatggtgctgataatgctgatgcacctgcagcatgccaacagcagcagcagccgagtttgaccgcggacgaaccgctgttggtccgacagccaaaggaagcacctgcgcaccagctaatgaagaaagaggaggaggaggagaaaccgcgacaggaaagcgcgccacttcctcagcccacacacaatgatgacgtcagcaaatcggtcagtcagtctgttgccgtccaccacaatgcacagaacaagaaattgtcaaaacaaaacaaaaaatcagtcgctcgtttgttaagatgacgaagctgagcagcgatagtaatgatgaacatggcggtggcgatggtggtgatgatggacaagcgttgccgaccgaggatgacggggtgggcggtgctcatctcccgcccctcttgttcatcgatgaggaggaggaggaggagagcaccgagtcgcgcactggggatgacgtgggccgagacggtgacggtcagattttcactgaaaaagtgaagcaggaaggggaggaggaatcaaccgacggtgacgttgacatggattctgtcagccatgacacgtgcagaagcagcagcaacagcagtagcagcaccatgagttcgtcgttgttcttgctgcatgactgtcatatgcaccaccactacaaccgccaccaccaccacgacaacaacaactgcaacagcccgccgcgaaaacaagcggcgacagagctgctcaagcttccgctcatcgactatttgtgtgggctgaacaacgggtgcagtgtgagagagctccacacgctgcttcagaccaagagcccacgtgcacacatgttggcccatctgcaacagcgctgtctgctgcgcaccgtccatttgcggcccgccgagcgcaacattgcgctacatgcgcatgccctaagtgccctaagtacaaacctgacctttgcatgcggcggttatctcaacctcacagtaataattttgtttaaagaagcgccgcccgcattctgtttgtttttttttgcctaggtgcgtcagtacttctatgccaaacacggtgtccgtttgcgccacccaaacctgccggcgctggttgagcgcggtggtggcgcacacatgtcctattatccgctagagtgtgtgcaggtgcatgtcatggtggcatcgcccacggaccccaacgagacggaggacaataaagaggaaagcgcgggctgcgcagatgatgagtgaaaattgacatgcatacaaatttttttctctcatttttgatgcgtcaatcccattgagataaaattctaatttcttgttgattttaagcaaggttatttcaaaatgaaatattttgtgcaaaatagtaccagcacattttctcttttcaaatcgtgtggcgctcaagcggcctcatctccacgacagcaacaagaacaacaacaacaacagcgctttacccgcgaccaattcttggcattggcacgcaacggtgcgtgcaccgaatatgcccctcgccgttttcacgccattgtgatgcgtctgcgcaccggttcaaccagcaccagcaccacgagcaccgccgccgtcaccaccaccaacaccataaccaacaccatcactggcaccacaactgcgcttattttccaaagcgggcgtgtggtgctaactggcattggtggtggcggtggtgatggtggtggtggtgttgcggtgcagaaaattcacgtactctgtcgacacgaagcgcaccgagtgtgccgccgtgtcgccgatgcactccggcgaggtggctttccggcgctcggtcgctcgcttcgtgtcaatggggtgcagttgcgcaacctggtttccacacttcatatgccctaccgcttgaacattgaggggatggcgcagcatcttttgcggtgtatgaccatcagtgggaagcgaccaaatgacaatgacaacaaca

SEQ ID NO: 2197 - DNA, 2165 bp, Heterodera glycines
ttgagacgcaggctgcgacaacaactgcgcgtgaacattacccggcaacagtttcctatgaaggaccgctgagcgcaacaacacggaaatgggagctggaaggcgctccgctgaactcacatgtgactgtgtaccatcatggccgctctgatttggcagcacctgagcaacaacaaccagtcgctgagaaagtcacaacgaagataagctcattgttcaagaggaagccacaccatgaggacttcccagtctcggagcccttcactggccaattggatgagacggcaagggtttcggagctgttccacgaaccaatcgacgcaagtgtcagcgtctactcggccggaagatctgatgagcatgtcgttgtccagccaacaacaattgctgaggcggagcccgtaccgctcgttgagtacccgcgcacgacagcatatgatggtccactgcaaagcacatcgaaaggagcagaaatggaggggcagccgttggatgcacatgtttccgcctatcaccatgggcgctccgacatggcacccccagcagcaccgaaggagacaatcacaacaaagctcacttcaattttcaagaagacaaccgctcaagaagacgagtacccgcccaagactgagcctttcctgggaccggtggcacaaacgaatcgccaacgggagttggaagccgttccggtggtggacaggattgaacggatacccaaagggttggtgaagtgcgaaaatagtcataataaaaaaagaaaacctttttttggtttatccatgttggggtggggtggtctcgacaactaacacgggaaaaagccggccagcttttatgttaaaaatgcaaatgttctggcaaaatagacttcgactaatggggaatgttagagccatagaattttgaaaaattttttgatcacgacaatcaatttccagcttctacgaggaaggcgaactgcatccagtggtggtccatgaggagaaggaattgactccgtctgaggcggagaaaaggccaggaacattggagcgaattacgcacttgttcaagcggacagccacagagggagagtggccaatggtcaccgagccgttcactggaccgcatgctgagacatcccgaaagggggagcttgaagcacgcccgcttggcgaactcgtggctgcctatgcttccggccgttctgacgaagtcggtccaatgcaaacgattgagacgcaggctgcgacaacaactgcgcgtgaacattacccggcaacagtttcctatgaaggaccgctgagcgcaacaacacggaaatgggagctggaaggcgctccgctgaactcacatgtgactgtgtaccatcatggccgctctgatttggcagcacttgagcaacaacaaccagtcgctgagaaagtcacaacgaagataagctcattgttcaagaggaagccacaccatgaggacttcccagtctcggagcccttcactggccaattggatgagacggcaagggtttcggagctgttccacgaaccaatcgacgcaagtgtcagcgtctactcggccggaagatctgatgagcatgtcgttgtccagccaacaacaattgctgaggcggagcccgtaccgctcgttgagtacccgcgcacgacagcatatgatggtccactgcaaagcacatcgaaaggagcagaaatggaggggcagccgttggatgcacatgtttccgcctatcaccatgggcgctccgacatggcacccccagcagcaccgaaggagacaatcacaacaaagctcacttcaattttcaagaagacaaccgctcatgaagacgagtacccgcccaagactgagcctttcctgggaccggtggcacaaacgaatcgccaacgggagttggaagccgttccggtggtggacaggattgaacggatacccaaagggttggtgaagtgcgaaaatagtcataataaaaaaagaaaacctttttttggtttatccatgttggggtggggtggtctcgacaactaacacgggaaaaagccggccagcttttatgttaaaaatgcaaatgttctggcaaaatagacttcgactaatggggaatgttagagccatagaattttgaaaaattttttgatcacgacaatcaatttccagcttctacgaggaag

SEQ ID NO: 2198 - DNA, 2662 bp, Heterodera glycines
  unsure (1)..(2662): unsure at all n locations
tatttcgccttttttggcgcctttttctgaatttcggaaaaatccttagaaaaatgcaagaaaaatgaaaaatacacctaagtatcgacctgaaaaattttcaaaaaatacactcctaagaattgaaaaaatttttcatagaaattgatccccaaaacttaattattttttcttgttaaaaatttttggtttaaaattgtccttatttgaaaaaactttaaaataattgaaatataagcaaaattaaattttaaattaagttcttatgtatttttctacctaaaaagcgttaataagaaatttttttgcctatttttgtacctatttgaggatttttgattgcctatttaatgcctattttgcgatttttttatgcctttttaggtgcctatttcgcgatttttgtgcctaaaaatctcagccctaaatattagcataaatataataaaatatttctcgcaaaaacaaaatattaattaattaattggtcaacaacaaaacacagcaggggtaatctttgatgcattaatcattcggctggatgagttctattttttggcacctcaaagtgatgagtatcggcgaagcggaagtatttaataaccgaattcgtacatttgatgaatagtcctcattttgtggcggctttttgatgggtcaatgaggtttttggaaataaggggtttatgatttttataatttttttgagattttcctttgtctatcggtaagtggtaaatttgtcgggtttatttttcttttcaattttaacgagttgactttcattgtgcctaccattaatttgccataaaatttgatttatttacatttaaatttgaattgagttattttgtttatttgttttcccctctatccattcaattcactcacttttcttttcgtcctttcacaattatttttcatcactcaaaagaaagaccaatttattctttcgttaattgtgtaaaataaaaataagccatcggcgaaagacaaatatttgataaggaaatgaaaaagtcattcattcattcaaacattccatttcacttcgtacaatttaattgtattttattttgaattttataaaacaaatattttttagtatttttttaaaaagaaaatttcaatttgaaatgaccaaaaaacgctgtgccattgtgggagcagcagtaagtgggctgccatcagctcggtaaaacctttgaatatttaaaataaaaataaaaattaattattcaaaaaaggtgggcattggcttatgactttgagccggtgatttttgaacgccttgacaaaattggaggcctttggcgctataagcctgagcaattcaacccagaatgtaagcatactaaataaaaaagcttaaataaatttattaaaaaattattttatataaaaaagcaacaaatcttttaagtggcgagtgtaatgaaatcgaccgtaattgacacgtcaaaggaaatgaatgcgtattcggacttcccgccgcccgaacacttcgccaattatatgcataatgtacctaattattagtagggctgctaattttatgtaaatacatttttttcctggattctccatagcctaattagtaggaaaaacactttcttttttgtgtttgcgaacaaaagttggttatttacatattttcgggttttatatgtacatatttttatacatatttcacaatttttgtacatattttcattttttttttacatattttgaggatttttgagaatttatagaaattttttgtaaaaaatttaaaaaaattttttgaaaatgtatccctaagaaatcgaatttttttttcaaaaaatgatttatcaaaaattaattttttaaatactagcatgtgattctaagcctattttggtcattttatgcctaggtatttcactttttacgaagaattttttttcacaaaaaataaccattaaaaatttttatttacatattttagtacatatttgggggtttttgtatatttcatacattttttagcatttttatatatattttatttacataattcgcaaattttcttacataaaattagcagccctaattattagtttattagagagctaattttgagcgtatttggacaaaaaccgggtccgggtattaaccggtattgaaaaaccgggttcgggtccgggccatgaatttttatgccttttttggcgttttgtgcctttactggtcctttgcggaatttgcagaaaattctttaataaaaattcaattaaaatgaaaaaggcaccccttttaattatttgaaatcccaattaaaaaaaattttaattttttttttgttttttttattaaaatatttgtcaaaaagtgttaatttttccaaatctctttcctttactaagacacaaatgctcgcttatttggagctctacaccgaacatcatgggctttaccaatatatacggtaggcacaataataatacggtagacacttaccaatgtcaattgaataagcaatttattagatagtaatttagtcaaatattgttatttcctttgtatatccctcaatgtttggcaattattcccccacagtttccacaacaccgttctcgccatacgccgggcggacgattattcccgaaaaatgggcgttgacctgnccnaggcatgc

SEQ ID NO: 2199 - DNA, 2852 bp, Heterodera glycines
aaagattgtcaaatttgaggaccaaatcaaattcgaaggagacattattcactcccatgacttcaaaaatagcaaggaatatgaggtgtgagaatggcacggagagaatgatgtcattttaaagaagctcaagcgaataatttttttgaaaataggacaaagtgaacgttgtcgtcggggcgggtaattcggcgatggatttgaacgtggaattgggtcgagttggcaaaaagtgttatttgtccactcgtcgggggcgcatggattggcaaaagagttggcgaaggcggaatcccaggttaaatggacaaaaaaaacaaaaaaaaaacatttacatgccgcagaggactgtctgttcaacacacgattcaaagtttgtgtgctcaaccgcattttgccccaggccttcactaattggctgttcatccgccagtgccaaaagcgctttgaccatgcaaaatatggcattatgccaagccacggattcttcaggtcttgcggggccacacaatctcggaaaatttgaatcaattaaaaatgctttcgaattttatcacttcagccaacatttgaccgtcagtgatgatttgccttgccgaattatcacaggttcggtgcaggtcaagccggacattcgcgagttcacctctcatggcattgtgtgggcggacggcactgtcaccgatgacattgacaaaattgtgatggccaccggctatctgttcaactttgacctggtggagaacggacaattgatcccggtaaaagacaacacagtttggctctacaagaacatgttggcaccgcaattggccgattggaacactttggccattgtcggactcgcacaggcactttctccaatggcaatgaaccgcttggatttccaagttcctattagccttccggtgccattcatcccgttgccgaaatgcaagcgcgactgttctttgccgctctgtgcggcgatgccaaattaccaacgcgtgaagggatggagcacgacattgacagggcacaagctgaattggcaaaagcatttgtgaaaagcactcgacacaccatcgaagtgggggagggtggtgcctttcgctgtttattaaactacacaggtcaattacattttgttcatggacgagttggccgagctgatcggctgtcagccgaatcccgtggactttgccttttcaaagccccgtctcgcccatgcccttctctttggcccaaatgtgtcctatatgtaccgattgcgcggcccaaaagcatgggacggtgctgaggaagtgggttgaatacagtaccaaacacacacctcgttacagtaccagttccagcagcataattctgcactttttctctcaggcaattcttgacatcccacggcgcatggacatgtgtttgtcgggaagaaaagtgaaggaagcgccgacaacggaatgggccgaaattcgttccgttttggcactgattgtcgccataatggtgatcggagtgtatttgctgagagcactcatttaatgcacaattcacaacaattcattcattcggcccatcgttcgaactgtcaatcactcctttttcattgcacatttactatgggataacaatgataaaattcataatttaacagtctttcaagtcgcattttttaaaactgaaaaaataaggaattgaaaatttagcaaaaaaaaacttacaattagtgttaatttgttttttgtttttttttgaattttgcattttacattttgtctctgaaatataatacaaaacactaaggatagcataaatttaatgattcaaatgcaagaagtgaattaagctatttgttccgtgttgcaacttttgcgccgcgggcattagcgccgtttattgtgaaataacaaacaaaaaaaagctaatcaaaggaacggaaaaagaaaaaaggaatcaaagatagacatctaatttttgtttttgtaaatgcgtaaatcagcagcaacggcaaatccgatgccaaggaaaacaaagataatgaagattataataataataagccacattcatgcatttacaaaattatcttggcatgaaaggttacgaagaatggatttaattttcaaattaaaacatatgagtttgatttaaataaaattttttatattattttaaaatcttattttgaaatgaatggcgcaaatggattttgtgggacggcgcaagtgtcggtacacaattttcccatttagttttctttgaataaagcatgcttttttaaaatttaactccccttttcatcattttcgcccctatttaagccactattataggacttcccccccccctataaattccattctttcgagttttgaatattttaattaaataataagtgaaatctaagaaaggcttttcgaatcggactttcgagttcctaatatttttatttaattatatttttacatactagaaattttatactaaattaatgaattagcaatgagtttaattatttctcttgtacaaatggcatacatattaataatcggtgcattattgacgtttaccgtaggatttgcaaacattttcttccaataaattttaattggcttcatttgcacgtgattattatccattttgaattcattttttaaccataaaaactaaactataaaattggaatttttagtaaaatttgtttgaacagatataaaaaattgggagattattactagcttaattaatgcagccaaaattgtgtatttaaagcaaatttcttaaattatcacataaaatttggcattaaatttcaaatgaaattccatttatttctgctcttggtcattttcactgatgcgaaacagatccattca

SEQ ID NO: 2200 - DNA, 2007 bp, Heterodera glycines
attattttggctgattttctcacttaggtcaattagtgtctgttttgtgggcagtcaaaccaattagcaaaattatttttcccattattattttcttctcaaattcgcgatgaacaccagtcaaattgtgttttttgtgcttttttgtctgatcattcaattgaaatttctatcaacaaatggccaaccgattctaaaaaggtctttgtcctttttttaattaaatgcaaaaatatcaaaggaaaataaaaaatattttcatttaatttagaaaaaaattttcagcgatgagaattttaaataaaaatttgtccagcagtgttcgtgcaaagcgaggcgtcggtgaatttgcacgggtcgctgcttccggcgcagtcagtgcggtggcatggcacgccaccaacaaagcaatcaacaaaattgtgggcggataagggcaacacagaaaagaaaaataatggagacaaatagaatttgaaataatgataatttgataattaatcagtgtaaagcagatctgtgatttatgcttattttggcatgatgtgcttattttgtgcttattctttgattttggtataaaaatatttaaaatgtcccggttcttagatggcgtcgatttgactttattcttaggttatgaacgtaactcatcaagagctttgccatttccgcacctcaggtgtattttttctgagcattacaggccacgagagaataatgaatggcatcaattttattcaattttttttgagtacaataataatttgatttaaatattaaattttctgatcactgacgcctcacaaaagagcattttcttggacaaaaaaggttaataaatttattacaaaaggcgtacaaaaagaattggtaattttacgagcgaaatttttttggtcgtgacaattagtctatagtacagccgcaaaatctgttaataaatcgcataaaattttcaaaaatctcccccggcggcgcttttcggcaccgcctgcctaaaattcgtctatcatttttttataatttggccaaaaattcatataaatagtcttttttggtaaaagctggaggccattcaattcaacgattgccccaataattgaaaatgaattccaatttttgttttcaattatttctgctcctggcaattttcactgtgacgaaacaaaagcattcaccgaatcgaatcgaaaggattgtaaagcactgaatggtgtaaaagttgaaatttcctttgacgcaacaattaattttggccaaaatgggccatcaaattctgacgattcgtccgagtcaaacacgacgaataaaacccaagcagcagcgccgacgacgggatgttcattgaatggggtggaccttcaggcgaacggattcgaaaggatgtgtgccgaatggcccgacttggctcccatttattgctacggcaaaatcattgaggtgccgagcaatttggtcccaattaatcataatgacatcaaaattcattaattcattacgatgttgagagtgaattaattggttgaatgactttcgcttaaggccgtcaacttttggggcgcccgaatgcttttccagaacgactcgaaacattttgttgacagaccactgaaaaaggaggccaagaaaattgtcgaagagttcacatcgacctttggcggcaacgaattggacgtgagcaaaatgaacgaacaacaagtggaccaattggccaaattcgtccgtgaaaatttcggcagagccaacggagtgctaatagcgtaaaaattgatggaaaatggcaatcaattaaaaaaataattaagttatacgcccgaagattgggtggaaagcccaccgaaacttgaacggataaaagacgcggagttcaaaaaatgggcaaagcaattgaacgaactgtggaaggagctgagtcggaaaatgccagatgtaagagggaaaaagcattgcaaattagtcagtaattaagctctaattacttattagtggaatattaggtgcaaa

SEQ ID NO: 2201 - DNA, 1098 bp, Heterodera glycines
aaggccgtcaacttttggggcgcccgaatgcttttccagaacgactccaaacattttgttgacagaccactgaaaaaggaggccaagaaaattgtggaagaattcacatcgacctttggcggcaacgaattggacgtgagcaaaatgaacgaacaacaagtggaccaattggccaaattcgtccgtgaaaatttcggcagagccaacggagtgctaatagcgtaaaaactgatggaaaatggcaaataatttaaaaacattttaagttatacgcccgaagattgggtggaaaacccaccgaaacttgaacggataaaagacgcggagttcaaaaaatgggcaaagcaattgaacgaactgtggaaggagctgagtcggaaaatgcccgatgtaagagggaaaaagcattgcaaattagtcattaattaagctataattacttattagtggaatattaggtgcaaattagggaccattaatgacaataatcactaattgattgctccatctgttgctggttcagttgaactgcaaccctgatcagcaaaaccactcactcactcatctgcgtgccacaccctttcgtggtgccgggcggccgtttccgcgagttttactattgggacgcctattggatagtgaagggactgatcgcctcaggcaaagccaaagaccaaagatcggccaaaatgattctgatcagtttaaggcatgaccaaaatggtgaagaacatgtgcatgaactttgcggagatggtcaaccgtttcggttttgtgcccaacggcggacgcatttattacgacaaacgctcacagccgtccttcttcacattgtctgacaaacaaacccttgctaattgcatttcctaattactgctccgttttagcatggtctacgattatttcttggccacaaatgacaccaaatttctccactaagtgttgccagtgcttgaaaaggtcagtgccataacttatcaacgccataattatgtgctaataagccaaatccgaattttcattaaggaacttggccattggagcaaaaatcggtcggttgaagtcgaagtgggcggaaagaagcagacattttaccaa

SEQ ID NO: 2202 - DNA, 1970 bp, Heterodera glycines
cggccgtttccgcgagttttactattgggacgcctatcttctattgaagggactgatcgcctcaggcaaagccaaagaccaaagaaaggccaaaaatgattctgataagtttaaggcatgaccaaaatggtgaagaacatgtgcttgaactttgcggagatggtcaaccgtttcggttttgtgcccaacggcggacgcatttattacgacaaacgctcacagccgtctttcttcacattgtctgacaaacaaaccgttgctaattgcatttcctaattattacttccccactttagcatggtctacgattatttcttggccacaaatgacaccaaatttctccactaagtgttgccagtgcttgaaaaggtcagtgcaataacttatcaacgccataattacttcctgataagccaaatccaaattttcattaaggaacttggccattggagcaaaaatcggtcggttgaagtcgaagtgggcggaaagaagcagacattttaccaatacagagcggacagcaatgtttaaacagaaagaaattgagtcaaactgaagcccattttcagattccccgtcccgagtcattttgtcaagacgttcaactcgtcacgaacatttcgaacacacaaaggaaagccgacatttggaaaaacgtggcatcgacggccgagtcgggctgggactttagctgtgagctttaattgcaattttagctaattaattaattaatgtgcataattcatttagcacgatttatgaaaaaagacaacagcaacaaagccaacccgtggaatttggtcaatttacagaccacggacttattgccggtggatttgaacgcgttaatttgtggcaatctcagaatgttgggagaactcttttcaaaaataggcaactttactgcattttaattgggcatttggccaagccaattaaatgtaaatatttttcatattctcttcttaaatggttttaggtgacaatgcaaaagcatcaacttatgcggctgagcataatgagtttcgaagcgactttcaacggttattctataaggaagagcacggcgtatggtacgacttcaacattaaaagtggaaagctgcacgaggagtactacggtagtgtgacggtgccgttgttcacacagtgttacgacaccgacgatgttggcacggcggaacggatgtacaaccactggagaaaattggcgtactaaagcacaagttcggcgtgccgaccaggtgcccaatttagcgcttctcatcagagatggaatggcataaacacattttattttcagcaatgtaaactccacacaacagtgggacttcccaaacatttggccggtaatttaaggataaataaacataaataattatgaaaattggaattaacttcagtctttggcccatatgctcatcgaaagtttgaggcgatcgggaaacaaaaagtgaagcggaatttccataacattttcctaatttgttttaatgccttttaagaatggaggaaaaggccaaagaattggcacggcaatggctgtcggccaaccaccaaatgtatcagaactgtgggcagcacatgtgggagaaaatggcggcggacacgggcgtgccgggcgggggaggcgaatatgtgccgcaagtgagtgccaatgggacaactcaaaaggccatggcattccctccaaaatgctcacagattggcttcgggtggacaaacggtggcgttttggatttgctggtcacatacggagacgaaatgacactgcagcaaatgccaaacgtggaatgcaagcagaacgcggtggttgaagagccggcggagttcccacccgcttaagacgaaacgagcggacaatggcacggaattcgaatggacaaaataaaaagaaaaaccaggcaaagaatgttggtgcaatcaatcgagtggagattatcaaatcattattatcatttagttacaaaa

SEQ ID NO: 2203 - DNA, 1434 bp, Heterodera glycines
tgtagggatttcaaagtaattaatttatttgatttgattaacaaagaaaaaagttaagctctaaacttggcttgtacggaactggcgttactgaactgacccgttggggtgatgaaaaaaagaaaaatttttgaatagtgcaattgacagttagcatactgtatttcttgaattataacagtccaaggcttttttcaaacccatcttgaaaggggttacgaatctaggaaatacagtaacttgttgcatacatttattgcgtttaaaacagtcgttcattaaaaacatttaaatcaaaaaaatatatatttaagtccaaaattatttagtattgaaaacaatcaagcatttatacgtaaaagcgtttagcgttttatctgcgaaacgtcttttcccgctccctctacgcgtgctcctttgttgtttttttaatttggttctgtgtacacataaccgaaaagtacacacttttctatgctaattttaggcgctaatcaagcctctggcattaaaagctgcaaaaatctgtgatttcatctatgatattcatcatatattttgtcaataatttttttaaagaaataacattcctatcatattatcaaaggatttctctcgccgagaggaatcgaatggtaatagtttcagggttcaacgatgggcgatggttcagcagcctcgcaaccaattatatatatatatatatatatatatatatatatatatatatatatatatatatatatatatatatatatatatattttgaattaagaacaaataattatttagctgctccctttcattaacctttttatttatttatgaaaataaatttaattaaaataattatacctaaaagaacactttcattttgttttcataatatattttaacacttttcgaactatttattccgaatttacacttttttgatttgatgctaatgagaagaatgtcatgataattttgtggcgtgttttttctttttctttatttagcacaatttgtgaccaattatatattttatttttcaaaaataaattaaattaattaaaattattttagaataattatgtaaataaaacaaaaaacaaacagagagatgaataataataaaaaagtcactgaaatgagtaattcgaaaatattttccttccataatttgcaataatttgggaaaattaaatttttataatggatccaaatttttagccaaaaaatccgccaccgtacaatccaccaccatatcctccgccaccgtataaacctcctccatacagtcctccaccatatcctccgctaccatataagctaccaccataacttccgcccagcaatccggtaccgtatgcgcccatggagccgtatcctccaggaaatccgccaccaccacacatctgacatgatcccatgcgagcctcggcgatactt

SEQ ID NO: 2204 - DNA, 1074 bp, Heterodera glycines
  unsure (1)..(1074): unsure at all n locations
tgggtaaatttgattngttgggtaataatttggatatgnatagtttgggatggttggactgattggatacgtcggatttgccgggtaactgggataaactgggtagtttggataagctgggttagtcggtgaaaccggantaaattggatttgtcggataaattggatatgttgggttgttgggataaatgggataagtcgggttgttggtataagttggatttattggtaaaggctgacctaaaatagaatatacaaactatgacaagtttgaaaggtgaacaagagttgcttaattgttgggcatttggacagtaaagaaaaatgccggattaatttggaccacccaaaaaccggctttaaattgaaagcccaaactcacaacaaactccttgaatgcatgtttcccttgggtcgacacagaaatttaaataattacacgctgaaaagggttattaaaatggttattcagaattaataattttaaaaaaagttttcttcgctaattgctcacctccctctctgtaatagccggccgggcactgattattaaagcagcaaattccgttgtagcacctttcatttcggctgatgcaaaacccaagagggcaaactaattacaaatcaagccttttgagcatttttgacttctttttttacctccgtctggcgttgcgccgaaagggcattgattttgcggtaaaatcgcttgtcctttaatgccgtttagattttgtgaggccaacagaaaagcggccaaaaaaaagtgccaaaaaagcgaagtcagcgccgatcgatcggccatcagagaaattaataagcaaacattggcaaaggaatgaaaagcggtttttgcttgcaaatttgtattcatcatcaaaaattgggcacaaaaccaacttcatcaaatgtttgttcaaatgtcccatcgaaatcattccgtcaatgttttaaatcgatccttttgacgaaattgccttaaaaacacacttattcatatttaaattttttattctccgtaaaaatctaacacttagaatttctcttgacttcaccttcttttcccatgtgtca

SEQ ID NO: 2205 - DNA, 3975 bp, Heterodera glycines
  unsure (1)..(3975): unsure at all n locations
aagtaatgtcgttcatcattctgtggtggatgaagtagaatgtatagattttttcaggatagttctcgaaaaacagatgaaaaaaattccctcaccggaaattgtttatgggtttattccccacgacaaattccattgttgcgccgatatgactaaaaatttttttaaatataataatattgtatgaattatcaactgaccgaagtcgcaaaaaagatggtttgaaatagtatcggataaaccgcggagtgaaaggcttgtcgccctcttcagcattgccttcctcctccgcttcatcactattacccccagcttcggaacagtcgtcgttcgctgctgcgtctaacattgaaaatccgttttaatggcccgttggactgtaccacggcttattaatctcgaatagaacagtttcggaatcgatgtcgcgcactttgaagcggacaaactcaatgtctaaataaggagcaacgcaatgctcactaaacaggcttaattaagaaaaagccgaccgtagacattatcctcgggtcggcagaggaaatctgaaagggaatgccacttttggttttgttttgtgatcatactttcagtaatgcagttcaatccgagcacatcgtccggcatcaccatttctttcgccctaatttctgcttcggtgatcggcgcgcggatttcgttggtactttcgctccgtccttcgctttcattccgagcattattttggtccaaatctgccatattcgtttgcttagtgcgtctgaaaatagaatatcgtttaagtgagctctaaatgctttataattagagaaaaagtaacagaaggcgtcttagaacaattcacaaattaaataaaaaattaatggggacggcacacactttagcagaatgaaggaagcaatgctaaaatcaaagattaaaataactgtaaaagaatctctatgacaaccacaactttaaaatgcgttacggtgtaaaacgaaatgaacttatgctaaaaatgcatgtgttcatcaattgtttattgttttcaagtgatttaaataaatttacacatatattttacattaaaagttaataaaaaagataagaaaccaattagttaatgaaaggaaagtagggaacaattggggaaataaataagggcaatattataacaacattataagggtcgggcgtcttttaggcgctcggaatgttcaaggctaaataccatatttatcagagtatttggattaataaatcttctaattgtattccgaaaatcgtttcagttcaaattattaaaaaatgactcaaaacagaaaaaataataattttttagacatctgttaacaattacactagaatttgcaaacgttccctccttttcactgaatttttttgaaaaaagcgcagcgcaaaaggggatttaaaactcatcgatttaaatggcaggactccctttctaaagctggtcatcgccgccgccccccccccggcttttgcttgtaaacggtcagaccgatcccccatcccccattttatgtatgaagtggtgcttttcattcataaaatgcctaagcctacaaagtgaaaacgcaaacatccaatacgaattatcgcaccgttccataaaactgcagactttcgcgacggtacaatttcatagttcgattccaacaatcgaagaacaaccgattcatcgccatcttccgcatccattctttgacaggtgcactcggaaacgaaatcatcgaaacgagacgcattcttttgcatgcatttggaggacggaaaagaatcgcagtcgaacaaattggcagaaacaatttcgaaacaaagtttggccttaaacccatttaaatgaatagagaaaagaaaagaaagaccctgtcgaagaaaatcaacgcctgttgcttggtgagcattttgcagtgcgtaaaatgactaaaagaaacattcaaaaaagattggaagcaaagacggacggaaaacctcaaattgatgtgatgaagcgaattcactttcaatggacccaaagtgacaaaagacgaatgaattggaatcagaaagtcgctctctcccatgcttttgtcagcaccactcaaaattttaagggaggcgaaaatgggctgtgttctgtccaaaagtgctgcagttttgaaacatttataaatattcaaagaaataaatatggtttacttggattaaaagaaagcagcggcagttggttattgtcttcttccattttcggcacaaaaacatcagaaaaaccgatggcaaagtcaaatttggattctgatacggtgaaggggtgaagaaaatcactataaatcggtttatattattattggtagacattattataaatttgcaaactccatcatatcgtggtcctccgtctgattatgcattttcatcaaagcctcaactgcaattgacagtctggcatcgtccggactgccaacatcaatcggagtttcttcccgactatttgagcaatctccagaaaagttttgttccgcaacggcataagcccttttgatcagactttcgattttgaagggtttattgatagtcttttgttgcttttttgttgtcattgacttcaatttaagatgttgctttgtgttatcctctctaacttttgtgtagaaacacgaaataacggaccgaaaaggcgtttcggactttggcagttcggtgtaccttttccaaagggcaattcggtcagttacccgtttcgaatccaataaattggcgtccttaaagaaaagttgtaaaacgaagaaacaaaattaaggacgatgaatggttcgatgtgaagtgagcacataaaacgttcatttggcagtgcagtaaaaggcgggttggggcagtcgaaacagaaagaagcgtcgcaaaagtcgcaagaaaccatcctcttctcgacgaacctttatttagttattttgtacaaaataaaataggcaaattcgaaagtgttaaccttttacagtaaaaacatctcttcgaatttggctcatcttttgcgaaaagttcatcgaaaggcaatttgtaaaaacattcatcgacgcacaatttgtcaagagaaaattcacgagaattgattgcctttaaggagttcacaaattcagaaaaatcctcggacggcgcaccatctttcccggataagcggagtaagaagcgaacgaatgattggtttaatacatcttctttttcttgaaaaccctaaaatacattaaatttagaaaaactttttttttggaagagtagtagtaatatgtgaggaaaaattatgtgttataacgaaattaggtaaaattgatagattttgtaattcccaaaattaagaaacttaaaaaggaccaaaaaagcattttattgtaaatccattaatgaaattccttaccaaattccatttaatcctcggcacatgactgtaaaaatatttattattttgtaaaaactaaaaaaaacaattaccgtctgttgtattgtacttccatttcacaacgatgacaaatccaatcagaagaatagctgcctttgttaatgggaagagcgggaaaatgacaaatggaatgaaaggaagagttgcatcttgagcaattgtacaaaaggccgccaattatttcctggaaattttcataaaatcaaacaaaacgacgaaataagtagtaagattccttcaaagatctctcaacttagaatcaaaaaattaaatgaaaaagactcaccatacacgagcagcaacattggtttgaatcggtgggactggaacgaggcgaagaattgtaagagcgtttcaccggaggactttggaatgtctgttcgatttcatgttgaagcccaacctctttgtcgtacacaatgttgtctttccgaagcttcgactcgtagacaaaagtcatctaaacaaagtttgtttattcaaaatttaagaaattctttttaaataatcttttatttaagaaaacgaccnntgcaggc

SEQ ID NO: 2206 - DNA, 3436 bp, Heterodera glycines
gtattatcaccgctttcttgacagacttcttggcatttcttccctcgtaattaccaatgaatgtgaaaattggtacgcacttaaacttaacattgacttgggatggattccgtttgccaatttctttgctgttttactactgcattttcttttacactttcaatatcggtttgtgtttactttctttggttgaaataaagcgacgcaaaaatatatttttattcagatggacgaaaattggtgtaaaaaaacccattacaaaacgctccgccaaccaaagagtcggtgactcaagccaagaagaagtgaataaatttcaaatccaatcatttgcaaattattcttatccttcagttactttcgcctcaacacaccgctgaaacggcagatgttgctgcacttcagaggatcacttcggaaatgatggacagacagacaattagccaactcataaaacgttttacaaaaacaaaacttattaccaaatcaaaattccatttagcaaaacaagaagatgagccgggctttctgcttgttcgtgccttctccgaatttctctatttttgcctttaccattgctacgtttttgcccttctctccatgatggtctgtctatttttacccgttaatttgagttttcatttgtccctttcttttttcagatgtgggcccttctctaccattctgtgttcggccttctcttccttttgctcacttgtttcctctgggccctcgtaaattcgcgcaaatggacattcaaattgtcccccattcttttggcttacgttgaggtgactcccaaacaaaaggacaatttgtttttttatttgtttcttttcaagttccttttgttggttcaatatgtgttcagcatgaatttacacaaaaatgagcttggacttcccgaatcggtggaaatcattggcttcaaacttgagcaatccaggactgatgcatttatggcacttttgttgaaggtgggacaaataataacactgaacacacaaattcccaccctttttaacttttttcttaccgttgccttaaagatcactttttcaagtggctaaagtccaaaaatcaccgactgacagaaatgaaaaaaaaatatcaattttcttttgcctcgcaatatttgctgatgagaaaagatcttttgtatgtcaatgtactcaactgataattttgaggacatatataatttaattttaaatcgagttcaaattaatttcttttttccctcacattttatattttttactaaaagctaaatttattataatttaaccgaattttattgctttttggtttttcgctttttaaagccatttcaaggagaaccattgcaataaaaatcctaatgatgagggaacgatataatattatgaccatgcagtgaatagtcaatatttaattctttattgttttttcttcagattatcctcagtcttccacttttcattcttttacgtttgcatttgcgcgaggattattataactctttgaacggacgtgaacgattccgacaagtcaattacggcacattcgcagtgaacgacagtcaaaggcacgtaaagtgccggaaattcacactttcgagggcaaatgaggtgaagcttgatacatttgagcaacacaaaaataaattgtgaagtctcattttcaaattatttaggacccatttggctgcatttcatatcttttgacaaagtattggattttcctagcggtcttttgcattttggtgaattcgccaataatcggtgccagagggggcggcgtcactttcttttccatcggatttctcacctttttcattgtgttcattcttcttcttatcgtaagctaatcatacttttttacttaaatcttctctttttttcactaattaggcatctttccgactcttccggaaagtcgtcttcgcatttttcaccgttctcatcatttacgcttccgttgttttggtgtccatttatctctaccaattcaagggagtgcccgagttttggcaaaagtggacgcacataaacgaaacggtgtgggaggacattggactgatcgattacaaagcaaacgaatttgggttggattttttaaataaaaaacattgagtaacagttttattgggatattattgccattttagacttctgttcactaatttgacaaaactcatctctctcctcgtcgtcactatgctccagctgaaattcttccacagcccttggtcccgactcgtctccgattccgcagaagcgtctcatctcgaatgcgtggagaccgttgacaccgtacgcgccggtttgtaaaaacggaatcgtataaaattcatggcaccttaattttggaagcttattcgttgtgattgaatttgtttatttatttgtttttgaatatattatttaatatttgcccgttaccattctttgttccatttcaccgactttttcatttttgtcggattttttgttttctactaatcacagtctcaatagttgcatttatatgcttttggtttcttatccctttttttccgccagtcagaagatggtgttttttatttttgtatcccctcttccccttcctccctctttacgtttcatccctcaaaagagcaaaggaatcaatatattttttattatgtttgtgtaaggttttaaacagcgaaaaaatgcaaaagaggaaatcaaagcgctagcgaaacctgaaatttagggaatttataaaaaacaaacgatgaaagtgattaaaagaaattcaaaatttggtttctaaatacgatagaaactcacaattttgtttgtacatttgcacaattgtcaccctcgcacctaataataaagttttgtcgatttttcactgtttttccttgtgtttttcaccgttcaattcgtttgttcgtgattccctgcataaataaacctttaatcctcttaataattcgttttcaattcgcaataattttgtgtgttacattttcagagattcgacgggctgtaatgcgtgcttccgacctttggtccgcattcaaagagttcgcttggcgttttgccgaagtgcacatccaccgcttcgttctgttggtccttttggtcgtatgtttggatcaccattgtctcctcaacttcgtgcccgtcctctttatttccttggcactttccttcttcacgttggcacgattcatttccctttcgctgtgtctgtaccttggactgatgttcatcgcaaaaagagtgtaccaggtaatacggtgccaacaatacagtgacagaatcaactaattgctatacaatatcaacttgttaattaacgatcttacttaatttcaaaaaagggatacatttataaaccatttttagatgagttttgtcccaagacttaaagacgatgcaagcaattgtacaaatatttacaatgacggaccatttaacac

SEQ ID NO: 2207 - DNA, 1800 bp, Heterodera glycines
  unsure (1)..(1800): unsure at all n locations
gctttgtttgaattttcttgtttatctctcaaatcagattatggtcttatgtgctggtctcggtggcacttccctatttgccttgggctatttgatgatcgctttttggatgctttggcagggcaataagctttacaccatgcataattactcgaggacgttggcgcgttggaatttcttggccatttattccgttgttgtgatgattgtcaaaatttctcttcaggcgagtcgtttgtgtccgtttgcccgattgtcacttttccccttttcagcttctcggctgtgttttcgtctctctccttttcggaatttgccctattcaacaacttttcgctgctttttgtgccaatccaattgcaagagacaatttggcatatttcagcagtgagaatctgaagacgtcgaacagttccatcaaatggaacattggcaatttcacgcagtgcggataccctggagggtcagccgaaaaggcggaaaactcgcagcacaatgaggcgatgatcggctacgatgtgctcgccttcgtgttcattgtgtttcagctgagaattctccattcgtggttcttccaacgctgcatgatcgagtttaggtgtgaggtcatccaagccaacaggtgagcagagataattccattcatttaatttaaaagttgtgtaaacaaattctaaaataattatcgctatttatttgccttttaggggtgccattcttatcaaccaactcattgagaaggaaatgcgtgaacagactgaacaacaaaacaagaaacttcacgaaatcaaagaccgaacggcagcgatccgaaaacgatacgaggaacagcaaaggcggagcactgggattagctttttctcgccccaaacatatggacaaggtccatttttgtataagtactttttatataattttttgctttgcaaaaattagcatttgttttttaatttcgttttaatttgttttgatcaatggtctatttctgtttcgtattattcgacccgttccgatggtctgcagtctttttctgacactttctttcgttcctctctaatgccatcactaatcattgtccaatctctctcttttgctttcaaattgggtgattagtcattactcccaaatgggtggtttcgttggtgttccactgattgtgtatgttttgtctgtcctcagtgtttcggcacagtccttcttcactcgtcgagcgtcttccgacttttgacgaagacgaccccttaccgagttacgacctccgactttctgtcccgtcttccgtccctggtttgttgtatttgcattgccttcttccgtgtgctcgactttcgctctctttcccgcacttcgcttttgtttttcgtttgctgtgtttttgtttctttggaataatatttaattttgttatttaggggactattaaaattctcgttaagtagcataatatttgttattggtgttggtttgtgaacattggcaattgccctaatgtgtttttttttgtaacccttccttatacagtaattacttttctgctattcttttgcctttctgctttattaatgcgacttttcccttggatttgcttttaacattttttattttgtgatattttttttcttatagccaaacgttctggcgactattacatgtttgactacgagccggacaaagatgaattagtcgtaccaattgagtcatttgtntcccgaaggtaaacaatcctaattattttttttacttaattttatttgtaagttacgcctggtgccgntgactttgacaactcgaccctgctca

SEQ ID NO: 2208 - DNA, 4612 bp, Heterodera glycines
  unsure (1)..(4612): unsure at all n locations
ccgtaaaacggccaaaattgggtccttttttagtgaaacagttgagtttttacccagcagcgggaaaaagttttttttaagcagccgccgccgacgaccaaacaatagaaaagtctacaagtgggaaattgcagttatttgcagatcgtaaacaacttttatcacttttattcagcaaaaaaaaaattatggataaatttgcaaaaaaaaaaaaagtcttcggaccggaccccaccctttccccccccccccgaaaatttttcctggctacgggcttggtctgaacagcccgaactaaatgggtggatttgtattggcaaaacctggtaatttcatatttaatttaagaccaacaaactcaagaagatgaggagaccgatgttccatcgatgcgaaaactccccagacaagaaattggaactgagcgccaagaaaagttggcaggtgacgagacggaaaagaaatcgttggaggagaaaagtgaagaagagtcacgagccaaaagttggggtattgttttgtttttcgaaacatttccatttgtcagtcaatttcccttcccaaaaggtcaaacaattctttctctgttccttttcgccttgaaattgttccgttcactgatcggatgggtctccgcctttctcaaccgacggtctcgcgagcatcgatacgttgaatatgtgttgaacaaagagaaggagaagctgaagcaaatgatgtgcaacgtaaatgcccttaatacgcttttacgcttttccctccttttttcttttaggagcttttcaatgggcaaattacgacttcggcattgcgcgaccgatgggaagcgcacaatatgcatttggtatccagtgaggcggacatcaaaaggttggccgggaggatttgatggattataataaacaatattagtatttatttgtttcaatcgcttaaaattgaggtttttaggttggaagacgaggcgctcaatcgttgggagcagcgaaacattttcgcccgttttatcactgcgattggaaattgcatcgccgcccacaccgacataatttgctactgtttcgtgatcattgtgcacgggtacactgccggactgctcactttgccacttcctgcgcttgtctttctttgggggacgttggccagcccgcgcccctccaaattgttttggattgtcatgttcgttttgaaatagcccagctaaattttcatatttcattataggataatttacaccgaattcgaaatcgtggccaaattcgcttttcaattcggattttggccttggaatggggacacagtcggcaataacaaagtgtacaagacggagtatgtgttcggagttcagcgcattcagggctttgccggcaaggacgtcgccctgctcatcgcactctttttccaccggtaaaaacgaaatttgtgaggaatttcacacataaatgggctttttttaagttatatgttgaggaaatttggactttggagagacgcaagttccgacagattgattaacgaaatgcccaaaaaacggatggacaatgggtcatcttcatcatcatctgctgaaaaaagtccacagaaatcgactcaatcgacggttgttccatcgtcgagtggagaaaactttgaatcggtggccaaggcacaacaggaacaggtaatttggattttttggtagtttaaaacctaaaaacaaaaatagaactccgacgacatcgaaaagggcataaagcgacaaaggccgtcatcggattccgttgaagagattggaaaagagactcaatccatcgaaaaggatgagaaaacagttgcaccaatggttggtcttatattaatttgtataataataattaaatttttcataaggaattgccatcaaaagatgagaaacgggacagcattatgctcggatttgttcaaaaggtattttgttttgattggcattttctttccctgtcaatagatttccctcaattcattctcccattgtcagctcatttttcccaaattccgttacatccgcgacctctatccgctgatgttcttcctggacgtgttgtgcatgttaattgttgtttttggctattcatcttttggcgaaggcggcacaggcgacgttgtttcggacattcaggcactgattggttactgtagatcggatgttcagagtcatccggtttccgggtctatcaaaaaccggtcaagccggaaaactggtcactccggatttacccaaaaatatccgggcccggtaaaaaccggtactgggctctgctcggtccggtctctattgcttaccgccatctgacactggatggaattttcagagcaatcgcatccctataatgatggtcgccatcattctgatccaatctctgctgattgtcatcgatcgcggcctttatctgagaaaggcggtggttgccaaactcatttaccatttggtcactttggttttggtccatgtttggatcttcttcattttgccaagttacacgagaaagtccgtgccatttcctctcttaacataagaattccatttaaactttaaagggaagttttctacaattatacagcaaaaactctctactttgtgaaatgcatttactttctgatttcggcatggcaaattcgcaatggttacccctcattgtgtgtcggcaatttactcacccattcgtatgggttgatcaacatggtgcttttcaaaatgtaattttctgattttttaacaatatttataattaactttagctttatgctcaccccatttgtgttcgaattgaggacagctattgattgggtaggcattttattctttcttttaaccctttttgttttgtaatttcggcattttaagacatggacagacacttcgatgccaattttcgactttttcaacatggagaatttttacgctgtgatctacaacttgaagtgcgctcgcacttttgagctggcatttcccgccccgcggggcgaagccaaaggggcggtgatcaaatatatgatgggtcttccatttatcatcgtgctcattttgctcgtctggtcgccaataatcgccttcgctctgatcaacaccattggaaaagtacagtcgccggacagtgtgactctgatcgccagtttggagggatatccggttggttttatttactttttatctaattgtaaatcgtatattttatttatcaggcgatttacaaaatggaagcgcagggctctgatgaaataaaaaactttgaatatgctcagctggaggaactgaagaagaaatttggagatctgacggagcgaataaaagatttcaacgacggattgggcgacagagttcggatggcggtcgcgttcatcaatcagtactcacacaccgacgttttggtacattttttcaaaatatttttataattgtcattttattttgtttttagaaaatccgatttcggcccgagtcggaaacatcttggcaaatatcccccgagtctttggaggcactaaaagccgcattgagcaacaattccacaatcaaattgaacttccatttggaattcaccaggccgagccctgacgggaaaaaagacccgcaaaagcattcaaagacttttacaatcgatgcaaacagttcggcaatccttcatgccattgaaactaacgaacaatgggtacaaaattatgccaaccttatttcatccaaaaacttaaggcaaatatttcgaatgctctgccgctgtatttgtccgttccaagtcaaggcgaagtccaagcagcgcgccttttgcatttggtcgctttgaagccggacgaaggccaattggaatacacatacaattatttggccatgaaattgtcgccacaaacacagcaaaatgcgtcctattggaccagtcaagttgatctcaacccgaatatgacgctgtacaacatttgggagccgacaaaagtgacctatgggatggaccgttcgcttcattacaccgaatttgtggcctttgtggaccgcgtgttcccctcgtggttggacagttacgtccagggagggtaagtgaaagcatcagacatgcaattggacctcgtttctccacccccagcatcattctcatgtacgccggcattgtgctcgttgttggccgtcttatccgcgggttcgtctcctcacagccattggacgtgatcatcaacgaaattccgaaccccgactatttgctcaaaatttgtttggacatttatttggtgcgcgaggcgggcgactttttgctggagcaggtaaacaaccgactagaaaacaattactttgacacaacaatgtccattttaaggatcttttcgccaaattgatcttcctcttccgctccccgcaaacactgatcagatggacacgtcacaaatccaaaaccgagtgatgatcattttaacagcaattatttttacttttcttttctatttttgattcgactctccaccctttcccaagtttcttgtcctctcttacattattccttttgaactgtttcgagcctttcagggttagaattagcctcaaatatacataattttttcgtctcgaatcagttcgttctttgtattttccgctgntttctgtctctgt

SEQ ID NO: 2209 - DNA, 1654 bp, Heterodera glycines
catatatttatcggaattttcgtcaaaatttgtaaatgtaataaggtgagtctaaaaatggcgactggtggtaaaatgggattcggagagattgtgccgaaactgagtcaggtgaccgaatgggacacaatggccaatcaggtggacacgagtcgtttgtgcataattaggcttactgatttccttcgctttttcagtccctcgccgaaggcttacgctgcgagataaaacagacgtgggacgggaagccgttggatgggcacggacccatcaaaatttggatgcgatggcatttccggcgaatgttcgggcaaccccacaaaagagtggtgagacaatggcattatttgcttgggatgccggcaaaaattcgtcatccttaattctttttagattcgcgtggagatagaagctccgctcgtcgatgaccccgaaccgcccagcgaattcgccggcatttgcacggatgtgagtaaattaggcaggggtcgatcggtacagcagttgcacatttttcaagctgtacaactacgaatgtgtggagctgttctttgccaatgacaagggcttctacacggaggtaattaaataatttgtaaattaacttttgaacttgggggcgtgggaatggcattttgtcctcattggattggcatccgtttctgagttcacacatttctcattgtcaggtggaagtcggtccgcacgggcattggctcgtccttctccacaaaggctacagacaatgctttaacagtggcgacaatttgcaattggaagtgaaaaacgaatggaagggcaccgaatggcactgccaattggaaattccgttggcatatttgccgggaagtaagccaagcaaaagccactcattctgtcccgttctttgtttgcttcagatgtgaccaaattcaacgcgtacgctttgcacggttctgacgaacagcgccatttcgaggcactgcacgcggtcaccgacggcacactgacggagccggacttccacaatctgatgttttttggcaaactcgacacgaaacgaatcattccggatgggtacaatcggacggtgttcaacgacctcaaatacggcgatctttgggaagaagccaccagcgacaaatgaaaagccgaaatggacattttaacactttttatcgttgtgtatttatgtgcttttggtacttatcattctttgtttatggttgtttacgaataaatcaattaattattaattaattaattaattatggtcactttatcagtcaaacgtcctcttccctttgtatttgtttgttttgcaaatcatttgctgtgactctctttttcgtttctctccgttttcccatgtttacccctggcgacgatttctgcgccgcctgcggttccatcatgcaaactccgaatgaattgaccgccggctccggtgtcaccaatttcatcaaatgctccgtctgcgatgcaaaatggccctataaaagtgggcatttcccctggggctttgccattcgttgcacaaaagttggttgctggcgttttgcagttgtccacggccaattgcttagtcgtgcacgaaaggaatttcgagcagcgaaacgccgtgggggaagaaaaggcgaaagacagcagagaaaagagacggcgagggaagagg

SEQ ID NO: 2210 - DNA, 1664 bp, Heterodera glycines
  unsure (1)..(1664): unsure at all n locations
taaatttggtgttttggcaaggaaaattttagtttctcatttttatgtgcataatgcatacggtaatttgtgggtgcgagacagtgggcggcgggcataaaggagtatttgggtgggcggggcggacagggggcgcaactgaataaggggacgcgatagcagcgacaacgggcgatgagacgcggagagtgaagtggttgtgccatgcgggcgggcccattagaggggtagggcggggcggagtgagcattaatcggtcgcaaatcgcattaacggcgtcgcggttgtgaaacgcgcctgcggggccgaccgccaaattttattgggcgaatgaatgaatgttcaatgaatgaataatggttgagtgactgtgattggataccgctgacgatgggagctaagtgatcagcagaaagcagtccaaataaatggcgaactgacaagatcagtcagtcaaacaaaacaaaaaaattcggtggctgatttggcgattgggtggagngagggggcggtggggcattcatcgcttaactcctccaccaccaccacacgggcggaaatcctaatccaaatcccaggtgaatgactctgtgaatggataaatgggattggctgaggcgattggggagcgaatttggcccctccggcagggaagcggcggcggagaggggattttcgagggaggtaatccgcgcgactcaccgaacaccaccaaatgcagaaggggagggagaagaggggataagccgaagtgcttacggacccaactaagtttatgatgtatttgttggtttatgctgcttgactttttgacggacgcgggagaaaagtgagagagagagaagactaacaactaagaggatgaggaagggttgttggaggacatactgactaagctatatgttggagatggattgtgcattttgcaccctcttcccccagcgccttaagtctcttttttttacaccgtcccctccggctgggattggtgcctaattttttgtcaagaagctttggccgttacagtgtccagcggcgaatctaactcaaacatgtgtccgctaattccgtactaaataattccttgtcaattgggttgtggggactgatgagagatgccagtgagtttatatctttgtttactgtatttgacacattcggtagtacaattttccccctggtatatttatagttcgtacatatccaatcagtcccagcaaaatggcacatttcactccggtactcaaacagcacacaatctctttggcgctgaagtgggtggtggcggtggtgatgggagacggattcgcgcctcccgaagtgtgattatcccccggggggacgagggctttagagggggagagagttgatggccccctattgtttgcccatgtcgtacacacattttgtgggtggtggagtgccgttaagagaattaatggacttgggccttaagcaaaacaaaacaaaaaaatttgttttcattaggatttttcagggtgaaggaatggaaaatgtgttaaaagtttttttttgttttcaatgtttaattaagggaaggaatggtgggggatgggatgaactttaaaatttaagtaaatgaaagcaatttccaataattatataagctacttcagacctgatgtaaagcaaatttacaaggg

SEQ ID NO: 2211 - DNA, 2667 bp, Heterodera glycines
  unsure (1)..(2667): unsure at all n locations
ccgcaaatgtccgtccgcaatgtccgtccgcaaatgtccgtccgcaaatgtccgtccgcaaatgtccgtaaggctccctcggggggacgagggctttagagggggagagagttgatggcccactattgtttgcccatgtcgtacacacattttgtggtggtggagtgccgttaagagaattaatggacttgggccttaaaccaaacaaaaaaaacttttttgttcacatggattttttcagggtaaaggaatggaaaatgtgttaaaagtttttttttgttttcaatgtttaattaagggaaggaatggtggtggatgggatgaacttttaaattttaagtaaatgaaagcaatttccaataattatataagctacttcagacctgatgtaaagcaaatttacaagggataaatttaaaattttttattaaataattatttgaaaatttttcagtgtaattgtaaaagggtgcagaagtgccgtgctaaaatgaaaagtcgaaaaacggttttgaatgttttggcacgaaacaatggacactcgagaaaggagggcatgctgaatactgtaatccaaaaagcagaaaaaaacaagtcctaatttgtccattcattaattctcgggttttttgacttaatggaagatattgtctcgagagtttaatggaatttttatgagataattttttttattaaattgaaatttattaaaattagagtgttaatttagaagaaaacgtttaaaaatgatacaaaaaccaaaaaattataaattatttttttaatcagtcaaaacgatcaaaaaattagggttaatcatttgaggagagcccgaatgagccggaaagaatgggaaacgaaggatgagtgaatgagtggttttgggtgtgtgtgtgtgtacccgacgatgaccccttatggaagcgaaaagatttgagaggatttgtgtgggaaaaggacattttgcgcccaatcaaatggactaatctttgtcaatttgcacataaatgtgagagaaaagaaaaatatgtacaacaaagtcggtggctgttttgtgtgtacggcttgaagaagttggcgttttgtgttgcgcgccgctaatgagaacaaacaaaagtggatgggggtaattaagggaatttatgtaataatccggatgaacaaaagtgagattggttaggccgttattaaaaatatttgtggtttagtggttagtgcttcaagatttcgccctttttaaaaattggtgtaataattactgaagaaaaaaggcaacttatttctcgttgttttcaagccaaatttcaaaaaatcataaaaaatcaaagagttgatgaatccggatacgtttttttgcattcgattcagaattaggtggtatagaaatacaccgctggtaacgaaccccgaactccacgttaaaccggtctaaaacccgaaaaaccgttttcggcaattttgacctaaaccggttcaagaattttttttcttgccagtttgaaaagctgatcaaaagcttttaatgtgattttgtagaggacagatggggctattaaaatagcacaaaagcagatttttatcacatcaactttttgagattttcaccaaaaataacagggtgatcatttgttatgcaacgacctagtagaatagcagttaaagactcagcacatttttaaagcaaaatctagggtattccgtcgggagaagttaaatttcttaccggcggctcttaaaatattccaaataatttctgaatttaattcaatgtcagaaagttgctgtttagggttgttcggttgctcattttcagaaatacaaaaagctttatgcaaacttagactgtaaaaattcatcatttaataatatgactttctatttattnaatgaacgacattaaagttttttatgcattttntagcataacataattgatttaccaatagtntaagatttattctttgccaattgaataatattataaatatgattttttgattttcaagacaatataatcaaaatcaaaattatctgttttgttgtcttgtgcttaatcaaatttcgtaatggactttcttgcccagactttgaaattatattgtggtaagatttcttataataattgaaagatcaatttgatttatgacaatctcaactagattaaaaaagtttagctgttattattaagtttacttaagacaataatatctgctattaggataattctcttgttttccgccgctctgaggcacttaggcttttgaaccagaccaaaattttattggtgaaatcaatttgctaaattcaaaataagaaatttattttaaaatttaatgtaagttattttatcagtttttcttgagtgcttaatatttgtggaaatttttatcaaaagttcaatataaatatcatttataaaaatattatgattaatgaaaactttttaatttcaatttctgctattaggataattctcttgttttctgccgctcatggtacttaggttttttgtaccagaccaaaattttactgatgaaatcaatttattattataagattaagtgcgtttaatatacgttgattcattatgtaaacttaattatgtctaggtagcttattatttaattaaatgatttcaaaaaaaattcgttaatatttagctattaa

SEQ ID NO: 2212 - DNA, 1926 bp, Heterodera glycines
tgctaagccaatgtttagtgtccaacaaatataaatatttattttgggtgcagacaatacaatttatttagaagaaaataaatgaagagaaattggggaagaacaataatgtcaattgcacaaaaagtgaactgaatagggaagagtgaacatgaatgagggaaagggggaatttaaataacaaacgaacagaggggaaaagaatatcgattgggtcaaagggcattgcgtgtggcgttatgttgaccacactcgaaagccaaagggcgctgcccctaacacctccccttttaagaagtgccgcttccgcttaatgagggctgtagcggtccggtggccgtcgattccgtcgagggtatactcggggagtgatcggcctttcctcattcggctgttcctcctgttcgatacgtccatcattctgttcttcgactgcccggccgatttcatcctcatcggcttcacttcgaacggcttcgtcttgaggctgtacatcttccggttcggctcttacctgcggtggaaggccgaagacatcattgaaaatgttcaattgttctgtcgtcttgtcctcaatttgccgtgggcgaatttggttggcatggtaccgattggtcgtaccatctgcgaatttaatgtcgtaaattacgccggtctttttaacgacttttcctggacgccaattctgcgaaattcggtgacgggcgaagactttgtcgcctgggccaaactctcttggtttggcgccaaatcttttgttgaaacgccgctccatcagttcatcacgctccattggctgaaactgcggcgggcgcaacaaatccaatgtggtcctcacttttcttccaaggaacgcttccgctggtgacttacactcttgtagtgtgtcatttggggtggtacggtatgccgtcagaaatgtttcaatgatttctgcgctaagggctccctccccttttaactttcggaaagttctcttgaaggagtccacaaatctttcggcttgtccgttcgacattgggttgtacggcgccgaaaaacaatgatttatgccgttgctctgagtaaaatcggcaaattctttgcttgaaaattgagtgccgttgtccgagacgattgtctctggaaggccatgtcggctgaagagataccgtaatttttggacggttgctgctgtggattttgtcggcatttcgaagacttcggggtacttcgagaatgcgtccacaatgagcaggtactcttttccataaaatgggccggcatagtccatgtgaatccgttgccatggtttgctcgccttcggccatgagtgcaactctgtttttatgggtgatttggccgcgagttggcaaggctcacaatttctaacgaaatcctcgatttccgcgtccaattttggccagtacacttggttccgcgccagttgcttcatccgttttattcctggatggcctttgtggagcattcgtaggactttcgctcgaaattttggtgggatgacgactcgttctccgtacatcagacattcttttgtgatggagaggtcatcttttcgacgaaagaacaattttatttcttccgtttccgaagcaattgctttatcattgggccatccatctctgacaaatttcttaacctttttgatggtttcgtcttcgttccctgctgaaattatgtccttcgatgagaatgacactgtttccaaagtgttgctgaagaaattttcggcttccttctcaaattccatggacgcgatgactcggtcttcttcaggactggtgctttttgcaatcagccttgagagcgcatccgcttgtccaaattctgtggtgttcacatactcaatctcgaagtcatacgccaacagcataagtgaccatcgtaaaagacggttagcactcatttggcggattccctttttgt

SEQ ID NO: 2213 - DNA, 2674 bp, Heterodera glycines
acacatatactgaatagcctttttgtggattttttcacgtggtgttcacctgtgtttctctttctttaaggaggtatttcattagcgtttccttgcaattattttgtttgaaatgattttatttttattttttagctttggctcggaaagtttcgtattttccacgcatattttttttaatcatcttttcttcggaatctcattgtatcagagtatgcactattctcatcataaacaatcatgtttaagtaggcttgatgttaatcggaattccgttttctgttaattatgcattagcgttagtggctgactttgtctcatatttatttaaacatagttgaattttccataatcataaatatgtaaatgtccggattatggttttatttcagtaatgtcaggggagtgtatttgtattcagtgtgacgacctaaatatgttccgtagatcatttcgtgaaattttcgcactgcgtaaatcaaagccaatccctctttttcaatttgggaataatttctttcagcgggtgtcaaagatgatgaggcgtgttcgatggccttaattgctccgtttggaaatcggtgggaaatgactgcgccaattccatgttctgaggcgtcagcggccacgatgatttccaattttgggtcatagtgcgtcaggagcaaatccgaggacaaaatttccttgattttaatgaatgctccttggcattctttgccccagtcccagtctttgtccttcttcagtagttcatccattggttggcggatgaatcgcatgttcttcacaaattgttgataatggtttaccattccaaggaacgtgcgaagtgacgggacgtcttttggtgctggcatattcgttattgccgcgattttgccttggtcgggtcgtcttccatctttgtcgatgatttggccaagatacttgatttgttcttggaaaaacgaacatttgtccattttgacccgaaatccccagctttggattcgttcgaacactttttccagattttgaaagtgctcttctttcgatttgctgacaattatgatgtcatcaaggtacgccgtcgcaaactcgagtccggccaggagcttatccataacggattgaaaaattcctggtgccgtcttcacaccgaatggcaatctgttgaatttgtagtagccacggtgggttgcgaccgtgcatagctttttcgcttcagcagtcaactcaatttgcaggtaggcatcttttaagtccacctgagagaagacttttccaccattcaacgtcgcaaaaatgtcatttggcaacggaagtgggtgctgatggtccaatagagcgttgttgaggcccgtcgagtagtcgatgcacatacgggctgttccgtcggccttcttcacgattagaatcggtgccgcccaatccgtgtgctcaacttttgtgatgattcctaggctctccaacctttccagctctttctcgacaacttcccgtgagttgtgaggtaccggcctagcctttctgaaaattggctgtgcgtccggttttaggaccaaatttgcttttgcctttgtgcaaaatccgagttcttctttgaacacgtcggggaaagcttttttcagcttggtgaggtattcgttgacctcggtgccttttggtcggattggagcgttgtcctttttaccgcctttgcacatattcaccatttttgaggaaatcttttccttcaattcgtcgagcagcccaaatgcgtccattgtttgaatagacagcaaatttagggaatctttgccggccacataaaattcttgttcaacattcactccgttgaattcgaatgtgccggtcccttttccgatgaagcttcttgtgcttccatcgtaaagcactgcttgttctttacaggctttgattttagggctgccgatcaatttgtatgtcatttcgtttatgacattaacttctgcaccgctgtcgaggacaaattcgatgactttgccttgaaaggagaccttgacccttagcaatgttgactttgttgtcggttttgctgtggtgccaatgttgactgttactatgtggacattgccaacatttttcttgagccaacttttggcgttctttttgcgccattcctgcactgcttcacaacgcaactcgatgtgtccgttttgtgagcactttcggcatttgtagcctttctgcgggcaagctgcgtggtgatggttcgtttgaccgcacctccagcatttttgttgctccgtctttgtgctttgttggctttttggtctctcatagttcggcttttctcgttttggatggactgcatttacggcatgacttcgttgacttcctagacgaagactcgatgactttggcctccgcaattgtagtcataaaattcatgcagtcctccaccaccgcatcatacgtgatgttgtctccatccgcggtcaatttggacagaattctttgccttagcattgcatcgccgtgcgatttgagcgctgtcagcaacatcaggacatagaactgttgttcttttaagtcgctgaatttgaaatccgtgatcaaacgcttgtgacggttgacaaaagatcggaagtcctctccctcccctttgcgggcgatcaagcactcaaaaaggtcgatgaagatcgattgaggcttggcgaacagcttc

SEQ ID NO: 2214 - DNA, 2150 bp, Heterodera glycines
  unsure (1)..(2150): unsure at all n locations
gcagcagcaagtggggaggtcaccgggtgcgcctcacgcacccattgcctctgtagtgacagtatcagcagcagcagcagcagcagctgacgtgtggcgttgttgttgttgccgtacgtctttctcatgccctgccttctgctcaacggtgtcctcaaatatggtgtgaaggccaccgtagcgngttggggtgttgggatgtcgacggtgattgatgaggcggaggcatgaggccggagcggcggagccagtgtacaaccatcatccaacacagtaggaacattggcagcacgattgcgtagttggcgataaggaacagggtggacaaaatctgaacagccccatccactcttgcccccgccgcggtcatcgccgtcgttgatgtcacggcggcggctgacgtcgtgcctattagtgtgctggtggtgttgttcagcaacgcagcttctgttacagtgtatgctacgccgctaccgccgccggagatgacagcatctgccacgctgtcgtctgattcattagcgtgttgggtggcttaaaaattattattattattacatggaacggtgcgatgtgcacattgccaagacatgtaatgtaaaagataataaaaaacaaacaaaaatatgccaagacatgtaatgtaaaagataataaaaaacaaacaaaaatatgatgtcgaaaaaagcggagcggtggcaatgacgcgcgccgacatttccggaccggggtcgaacagcggatggggtaccatacgaccaccctcacgtggctcgtacaaaatcatccagcttaggtttgacattttggatttgttatcgtcaatatgtttatgatgatgatgatgatgttacgatttttggaaacagaatggtcttttacacaacggcaactttatttatgcaatttttgagtcagacacaatgtgacggttgtagtctatcattatcaactgatcaaattccccgagcacaaccatctcaacgccgccggccggaatctcttcgttgaaagcgagccgaatgctggtagtgccggagcggagcagttcaaagccgcagctgtcatccagcgtcgaggtcatgggcaccacaaaaattgtccatccgtcgcggaactggtccagcgtgatgtccatggagcgttcagagttggccatgcccagcgcctcgtacatgtcaacaaagggtcgaatgtaggcggcgccggaaaagtccatgcgatgcggcactgccgggtacatttgaccgccggcgtgcacgctgatctcacggatggagtatggcttgaagttgaacggtgactgcgccagctgtccgttgaacgccccgtttgccaccagcgcaatggtcaaccgacgggggatggcggcggaaaatatgttgtggtccatctcggtacggccggcggtcaggaacacggacttcacctccgtcttccgtaccgcgtaggtggccggctgcttctccagcgttttgtagatggacaggttcagcgagggttgcacctccaccaccttcatgtacagctttatgtcgtgcagatacaaggcatactgctgcctggccgctgctcctgccgccggcgctggcgccaggttttgcaacagaaaagtgttctttgcacggtagatggtgaacaggacgtccatgttgtttaataggtacagctcctggttgcccaggtcaaagtccaggcgggacaggaagcgagcctttcgtcctccctcaaagcgagcacagcgtgccatgaagccggcatccgtcgcgctgtcatgcttcagtgagggatggtagcccgcgctggccatgaaatgaccctttgcactgtttgggaaggacagctcattggtcagatacgccttgtaggggtacaatgtgccgctgtcatacaactcagtgttttgcacttcaacctaaatattggtaattttctgcaagtgaagagtgttcggatgttgtatgtgtgaccttgagttgttgaacaaacgtttgtccaatgcattggataggtccgacaagttggtctgccgcttcaattggtacccatcgtccgccagcgtcctccttttggatggacaactccagaaacaggtagacacgagacatgtcggcccacaggtgtcatgaacatgcggaacagatacggtc

SEQ ID NO: 2215 - DNA, 988 bp, Heterodera glycines
atgcgctttgtttcagttgcatttgcttatgccgtgccactttggacgatttggtgcccttagtcggcagtacttccggtgatttattatctgtcgaatctgctttctcaatgtgttttaattggtgtcttttgctgtttaggaatgctcctcgccttcgtttaccccgccttgatcgatttgttcacttttgtccctcattaccgtgcggaaggacatcgtcaaaaggcttgttttcgccttcttctgaacctttttcttgccagcgtcggattgtttggcatggtggccggtttatacgcgagcgtcagcaatttgataagtcatggatcgaatgaatgcaatgcgatgacgacgactgggacgccaactattatgtggaacctttataatgggacaactttgtctagcagtattcagtgatagcccttctgtttcatttgtaaatatgttgtatttgattgtctgtacataaacatatgaataaatttatctttgttaaaatgcatattttatcaatggaaaattttattttttcctttgggaattttgacgatgagcgaatataagggagagaacgatagttttagggaaaagtgacaaaatatttttttaattaattttaataaattaacacagaattttccgtttattcttttgatattttctctcttccgtccgatgattcaattgaccttttcattttaagttttcctttcgttttgcgccgtgaataaatgttttctttctaattgatttagtcctttaaattccctcgagaaaaatgggcaaaataattttcgattgacgtcgaattgagggaaaacgaaacgaacgaattaaacgcatcagccaaagcaaacgatttgttgtttttgtatacattttaatctcccattagtcaatcaccttctttcgtctgatcgtcgcaaattaacgcccccaaaatatttatggtccatttaatttaattttgcccccccccccc

SEQ ID NO: 2216 - DNA, 6452 bp, Heterodera glycines
  unsure (1)..(6452): unsure at all n locations
tcggattgtttggcatggtggccggtttatacgcgagcgtcagcaatttgataagtcatggatcgaatgaatgcgatgcgacgacgacgactgggacgccaactattatgtggaacctttataatgggacaactttgtctagcagtattcagtgatcgcccttctgtttcatttgtaaatatgttgtatttgattgtctgtacataaacatatgaataataaatttatctttgttaaaatgcatattttatcaatggaaaattttattttttcctttgggaattttgacgatgagcgaatataagggagagaacgatagttttagggaaaagtgacaaaatatatttttaaattaattttaataaattaacacagaatttttcgtttattcttttgatattttctctcttccgtccgatgattcaattgaccttttcattttaagttttcctttcgttttgcgccgtgaataaatgttttctttctaattgatttggtcctttaaattccctcgagaaaaatgggcaaaataattttcgattgacgtcgaattgagggaaaacgaaacgaacgaattaaacgcatcagccaaagcaaacgatttgttgtttttgtatacattttaatctcccaattagtcaatcgccttctttcgtctgatcgtcgcaaattaacgcccccaaaatatttatggtccatttaatttaatttgcccccccccccctcagtcattcctttcaatttttagtccaaatattctccgaattatggccaaattgcgcaccctttgcttttacgttttaattctctttctgttcggcttcaccgtctttgatgttcaaaaaattgtaaattattacaaatttaaatttcgaattctgtcgttttattaattcattgtgtgctgtgccgttaaggtcttccaattcttagacgataacaaagaaacggacatgttcgtggtgttcaacgacacaatgacaatgccaaatgtttgtttgtcttgtggatttgttactgtagaaagtgtcaaacggttacagtaccattcagataactttttgcatttccaaaaaccacgcgtggagtcatttcaaaaccacaaatgtgagtgacagcgaaattgacgacattgtgcaggtgagacgatgatgaatccacacagaaaaggacgactgaaattggagaaatttaaaaaacaatggaaagggaatactgtatgattgggatgggactgtaatcattgcttgggcatactgtagtgggacgttttaaaagaatactgaatccatctagaggggtaccgtaatgagaggagtgaacgaattccacgaccaattatgaaggagtacggtattttatttatttaaatgctacagaaaggtctaaagaagatgagaaacaaaagcgatttcctgagcagtccctgggacgatctgatggtggtcgacgcctttcaggtgaccgaccgttcgttcggctgacagagaaaaatcgccgaaattccatttgcgaattttaagacaatttcttctctgaattcgatggaagtcgaaacgaatccgacagtttttgcgatgactgtgcaaaaaattgggcaaactcagcgaatggccaatgtccgaaagatgtggcaagtaatgtccttgttcagcggttttagcattttccgtgccatttccattggcactctcttccacacagaaatggaacgacgccgtcgcgcaaagggacgtcactttcgacgaatttaggcaaaaggtcggctcggaaacggtgaaacggtgagaaaatgccgtagagaaaaagcaaacgaacgaagcgacagatcgttgaaaaatttccaacggatgggcggcggcgccaattggaggcctatccaggacgtcaaaatcacttggatttcactacgccaaatgtgcttccagccgctatacagcccggacgaattcaaagaccattgaagaacaggtcagagaaagagagggcggtgcagaaacagagaaagaagggagagagagtaaaaggaagagagagactggggataacgaaagagaggaagagagaatggaaagaggggaagagagagagagatatgtgaatctagggaggaagataaagcagtaattagagaggcgaagaggaatgaaaagggatggaaaggggatttagagagaatggagagaaagagattaagagagggtggaaaagaaagataaagacagagagagggaggaaagataatgaaaaggaaggggaaaattgccatttttcttgaggatcaattcttcaaaatgcttatcgttcacggaaaagaatacgagtcgttggactgcatgagcatcgacttccacggtcggcccggggaggaggcgcgctatttggggccgaagggacggacgaacgatggcacggacggagacgtacggacgaggggggcaattgaatttgggttaaaattctgttttttcagctctgtctgtccgaatcacacgaaattgtcgcggaagtgaaagaaatacagactttgctgccgggcgcggaagaagcggaagaaaaatgcatggaatacgggggggaggagcagttcgggacggagttggagtgccatggccaatgccgacttggcctaattcgggtcagctaaataccatttttggttggctgatcagagaactccctccaattttgcaatttaaaatttcaaaaatggactttttgatcaaaaaccatcatccgttagcaaattgaaaaattttgtgaatgtttcagaaaatttgcaaatgcaccgctcgcactttggaaagcctcgccgattcggaaactctacagaattttcccctttgtgactatgcgaaatgcaatttgaagttaaatggaaaaaaacaattaaaaagggtaattagtgaaattaagtgccaccgaagaagcattggaaaattgggaagcgacgctgaaaaattgcacgacggagtgtctgccgaattgtagccaaatcagattcagaataagcaaaaagacgaaaagcgcacagagagacggtgagaaaggaaaagcgaagggcaaagaaagggaaatgaggaaaagcatttcagacagcacagaagtgaagctgttctggggctcgttcgagtatttgcgactgatccaaaagcagaaatggtccttcaacaaattcgtctccaacctcggcggctctttgggcgtttggttgggcctttcggtggtttccatcattcaggtcgctgttttcaaagagcaaatgaatcattttgccatttttcaatttttggcttttcattttgccatttttcaatttttggcttttcattttgccattttcccttttcagttcatttcttttatgctcctccgactgcacaaaatgatgcacaaagaaagtgccgtcgaaggcgaagaaacggagagacagaacgaaccgcgtgaaatgccctcgccctcccgcgccggcggagacaccgaaatttcgatgagtccgatggacggcggcggagggcagcggaagaagcgatgatcggctaattatgcacactaatgggatatatgacgtcaaagcagtcaaacctaaacaccaattcatgccatcattaggggcgactgatcgataaaagaaaataaaaataaaatgggcgctgtctcaggccaaatgaaggcgaaacgctggcaaatcattgatttaaaaagcataatttacaaaataaataaaataaatgggcaattaaattccattcattcgtttgcctttatatcataaaaccaaaattcattttgtctgatctccaaaatgagtttttcatctttgccactgcaaatgctaataatttccacggctttcactggcggcgccattttggatttaattggagaagaaacggaaaagtttatccaatttaaggtttggttgggaaggggcttttgattttgcaacgcttaaaacatttgcccgaaaggtgcttccacccggcccatacaaactgattttttggaataaattcagcaagcgattttatggcgatttggacccctcaaaattattcaccaccgacgccaatggcaatttgaaattcaaattgggcgccctcagaaggaataaagaaacagcgatcagcgaacgcttcttcgacaaaatgctccaaagcgcacagacggaaaatggcgaattcataatcagaaaaagcgaagcgaacggaggcaacggacaaacgcacgtgacaattgtgccattggacatggaaatggtaaacaatggcattttaaaatgggaaacaaaggcaacaaatgggaaaagcctccgagtgttaaggagccttttgcgttgggagcagctgaagaacgggtgacagacaacgctgaacaaacggaccgatggataaacaccgatcggtgccccagccctaccgtactccattaccatagcattgagcgaaggaatgaaattgcgctgggaatgttcgaccgttggttgcttgacaatggcaattcgttgagtcgagccgactgcttctttgtggaggcgtatctacagcaaatggacacccatttgaagcagctaattcacgcgacaaaaggacgcccgcccgccgccgcagtcactaattatcctaatgattattaattaattacacgctttcattcattaaatgtgttggcgcctgccatttatgatgttctttcaaagttgcaggatcaagcgacggatttcgagttgtacttcgaatttggcgccaaactgtcaatggcgttccgttcgggccaattggccgaccgtgtgctgatgatcgacggaattatggtggccattcagacactttgtgtgaccatcgcaacttttcggcggattgtttggcggcaaaaacaattcgaaaaattggagcattgggacggaatttgcttgcatttgaatgaattgcgaactgttgcggagtcgctggccattaaccgttggctgaccatcggcggaggggaaattgctgatcagccattgcaaatgggcgatgcgaatgcattggccgatttagtggaacatttgctcttccaaacgcaattaatggcgaacaatggcaacggacaaatgcagcaggagcagcagaaatggcacaagagcacttcggcactttccatcgaagagcaaataaatcagcagcaggtgcaacaaaagtggcactcttttgtcggccatttgtccctttaggcaaaaatattcgccgaattgggacaaaagttagaaaaagcccgaaaaacgaatgctcaatgggcgggacgagtggcagcagtgagcggaatgttggacctgctcaactcattatgcgaaacaaaaagtgccattgcgacgaattgcggcgattgttcgagtgaatggacacgcgcaatcgaagcatggaattcgttttgcccgcacttggacgaagcacaaaatgaacgggttttgggtagtgttgaacgatggctgaaaggggaggaggaggtggtgccggacgagaactcgttgatggagatgaatttggaacatttggtggagaaaatggagccgtacggagatgcacagctggacgggggagacgtcgcactgctgcacaaaatcggactcgaattggccaaggcaaaggaggagaagcggctggcaggaagagtgatgacggctcctggcatttgggatcaactctcgaacatttgcattctgatcggagggtttgtcggtcgggcacagaccgcgactgaaaagcagcagatcacggcactgacaatgtgctgggagaacgcactctgtggccaattggaagagatttatgtgagtgcggtgatgaacgcgttggagcggtggcgcgccggggcgaccaatggcaccgacgcgggagtaatcattggaggcagcagaaaggcactgcaaacgatgaacagagtggcgagcgaagagggacaacacaatgagcggcaaaaaacggccatttcaaagacagagatggcattgatcgctgaattgggggcatatttcgcggaagtgatcgaagcgcagagaaaggcgggggcccaatggaaggagatgagaaaaacggaaccgatcgttggcatggacaaaatgctgaagaaacagtgcaaaaggtcagtcggaaggaccaagcaaacaaaagagagaatttattgtttaagttggacagaatttcgccggaaaattccgccagagaatcggaaaatgttcattagttggtcaaaaatttgtaaaactatgaatttaaaggagacgaaaaaagaaaacaatgagcaaattcgggacaaaatggaggaaaatatattaatgaaaagagaggaagaaaaaaaggaaaagaaaagcacaaagaagagaaaggatgaaaagccgaacaattaaattatgaannctgacttantttccattttattataccgctcttcgcgaccgacgactggtcgatgac

SEQ ID NO: 2217 - DNA, 3215 bp, Heterodera glycines
tctggattacaaaatcgcaaatttacccataatgtagttttaaattctacctcctttatctggaatttttagattctgtttttgcggtctttccaatgacaagaggaaagagttttgaggatgataacgaacccaaatgcagagagaaaggggtacgacctcaaaagaaggatttgctaactcgtttcttaagaatgagcgtcctttgcctgtcgatagttggctcggcactcaccgccaccttcaagtctttcctcccctaaaatgccataaaagctctcccttccctacccaccaaaggccgccgttgctgccattgaggaccgcatgttgttcttccgtttgtgcgaggagttggacggccgtggcatttcctacgagcgagtcgttgccgaaagaaccgtcggtggccatttgctgcgactgaccgagtgaaaagtgccgaaattcattaacatcactcggactttaagcatttctgccttgggccttcgccatgcgctcgaatctgcggacttcttcaacaatttgctgcactgcaacattcgcttgacacagtccttccccgagcgaaggtcgccccccccccctttgacgctgaatttgtgcgcttttacaatttccagtcaactcgagtgcacttttgtcaatccgccgttggtgcccgattttaataagaccgaggcggaggtggaggccgacaggagaagagtgagtggctttttgactcatttggcattcgaatgagagttggacattgtacagccccacacttgggtccaacccatcggcaccgttcttccgccgtcgcatttctcccgtgctaaaatgttggcggcggctgaccagcgacaggacgcggacaaaacggacaacacaccgcagggaggggcgccgctgatgagccaagtgagtgaggggacgcatccgcaaaaaagggacgagaaaaaccaattcgaaatagatatcaatcgctttgtaccttaacgagctcggcatcttgaaaaaagcttgcacctgggttccatattggacctggacatggacccaggaaaatccaggccttggccatatccatgccaaactaataatacacctcaaaatatttatggttatttttgaggatcattttgggttgattttgtttaggtgattgcccagaacattgaggaccgactgatcacttactgtcaaatttacgttccgatcaggcgattttcaactgcttactacgcacactttcggcatttttgcaacgttgttgaataattaattataaatggtatgttaaccaaacattttcaggtccgtaccttcgcctatttcaaactttcgttggcgtacggcgatgatcgcgaaatgctttttgttttggcctggcgttggcagaaatattcgctttgcttcggacaggcgcctgtgcccgcggggagcgcgtgggacggacgaaaagcggcgcgacggtgggaaaggggggaagaaacagccaaattcaaaagcgaatgaaacacacgtttatttaaggggcatttaaagaaatccatttcatccgccctttcagttttttctgattttgtgcccctcttaaaggcgttggaatccgcatgtgctcgtcactcagtcgctcacagaacgtttcaaccgcgacaaggacctgacttggctagttaattacctggtatttaaattttcttgcattttgaggatcattataattgtaccactaataataccaaaaaggagatattttttctaaatctcatgggggaggggacttttatgacaattcataaagttttaaacaaatctatcggggtttttggcgtcgcttatccgagacagaaatccatttgataaattccgaacgaatatgaaacttatttttattttgtggattttcttttagaaattatgaatcggcattaataaagcccttttgatcagatcaacacgcatcgttccctttgctcaatttacgatttcgcacgcacccaaatgcattccacgaaaacggcggcccaagtgcacggcacagaagccgcttttccggctgaactgatggtaataatttaatgggaccaaacagtccttccatgtttccgatgtggcaccatcagagacttttttcaacaaaattttatgatgaattactgtttttcaaaaaaaattcaaaaaccgttgaaatttttcaaaattttttttcacaatttctgtttgatcctttccctcccccgacagtgccatctcagtgccttggatgagagtaccattcgtctctcatacggctctcggctggccatggaatttcttcttctggacgacaaccgcgtggctgtccgcgactgcagcgtcggttccgcgcgctctatcggcggcggcggtccttcgctggccgacttttggcatttttggcgacaaaaaatgtgtgatggcatgtcccctgaggacgaaaatggggagggaattgggagacaaagaaagcaagagatggacatggacaccaactactgaatcaccattttttgatattttatttacaacgttcagtctttccttcctctatctctctcttttttcattcattttcattgtatctttttttttaaatttgttatcatgtttttctgtcctttgtttatgccaaatgtatttacctagttattttttaagaataaaaaatataaaatttgtttttcccatacaaaaattattggtaatgcttttttgttgttgtccatatgcgttttttcttccatcgatttgtgttgttcgttttaatatttttcgtgtccactgattttactgtgcatcgaaaggacagaaaagaaggaaaaggcgggcaaaggaccgaccgaccgaagacgccaccgccgcaatgcccggcggatccttcccgccccttcccccgacgacgtcagccaccgccaaacccaccaaacaggtcgttcgttgttcattcattcgttcgctggccgcccccattcaatcgcccgtcgatgacatttcatttctctgtttttctttggctttgctttttcccctttcgttggcatttgcctgttgcccttttctcatctttaatattttaagtgccgcctcggataatctcttcccttctcacattgattttggtgcgctcttttcgacaattacaaatatttattttctaaaaaaggagggctttccatcaattgaacgtcgttcccattttcccc

SEQ ID NO: 2218 - DNA, 3415 bp, Heterodera glycines
tttcccccaattcttcgttttgcccccccccccccccaaattcgccgccgtttcatccctttttcccctttttgcgttttcattttttaaattatatattttattaagcgtcaccaaaagtcctcttcttcctccgcttcgcattcgcctcattccgactccgtcctcttcctgcacacctccgtcaacagcaccaaacagcagcaacaggaacaacaccggcaacggcccgtctctgtcccgccgtcaattggccctggcgtttttgcagaatttgacagcaccgaaggcggagcagcaacagccgctgatacgatgaattttctcactgaggtgaaagcgcagtgccaaacggtcatccttcagttcattcacaagccgatgcaactgaccacgctcagtttgttggcccataccaccctttcttgaaatgtctgcatttttttatgccattacaaattagtctaaagagaaatggtccaccaaactgaggagaccggacccttaactaattttgatggtttctgtttcaactgtacgattgcagaagagttcgacaacccccgcaatgtccgctttgctcggccgacagccgacgatcaccgaagacgaagagaatgagcgggaggaagacgaggagcccatttcaatggcaattcaaaacatggcagacagcccataacccatttgttccgttgcttttagcctgattttggtgctgcggtgacgcgcattgtttccgatttcggcgctggtcgtgtcaaaagtgaggcgcacgaggaagtgattatgatggaggacgatgtccgccaccaacaacagcagcaaatgccgcgttttgctggcaaattaattggcgacggtggcgaatgtcgcgatggaagtgccgaaggcgccgcccattcgatacatttgaaacgggaggaggaggacgccgcgggagccgaacaacagcggcagagggaagaagcggaagacgcggcggatttgggcgcggacgcactcaaagcacggcgagcagcgcggcagcggaaacgcgagccggtggtggtcgggtggcgcacattggagaaggcaatgcgaacgacggccgaaggtgggcgacagaagggggagcaacagacaatgtacacggccagggggacaaaggacccaaaattaatgaaaaacaattggagtggggagagagaattcaaattaaattattgtaaatatatgtggtaaagtcagaaatatttttccaaattgttgctaaaaagaatttcattcgtttccctcaaattcccaacttcgctgatttttcagattgggtttaatttttaggacgggccaaatttagaaaaatatacgcttacaaattgctaatggacatttttatgatgaaatctgcttcaatttttcctgacgcatatcgacacccctccacagaaatttgttgaaaaacatcccgcaaaaaatactaaatttttttggattttgaagaaaatctgaattttgcttaatttgaagcaagctatgattttcctcaaaattttgcgaaattccttcaaatccccgtgcaaaaattgaagcattgaactcccccaccctcatttttgtattcataaattgaacttgatgaatttactttgaaaagtgcagacagtgacatgtctccgctggagcaattccttctcggctccacgctgctctcccgtctctgttccttcttcgaaatggcatttgccgaagcacagcgccaacagcgcgggaaattcaaattgccaatcaaagactacggagttggcactgacggagtgatgagcgcgacatttccgaggtgattagtcccacaaaacaaagcgattgtttttttttaaatttaaaaacttaaattgattgaaaatgaccaaattgaatcgggttttaacctaattttttttaaagaaaaccaaggggtttacgcacccggtttttagttcgggatttcttcgatttcattactctattcattcatagaaatccctattttgctttttgttcaattcggattaggttcgaaatggatcccaacaaaatggttattcttccatctgaaaaatctccaaaaacagacagtttccaaaaaacattcggcgctgtactttcaaataggaacgtgccgaacccgtcccttttttgtccatgctatctgatcacttttgtatcgctctctgctgtccttcagttaccccatgcccccgtccctcgcttcttcctcgctgcccaatgcgctcggttcgcccggtgaccattctgtccaccagcagtttcacccctccacccattgtatggttcgtctccaactgttcgtctgtccgcagcagttccgtttggtctccatgttggactatggttgtgtgtctcttcgtcaccacttttctttgtccatgtatcttccacccaatgccattttagccaccggcccccaatgtccggctgagtcggacgtgcgcattttcgagcgatttttcgcccgcgaagtcgtccgtatgaacaacgaattggccgtgttcgctttcgtcactctgtgccgtttttgtcacccgccaattttcgcctcctttgcccaactgatgatggcccaaatggtaagaaaaaaggccgagcgctgtttttgatttatttcgtattgcaaaaaggagtcccaaccccggtggccatggcgtgtcgaattggaattggtacacaacgccgaggaatcggcccaacccacgggagccaactctcatcagcagcagcagaagacgcaaaagatcgtcaaaaacagcattcaggcagcaataaaaacataaacgaaatagggagtcaaaatgagcgacccttttcaacaaggacagaaaaaaggaactgtacttttttcttaaaattctctaaaaaggtctggctactaaagaccgtaacagagtcgaaacatgtcagggttttcccgcggtgcgtatcctataatctggtcccgaaaaaaacaattgaccctgaaatctggtctggatgcatcctccggattgagttggatcacgatttgtttttctgggtttggcacaatgccatcttttttttattcacaaatacactcaccaaaaaaaagtcttgggacaaaaatgccaaaattggcaaaaaccaattaactctgcaatactaatgcgtctatgtccggttcagttcattgatcctgaatttttgagatattccgggctctattatctatgtctctgagcttacaacaattagctatagcttgtgatagcttctaaaaatgccgcgtcaacccgtttagcttggagacattgaaagagattctcaggtgcctgacatgtgcaaacgctttgtgtttgtgatttggttgaggccgcaatggcaaaacggggcaaattgccaactgcagccaacgcaacaa

SEQ ID NO: 2219 - DNA, 9565 bp, Heterodera glycines
tttttcaatttttccatttgtcagaccgccattctgttgaccaccaacttgttcggcattttcttcatttacccggcattcattgcgttggatttgaagcggcgcaaggcgggccgacgcgacttggaatttctgtgctattactgcctttgtgtggacgacgacgacaacgtcgacgcggaaacggcgcacaaaattcggcgttccgacgtaataaaaaaacagatcgggaaattgttgtgccatcttaccataattaggcattttgaaaaagcctgggcttggacttgggttccatgttgcgcatgaatttcttggacaaaaatataggaaaatccatgcttggttcattgcccacgtggatttattcaaacagagactgtttttgatacagtacttgtggtccatgacagtaatcaggacaagaacatgtccaaaatggacatgaaaatggccaaaaatgatgataaaaacccactctaaactttaatatagttgtttattgtgtgcagcatttatggccaaaaattacgaggaataacactttccatggagtgcccgtcaatgcacctttccatggtcttacagttccaacaaaatattaatttaaatacaattgaaaaccaaatataaattattttcttcaatttcgccgacgaattaaaaaaaaaatttcaaacttagaaaaaatttcttcggcgaaattttgtttcggcaaaacttttcataaaaaatacatatccctttgttttccccaagtgccaaaaaggggtggtgcacaaattgatggcggagacggcggacgacgaccacaagccggacaaaaagcgtgtgcccgcggagccacggtttggcacaacggcggaggaggaggacggcacggagccggaggatgagcaccacccgcaccatggccagcagaagccgtactttgcccgctgctcgttcaagccgatggtcattggacggacggcgccgagtgccgtcaaatatgtgcagcagccgaacggaaatcccaccggcgacggcactgtcattgtgcaaatgccaggggttagtacaaacggatggaaaatgtggcaaaattagtggtgtaacgatgcccgaaacaaaaaatttgggaatttgttaaaagatatatcaaattgattagtcgccactgttggtcaaacaaccaattaattagttttgccataaatgatttaaaatttatccattgttggcaaatatttaaatttaagcttgtcggtacatcccaaaaacgtcaccgcaaaaaaaaaaacaaacaaactttttaaaaattgttttaaaagttattttcaaaaatctaggtgttatttaaagaaacttgctatatttcaagggagaaaaacgaaaattggttcatttccgattaataatcgaccatgaacagcctttaaatatattttttaccaaaataactattttctattatttacaattgcttcaaaaatttcagtctcacaaaacgcgacgccgacgcccagcgcagaaacagtacaaaatttacactttgcacggttttttgcacattgtgtacattccgttgctgaggcgaagggctgtcaaagtgagtttggatgtcataaatttttttttaacaaattcatccttttggaatttgaaaattcagatttttaaattacaatttaaaaaaaaacgaaaatgacttttatctaagaaaattcaaaaaacaaaataaacaaatttcagcgatctgttgaaaattttttgaaaacagtaactcattcattatacagtaaaaacttgaaaaaatagttggaaacatttttttttaatttatggccctttccatccaattttaaaaattttctaattatttcttcggttttttttactaattacccccctcccaaaattgtgcccagtttgccattctcgtcacgatggtggcactgttcgctctcggcatttacggcctcagccgttcgaccatcggtctcgagctcagcgacgtgttgccggacaacacggcgccggccgccttcctgaaaacgcgcgacaaattattctccttctacccaatggcggtggtcattcgcggggcaaacgtcgattttgcagcgcaacagcaccaaattgacctgctgagacgggacattggtggggaaacggacggacggaataaattacaaaaatttgaattttggcatagaaaaacatttttaaaaacctaaaaacaaaaaggtttaactattgagtgcattctaaaatatcgtcgcccgaatgccgagaagaaatctcgccaccaatttaaaaaaaaaattatatttttgaatttttttctggaaaatttttttttgaaaatttttcaaaaaaaaattcagtgacgagatttttttcccgtatacgaaataatgcaatttttctaatttaaaataagaaattaatttggcattttcaggcttgtcaccatttgtggtcaaactgccggacggcgagccgagtgagtttttttttttaatttttacatattaaaatgttttttaattaatttcattcaaaaataataaaaaaatgaaataaaaatgggggatggcactttcgcccttcattcctttccctgaaatttaaaaagatttccaaaaattcgattaaaatttgtgcattttgccgtgccgttcaggtgaacgctattggctccagttgttccgcgattggctgcgcggtatgcaacagcggctggacgtggcgaagcgggacggactgttggacaattttgacggggatggcacaacgccaatgacggcgacaacaaatgcaagcagtacatccgcagcagcaacgacaccgaaggcgaaacatcattcgcccgacctgcaaattgcctattcgttggcctgctcctacgggcagaactacgactgtgctagggtgagtttttcaaaaaaaaaaaaccttgggatttttagtaaattttttgcctacaaaaaaaaattttaaaaaattgcggctaatgattcgaaaccatgttttttaatgacttttcgtccatgcttttgaaaaaatgaaatttccatgtagagctgctatcttctgttaaattggttgcatttggaaaaaatttacgaatttttcattgttaccgaaataaaaaaaaaaattccagaatcaaaattgcctccttttttttcctgtaaggccggcacagtgcgtctgattgatgagagcggcacaatcaacacggaaggcttctacaactatttgtatggatggcacgaatacgaacaaatggtatggggttgccctcctaattttactgtttttttctcgaatttttttatgaaaattttgaaaattaatcaaaaaatgtagaaaatttcccttcctttcagttctattccgtctctcaggccagcttctacccccgtcttcgcaagttgcgccagggaccgcctgggcctatgaaatatgtgcgttttagcagtttcaatcttaaaaaggactatttcgtgattttaattacgaaaattagtgctccgactttaaaaatttaagaaaattgccagaaaattcttccaaaaattaccattaaaaaactcattgtcgggcctcaattaatattttacactttataataatttatttttaaattttttttcccaatttgtccctcccatttcagcgctattttcattccgccggcgccgaagccgttgttcagccgaattccgttttactgtgacgggttgcgcgacacgccgaccatcatgcgcatgatccgcgagatcagggcaatcagcgaaaattacagccgcgcgggcctgccaaattacccggaaggtgtttttttggaaatttgggaaatttttaggggaaaacaccaaattttattaatttttcaaggcgtcgcttttaccttttgggagcagtatttgcacttggactactacttggtgttggctattggtgtaagtttttctttcttttttgatgaacaattattataagaaaaataaaatattcgactaaaagttaaaggagtttttcataacttttgcttgattatttcttaattaaaaagcaaaaaaaaaaatttttttatttaattttttaaaaatttttacaatttaatcacgtaaaaaatgaaaacaataagtcgctgaatacttcaaaagtttcttattgaaatatattaattgatgcatttattttagatcatttccgtgtccgtcttctgcgttatctccaccatcattttcaacccgtgggcgccgctttggtttgttacaaaaaaaaaaaaaagttttttttttgtctggccgaggccccaaccccattctcctgtatacaatttgttaaattttttggtcattcaaattctccaaacctttctaaatgtgtttctgacaaataaatcatattttgtttattttgacatggtcgatcttttgttcgctaattacttttccgcttttccgatcacttcttctgatcacatcatttcatgtccactttttaacttatttctgattatttctctcgtctctaatcactttccccattccaccatccgatcacatcactgacatcaaatcatacaatttcctttttctgatcgttcccgctcattcagagcacttcctaatcatttgtttctttgctttgctttttcctttttctgatcacttaccatttatccccaaacaacacaggtcacctgcgttgtggccagcatgaccgtggagttggccggcttcatgggccttgcgggcgtcaagctgaacccgatttcgtccgtcactctgatcaccgctgtcggcatcggtgtcgagttcactgcacatgttgcgctcgcatttctcacctcgttgggcacccgggaggagcggatggtcaatgcttgcagcacatgttcgtgccggtcatccacggcggcatgtccaccctgctggtcagtcagtcattcaatcagcaggctgaaagtgggaaatgccagaaaattaaaaatttcaataaaaatgaaaaaattttctctatttttaaaaattttagaaaaaaacctgccagaaaatttttttaaagtcgctgaaaatattttccattttttttgaaaattctttgaaaattcgggcgcctttgattttgaacacattcatttgcttgtattgaatttaccaaatatggtttaaaacagagtgaccaattacggttttaattaatctcttctttttcttccagggcatcatcatgttggcgttttccgactttgattttgtcgtccaatacttctttgttgtgctgactgcgctcgtcatcattggcctgttcaacggacttgctgttctgcctgtactgcttgcctatgtgggcccgccttgcgaggtgggcaaataaaactatgttattaatcgaaacataatttttttttaaatttttattgtaattagacccgcatggaattcaatgaaacccggaaaaatttatgatttgccgagatctcgatcccaatcagtcgcaatagtgaatatggaaaaggatatcggcagctttaagctcaaatggaactgttgctttttacagataaagccgattagcggacgacgaaatcgactgccgtttccgtcttcggcacgtgagcttcgggaaaggcaccgatcagcaacagaagtggtcaccaccacccaagacaacaacaacatcgctaattgaagacgcttcgttcaatctttgatggatgcaattgcaatttgccacgaattttgaatcatttttcatccctattttgaccaattaacatcaaaaacattttccactgacaccgatttcaatgattaatgattagacatacaaatgactgaccctcacgcagtgtttcccattttaattaattatttttttttgaatttaattaattttaaacgggcaaattaattgttcctaaaatttaaagatctataaatggcttttagttcaagcttttcatcaatattgactttaattaaaaaattggtaacactgcgtccgaatcttattattatttttaatatataatgtgcattcaattaattaattggataatatgataatcctttccgtccagcagttttttccgagtgcttgtgccattttttcattgtttttttttctttaggcattatttcacatttctttacacacccaatttgtttaaacgttcatttttagagcgattttttgccgtcattttaaaagtgccaaaaaattagggcaaaccattttttaatgtaaaaatcgcttttatttactgagctttaacttatatttgacttttcgatgttgtaatattttgttttctgctgatccaattattaccgtaatttatctcgtgtttttcctattaatttgatcatttcgttttgttcacttttgctttaaatgtaaattataatcatttatcgctgttgagcttcgttttattttgtgtgaccgaagaataaaaaatgcaatgcaaaaataaattaccattatcaaaatgggttttgagtagagttggtcggaaccgggactggtactgaaaaaaacgggtacaactgagtacccagtcccggttttgacaagttttgaccgggaccgggaaattcccgggttttttcccggttttcccagccaaaagtcccggtttttcaacccgaaaattcccggtcccgtttttgtcaaaattcccggtcccgaccaaccctagttttgaggaaaataatgtcctattttttatgtcaaaaatatgtgaaataaattttaattgaataaaaataattctaacatattattagggattcttttttaggtacaaaaaatcgcgaaataggcttttaaaatattttgtgactgaaccataacaaaaactaatgaaaagaattttgatcagaaccccatattgtcagcatattttttccgggttgagagaaaacttttggattggaaattttgaagaatgcccaaattgctcttaaaggatgcttcgagacgagggggaaaatatattcgaacaacaaaaaaaaacaatcaaatgagcaaaaattagcatcaaaaatacaatatccattcaataatctccaaaatagccaatcatttctcaattataattcacttccgcacagttcgattccctttttcgttgttttgactcgcttctttcgtcgttcctaaattaggtgcaatttgaatttgtgaatgccgtggaaatagtagtaagtaagtaaatgatcggagttttgaaattaagacggggccgtgacttggaaaatagactgggagcacttcgccaaatatatttttaaaatttttcaaatttaggtccatttccttcatcgagttgatgtttgggccctgactttaagatgttttagtttttaaaacccaaatggcaggacaaaaagtggggccaaatccatccgccaagtgttaggaaaataaaaaatttaggacatataaattcgtatcttggccaattttcaatcaaattaataattcttggtatcattcaatagctttaaatgttgtctatgagaatattaatttctaaaatttttatatgaaattataaaaaagttatggccattttatttggacttaattgcactttaatgacttgaaaattttaatgtttataattatatttgcatgaccatggcaaaaaacaaagcctattcaatgctttataattttttcagaagcaatatttttagaatttcaagtactctatttatctatttattgtttaggacaaaaaattccgacataagattttttggaatttaataaccataacttttttatactatttaaaaaaaaaattgaaaattaatattctgatagataacacatagaaccattgaatgataccataaatactattttggttgaaattcaccaagttgtgaatttatatactatacgttttttgtttttctatccctaggaagggtttaggaaacgacctagcacctttcgaaacattgaaagaattttccaggtacattttcatgcgaagtaaaagtgactgggaattgtttttaaattttctttttaattttttaattatataaatccaattcctttttattgaaataaccttttcatctctcctccaacatggccctgatcagtgccgccgcatctctcacgcattctcccttcacatttttcttcactttcttttcaaacttcataaactctgtcttattttctgttgacagaacaacagtgctttttcgcgctttcgccgccgccatcactttatagcgaaggccaccaaccttgccaatttgtttgttttttctgatcaccgctgatacggctatgtttttcttcacaaaaagcccactggccaaagcatacaacgcgattaaaatcgctgccgacccagatttgccgaacatctttccatcatcttctgggcccactggtggggctaacacctcgattttcgtggtctcgaaaaaaggtcctccatttgcttggcgaaagatgctttttgcaacttcgtacgctgtttgccatgattgctttaaaagagtttctgatgatggtcatatttagcaaccgaaaattcaatcctagacactcattagcaaaaaatacatacgaattcaggaaattttagaacatttcagtccgaaattcctggttattaatttttaaaggttcaagaaattagatttttactaatcacattgccattcaccgaatgagcggacgggccaacgagtctttttagtgtgaccatttattgtgagtgtcaaatgaaaatcaaccttttttattaacaacaatatgtatacatatgtggaattaaatactatattattctcaatttcgcagttccgaattggtttagccaaaatgaatgtcgtgataagcgacccaaaaccccagaaatagttttcatgtcacctgaacacaaaaaaaaaaaaaaattcaattaattgatctgagctcagcaggtccctaatcggtgtattttttcacactagaaaaatcaaatgaaaaatatttattttgttttcctccgggtcaccaattctccagtgttaccaaattacgcataccacttcccgtgaacgggtcaaactaaaatttttctattagcttttctgaaagtgttaagagccaacaagcatgcgatgattagataaattatggctatttcctcaaaatgggatgttatatcctggttttggtccagtgtattttgaaaaagctcaggagcatacatgaacaacggctgcgccaggacaaatttttcgtacgaaggcccccaattttctccggcggtgacctttttttgctattcaaaccacttttttgcgaccattttttcaccttttttttgcggtgcgcttttttcaaaaattatgcgaaaccggagggggtagcggggtccggtggtccagagagccgataggcgccgccggggaaatttttttaatgaatttcgcttaggaaattgttcttttaatttttcccccttcgttatgcccatccccctccccacgacgaacccccccggggggggggggggagaattgagtgtgataatagg

SEQ ID NO: 2220 - DNA, 1663 bp, Heterodera glycines
  unsure (1)..(1663): unsure at all n locations
tttttgcggcgcgtttttccaaaaaattttttgcgccagcctcttacgacgagcggcggggttgggggagaggtgcgccggcgcaccccttgtttcacctatgcgcaggagccagtttaaaacagttaaaacaggacagaagaaaatattattttgccccgcggcactcagggttcacaggaagtggtcaagctcataaatactaattttaatctaccactattctaatacatattgttataaatatttcattgatgcatctttccgttttgaaaaatttgtaatattcgagccacactaaagaacaaatttgaaagaaaattttaaattaaatcctttttcagtttgtgtcattttttgctaaatatgaccaccataaatcttacacgggcatctcgtgaaaaactgccgacaaatgtcagcatatttttatggtttcttttagccattcgcgcgatgacgcgctgtgtgtagccttttgataaaaaaaataaatagattttctcattagcataagacagcggtacctttgcactttttcccactatccagaactactaatccaataacagtgacttgtcttcggaccattgtcacacaaaaataaaagcactaaatgactgcaagaaaaccgagtttcttccagcaagcactcctttcaaaatttgagccccaggataggtattcaaaaatagtcatatagcaagagaatgggctggcagcgcagagacaatttcattgcaaattttcgaatatacatatttgctcttatttttaattttctttttgaccaagagtttaatatggttatgagattttactttattcatatatcaaataaaaaataataattacaattgtagaaaaaaatcctttttaacagatgaatttaaaaagcgtttttcaaattctttaagattatatgatactcaaaaaacaactgaataaaatcataattggcagatatttttcaacaaccaaatttataaatagggaaggggaagccaagaaatagttaaaaaccgtgatcgattagctaaaatagaaattaatgcaaaaattttttgtgaaagattcgtactaagactcgattcgtactggtcctcgaatgcgcgggactggaccatgaaagtcgggatttgtccacggaactttgttcaaaatgttcatttttcatattttacaaaatttttgggtccctctttttcatgcgtagcatattcgcaaaaaggttaaaacatataaatccgggccctaatgataactttgtctttcttattttttgggttatagtctctttaattttatttgcctacaagttaaaataattttggattattcgatgcgttgattttattaattcggtctcgaaaaattcgtccctcaataattttcttcatcttttcgtactagtttacagtcaaatttgagaatccctcggacattggcggcaattttcaatttgttttacgcaggcaaagcagtggcgggatcaaatggggaataggcaatccggcataacatgcaataaaaaagtaatgagaatccgtaaactaaagttgtgactgtcatgtatgaggactcaaacgatgggactcaattggacaatttcatatttccactctttatccccaactgtgtctctgtctgttnaatgctgtct

SEQ ID NO: 2221 - DNA, 978 bp, Heterodera glycines
  unsure (1)..(978): unsure at all n locations
tatgttttactcacaaccgataagccattttggaccattttattaattagtcattcgctttttaaacatattggacaaagtgatagaaaagaagcatcgcggcgaacagaattaaaggggcggtcacgaaaagggcgatgatcacaatgttcacggagggccatttgtggccgcgggcggcggacgacgaaatttcgctggagacaatcgaccgccgagactgatcactttggtgatcagcagcagagcacaagccagcacattttggggcatctgccgaaaaacaaagtgtgaaaatgggataaaacaaatttaaaaatggagggcgggggagagagagcggccggctcagccccagccaagttttactgtatcgcaacaaacttggtgaccaattgtcattgttaattaactttgtacctccataccctaaccctaacttttcacattgttttttttcttggggcggtctctttgttttcttgcgcccctttgacttaatcaataagtgcccttcccgcttggctttcgctcattattctgtcggatcgatctcgagatcccaacaaatctcccctccagggaacttcacagtcactttatattgtccttacagaataaaggatattattattccattgtttaagcactttttaagaattttggactcaataaataaaaatgtgaagaataaccaaaaggtcggaaaagctgctgctcattgtggccaaagcttttgctgccctcaaattggtccattcggcttaattttatttaatttcaattgggaagggaaagcgttgttaaataattttgggcgctagttaaaagtgacagattttgaatctatcaaaaacnaattcgaggtcttttaccccaataacccattannataattttcatgactatatattanaaatttttgcaaccaaaagggtctccctcccccttntctttcactnnttgatggaattcaaa

SEQ ID NO: 2222 - DNA, 2516 bp, Heterodera glycines
gtaaaagatttaagattgaccgcaaaaatcagctgtttttgtgtactataactgattaatgacaaataaatatttggttaattaataattagtaaccaattattgtgcgaagtaatgaataatttattcatttattaataattagtaaataatgataattcatttgcctaattaggtaattagtaaagaaatagccattaatttaattggccaaaattggaccggcaaaggaaagtgcgtagggcagcacaaattcaatgcttagcacaagcgaagcaccgatcagagcggccattggctcaaccattccgctgatttggccgtacaaaaacgccttccatttggagtggccaaaggccgccagaggcaaagcgacggccatgccctcggggaagttttggaggccaatgctcagcgccaaatttgacgccttctccaggctaacggactccgaccggccggcaccgccgaagccaacgccgacggccaatccctgttggaattgggcagttgtttgggtaattaattaattggatggcacgggaaacgaatgaaaaaactgccaattgcaaaaaaccaaaaaaggtccctccctaattgttttttttctattttttcacctcggggaaattatgtgccgttatggcaatgatcagcatcataattcgatgccacgactgttcttgtgagcgcttttgctgctgctggccatccaagcgaattgtctctttgtcggccatccctttcgaatttggcgcttttacgcagcgttggcgtaacgaagcggccaattcgccagcgttttcgggattttcgctcctaaaatcaattatacgagttaattaaatggtaattaagattaataagggacacaattaaatcggttaattaagtaaaatgcaaattaatttgttttaaattgatgcttaatgactcaactctgtcggtctgtttcaaaatcgaatggagcattttcactatgaattccattttgctgattggccgaatgccaattctctaattgatttatctgatcggagagagcgctgccattgaaactaattaaaaaatgcataattagcacttaaaataataacatttaaaacttaattggtcattgttttttttaataatttgctcacttttgtgttaatcggtcggataaatatacaaaaaaggcacccaacgcaaatccaacggctgaattatttttcgactgatttttaattaaaatcagaaaaaaaagattaaatttttgttttttaccgactgggacaaaggccaatttggccatttgtctttcggaaatttcgatggccggcgaaagcaaagaccaaaaagaagcggccaacatgacaccagaagagaagccgaggctagcatctgatggaagaaaagaggcgaaaataaaatttataaaacaaaaaaaaggcagaaaaacatttaaattaatttaaatgataaaaaattaccgaggaaaactctgttcgaggacggaaaaacaaaaactaaatatgttttaattgaataattaaattaattaagcataattaaatgttaaacggacggaccaacggcggcgccgagggcggtcactgcccaagtgaaaagagaggcgaaaagcgactgaacgatgggggagaaatgggaaagggagaagagcatttcaagaaaaaggaaaaggaaattcaaataaatttaaatgggaatggaaaatcattaatattatttttatattttttgtaaattgttttttttgttgcgattctttccatttgcttttgccactgctgtgcatacaaaaaaataataataatattaataaatattaataataatattcattctctgcttttatttccttttgtccattttttggcttttccttcgcttttcttccgatgttttttccttttgcgattcttttgccattcaattgacttttgtcatttttcttcttcacaaatttctccgtttgtccatcgcttttattattttatcatttaatgattaaattctccccaaaatgataacattcgctgttttttgccttatgtatttgctttggcagataattttattttagaaaattaattttcggatgtttttacaaatattttattatttttttcggcaccaattagtgctttaatgtcgcccgttttagcgggcgtttatttttttcgtttactctttgaaactcatgaatattcagtgcacatcaatcacattacataataactaatagcttcataagaaataacaaattgatttacaaaattcaatcacttggaatgaaaaggactttgtacaattttttaaattttgcataatttggctctttcattttttcaaaaaaggtttgttggcatttcttccgccgtttttctctgtcacttctttttgtcgtacgattgctgtatcattgtaagtgttaatctgatcagaaaaggagatttaagtgataagagtgggaaaaagacatgtcgcattatgccaatgacttgtggatactg

SEQ ID NO: 2223 - DNA, 7223 bp, Heterodera glycines
aaaaaaaaaaaaaaaaaaaaaaaaaaaaaaaaaaaacccccccccccccccccccccgccggggggttttttttttttttttttttttttttttataaaaaaaaaaaaaaaaaaaaaaaaaaattttttttttttttttttttttggggggaaaaaaaaaaaataattttttttttttttttttttttaaatatttttggggggggggggaaaaaaaaaaaaaaaaaaaaaagagggggcccccctccccccccaaaaaagaaaaggggggggttttttttttttgggggaaaaaaaggggggggaaaaaaaatttttttttaaaaaaaaaaaaggggggaaaaaaaaacccttttttatttttttttaaaagtaaaaaaaatttccgggggggaaatttttttttggggggggggaaaaaaaaaaaaaaaaaaaagtttttatggaaaaattaaaattaataaagcttatttaaatgttaaacgggggggccaagggggggcccgggggccgttccttccccagggaaaaggagggcgaaaaggggttgacggatggggggaaaaaggggaggggagaagagcatttcaagaaaaaggaaaaggaaattcaaataaatttaaatgggaatggaaaatcattaatattatttttatttttttgtattgtttttttgttgcgattctttccgtttgcttttgccactgctgtgcatacaaaaaaatatatagtaatattaataaatattaataataataattcattctctgcttttacttccttttgtccattttttggcttttccttcgcttttcttccgatgttttttccttttgcgattcttttgcattcaattgacttttgtcatttttcttcttcacaaatttctccgtttgtccatcgcttttattattttatcatttaatgattaaattctccccaaaatgataacattcgctgttttttgccttatgtatttgctttggcagataattttattttagaaaattaattttcggatgtttttacaaatattttattattttttcgacaccaattagtgctttaatgtcgcccgttttagcgggcgtttatttttttcgtttactctttgaaactcatgaatattcagtgcacatcaatcacattacataataactaatagcttcataagaaataacaaattgatttacaaaattcaatcacttggaatgaaaaggtttttgtacaattttttaaattttgcataatttggctctttcattttttcaaaaaaggtttgttggcatttcttccgccgtttttctctgtcacttctttttgccgtacgattgttggcccaagttgaagctttgctctttgccctccagaaaataggtggtcacttcacctttgccctgaggcaacaaaactttgatttgttgaaaatctgctgatcagaaagtattttttgccccacggattgatcattaatgatcagcaactgatcgtttaccgggaaatagcccacccatttcagtgagtgatcactctgatcagagaatgattaaggaatttctcataataaattgatagtaaaaaatgatcaatcagtcaatttgcttaaacaaatggcggctcactttgatctccactttgccacgttcgatcatcacaaattggtggtaaaaacagctgagcaaattgaacgaatgttcactgatctgaaaattaaaataacagcaaaaataaataaaaactgaaaattttttgcctgaattttattcggaagtccatgggattcctaaaaaggcaaaaaataaaaataaaaacaaataaatttggctaatgaaattggcggaccattcgtgaagcgaagttgacagtttcgccgaataagcagtagcgaggcgcttgcaagcccacctatgagtattattatatcatttcgttgtttcattgaaaaaaatgttaaaatttaaatgataatttatttatttgagtttggcattttgtttgtgccattttggcaaaccgaccactccggcagccaccggtccgctgtggaagccgatgcgcaccatcatcacctcgtccggacggtgggccaatttgaaattggcgacaaatgtgcgcattttcagcccaatttccgaaatgtggtgcacatgcgcgttgccattctcgcgcggcagacccgagacaatcatataagcatcgccaatctgatcagaaagtgggataataatgtgggaaaacgattaatgatcgaagcgaaggtttataatgactaatctgatcataaaactgggagatgggaggggggagggagatgtgtaaactaatcagagcaaaagccaaaaatgatcaatgagcggatttaatttgatcagcagtgaaagggacagagttaactggatagtgggctattagctgatcagagtgggataaatgagatcagaaagcggggatgggtcgaataaaggtccagaaaacgtgacggacgagcatctgatcagtgtaagtgttaatctgatcagaaaaggagatttaagtgatcagagtgggaaaaagacgggtcgcattatgccaatgccttgtggctactgtaatgcttgctggcacctaccgtttccactttgtacgcgtcgtgtttggcgatgatcgcatcgaaaccgctgaaaaggtcgttcagaaaagcgaccacttggatgggcgttgaagtggaggaaatgcgcgtgaaactgaacaaaaaggggtgggggattatttgggatttaaaacattaaaaaataattattttttaaattttaaatttaagatttgagtataaaatacccccttatgtcggaaaagagaacggtggcatttgaataaagttggggcggcacagaacggccggcctaaaggggcggtaaaagacggcaattgaattaaacttttcttcatcaaaaatgcctttaaatcgtcggcaattgccgccggcaacatgctcttcagcagccgatcagcttgttgctgcgtgtcctccaacatttgggtccgttccttcactaattgctccaaattgctggtgtactgtagcggggaaacagttgtttaatgataaagaccggactaaggtaagctaatccgattccaatcaccgaaatccgatccctaacattttttagagatggcatgactttcccgattccaaaattatttcttctcatccctttaaatgcatccacgaagcatactgtaatgagacggaaggtaattgactgccctcccgtctttggtttgttcatttccccattatagagcacatttcctcctatattcattaccttctgctgcgctgtcctagcagtttttttgccacccattgttttgtccaaatgggcaattaattacaatgttaattagccataattaccccctccccctccctccggctcacttcctccatcattttcatcatttggtccaccagtgagccgctgcccgtcgagcgaaggttggcgaagacgatcattttgatgcgtttgatgttcggccgcatctccgggatttccaaccagcacgcctcgagagcggacagcagctgcaagttgtacgcctgctcctcctcctcctgcgactgttgctgcttgggcgccaaattttgttgctgattgggaaaggacgggcgaatgatttggtcgttgtcgttggacatggcaattttagacacaatttctgaacaacataattcatcaaattagtgagaaagtgccgttaaatccgcaaaaatggaccaattttcggcaaaaaatgcaatcgaaattgttattttttggcaaataatttaatagtcttttaaatattcattgaaagaaattaaccgttatttttaattcctaataggctaattaattgtcattttatattttgtcgcatataataataacaaattgctcactgttgggcggcaaattgcgctcatagaacggctccaatttgaacataatttggtacaaaaccatcgccatgccaacaaattaatgggggaaaaggatttgaattgaatggcattccgccccaattactataaatgtcggccgcgggtgtccccgggggcaaatgctttgagctgagatattcgcggacaatctccggcgcttgttggatcagttcttaatgagaattatgaattggttaagctgtttccttccatttgcaataaattaatctttttgaaaacgaattctcgatccaatctctagtcaatcaaaaaacgattaattgtaaactcatccaaccaaaatttgtctgccccaccattttatgatcattaattacgcactctttcccatccctttgacccttgcgcccacccaattgatcaatttggccatttgtatgttgtccgatcttccgattccgaatactcttggtcatcctaattccatccccattccgatcactttgccccccccccccctctaactgatcattctacaaaattctgcttcccattcattttgtccctcaattagcattgtcagcccattgccaatttgaactactttttgcgttttttttctcgcgcattttgatcgccgccatatccatctccgagtcgtcccgcactccgtccgaatcgattgagtcgcgccgtttgcgccgtttctcgcgctccttcgccttttccgctttctcctgctgctgatcatccgtgccgttctcgcgttctctgtgctcccgcttctcgcgctttcgctttgcctttcgttttaaatttaaattttaaaatttaatttaaatttaatttccaaatttccattcattttttatttacttcttgttggtccatctcgtctctgtcaacgtatttcagttcgttgtgcttcaatttgtccccgatgatctcttccgtgacgaaattggtcagtttgatgttccaattggagtccaccaaacagttttggaggcacagaaagccgtgcattcggatgggggaattgtgcaggaagtaaaggccctgcggggggagaagggaacaatgaatgactttgttccactagttgaccatttgtcccacgaattggccatttgtcccactaagtgcctatttgtcctactgattgtgcatttgtcccactaattgtccatttgtcccactaattgccaatttatcccattaattgcccatctcttccgcgccccctaattgctcaatttgtcctacgtctttggcaaaggtcacttgaagagttgcgcccgattttgatctccccactgaataaaacgtcctccaaactgccgcgttggcacagcacccaaagcgcgatgagttcattctgctgattgaagctgatcccatagaacttgttcaggttctcattctccatcatctgacatttcaaaatggctttttttatttttaattatttaaatttaatttccatttttaatttatttaatttcaatttcccattagtttcgttttgccttcagctccttcagccgtgtcaagtcgtgtttgttgaacgaaatgttgcgcgtctgcaggtagcgtttgcacgcgcacttaaccccattggccaccgcttgtttcgttgacagtcgcttaaggggaaaacaaacatttgacatttttgtcggcatttaaattatttaattgagtgaatttagtcaaatcaactctctgctgacccaattcgcgaccattgagccggcggaggcgctttccatcgatttgcccagcgacgggtcggagcggcgctggtgtttgccgccttcgcccaacagtttgatctgctcgcgcgggatgcgccacgtcatgtcgtacagcatgcgctccttttcgcgcacgtacagaaaatagccgaacggaatgaccactgaaaggggcggaaataaattcgaaaagtgatcggaaggagcaaaaattggaatgatcagagagacaataaaagaagtgataaaaagcaggaggaggagagaaggtgatcaaaaaagagataaggagaaaaggagaaaaaaaggaatgatcagagagggcaaaaaatgatcaaatatggacaaataaagagatttgaaagcaaaaatcagaaacaaaaacgaactgatcaaagaagtgagcaggagagggagtagtggagagataattagcagaagtgaaactgataaatgagcatttaacatttattagtgacaaccaaatgaaatcagtgactggggaagaaatgttccaaatatttaaatggggacaaaaaatgttgtactgatccgtaaaaaaaaggccatgggacgcataaaaggccatgggacgcataaaaggccatgggacgcataaaagttctttgggacgcataaaaggccatgggacgcataaaaggccatgggacgcataaaagttctttgggacgcataaaaaaaaggccatgggacgcataaaaggccatgggacgcataaaagttctttgggacgcataaaaaaaaggccatgggacgcataaaagttctttgggacgcataaaaaaaaggccatgggacgcataaaagttctttgggacgcataaaaaaaaggccatgggacgcataaaaggccatgggacgcataaaagttctttgggacgcataaaaaaaaggccatgggacgcataaaagttcatgggacgcataaaaggtctttgggacgcataaaaaaaggccatgggacgcataaaaggccatgggacgcataaaagttctttgggacgcataaaaggccatgggacgcataaaaggccatgggacgcataaaagttctttgggacgcataaaaggccatgggacgcataaaagttctttgggacgcataaaaggccatgggacgcataaaagttctttgggacgcataaaaaaaaggccatgggacgcataaaagttctttgggacgcataaaaaaaaggccatgggacgcataaaaggccatgggacgcataaaagttctttgggacgcataaaaggccatgggacgcataaaagttctttgggacgcataaaaggccatgggacgcataaaagttctttgggacgcataaaaaaaaggccatgggacgcataaaaggccatgggacgcataaaagttctttgggacgcataaaaaaaaggccatgggacgcataaaaggccatgggacgcataaaagttctttgggacgcataaaagttctttgggacgcataaaaaaaaagccatgggacgcataaaagttctttgggacgcataaaa

SEQ ID NO: 2224 - DNA, 3298 bp, Heterodera glycines
gatcctgcgcaggattttgcaggatcccagtccgcaatcctgcatattttggaaaatacaggatttacaggatttgcaggattaatcctgccggatcctgtcctgtaaaaaattttgaattccaatcctgcaacaggacccgcaaatttgatttttatgcaggattcagcaggatcctgtattgattttttgaaaatttttaaaaatagaatgccaaatattcagaaactttcttttttcaaaaatttttttcttaataaaaatttttcgtttaaaaacttatccttattcgaaaaaagtttatacaattgaattttttatgtgttttgctacctaaaaagcgttaataaatttttttttttttgctattttcgtgcctattttaggatttttctgcctttttaagtgcctatttcgcgattttttgtgcctaaaaatcccatccctttacataatggattatggcttttttgcaaagaaattggcaaatcggtctttttaaacgcattaaagaagattcagtcgattgcttggagtgtaagcaaaaaaacgttattaatttttcatcttcatcattttttggtttaaaaatatattgaatacttttttatactttgaaagacttttttataatacagaattttttgaaatttcctaaaatccgcaatcctgcgcaggatcctgcagattttaaatgcaggatttgcaggattaatcctgccggatcctgtcctgtaaaaaattttgaattccaatcctgcaacaggacccgcaaatttgaaatttccggtctctaattcctagtgatgaaaagtggcgctaaaacaaaattttttgaaaaagaatgtgttttttgggggccaggccgttttcgtacgaacacatgtttttggactagagagcagggctgcacgcaattacggattgcggattacgaaaattacggggttttgggagttacggattacgggttacggatttttgggatttttccgtaattttgatccgtaatttgacttggattattttttcgagacgatttcttgtacgattatttttataaaaaacaaatttttctattttttatttaaagggctacccgtatttcgatttatttaagaattaaaatagtttataattttttatttgttgttgttaaggctatttgggtagttcgcctagaaaatagaggcatcacttttttgtcacacctatttttcacgcattttatgaaaattcataaaaccttagccaggtgaggggaggaattccccccttcccccgcccgaaatgaaaaattaaaaatttttacaggaaaaattgggacttttaaattttttttgtcgatttttcatgtttttttttttgtgtacataaaaacgctgcgccagaaatctctgacaaaaattgatttttaaaaattacggattacggattgcggattacgggaaattacggggtttttggacccccgtaattacggattacggatttccgtaactgagaaaatcgccgtaattacggttacggatttccgtaattgcaaatccagttgcgtgcagccctgctatgaacattttttgctcgcttttttgcaatataaataaaaaaaaattttttaaatgaagattttgaccacaaatgctgatttagaaaatttaatctgggagcactgttttttaaattggtttctcaacaaaagcaagttgattacaggaaaatttcacagttttcaattcctaccctgcagttgagaatttgtgaatcaagcggaggttttggattggaaaaaatacagaaaaattcagtcggtcgatgaaataaatgcaaacaaaaaatatatatatgaagcaatctttcggaggacaaacactatcgaccaaatgcggacgaacacagaagacgatgggtggacgacggacggttcacaaaaaataggctcaaggtcagcagaagcagaagagaatttaagtgggagggaagaaatggtttggggttggggtagcatcaacaaaaaaaaaaatattgagagaaaatgccgaccacaaataacggaaaaatgccaaaattgtaaattaaatgtgaatttggtttgtgagtgcaataaatttaataaatgaataaaagatttataaaaaagaaaaacaattgaaaaatttactaggcatgcaatccttgaaaagcagcaaaattatgctaaaatcagcagatttggcaacctgatttattatacatacaatacaatattcaaatcgtaaatttgcttagaaaatactaaaaacatagttatactgaaaatggttaaaaaaacatgaaatagagaaagacagttaggcaattaccgaaaatttccatttatttttgatatgaaataccaacattttttaaaatgtgtccttattatttagaaaaatttcaattgaattgttctataaatactcaaaaattgccagaatggatggtgggcgggggatatttaagtaaatgccgacaaaagcaattgagtcgtcccatctgttaaggattttctcttttataataggcacagaacccgcgtacaaaatatgacaggtgtgcaaaatttaaacgttttttgagggaaaatgaaaaaaaaaatgtccgattcagtaaaaaaaaaaagtgtggtggtgggggaggggtcgtggttaattctgcgccgaccgttcggcgccgccaactttgaaatgccataaattttttctttgtcagttaattttatccgattgtcaaaatatttccaaaattaggatatcattgggcaaatataagattttgtggacaacataaacatttttttgtgcaactattctcagattttgtgcaagaatgggcatttgagacatttttttaaaattaattaaaaatactatcttttaatttataaaaaatcgaagaaataaagaaaacaataaggacaaaatcgaagaaataaggacaagtgaaagccagagttcccaagtgtcctttttttaaagatttgtcctttattggaggggccggatctttgaaaactaaaatgtcctttttttaaagattgtcctttattttaggcttccccaaactttttttgtcggcaaaatgctgattttgaaaattttcagttgacaggccatgtttttacgctaataaaatgttgttttaaatcgattttcatgtattttattgcgtttctttcgggctaatattagttttagaaaaaatctttttttggggtccaaatcttagtttaagtatcgtttgtcctttttttgaaaaaaaaaacttgggaactctggtg

SEQ ID NO: 2225 - DNA, 5284 bp, Heterodera glycines
tttattaaaattagcaaaaaaatatattttatgactaaaaaatatttattttttagtgaaaaaataatttttggataaaaatgggcataatgcatggtaaaataataaatatttagaaaaaaccagcttgaacaatttttttgtgaatatgcagttaaaaaaaatgtaacaaattcttcatttatcgatccccccccccccctaacgcttccctaaatgccccattcatttcgctgttttaaaggcagcgaaaggagggggaggggcagtttaggaaatcaatggaattgaggattttcgattagaaatgcaaattatttttgaaattttgattctatatatagtatgtagtgagtagagagaggggggggcatagagcatacagaaatatgtagaaatatgtataaatcagggataggcgcgtattgtccgagttacgaccttttttggcttggaattccgactttcaattttttttcgggctacaggctcccgaatttggcatgaatatcggcatattggtggattgtgcttctcggggcggaatttttgccgtggagttaaaagactggaattcatccaagagaaaagtgcttttttctaagtcaaaatccgtgatcgattaataattcttaaaaaatatctattttttccacaaaaatttgcatattttaaaaagagaacgaactcttttctattatcccatcgcacagctgcgcaaaactgtgacctctctctttaatgagcctaatttggctctaaaatttttaattctcataaatctcataatcaatcttactataaattactggaccaaaaagtaaagttttgcgcgctcaaggcctcaaagattaggaaaaagatggaactttttttatttttgtgttaaaattttaatttattaaaaaaatatcaaaaatttgactctcatcaacattaattgaatgtgctatatgaatatcatttcatttatgcttttgccagtgaaatttgagaaggagctgtgatggaaagggttgtgacctttgaggaaactcggggattaacagaaacaacatggaagaaatgaagatttcatctaacaataagcatatataaatataaaagaaataaatatttatttatatatcttttataattataattataattataattattattcattatttttgtttgtcattctttgcgtgataggctgtggccgtttcagtttttgccgtgttaaattctgctttttgaaataaaaaatagattataaaaatcaaagttattaaatgaataaagctttggctttatccacgcttcaaaatcactgaaaattttttcagaaaatttttcttgaaattttattaggaaaaattcctaagatttttttcttgaaaaattcctaggtttgaattttttttttaattctcggggtgaaacgacgagacggggagaaatagcggcggggcaaggaaatgaagtgcacccaacatttaccaaccgatgatctccaatttggctgtgttcggatgggagatgacagtgaaaactgttgatcatgatgttgttgttgttgttgttgttgtcgaaatggcacattaaacacactgactgatccaagacaacttttgccgaactcatcaagttcaatggcggatgaggactgatgaaatttttgaatgcccaaatttttgtttttgtcattttgtccaataatgccatcgtcgccatgttgtcgcgtaattttggtcttaataatgtcagaagtggccgccgattcattacgacagtcgtcaacggcatcagttgggtggccggaatgaatgcttcctgctgacaaaattgcctgcatcggaggtggaccgaacaagaagggcgactcgcatttcctaaaaatattttaaaaatgcctatttttaatataaaatcttaaaataaaattaaatataaataatttcccgcaagcgccgcaggtctccgcaacccttcagtaaattgaaaaattttaaaaaacctcggcaattttttttactgtgatccacccctggtgaatattaaaaatttgctaaaataagtttcaggaaatttgtttattaatccccgagtttttctctccctgctgaaggtcggggagcacccaaccctaaattgaagaattaatcaattaacggcgaattagaaattaggaaaatataatggttcataaaatagtagtaattttatattttaacaattttcggattaatattgcacacacaaacacacctttgattgtcagagatgcttgtatcagtgagtttttgctgctgctgatagcaatggtagtcaagtggtggcggggtgggcgaggatgatgacgacacggcaatgccgtgcaactgttgctgatgccattctcggatacggccaggcattcgattgtcatgggtttcatcctcaagattttcttcagcactgtcatcttcaatttcgggccgatcagcttgaaaatcacaatatttattattgcgattagcgttattatcttgtttttgctggaacatttaaaaaaagtttatctctagcatgatgttggaatttttttttaggaatttttaaaattttaccaattttatcgatttttcagtacttaaatcgatttttccgatcaattttgagggtcttatttcaatgttcagcaatttttatgaaattcccatacaaaagccggaatttttatgtttcaaggattaaagacatttttagtacaaaatacatgaataaattatatccaaaaaaatttccggcagtgcctttagaatcgctgtatctttcattcttcaaaaatttggaaaaataacgcaacaaaatatttaataaatgattagaaatatttaaataagccatttactcaaactccgttgaatgccaattgaactgctgccctcctcctcggtccatcgtcgtaaccgttcccgaacttgttggtacttttgatcatcatctattattgctgaagccgaatgcttctgttgttgctgttgctgatcattttgccactgcataacgcccgatcgacggctaatgcgattaacaccggattttgtcgaagcacctctcgacaacggatcaatgtactgaaaatgaaaaaagaaaaatcggcactgaaaatggcatatggtttttggcaccgaaaatttccgactttctaaaggctcctgcgccagaaatttattttgactaattttaaaatccaaacctaaaattttgttctaaaattgagtagagtgataaaataatattaaatatattatttaaatttttattataattacatcgtatagaccgccttcttgctgctgggtatgctttggctgcttactctcctcgtcatccaattcacgtttacgaaaacttccattaaacacgctttttaatggctaataaaaatcgattttaattgtaataaaaataattttaaaaaataaatattattattaatttttactttattttttcgccttgcatcccaaatgttgtaaattgctgtaccaggcacaatcagcaatggtccgatcatcacaatccatgcaatcaattcatattcaatgggtaatatgatgccattgaatgttacacgttcatagtccaaaatggaagcgatcagaagcatctgaatcaaattgaatatggaataaatgatttaggcatattgtcattaaatatttttggaaaaatgatttaaatttaatgatttttgacattttgccattaaaatattttcggaatagcccaaatcagaaacgcaagaagcatcttaagcataaataatagaaaaatgatttaaatttcttaatttttggcattttagcattaaattatttttgaataaatatttaaaaatgaaaatttctttaaaatgtgaatcttttatgatttttcttataaaaaaatatttcctataattataatctcaccgtaagaacaattggtgtaaacattgaccacatccattttatgtaagaacctgttggtccaatgatgtgcataaattttcttaaatttaaaattgtaaaattaattaattattatttatattaaaaatcatatatttttctcaccgccacataaaatgttcacgactcgaaaagaaatcaactgatggcaatttttgaatgcgaagcatgtcagcaatatcttccaaaaatttgtccacaccttaatgcctacaaattagggttaatttaaataatattaaatattcagtcgcgatatgttactgtagttaatgtaccgtaccataaacatggcacacaagcaacacttggataagtgacagaaagaatgaattccaattggagtttaggttttcaattgcatgaaatatgtaaatgccgcctcgagtgcacaatggaatgccacacaaaaagcagaacacacatagcataattagctaaatcattagggaaacgctgatcgcggattagagagaaatcagagttaatcaatcactagagctgggaattcaatgtaaatatataaaaaaatgctaaattctaagtgctctaaatagtttgtaaaacactttcttttttgtgtttacgaacgaaaatctataaatagcttctttccaataaagaaatacaaaaattaaatttttaaatgtttaaaaaagaatttgttcacaaaaagatgtctaggtataaatgtaaattttttatacatattttgttttttacgtatttttatttattattatatatttgcgattttcttagatatatttcaagccctattaatcagtcatttattagaagtagtttaaaaaaaaaattactaaacggttctccagccttttctgtttgctcccaaatttgttcataatggaagcagcgatcatttcaagcctaatagtttaaaaaaaaaattattttatttttaattttttgtttttcaccaagcaaattcggcatcaagtgccgatactgtgagaattatgtagaacagaatggcccagacgaagccccattccaaatatgaggttacccctgggtaaacagtgaacgcaatatatgtcggatcaagtcctaaagaaaaagatttaaatgttgggcgctacttttaaaggaaaaccaaaaaagcgtattcccggatttttgggggccgcttatcacggtgacatccatttcgaccaatccgaatccccaatccgattcggagaaaaaatcgaaattcaaatttgagtttttttgttcgggttaggaaaaaatcatcttataattatttgcaaatcaaaataaaattatttaagtcatag

SEQ ID NO: 2226 - DNA, 3578 bp, Heterodera glycines
  unsure (1)..(3578): unsure at all n locations
aaaaaaaaaattgttaagtgatggttatgaccatgaaaatgagtggacctgcgtcaatccccaaagaataaaaaacctggaaaaaaatntaaaanaattaaatttattaaaggaaattacttgctcagctgctttacgccagagctaagatacaaaaaaaagatataaacatagttgaagaaaattattttttgaattaattaaaccttttttagataatataaataatttaaataaaaattatattatattattgccttaaggctccataggtttttaaactcaggcttgaacagataaacgagtcccgacgaagcaccttcaagcgaaacactgcgaagcagaagaatgatcagcttaatccaattggtttgaagcttattggcatttgataggtatgattatcaatgttttctttaaattaaaaaaaataatcccaaataattcagttgcttttaaaaaatttaccactgaaataaactcatttttttaaaaaaaattggtgcgttttcatgaaaatttacgaaatccatttatgcttttgtgattaattaattttatcaaccaaaaaatatggtagcgttgcggtgaaagacactgcccagccgattgatccaagtcccttgaacacaccaaaaaatactgaaattcaaaaccaaattatacataaatattatttagtaatactataaataatccaaccaattatccaagaaattatcaacgaaatgagcaaatgttcttgaatttgtccaagagccgtactttgtatgtccttaaaaatttcattggaattttacgcaaaaaaatatttttttttaaataattttatataataaactaaccattgtgcgattcagcacctatggaaaactccaattgaaataagttgattaaacaagtccttttttgtcctacctgaaagcttaacaaaaataatgattaatttaaatttacaaaaaaaaaacaacaatttaaattaaataattcgtttttgttgttcaagcattttgttgtttttttaattaaatgcaaaagtttcattttaattcttccatttgaaaaaaaaatcaaaatttgttgaaaaacaaaaataaattttttcatattttgtatgcaagcaaaatcattactagaagaatgcctcaggcgctggcattgactgagtaccgtagccgccacacagttcaccgtttacagtagtcgtgagttcacaacagttaaattgttttatccattcgggcttgcaatgttcccacaccttgagatttaaaaaaatagttcaaaaaaaaattactgcagtgccgccttttactatggctggctataaaacataatttgtttttactactgtagattttttgttttaccgtaccatgccgtcctgctcgaaaatgccatgcaaagcaaaccacaggtagtaaaagccccaagcaacatagaaaatgtaataaattgacacgggtaatgccaataggacaagacttgaaaaaaaaaattaatttagaaatataaaataaataaaacgaacgcccagccgattcctgaaaataatgtgaaattattattcaataaagtgttaaaaatagtaaattgtatttattaaattatattcaaatattcccaaattgtttttaactgaaaaattgatttttatatgctttgaaaaacttctgctaattaaaaaaaatatatttatttatttcacagaccagaagcaattggcatcattttataaaaggctgcgcttgcagaaagtcctaaaataataaataaataattgcaaaaaataaataaataaatatattgcctgaatattggccaattgtcaagtgcatatagacaagcggaaatccgaaaataaccatgaaaaacagatgaggtatgaaaaaaataccttaaaatgataaaaaataaaataaaatcagagatatatttaggaggtgaaagttatttttgctgaaagaaatataatattattaaaccaaatatttacatcaataggttagaaatcacataattatatttatagctagggcgctatactaaacatttgaattttgacaagtaaattttgtaatttaattcataatcagaaagacttgaaaatttgcaaaataatatgtgcattttcataggtacaaatttcacagaaaatttgaaaaatagagagtaaaaattttggaatttttcagtctgtagggccttagtcaatttgtcaaggtaactgtaaacagagctacaaaaacccgactggcattttgtaaaaatttttaatccatacaactgatgatagttcctattttatagttaagtttggattttaaaaacgtaaatttaattattttaaaataaaaatgtaaataagaaataaaccaatattttttggtagtaaatcgaaaacttgttaattagttgctcatcatttttttgctcaccgccaaattcaaaaatcattgccgggaagcgcagcgtgttcccgccaccaacaatgaagcccagacaggacaaaaagaattcaatttgcgtgttccacaggtcgcgcacttcgtccgcccgtgcgccgcttgcccggtcgcgcagccgacgcatgccgcgatcagttatccgattccacaggctgcgcctgttcactgcattgtgccctcgactggcacgctttggcgtcttacctgtgataaaggggagagtgccataattagggctcaggatctttgagcatttaaaatttcttttcggattttcaaaaaattctttaaaaatgcttaaataaagaatacgtaaaaataaatatatacaaagcccccaattaaataccaaaatattattatttattaggatttttttttgacaaaaagttcttagaaaagcgtgaataagaatataatccattaaaaataataatttcatatctcttttttaggaaaaaaattctatttttccaggcctactcactcatcaagggcgtaggcaggggggggggtcccaaaaagtaaaaaattttcagtaaatttttttgaaattttaagtaattttcttaacaaaattgcattaaaatactcaaaaaattttcccggcggcgcctatcagcaccgccggacccccattttaccatatttttgaaaaatggaggccaaaatcgcaaaaaatattaattttttggcgaaaaacggcgaaaatgtttgtaaaatacaccccataattagggatttcaaaaaaccaaaaatgcatccctaaaaatcgacttaaaagtggaaaatacacccctaaaaatcgaattttttacttcagcccccccccgaagccaagggtctggctacgcccttgcaatccgtcaaaaaaaacgcatcaatttattcccacattttcaattagggtgacttaaaaaaaccaaaaaaacaatttttttatgaaaatagtcctcttaaaatacaaagccaggccaataaccataaaaaatggggggatccgaaaacagtttttttctgtcgcctgacggcctaaaaaatttttgtcttgcaaattttccagcagatggagaaaaaacaggcatttgtagcagtttttcgtccaaaaat

SEQ ID NO: 2227 - DNA, 3596 bp, Heterodera glycines
aacgagagataaggacaaaaaaagtatgttttttccgataaaaaaaaaatataagcaaaaatgatagactttttttgtgacttttttcactttttatggcttcattttaattcagcaataagaaaatgctaaaaataaatttgtgttaggtcgtaattattgagaagacctagggaattgttgaaataatcacctaattttgtcagattcttttaggcaaaaatgttgacttcaaaatctcacctaatttctgtcccattttacaatcaaaatttaatatgaccaaattttgaaatatactttttttttgctattgtaatcaaaataatagtttttattaaatactattctataaattgtttaaaaattgattattatttttacttttgcctaattttcatgattttttgcatttttgtcgtgattttttggtattttatgacttttcatgactttttggtgattttttttttgttttaagtcgacttttggaaattttcatgacttaaattaccagcccacgttagtactatgaatataatatattttttcaagaaattcacaaatttttaaataacatttactaaaaatttaaccaaaaatcggcaaatgttgtaaggattttaacgaaaattggataaaattaaaataaattaatatactcgaaaacgccttttagtaaagatatttttgtaatttttttcacttttttatactaaattctcatcttggaaagttgctaaaaatagctaaaattattcgtctatctttacaaataaaaaagagaatttttaaaatcaactcatttctaaaaaaggtgttctccacaaatcagcaaaataattgaaattgtcacgaaaacatatgcaacccttagaagtgctctctgatcagtggtgccgattctaatcactttgggctgctgatcggctgatcagcttgcccggcttcttcttcactttcagcttcgcctcctcgcatggatccgtcattgagggcacatttggatttcttcaaaatctgtgaaaagaactccttgccagcctcacacattgacgcccaatctaatagattaaaaaatatatataaagcataatttttattttccattgtaaccataatatatttaggatacatcccgttggcccttggaaaaggcgttttaaataaattagcaaaaaagtttactgtacataaattaaacgcaaaaaaaaagtctgctaactaactcttcacggttgcccggaaacagagttgatttaaaaaatattgttatttttcacaaaatagaattaagtatggcaaaagcagataattttgtcgagtttgaggctgagtacttaattttttataatattttttattttttcattaaaatccccaaatgtcgttttatttgaaaatgcccaaaagtggcgccacggaaaacagaaaacgtaaactttttttttagaaattcctaaatcccacacagcttgaggattttacccaatccaatttctttcattaattcccacagttttgcattttcttctcccattctcttcacaatttccttctgttctttctcgtttaaatttttgttttcaaagcgtttccattgtttttgatattcttccgacaccttttcaagttcaatcaaataattgtcaactttaatatttcttaatccatttaaggcctctaataatccttaaaataaaaagaatgttaatttggttgtcttgagcaacgaaatacgcaaaatatgcattaaataggcacaaaaataggcaagtaaaaattacttaaaaatttaccaaaagtcttaatttttttgggtcataatcttagggatatatttttcgtttttttgttaaggatttttccgaaaatcatcaaaatatgtaccaaaaatagcgaaataggcacaaaataggcgcctaggcatagagtacaaaaagtccaaaatagacattgtataattgatccaagaagcttcaaatcaagctaaaaattcgttttctgtgcttatctcaacgttaaatgcacgcaaaaattttatgcatttgcctaataaagtttgaaatatttaaaaaagaaaaataaataaatttgttaaaataaagtgagtggttatttattatttatttacccgcgacttcattaagcctcacatcaagctgaggcgttgcctttgaatttttaagctttaatcgcctccattgcggagctcatctgaagttcgccctggtccacaatgaaccgtgtcttcacaaaaaagaattttactgaattttcttaaaatatgaaaaaataaaataattaatgaaaaattgcacattttttagattgaaaaactattttatagggctcccggacttttcgacagcatagcactaaattccgtttaaattaacatactaatatgtattgctaaatcattattactaaggaaggatacggtttttacgttttttacctaaaaaaatttccaaagaataacccttaagaaacggcctttaaaatttcaaaaatacacccataagaagaatcaaaaattttctcaaaaattcatcttcaaaatttatttatttattttcttggttagaatttttgatttaaaaattatttatctcaataatgatttggcttaattttgttgctttttggataaaattttacgattttacacccccctttttgaaatttaattactttttactgtcgaaaagtcccctcctaaaatttataatatttctgtcgaaatgtcctttgctgtcgaaaagtcctctatcggaaaaatccggcgcccgtttagagttatatttaaaattgaatttggcagtccaaagtgaccactggcggggtgttggcacgacccgtgcttgctgaagtgccaacattggtcttcagtgtgttggttttcttctgctgaactagctgaacttgtgccacccctttgtacccgcttctcctcacattccatcccttcacataagcattcgctgctaaagccatcattttccaatgttcgcaaatctccaacatttttcatgggattgtttatatccaatttgttcaggacttatcattttctcttttttgcagtcccatttcaacaccatatttcgccaatagtacgttttgctcaatgccaatgccttggccatgtcttgctcttccgttgtgccatcttcgaccacttcattcgctgatagaacgacaatcgatgtgatcaagaccaaaatgggaaatagattcgaccaaaattgaaaatgatgcattttactgtaaaagtttaaaagcggtcaatttacttgtgccagtttcataaaaatgccaactttggtaatttacgacaaaaaaatctattaacctttattgctaccataaaatcaatcattttttgatttcaattaacaaacaaaagatgttaaatgaaacaaatgtgtgttatgtatcatattaattaacaattaacactaataaaaatacaaaatgcaatatttattaaaaattaaatattacaaaattagtattatgtatatttctttaaaactcaaaatgactaaatatgcatgaaaaagctaaagaaatttgctcgggttatcagg

SEQ ID NO: 2228 - DNA, 1190 bp, Heterodera glycines
acaactttttgtaaatcgttactattttttgaaaaattacttaagtagtagagaatatgtagagctacattataataccaagatgaataaattttactaagtttaagctaagttatgattaattatttagcaaataatttctaaataatattaaatttaattattacgaacactgatatttttgtcgcttcgtcattacaccactgaaaaagagccaaaaattttcggcattaaatcttaaaaaataaaaggagaatttaaatgagattaaattttcgaaacatagcgaaataattatattatcctttcataatccaggctaaatttgctcactaaaatgcgcgggcatattgattgtcgattcgccaatatgaacaatcattttcaaacaatgatgttttataattttgcccatctgtgaaccctattgattaacgtcaagctgcttaagtgaatttttccgatttttaattctatctaattcagaaaaagtatatgtgaaaaattttataatttggggaaatagcacttattaagggtcactgaaccaactccgaacaggggccgtagcaaaagaaggtggttatttgacgaggtcatttaaccatctccaaccatgggtaggggcagggttgcaatttagccatggtaacatggtaaagtatgggaatttaagtcataaaaattcacgaagttggaaaaaactaattttttttactaatttcatacatagttgttataatgactatttttcatataaatacagttaattaagggctatttctgcctgctaaattcataaaatttcatacatcagaaaacttttacaaaaatccgcacatgactttaattcccagcactagtctgatcacacggaacattttccaattttgctcccgtcatttctgatccaaaaaatcacttaacaaatatttgctgttaatttattctgccgaagtccacaattggaccccagaatgtcttatgggaatgaatcacatcattttggccaatggtaaattaaattcagcgctgtgatttttgtttgtcaaatcaagagaaacgccttcccccccccccccccattagcagtttaatttgacaatttctattccgccccctccccgccgttgtcccaatatttaaggtgcttcagatttccgaattcccaattttattccctcatttgc

SEQ ID NO: 2229 - DNA, 2310 bp, Heterodera glycines
aacaatttcaagtcattctgacagctaagaagtgaatatgaaatccgtaattttatattcgtaaattatatttctgtaaacatcctagctctacttatcaattttgtccactgacggattatccactgacggattgtccattactgacggattgtccttcactgacggattgtctactgacggattgaccactgaagaattatccactgacggattgtccggaccccgatattttagcaccacttttttaaggacaagatataaaatagaatttttgaagctctttaggctccgtttgttgctttttggctttgccactttttgggggtcagcgccatattttaacaacaaattcgaacatttaaggcaaagtatggactcaaaagtctgctgataccaagtccttgtcgagaaaggaaacagattaattcattattgataaaatttttaatgatgtcctaattattttttacatatcgaagaattatcaaaattatgaaaaattctaacgaatgatttaaacgatttataaataataaaaaaatattaaaaaaacatattgaagaagaaataacaaaaaatattaaaatcgcaggaaggaaacgaacaaaaagtcatagataaatcaatgaaaaaaatggttggcattggcatcatttccgggctcaaactttggcaaaaacacttccatttcaaaacaaataaatgctttttggaggaatataaaagccaaagaaagtcaagtgaaaattatattcgaaattattttttaatttaattacctaattacattttccaatcctttaaaatgcgtgccattctcttcctgaccatggtttgcttggtgatggctgttattcttgagacaggtggccaaattaattaaaattcaaaaatattttaaaattttagccaacccaaaggctgtgaagaaagacactaagaaaggtatcaataaattgataataaatattaatgggaatatgcttttcaaggtgcagtttcagcgcccgcaaaaggaaaagcggcgctgaaaggagcagcgaaaggaggtaaagcagaaaagagaaagggactaattgatgtaaattaattaattaataattaattgaggaattaaaaaggacgcaaaaccaaagggaaaaggaaaaaaggaagccaaaggcaaaaaaggtagagggattttgaaaataaaagggaaattaaaatttaattttgaattttagacaaaaagattaagccagccaaaggaaaaggagcgcctaaaaagggtaaatactattattgattataaatgttaattaaaaattgaataaatttagacaaaaaatccccagctgccaaagccaatgacaaaaagagtccaagtaaatcattaattcattctaatggaacattgtgccaatgttggcaatttgaagcgaaaccaatcgcagcatgaaagcggcagccgtgccaaaggcggcagcggcggaaaatgctcagaagggaccgctgagtgcggaagtggtggcggaggaaaacaacttggacaccgaggcggtcgacgacgacttgggggtggaagcatcggacattgacgaattggcagaggacgaactgctcgaggacgacgccatggacagtaaggcggatgcatttttggacatgggagaggaggcggagatggacagctaaatggacaactaaggccaattggagtgacaaatggaataatacgggacaaatgacacaaatatcattttaattatagaattatagagaagataaaaatatattaaatcatcatttctgtgcttctaacttcgaaaaaacattgaaatttctagaaaaacacacctttaaattattagacaaaaatatttacactttatccttgaattcaagatgtccttgaaaaagagcattcgaaaaaaacattcaaaatttttgaatttataatttgattcatagacacacacaaaaagcgttaaaatttgactaattttggacaactctgttaagaaattgcttaaaatttcaaaattttccttggtggcacctatcgcaaggctatgtcctggtttgagggtagtggaaaatgttgttccgattcttaaacatattcataattttgaaattttatgggcataatgtcattattatttagtaattttaaagtttgaaagcaaaatttggtcattattgaacaaataaaaattagtcaaatttcaagattttccccggcggcgcctataggcacatccggaccctaaacatcctttattttcttaaaatgacccaaatcacaaaatttggacaatttttcgg

SEQ ID NO: 2230 - DNA, 3931 bp, Heterodera glycines
  unsure (1)..(3931): unsure at all n locations
ccctcacattcctcaaaagttttntggaaaaaagggccgcaataaaaattgttaaaaatctggttttttttatccccattgcactaaattacacatataatttgctaatttccttcccctaaacaatttttgcaaaatgttctgattctcgacccctaatctgattttttgcccgatgttctgattttgaaaaattttcgatccgaaccctgaccctatcggcaccgccggaccctccccctgcacctcaaaagtttttttttcattccggcgaaaattacaaattatttgaattaaaattaataatttttcattgcttatgacaaacttttaagttgtccttgaatttagtgaaattttcccgttatgtccttggtaatcagtatacccgtcctttgaaagcgagtttttcgaaaagattacattttttgctttaggacacgcaaaaaaaggtgtgaaatttgaataaaacaattaattaaatcttgttaaatggcacgcgattttttgtttaaactgcgctacggatatttattcttttagaacaaatgaaaaaaaaagaaaaaactgaaccaaatgaaaaacgcacgaaagttagtgaattgtaaaagtaaagcacaaaagaatgtttctgctcagattctctgtataaaagtgagagctttgaaaaaagaacttttttttcaaccaaaaatttaaaatttaaaagattttccattttcgaattctttgaataaaacagcaaattaattctcttttgaaatggatgattttgccgacaacaacaaattttgcgactatttgaacatcaccaccacaacaaaaagtgatgttgataatctgacgggaaaatttgctgcttttgaggcacagaaaaatttgtctgtttttgaatggcttttcagttcaatgactcatcaattaattgtcgctaattgcgcgtatcagttcaaagtggcgcaagttgcggtaaaaatgattttaaagatggcaaaattaaatttttaaaatttggcaatttaattaagtccaattggtacctcgacaatgttctcgtgttatatgacaagttgaattgcgtttcgccgcttctcgcttggattgtcttcccaaatattttcactccgatttccattctattaaatttgtctctaatttgggtcacatgtacaaaaatgtgaattttattatcataattaaatttaatttttgcttcaaggactaatcacaaagtgtgcaattggctgatcgcctttgattcgctgtgccaactttttgtggtcgctccgttcggcgtcaatgcgattggcgtcattttccaatacagtagcattgattaccgtttctgcctggccacccttatggcagccaccgtagcatcatacgcctctatcatggcaatgtatctgatctcagttgaacgcctgttgatcataatgtacccaatcaagtgagttcctcataaaatgtcaaatttaaatttattttccattttttcgaatgaattggaataaaaaatctacggttctttggtgttcaacagtttcggtggttttttgctcattttttggcattctgatgaatttgaaagtattcgatgtgtggacaattatcaacgtgccatatgagcggtatcctttgatctagggttgctccccgacccctcggggggcaaaatctcgggggccggggaccatcggggggcacatgtcgcgggtcggggaggaactaaattgtcgggggtcggcgaccccgatcgggtagtgatcaacaaatttttttaacgaaaaaaccaatttttattttaaatgctcgtaaattttcttttttttcactgtcaaccgaaatttttggtaaggagtctgggtggaggaggggggggggggcgtcagctccgatttttgaaggtatctcaacatcggatttgacgatgacccttttttttttttgcttttcaaaattggtttttgcggcgtgttttttccaaaagacttttggggagaaacaaaggggtccgtccggcggtgccggtaggtgccgccgggaaaaattttgaaaatttgaggcaatttgttaacagattatgtctaaaaaagtaccaaattttgaataattttttaagaaaaattaatacttttggtggccggaggtgcagatagtcgccgccggaaagtttttcagaatttttaatgaattttattaagaaatttttcaaaaattttcaatctttcacccttcctggttgaattaatttttaaatttttacaacgctcggggtccccggccacccgactaagtgtcggggggtcggggggggggggcaaaatgtcgggggtcggggagcaacccaactttgatcaatgtcaaattaatatcgcaataattattaatgactgaactacatttaccgcaaatttagttgcgtttactgtaacagtggactttatgctgacgtgctgaatacagttccatcttatgtaatccttttgatgtgcaccttaaattatgcggcaattttttgcctgattttatggcgtcatcaaacaaacaaaggatcaactcaaacaacgcaacaatcggctgcaaaatgttgccaattatccgattttaattttattttttatttccacatttaagcggctgctgatcggtcaatgcgcaaaatgttgcgctcggtgtttctgctgctgttggtgttgctgatcggctggctgatcagttcggctgcccgcaatctgatcaccacattttttagaaataacaccactctgatcataaacagtctcttttctgatacgaacactcagaaccgtctgattaccaatattacttcttgggtgatcggtgttatcacttgttttccaattttggcgtccgccagtggagcgcccatccttttgttgaacaggcaaaaaatatgcaataaaatggcaaatttattaaaatggttatttatataaactatttttcagtaacgattatcggactgcttacaaaaaagcgatttggcgccgaagtaacaatttgccgggagttgggccgctttttagcgccaaagttgttgatggaaaaatgaagtagagcataactattctgatttattttttatgaaaacataaaatctcgatattttttagctattacattatgtaattttccatcataaaaatattactaatttgtcaaatgggtttttaatcgggggtcattttaattgaatccccgattatggcaaaaaattctcaaaaattatttagaaaattggtggactgaacgaacgttccgttccgcctattaccaggctatagtaattacaaaaatattttcttctttttattcaacattaaattacactaattatggaataatatgaaaagagtttttttggcatagaaaatcacaataatgaaaagttaaaagaataatttttttgaaagataattatgcaaaaaaatgctttggaggttttacattgaaagaccggtgatcaaaaataatggaaattttattcaaaaaaacatttatttatattcaattgccggtctttaaaagttaatatcgaacaatgattgaaaactttcactattaacaaattagcgagtaaaaattaaatgggtattgtaatacagtatatatgggtacaacacaataataaaaataaaataaaaatgctagagggtttgtattcggggtgactttgtattctcccccgccgttccccccccccccccgatattgtttccccgcctgaaaatttaaaaaaaagtttacgaatttagaaattttccgaaaaaaatttaaaaaaatttttgtgatatgaaaagctacacctgggtattcgtcgttttaaaggacgtaatttagaccgatttttatccaatcggtttcgactgatcggatccataacaccccgaaaattacccaaaaagaa

SEQ ID NO: 2231 - DNA, 941 bp, Heterodera glycines
ttataatagtaaaactcccgctcatgattaaaaaaaatggaaactaataaaaaggaaaatgatctcaggcaaaaagtgaagaagatggggaagttaatgcaccaagacatcctacattctttaagacgaattaaaaatgtaaaattatatttttattttattttttcaacgatttttcaaattaatttttcactatgactccaattctaacattgcatcaaattcacgcgtttcacactaaaacgcgagaaagaaacccccaaaaaggcgagaatgcgaaaaagcaagacgaaactgattttccgtctccacctagaaaaacaacaaaagtgagttcatttgaaaaatttttgagctcttttagttgatgaatttcatcaaaatttccagtaaccatgaaaaaaagagattatataccccaacgaagaaagtgacagaggtaaataaccgcacagaattaggggggtgggggctgagttagaggtcagtaaaattcataataaaatttaggattatcccccccccttccaaatcctctcaaaaatagctgatttggcatccgattatcccttacaattcgatcaatttctcggctgagctcaaacgcactgccatcggtgctcgggtaccacttgcgctcccacgtgtccgccaaatgccttgccccgtaaatggaatccaagtgggaccactcgtggaacgcttcctccccgtccaggaagatcagttggagcgtgatatgctaaagcgattttgaattttatagggattttcaaaagcacacaatatgcactggtttctcgcataaaacgcgtaaaaagttttttgaatttttgaaattaaatttcaatatggcttaaaagaccaggaaaagataagataaccataactctggttagacaagacaaaaagcttattcattcatcaaaaagagcatgaca

SEQ ID NO: 2232 - DNA, 2330 bp, Heterodera glycines
  unsure (1)..(2330): unsure at all n locations
tctggcactctccctttattgattcatctctcgttttttgaaacgctgtctaagtgtataaatatgcaaaaatttgcagtcaatccatcattattttcttcacttacaaattctgccttctgtgattgttcatctgtgacgacgacacttcgtgaacgaacatgacggacactgcaaatcgacagcgacgcggccgaggcgagagacgcacacgagtggtaagacagttggatggtgaacacgattctgacttctatttggaacccctgacccggattcgaaccaaaactcgaaatttcaattttcgacaaaattaaaattatgcaacaaaatgcacgaaataaaacggaaaatacgattctgaaggcaagacagtgtatttcaggcatatttgaactgtttttgttgcatgacttgaattttgccgaaaactgaattttcgagtttgtttgagtccgggttagggattcgaaatggacttcatacagcgcccccgaaaacccccctaaagcatcacaaagccgctcattccttttttactcttttatgggaccacaaacggattttgacattaattttagtcaattttcagcttctacgcgacagtgccaagaaaatcaccaaagcgtccattcttcgtctggcccgacgtgccggtgtcgcccgaatcaacgcagaagtctacgacgaggtccgtgccgcgctgcgctcgtacttggaaaccatcattcgagacgcggtaagttttcaaaaaatgattaatcccgatatatcacatcacccaatgctttcaggccatctactgtcagcatgagaggcgcaagaccatgaagagccgggacgtggtacacgcactgaagcgccagggcaatttgatgtacggcttcgaacaataagcgcaaggaagaggaggacggatatatttggaaccggcaccatatgacattttcatggataatatattatcattgtacatatgtgtgtatatgcctatattgtattgtatattgttttgtcatttatcagtgcaattcagggttgttccgggtcgagaaaaatatcgggtcgggtttcgggtcggccgaaaaatcatcgggtcgggtttcgggtcgagaaaaaggccgggtttcgggtcaattgacaaatttttaatttgtttaaaaatcaaatggcactgcaatatttgcagcgaattgcgccatttataggacgatggaaataaaaccaaatggaatcaggtttttcagccatctgctttgcttaaattcaagaaattcatacaaaatatctttagaaaaaggataataattagggacgtgaattttagtgaagaaaaatcccgaaatagttaactaaaatagtgagtaaaaatgccaaaatagtgaagaaatagtgacgaatagtgacataattttcagccaaaaattgagcaaaactaatttttattcactatttgcagttgcaaatgagttggactgggatttttaagaccaaaaaacccaaaatagttacctaaaaaattttttaaattaaaaatttttgccaagaaagtaaatttttgagaaaatttttttttgatttcttaggagtattttttgaaatttttttagctcgattcttaggggtgtattttttgattttattgcatttttgttaacaaattttccaaaaaatgtagaaatagtgaaaaatagtgacaaaacgccaaaaaagtgaattttcatttaagtgacgaaacgccaaaatagtgatttctagtgacgaaaaatgacgtccaaatgaaaaaattttaatgcataaatgcgttttttgagcacctttcttcaaatcaatcgagcaaaaaaaagtttttccactagaaatcgcgtccctagtaataaattgataattaattaatttgcagacaaggattagggttcatatcttttggcccggaccaggccgttttcgcgtgggcccagtttttgaactataattttttttttattgtcaactaaacccacgaacttgatacattcgaaagccctaagtgccctctattagccatcatttcaaaaaatttcgtttggttttaaaaaagttaggcaaaaaatgggtcgaacaaccagttttttgaagggccataacttttttgaactttaacgaaatttttcacaatttcagaactaagaaagagggtatttttttctttttagtttgaaaaatttattttctttttttattggtttttcttttggtccaattttcctctcaaggngtccccagctagcaaggggcgtaagccagaacccttaggctttcggagggggctggaagtcaaaaactcgatt

SEQ ID NO: 2233 - DNA, 2678 bp, Heterodera glycines
  unsure (1)..(2678): unsure at all n locations
cattatcaatagcttaagagatgaggaaaatatggatgaattgaacatttttgctgaaaattatgacaaaaaattaatgattgacaagcaacaatcattaaaggaactgttggcaattntaatgaaaatctacgcggactatagcaatgccagcaaaagagaaataagcaaaaatgccattcggttgacacattctgggaatgtaactttacgatttggacaaattttatatgaaacgatagagaatttggaaaatttgccggaagaccgcgtgaagtacgatgaaaatgaacaattgctaaccattccattattatttgtcaatcatttgcttgagcgactcaatgaattcattgaaaggtttgtaaattagcctatggcgttttttgccacatttggtcaacattttctgctggcggttaaaaatggtttaattaattataatataaatgggaaacatagaatttttaattactttttttaagaaacttgaaagaaaatagtaaaatcagtgatgactttgatttcgtgctaacacttcaaacagttgccgaagagagcacggaattagaggcggagaaacggcaaaagccaatttcggctggagttaatgtgaacttgttccaattgcttttctcattagcaattcgtttgtgcttactaattgacgaaaaagaaaaattggcagaaaaatatttgccaaaattcgtattcgcattgaaaatgtgcacaacaaacactgggtaaaaaggcgtgtttcattttttattcattaagaatttaatctaatatataatatatatttatacaaggaaattaaaacaaaaagaaatatttggataaatatttgtaaaatgcacttaattaagttttaccaaattctatttcatcgaatacaaaatcaaaattgcacaacaatctgttaagattaatttgccaaattggaatttgccttataatgtttatatgaaaaatgaaaaggaattaaaaatggataaagctgaaagtaaatttgaaagtatttaataaatagttcattaatattattttttaatagacaaagagattgtgaaaaaattgagtgaattaatggaattgatcaaactgaaaagggtagagaaaggtaataatcttaaatttaataaaaaattttaaataatattgtttttttttaatagtgaaaggactcaaagaaaaatttgttgaattattggaaaaagatgaaggtaattttgaataaaagtcaacaattttttaaagtattatttttataatagtggaaaagctcatggaaaagctgctggaattgaaaaaattgcaagtggaaaaagccatgggtaattttaaattattattattatttaattaattaattttataaattatttctctaatagtcgaagagctcttaaaagaattgaagaatgtttataaagtataaaaatgtgaagagaaaggaaaacatcaaggccggaagaaaagcagaaaaaaggaacaaaaacaaaaaagaattttctcccattatccaacatttcttttttcactttatctaaaacgatgtaaaaaattttgcgcatttatttttgaaccaaattcttcgtattgttattaggctggacacaaattcgacaaattcattatgtccatgattttcatgcgtatacaaatttatttcagttctttatccatcaaaaaaaacttcggttcccaaaaactttcatttcgcctactaagccaaaaaggtaagctcgaacttgagcccgtaggaaatcaagattttcgtgagagaatatatgaaaaactccgctctttttgtagatagacctgaatgtttgaaagacaaatttaaaatagggagaaaaattttcacaatttttcctcacatgaaaagccgggatttccggcggagatgggagtgagtaaatcttcccagaatttctagtgctcttgcatgcccataactggctacttattattacattttttagcgatgcgatttagagccttaatttttgcccttttaatacgcctaatcctgattttagaaattttcctttaaaattttaagtaatttttgtgtgtatgcttactgatttacccttatttgttaggcagaaaaatgttaaatgattttttgctagaaaaacatgaaatttcttaaattttttaaaaatcatacaaatattttttgagtaaaaagtctcagtttttacaaaattattcaaaacataattaaaacgctcaaatgttaaataagaataaagaaattttcgtttagatgacattgaacctagtaaaaaatacacagcttttttcaaaatgtcgagctctattaaaaagcaaaatatttaaagattgtcaaacattatgccaatttatcaaaattaacataaaatttaacagattctgaaggtgggggtcggtgtagtctggccattatagtaagagggacagtatagtctggcaaggtgtttttgtcccccacatggattctaatctggtttttttcgaaaagagagcatggaagcaaattgaaaacgactatgtccggtccggattctgacaatttttcccaaaagcctcaaaaatcctcaaatcctcacttcaaaaagaaaaatcctcattgatctatgaaaaaaccacaaaatgagggtaaatcctcagatctgcgagtcctg

SEQ ID NO: 2234 - DNA, 1739 bp, Heterodera glycines
  unsure (1)..(1739): unsure at all n locations
ctatcgcactaccagtgccggataatgatcagtttgacggaggtttaaaatctaaaaaatataaatataataataaaaaatttttgtatttttttagctttctctcactgatcaatcaaatcaagaaagacttaaaaatgcccatgtgaaaccaaatgaaatagacgaaaagggaacgaaaaatcataaaggaaaaaaaaaaggtatgatatttttggcacttttaaaattcaattaacgaaagaaaagagtcggcaccagtttgaaaattataaaaaatagaaaattaaattaaatttaaaaaatttagcggtaaaaatatattccaaggaagaaaaactacaattgcttaagaaattccaaaaaagaaagaaggaattcaaaatggatgaccaaataaatgcatttaatagaatggaagtagcaattgctcaggaattaggtgttagcataagaatgataaatgaatggaaacgagagttcggcttaacaagtaaaatttaattggttttcaaaaataaaatatcctacttttaatttaggaaaatacattaattattcaaaagaacagaaattagaattggtaaaggaatttcaaaaaaaaagaaaatgaattcattacaactgacaaaattaatacagttcgtagaatagaagaagcagttgcaagggaattgggcatcggtaggacgaccttaaaaaaatggaaaaaacaactcgggctaacaggtgattagaatcattttaattgttattctattaaacgatttatgttttagcgaaaaaaagttattcaaaagaagaaaaattcgaagtgattttgcaatttcataaaagaaatattgaatttaaaaaggatgaaattttaaattcatacaataaaattgtccaagcaattgcaagagaattaggcgtaagccgaaaaaatatatacaaatggaaaaaggaacttgggctatcaagtaagaatcattttaatattctatcattatttataaataaattttttaaagacgaacaatggttggagctaatccgaggaagaatgaatgaatttgaaaaagatgaaaatccgaatgaatttaacaatgccgaagatggaattgaagaggaaatggataattgtcatgtcaaaaaaggtgattttaaatgctacaaaagaaataataaaatattttaagagagcaaaatttattcaattaaagaaaaacttgagttgctagagcaattccaaaaagagaaaaatgcatccaaaaagaatgacgaattaaatacattgcgtaaaatagatgctgcaattgcaaagaaattaggcatctctcgaactgcgatttacagatggaagaagaaatttggactctccgggttatcaagtgattagaaagaatttaataaactatttgattaaatcaattagatttatattattattagggatggcatttttaggtttttacctattttttttttgcggcttagttatgatgagagaagcccaaaaatagcattttctcctaacaattgtcgatttagagcgactttttagcacctaaaaacacctatttttggcgttttggcacctaaaatagtttacaacctattttggcatttttcgaatttttagcancctattttgggattttcccagaaatttcatagtaaaaatgcaataaaaacgaaaaatacacccctaagaatcgatcccaaaaaaatanaaaaatataccccctaaaaattga

SEQ ID NO: 2235 - DNA, 1352 bp, Heterodera glycines
  unsure (1)..(1352): unsure at all n locations
gcagagaaggaattaggcgctgatcaaatttcgcaaaacaattggaaaaataaaatggcttaaaaagtaagttcgattatacttatggtttagctaatctgacaatgcttggacatttaaatataaattagattttttgttttagagagaaaattatattccaaggaaaaaaaattagaattgctaaaggaatttcaaaaaagaaaaaacgaattcatcagaaatgacaaaattaattcagtcgaaaaaatagaagaagtaattgcaagggaattgggaatctgtcgacggacaataagaagatggaaaaaagaattcggcttaacaagtaaatttcaatttaacattaatttgtggtagaattgatgatttttatttgttttaaattaatttttaaatattacttagatttatgtaatttagggaggacgattagttattcagcggacgaaaaactcaaattgcttgagcaattccaaaaaatccgaaatgcattacaaaaaaatggaattacgaatatatgtgctaaaatcgaaaataaaattgcaaagaaaataggcgttgatcgaaaaaagataaagcgatgggaaaaatggcttttcatagcaagtaattttttgtccatttaggcctatgaataaggttatacaagaatgaggaacaaagttatccttaaattgggaattagaataaatgaaaaacatacaatgaattagtgctgctcgagagtctattcttgagtctcatcgagaaaagtctcggcttttgtggtctaagtctcgcgtctcggggtcaagtccgcggtctcggaaagtttcagactctagtgtcactactagagaggcggaacaggaccagaccctggcatgaatttacaggatctgaaagcatccgcatcctaaaaattttaaaacccaatcctataatatgatcccaaaattcgtaatttgccgatgtcgaaacactactattgttaatacatgttttggaattacatgttttggaaatctagaaaataattaagaaactaattttgtaatgaaatactcattttcagctttccaacatcagaatggacaaaaaaacaaagcagattcgcttaacgcagaatttaatgatcaaaacggtcaatcatcatttatcaaaagacaaaaacacgtcaactttgaagaaaattcaccgccaaattcgtcaccgatttcgcaatcaatttcttctgattcgccattgaataatgaacttcacgaaaaattggtcagtctaaggactaattgtttctttttggactccagatttcgcatagattttgatttttagaatgttnnctgcgnattggatcaaagcaattttat

SEQ ID NO: 2236 - DNA, 4447 bp, Heterodera glycines
  unsure (1)..(4447): unsure at all n locations
taattaagaaattaaatttattttagagagaaacctcttgttatcccaaggaacgaaatttaaaaatatttgggcggatgaataatgaaaaaatatttacatatgacaaaacagaggatgatgaagcagagaaggaattaggcgctgatcaaatttcgcaaaacaattggaaaaataaaattggcttaaaaagtaagttcgattatacttattgtttagctaatctgacaatgcttggacatttaaatataaattagattttttgttttagagagaaaattatattccaaggaaaaaaaattagaattgctaaaggaatttcaaaaaagaaagaatgcctccacaaagaatgaagaattaaatacatggcataaaatagaagacaaaattgcaaaggaattgggaatctgtcgacggacaataaacaaatggaaaaaagaattcggcttaacaagtaaatttcaatttaacattaatttgtggtagaattgatgatttttatttgttttaaattaatttttaactattacttagatttatgtatatttagggaggacgattagttattcagcggacgaaaaactcaaattgcttgagcaattccaaaaaatccgaaatgcattacaaaaaaatggaattacgaatatatgtgctaaaatcgaaaataaaattgcaaagaaaataggcgttgatcgaaaaaagataaagcgatgggaaaaacggcttttcatagcaagtaattttttgtccatttaggcctatgaataaggttatacaagaatgaggaacaaagttatccttaaattgggaattagaataaatgaagaacatacaatgaattagtgctgctcgagagtctattcttgagtctcatcgagaaaagtctcggcttttgtggtctaagtctcgcgtctcggggtcaagtccgcggtctcggaaagtttcagactctagtgtcactactagagaggcggaacaggaccagaccctggcatgaatttacaggatctgaaagcatccgcatcctaaaaattttaaaacccaatcctataatatgatcccaaaattcgtaatttgccgatgtcgaaacactactattgttaatacatgttttggaaatctagaaaataattaagaaactcattttgtaatgaaatactcattttcagctttccaacatcggaatggaaaaaaaaacaaagcagattcgcttaacgcagaatttaatgatctgaacggtcaatcatcatttatcaaaagacaaaaacacgtcaactttgaagaaaattcaccgccaaattcgtcaccgatttcgcaatcaatttcttctgattcgccattgaataatgaacttcaggagaaattgtccagtctaaagactaattgtttctttttggactccagattatttcgcatagattttgatttttagaatgtttctgcggaattgcatcaaagcaattttattggcggaagatatccaaaacgacactgcaatcaaagagtaaaagataaaagtgttcaagaagaaaggcagaacagcagccaaccagtagtctattgtatcaaattgacgaatatattagtgctaatgagttagagcatgacgacacaatacacgcaatgaaaattagtggtgggatattttgcatttttattaattaatttttgcgctagttaaaaagtggagcactttgaattttcttaaaaccaagaaagggtaataagcccttttgctttgcaattttataaattcgtttgcgaattttatttgtggaattcgagttgggattagtaattagtgaaaaactgatgtcaaattcgtgctcaactactccgaagcacagctaaaataaattccacaatttaatacgaccaaataattttgctttttaaataaaattcaaaaaactccactttcaaaataatttcgatttttattattatagaatttacaatgaaatacgttagggaatctggcttgcttcatccacttttgttcagcgagccacctgaaaagttgggaatgaggtttataaagtaattttttttaaaataaattttgcattttaagaatgccaaatccacaagagtttagcattttggatgttcttggtaatttattcgttgttctgtatgaaatcagaaacttttaattacatttcagagcttgttggtggcgaaagacgaattgaagttttcgatgtacacactcaggaggggaaaaatatgcgactgaaagaatttgtcaaatatttcaggtgaataatatttatggttgggatactgtatgtgataaatggacgaaaaacaccatttttattgcttaattctttattaaatactattttgttaaattgtaaatataaataccaaccctaaataatataatttgttgatcagtggaatggaattatccaatcatcagattttttgttttagacaaagtccgtcaatgcgtaaaaatttgttgaattcgctctcactcgaaatctctgacaccaaattgtcagaacaggtttttaaaatgatttttatttatacattttggttcatttaggtgatagcgccgggttttgtaagaagaattgattggattgacaatgtgtggccaaaagaacttttggcacgtcagaaaaacctactaaaaaagagtcgttgggcacgaagcaacgatttttccacttacccaaaagtgcaaaagtttgtaaaatttaaaatatatttttatgattttttactttaagatattgcctgatgagcgttgctaattgctttacagactttcatattggtgagttatgaaaaactttttgttctacaaattttgctaaatttgtcgaacaaattcactcttccgatgggacttggatccacggccttttcccattgcgggaaatgctttaacaaactaagctatgggcgtttcctttagattttctcccaagtcctttatcccatttccccatacccgcttccttctggcaccaaactcaccacatcattttccggaaaattcctcttaaaattcatttattttaagattttggcggatcatcagtctggtaccatgttctgaagggtgaaaaagttggtgacggatgagaaaaatttaaataaaccttttatttgataatctcagaaaaagatgtagaatttgtataaattaaattttcataattcaataatgctacagcaaattttagattttttggctaattgaaccgactgaggaaaacctgaaactttatgaagaatggtttctgggcgggaatggagattcaaaattccttggcaaattgaccaaatgttcacgtgttcgactccgtcagggagaaacgcttattataccatcgggtgaattaaaacaaacatctttggtgaaaattgcataaacatttttcgtctggcttgttcacaaaaactgccaaattggctattcctaaaaattggcatttgctaaaactgccaaatagctgttttggcattttttgggaaacaatgaagcaccatgtttcttacggacgagtctgtgaataacattgatcgccgttaaggatggattcacagtgtttacacaccggtggatgcactcgtttttggtggcaactttctgcacagttacgcaattccgacacaaattcggatttcaacattggaagataacatcaaagtgaaatgatttattaaattaatatatattaattaataatatataataaatactctgtttggtacaaaaatttatatgatatttggtccctgaccaaattatcaaaaattttgtaaaaattttcaaaaatccacaaaatacccaattttggtgcaaatctatttaaaaatttggccaaatctcaatttttcaccgtcctactgtagtactaccgcacagctgggcctctcattccccgaaacttttttgaaaaaccgcaaaagcggtgtgcagtgaaaaacacatcctaggacgaccatcagtgatgctggtcgtatcataaaattttattatttattgcagcgcggcaaaaaatatcgcttccctcatttcaaacaaatattttggtgtttcattgcacaaattgtgcgcaaatgcacacatcgtctgtaccagaaaaagctgtcagaagaagcccacaatgttgaaggcctaaatttggtgcaggtcattgatgaaaggatggtcagtagcctttatttgtggttactggacatttgcgccccggatatttacacccgagcatatgcgctccagacattgcgccccgaacctttgagcataattatcattttaagcttaaattttaaactttgttcaaaaggatgacgaaatggcaaacaatggcccacggctgaatttggatggagaagaaatttgttacaacgaatttttgggaaatgcaattgatgtgagggaattttatagcaattaaagtccaanattaaactttaa

SEQ ID NO: 2237 - DNA, 1123 bp, Heterodera glycines
gtatcataaaattttattatttattgcagcgcggcaaaaaatatcgcttccctcatttcaaacaaatattttggtgtttcattgcacaaattgtgcgcaaatgcacacatcgtctgtaccagaaaaagctgtcagaagaagcccacaatgttgaaggcctaaatttggtgcaggtcattgatgaaaggatggtcagtagcctttatttgtggttactggacatttgcgccctgaacatttacatcccggacataagcgctccagacattgcgccccgaacctttgagcataattatcattttaagcttaaattttaaactttgttcaaaaggatgacgaaatggcaaacaatggcccccggctgaatttggatggagaagaaatttgttacaacgaatttttgggaaatgcaattgatgtgagggaattttatagcaattaaagtccaaattaaactttaagaaaaatcagtatcaaaattcggaaacaaaaaatatatttataaaattcggttttagggttcatatacatttaatccgattcaatcagtctacgacaataaagacaaggcgaaattcactcctacaaaaaactacaatattggtacgcacaaaaatattaatagattatcatttataaattaattttgatggttgaaaaaattaatgaattttaatttgatagtatgtataaatccgtgaaataattatgagtcgaacttgaagttccatttattgtgactccttggggtttatttttcaatcccattcaaaagaggggctttattttcagggggtgggtgtgcttgctgcatttagaaatacggtaatggggggtaagtcgttgtttttttagaaatacagtaatcctaattgctctaagatttccttcgttccattccaccgctggtgatcagtgggcttccaccgcttctgaactatgctaagcgattgttgaagttgaagcaacccgaagtgatcgagggcatcactcgacctaaccatttggtgaaagagtttcaagtttgttggcaaaacgcccttttttgtgccattgtttaatgggtactaatcggtagggatgagagttttaggcacaaaaactccaaaataggcaaagttag

SEQ ID NO: 2238 - DNA, 4544 bp, Heterodera glycines
  unsure (1)..(4544): unsure at all n locations
agccccgggaattttttttttaaatagaaaaccctattatttctaatgatttcgcaaaactcaattcctctttttttagcaatgtgtttatttattagaaaaagaaaatctttaaattttctcaaaaattataaaaaagtttaatcacactacacttgtgaaaataatcattttcaaaaaaccaactcattatcagaaattacccagatttttttcgaattcacctgggacgactgaaaattgcggtatccgtccacgagccgctgcagcacggagggcgactcagagggggacggaagggcacagggcagcagcgcaattgcggcggccggtgtctaaaaattagggaaaatgaaattaaaaaaaatatttaaaactcgtattttacatcgacggaaggaccggcggtggtggcgagggactgttgctgaagagttgaagacggacgaacggacggagaaagtgcgaaatggagcaactgaatatgttaagagtcagtccaatcaaaaaaaatattagagtttaagggcaaaattttttggcgattgtgtaaatttactgttttttggtaccgatgccaaaatgattggaaaaattgaaaccgaaataccagcgatattgggttagttcaattgattattctcccaattaaattttaaaaatgcctttgacggcaaaaaatgaatttcttaaaagaaaaatgataccaacttttttttttattggatttggtcggtcaaataaggaaaaaatttatttacatcataaattgtggcagccatttcggcatcctaaaatcggtggatgtgtgacgacccgtttcggcatcactcaccccggcaggcagtgtcggggccgtcggcgccgccgtcgttgttgtggttgtcggcactgtcccgctgccatccggaaagaatgccgagctggacaatgcgggtggtgttggttgcattgcaccagtcgcactgctaatgccaatgccaccgattcggcgaagttcagagacggaagaagccaagctggaatggaggaaacaaagaagtgtaggggaaacatttcataaaagataaaaattatttatagaggacactgaattttcgaatatttttgaatttttttttgaaaaaaacgaacaacccctgcggtgaggagtttatgtttattgttaggtgcataatttgttgggggaatggacgaaaaaaatgagagtgtgatggaggaggatgcactacgttcaccccccccccccctccccagtatcagttcccgcccatcgcatcgtttcgtccgggaattttttttcaagaaaaaaatcttacaattagaaacttttttatcttctaagagaaaaaatttcgagaagtttcagcgattttttgaaaaatcttagtaagtgaccacaaaagttttcgaaaaaaatttgttcatagaattttgttacaaagaactttctattttggggatgcagccgagacgaaaactgccaatttcccattaatttttatgtttttgcattttagcaattttttggaagtcttggtctcgactatcggggccaattcccgattcctaatccagaaaactttgcctctgtgcctagtgggtccatcgttttccaaaccaaactcactcactcagcatttggtggtgaagcggcagtggtggtggtggtggtgggaactgtgcccaacggcgacgaagtgggaacagaggaggaggaggcaacacaggcaaaagcgcttagtccatcaaaaaaaaaaaattggtgtaaaatttaaatgaaaattggccgtcacacaaaccagtagtgggaatggcgggagcagcagcagcgacaactctttttctcttccgctcaattggtgctgaagaggaggaggagacggcggcattgtttttcttggcatttcgcttcccaattgggtcccggtacatttggacgtctgaaaaaaaaaatttaaatttttttatttcgtaatagtcgggtctccgccccctgtccctccctcccaatgttggcattttttgtaaaaatagaaattatatttttgatattttgcaggctaatagaaaactaaaaacgaaaatgcaacattcattttgaatcaaagaaaacccgaatattcgttcgatttgggccgggggttcggaatgcatcgattatcgtaatagaaacccatccaattaaaaactgaccctctctgttcatgccgagccgaatgcacaagtcatagcgacacgaacggcacatattccgcatttctaaaccaacaaaatgagagcggacggattaaaaggaaaatgtcattttttaaatttttaaaattaatacccttccgtatttcgcactgtccgttttgacggcatcggtacgttttcttctccaccactgtgcgacgaaagaaggcggcacaagcgctgaaaaaggggggggggtaagtttcacaaaaacagaagaggaataaatttggcatttttcgatttggttgccattttcctttggtccttttttggtaggcattcaaaataatttgtattttttcctagtgcttaaaaagcaaaaaaaaaaggaggttttcataaatagcaatgaaaaagcggtcttgccggcatgcgagaatgccaaagtggtagccgtggctgagatggccgcacactaagcaaaaccgcggctttccgctcgacccctcttcgtccgaatcgtcgctcagattgagtgggcctaaaaaataaaaacaataataatagggcaataagtagtaattatcgattaatttgggcaaggcctcgcccaaaaaaaaaaggattattcagggattaattagataatcacttgttgtagactcgacgaccacagattgtgtgggcaatgaagaagccatagaaaattttttgtcatccatcttagatgaaatttaatgtagaaaaatggggaaaataaaaaataggtaattaaatcttaaaaaatattttttatagacatataggtataaatcaaaagcatagatttatgtgacaaaatagccaaaggtgtaaatatctctggtatttttcatgccatttccaccaaatcacacgctctccgagcaaccgcccaaaaatgacttaaatattgcaatgggtcttgacccgctcgttgttggaattcagcgaagagttgccgcaaattgttgtcttgttgtagataaatggactttctcttaaggccctttccccttatcccatttgccggtgcattgtgaaaatcggcaacaatgtgctgccaacgttcaaattctttaagcattcgcttaacaaatttgctgaacagtgggtttggttcaagaagggccccccaaatgttatgccacgcttctaacgaattgttgcttcttgaaagaccaatttcgaggcgatgagtcagattccatagctaaattacagaaatatgtaaaagtagatagtcaagaattttttaccgctattggaaatagcatttggggaattacatttaggcactcatgtttgggaaacgagaaattttgacgtccattaaaaattttttacggtgatcactgatcagacactccaaaatttcaaatacataactttatttaaaaaaaaatagttttcactaataaataattctttattttatttcagtgacgaaaggttcagtgacgaaaagtttagtgacgaaaggttcagtgacgaaacgttcggccacccgaaaaagctttctttctccgatcaaagtgtgtgtgtatagtttgtgataagtagggcgtcaaattatatggacaacaaatcgcaaaatatggacataaaattgcaaaaatctcaaaatatggacataaaattgcaaaatatggacatacatttttccaaatttagtgtataatttctcaaaatttcttcaaatttattggttgaaatgcatataagatacatttccaaattttgagctgaaaaactcattcgattgtcggcaaatttaaatttattcaatatttttcgtgaaaattttgctaaaaaattattttttggaaaattttccggtttttgaggtcaaaaggccaatttgcctgttgggggccgttctattagaggtttttttaaaaaatgccaaaatatgggcataaaatatggacataaatgccaaaatatggacaaatatggaaatatggatataaatcgcaaaatatggaaaaatatggaaaatatgagtatagaaatacggtaggggtcaactccgtctcagcaatgttcaaaaagctataacttttttctttgttggccaaacttcacaatcatggtatcattcgaaagccctagatgtttagaagatatttataagctatttctcagtgattaatcagctctcaaaaaagttgtcagttgaaaaccgcaaaaaaggcagaattttcaaagttttttatttctatctttttttatagttcgaaattttctgtaatttttagtaggactaatagagcatgtgaagagctttcgaatgatatncagattgtttgatttggtcaataactttcagcagtatattgact

SEQ ID NO: 2239 - DNA, 5978 bp, Heterodera glycines
attatttaaggaggccgctaaacaaataaacgattcttcgtcctcagacagcaaaagcagcacgtgaattgatggaacaaaacagtgaagtggacgaagtgaggcgacgaattgcagcaaaaatcaaagcggaagtgatcaatgggaagtgaaaaatgatcgaaattaaataattaaaagtgatcggaatttgttaattggtaattaattggtcagtgaaaacacggtgattaaaatggatgaaaaagaaaagctacttttgagacattatctcaactaatttgggaagtgaaaaacaatggatatgttaggtgtgggaaagggtcattttggtgcccacgttttggcgccaagccatataccttaaaagggtaaattttttgatcaaaaattttacaaaaaaaaattgaaaaaattttaccttccaatgggcttactctaattttcaaaaaaaaaattccaaaccccataaattttttttttgggaaaattgacgaatactaccaattttgatttttcatataaattattatatatcattcgattcgtctcgatgagacaaatggaatgaaggagtgatctgatcaacttgccgaaaagatttttttgatcaacatggaaattgacttagcaagaattttcaggtctttcctacaaaaaatgtcaaaacattttgacgctcaatttttttctgttaaaatttcaaaaaggtttgtgattatatacataatgttgacggtatatttaagaaattagaacaaaatttggtcactaccccaagatttggaccctccaaattaaaacagttctgataaaacaaaacagatacaatccctgatctatatgttcaaaaaccctttttgttcgaaatcgagtccgggcttcgcagttgtcaaaatgaataccatattcgtgattagcgacccagaaaaccaaagaatatatattttgggacggggtcgttttggcgccgacgttttggcgccagcctcagtctttttttcttgttgaccaaatctaacaatcttggtatcattcgaaagcccttcacaagctctattagccttacaaaaaacaaaccaaaattttagcttctaaaaaagttattaagaaaaaactcaaaaatttcgacttttttggaatttcatgttataacttttttggtaattgtctaatcgcgaagcaatagcttagaaatatcttctaaacatgttaagctttcgattgataccaagattgctggatttggttaacaacaaaaaaagttataacccaaaaacttgggctggcgccaaaacgtcggcgccaaaacgatacggaccctaatttgacgccctagtgataagtactcacattttttcaaaaaaaacaaactacaacagcaaaacggaggagagtcgaacaaacaaacaaaacaaaacacaacacatgatggtattcataaataggttgtacgtaatgggagtgcgcgaagcaaatgttttagattttatttccgccgggagggccaaaaatatgcgccaaatgggcgtggaactacaaagtacaaagaacaaaagacggagacggaatggactgaaatacatagaaaggaatggtaatgggaacatttgtgattttattacgtaattaataggggttgaattaatggatataaaatcgtaaaatatggccataaaatatggacaacaaatcgcgaaatatggacataaaattgtgaaaatctcaaatatggacataaaatggaaaaaatatggacatcaatttttctaatttgtgggtataatttctccaaacttcttcaaactggctaaattcaaaataaaaaactttcaaaaatgcctaaatatttatttatttatttattcaagtaataaaagtccaaaagaagggacaaaggccgcttatactttcggaagagaatgatagtccgggaaacatgatggtgtcagatctccaacttgaaattaatcttgtaaaatactttttacttttttcttgaaggtgggcaatgatttgatattgaaatatctgaatttttgcagatttcttgtagatgttttgtggttctgttagtaaaggagtgttctgttttggtaatttttcgtttggttaccaaaataggaaaaggtgatcttttcctatttgaaaaattataaggtcttttgggttgaggtgagtagtatttttgataattttaaaggctgttatgatatcaagatattttctcctggtttcaagcttggaaagttttagaaattttagcctttcgctgtatgagatgtaggggagacagcattttctgaaaacattttttgtaaagtttttctgaaatttttccaggcggtttatttcttttttggtttgaggattccaaatttcggttgcgtattctaaaaggggtcgaatataacttttataaactgtaatccaagtcttggttgacttggttttaattttttttaaagaattctgcttttgagataagctttttggagaattattgaaacatgttcgttgaatttgagtttgttgtcgattaaaatacctagatcacgaataatttttgattcaggaaaagttgaatttttaattgtgtacggtatttttttgttatttttacctagatatgagacggaagatttttttactgaaaaatttaagccacatgtttcaattaaagactgaaattagagctgtttctaaaactttacgttgggattcatttgaatagcaatgataaatttttgtatcatctgcaaaaagtttaattgagatttcttttggaatttcttcaggcaaaagctaaagggattttaaaaatgcaaaaaaaaaagaatgaaatttgcccgggctagtctaaatgctaaaggggctgactgcaccgaaaattgacaaatttgacaatttgtaggagagagcgagagagagagaataagaaaagagagtgaaggaagccaaaaataaccaaaaaaagtcctggtagcaaacgaataaggtagactaatttataaaaatatttgaacgattgagaagcaaaaaaaagagagagagaaaaaagaagtgagacagaaaaaaatagaacaattttttttttgaggagagcaaaaaggcctgggctgataaccaatcaaaggggcactattttagctaattaaaaaaagagggaccaataaaaaatgaaaattaggccctatcattttgcttacagtatgagttacagtttttacaagttccaaagttcattttatctctttgttttctctcgtttttcacgccataagaatattcacgtaatcacgtgccgccgcattttttcattgggcaagatcattcactttacacatttttgcggcgcctgagaattgttaattgctcttgtcaggcggagtttaaatgaagatggagcagataagcccattcctggaaggcgttcgcatccattcgattacccgctgtcattcattaattttttttctctctcaatcaatgcataatgggattaccaaataatttttttttagcaaaataaaacaaaatcttattataactgaacgacttcgaatgtctacatcagggggctcgtcaaatgagttcccctttggtacatcccaagccttcgggcaggaaacaaagatgtttttgagtggaaaggaggatgagtcctcgatttcggctattgataggaaactttggcaaggaaagaccacgataaaaatctctgatttagaaaaagctcaaaatgatatggggaaattagaagatggagtgaacagagcttttcgctacatgaatcgttctttgaaccaaaaagtcaacaatgcctatacaactcaacaaattcaaacactatgtcggccgagaaatctcacaatggccttattcgaccgttttggcttacaattagcattagcctaataagagaaataaatttaaaaaaaaaacataaataaatttggataaaattttcaaagattaaagctaaacttaagtgaaattcatttaatagccaaacttattgaccctcttttcatttctctccaatcgttggatcttgcacccatttatgccaacattagccccttagtttaatgatgcattatgtacattgccccgccttcttctcaccaatcggtcaataaattctctccatagccactcattttcattttctgttttctttttcatcttgctcgtttatgaacatttttttttcactctttttagatctgagcaaaaattaatcccaataataatctgaaccccttcgcctgcgggcaagaaacagaaaatatggtcggaaatggaaatgaattagtggaaacagaggatgacgaaaattctgttaatttcatgaacttgtttgagaatttggaactgacggattctgaaaaattgcctagtctaatggaaattgagaaaatatttacggacaccacaccaacgccagctgatctgccaccaattgaaagctcagttatggggtttgtgttcatctcacaccccatactgtgggcactggtacaaccggacattttgggcgaacaaaatgagctattggaccggaaaaatttaagcttagaatcagatcaatttgtcttccaaagtacaccaagttatgtgacgacaattacattggaccctaacaataactggccacatttcacacaaatttcgttgaattggaacaaacaatctctattaggaactcggctcaaaacaattgatttgaagcaaatgacttatcctccaaaactgggaccatcagtgagtcaaattgtcccttcgagctgctgtggaataattagggaagtgatccaaaataaaatcacctcagaaattatggccattgatgtctttttgtatggggaagaaagtaatcagcgtttcttcccccaccaaatcgattcaagtgttaatttgatggaattagaaggcacccgggtccaaactacgggatttcgagccaagacttcagaaaatgaatggaccaacttcgggtgatggaattcgcgattggtgggctgagcagatctatgtcgggaccagggacgtatccaggatttgggcttggggggggggtaccgatccgaaaagtcaattcttaggggtgtatttttgaaaattcttcgcccgattcttaggggtgtatttttgaaaaactttcgtttttttttttgctcataccagcgacgctgggaaaataggcagacagtcagacagtgcattatttccttcttttcttccgcatagccacgagagaaaggaagaaatagtgcactgtctgactgtctgtctacgtggggctgcggcgggtggaagggtagacagtaaacagccgtgtgctcgctgtgcagcagcattgtgtgtgggaaaagggaagaagtgagaaaaataaagaaggaaatagtgcactgtctgactgtctggttacgcttttgaaaaatttgacccaaaagggggatacaaaccgaatgaggggggggggggggtatctgttgaccataacaaaaacgtattatatagaaaggaaaattattcaatattaaaaaacatttcaatttctttctgtcatataaaaaaaatattttttacgatcaatgtacatgcacttttccatgcttaaggattccatggagataatttttaaatcattaatactcttttcttggcagaaatggcatgacatgagtatgggcttgccaatctgacaatggaagagtacgtcgtggtaatgggacttttccagcaatagttattgagattgagtgaaatgcgttcacttttatacaaaatttttcgctttttctcgtgcgaaaacatttattatgttggctagcgatttctcctttttcttgaggcaccttttattttttagctcttatttccgttaaaaatattatgtgttttaacattgagacaccagtaacattataataataataataattattattattattattgttcttactttg

SEQ ID NO: 2240 - DNA, 2019 bp, Heterodera glycines
tatttggcgctgatgaactcgaagacaatcagcaatggctccataatgagcaatttcgattgtcataccgctacctatgtgccgccatggactctctacaatcaccaaaacgcagataagttagttaatttttctttcctttgtttctctcctttatccttttcggttctcattggcattctttggtccctttttgtctcctttttttctcccggttttaaggcaattctctttttgttgccattcatttcccatgggactttcgtggaaggcgccgttctttttgcacaaccaattccatttttttttctcttcaaggccaaagaattccttttttttttccttgcatcattttccctgactttttgtcccttttcgcaaatatccttgtgccggcatgtttgcggatgttccattccacaccgccccttattcttggcaatcatagtctccagagaccaaaattcattccgaataattcctaaaacattattgcctttttttaacccaacggaaaatttagatttaaatgccaaaacccaaaaatcttcatttattcatttttttccatgcctgcgggccggacaaaagaattgcttgcaaaaaattgctaatgattttattgctattcagttcgaacgttcaaattgtagagtctcctcaagaaaaggaaattaaaggaatttcagtggacaaagaaatttgtgatcatttttgtgcccatccatgccagccgactaatttaatttttccaaccgaagagagaaatgcaactttgggttggacttgtgtacacctaaagccaaaaattgtccctcaaagttggtcctcatttttctcgaaaaatgcttggacaattggcggcataatttttactcttgccggcatttccttttgtgtaattcgagcatatttgtggtcaattgacccgattcaattgaaattaatgtttgaaatttcttttcaaaatttgcaatttccccgcttttgactgcgtttttaattaattccatatgaccaaagttttgcagtgcccccccatttttttctctccgtgccaaatatggcagccgacggaaagcaattcatctcccgtcccctctcccgttttttgctcttccccgtcgcaacattagctttttgcggcgatgaatctcccctgccgctcgggagaaaaaggttttttgcctttttttcccattagctcgccgctgttgtaacatttgaaaaaataaattgcatttttgctgtaacgcccatcgtccactcggacccgtcgttatttaaggccggctcatccttcagaaaagccatttcttgctttcattctcatttttcctccgctccttcatttttttttcatttttccatttcctttttcaattttcaatttttttttttttttagatgcaaaaacctactccttctaaccgccccaattcctctgtctccaaaacccttgcctgcgggcttgaaaaaattgtgaatttgagtggaaatgagccactctcggtgccggtgctggcggatcggagtgatccgctgggactcaagtcggtccaacccgacacggtgccaatggaaagtgccgagggcaccaaggaagtggaaataatggaagtggatgaaatgagtggagaaaaagggaaaaagggtgaaatgggtaaagaaaaggtgaaaagtggtggaatggaagaggaagaagaaagtgagggcagtgaaagtgaactgctaggagaaggtggatttgacaatttgcaattgaaccccagcctgagggcgggaaataaagcagttgaaaaggaagataaggggaaaccctatctggtcgcccaagtgagaagcgacggtgtgatcgcggcacggatgaaacttttctgggatttcccggaattggtctttgtcccttttagcctcttcgacaacgcccagccgataaaaatcggcgatttgttccgcttacataagtgtgagtggacaaagagcgaaacaggatgggaagagcgcggagattggctg

SEQ ID NO: 2241 - DNA, 2407 bp, Heterodera glycines
tgactaagtttacgtgggggatggggaatggaatgttccgtttttaaattcgtacggtctttggcaaaataccgtaatgcttttttggatgttgcgtattacagtgtcccgctgtcccaatttttgttgaaatccctaaactttcagctcctccaccgcatcacctcccaatgagtaccgcttctccgtccccggcttcttcagcttctgcttcgtcttcccaccaaaaccgtcgtcctttttccatcagttcactccttaacccctcacaaaatgccacgcaaaaatgtcctccacttggctctgtcgccgcattttccgatgccctccagcaatgtctgccgatgcttttcgctgtgcggggaatgatcggcgaaggcgcaacgaacgcaatgccaaaagaggaagcttcagcggcaccgttcagaaatgctttccaaccgttgctgatgggaaaagttcggatgtgccaagaaggggccaaagaagaagaggaggaagaagaggagaatgggcacgaagtgccaacatcggaaggtaaatttgaaattgtacaggaaaggaagagggcgaaaaggtggatttgattacatataaggggaagggagggggataacgggggaggggggacgaaagaggaaaaggaagtaggaagtctttgaaaagggaaatggctaatgaaaattcaaaaatcaatttcagaatcctctcaatcggaggacgatgggattttggccaaagatggggaacagaaagtggagatgaaagaagaggaagaggagcaagattttggagagagtgagctgaagatggagcaggaacataagcagacgaaggcggagggaaagagagagggcgacgagagagacaaagggaacacaacgccaagagagggtgcgtttgaacaaccataccagtggaagctcgtaattaaaacgaaagtccccccagggcatactgtactatcaaaaagggaaggaaacggcgatgggggcatcagaaaagcaaaggaatgagcgaccacaagggcatgtgccggtccttttcccgttctccccgtgtcatgccaacttcgaaattgccttcccccaatgtccatcccaggctgttttgtgccatggttgctccctgtcctgcccccctcggcccaccaccattccccgtctttgctccctccgcccagcgccgtccgcggtccggcaccggcgcttttcccggcaccgtttgtccccgcctttctcaagtcgccgtttggccttccggcacaattttttctgtccgccggcacttttcccgccacttgtggcccatgcgcaccgcaaacagcacaaatgcaacaaccgcagcagcaacacaacccaaacaaccagcagaaccatcagcacagccaccaccatcaccacaaccaacacaaacggaaaggggggcaaatccgattcagcaacgaacagtaagagagagagagggggaaaggggagggaaagagggtaattagtggcaaaagcattgattgcattaaggacggacattctggagagcacattcgaagtgcgaaagtatttgaacaacacggaacggaaacgattggcaaaagcattggaattgaatgaaagacaggtggccaaaaggggggggggaccgaagctaatcggagcaaagctgttcaggtgaagacgtggtttcagaacagaagggcgaagtggtgagtaaagcgaaacattttatttttaaagcatttgaatttgtgatcccgtgccatttccgttgaaaattgaagaaattaattaggcgacgccaaatgccctcgtcaacggagtgccgagagggtgaggaaagcattagcgaaacgatgggagggacggcagcgacagaacagcaccgacaccacccgtacgagctgtacatgcagcgacagtaacagcagcaaattttgtggataaatcaagagaacatcggcatgataaaaagaaaagaagtccaacaaatcaatcaatgttattcataaaaaggcataaagcaattaattatttaactagttaataatcaattagtgaggtccattttgggtgcgaaattatggtacagttatccactgatgagtcagtcatgccaacattcatttgccattccgttagcctattacacactcaccccgcccacccactcaaagcatttaattttaaaaactgggaataaaaattggcgcgggagggcgggggggggcgtgcgcggcaaatcaaagcggactttggcgggcgatgctgagcaatggtaatggatatatgtgcttttacttatcccctgccgttttattacaaataatccgaccaccgtcgcctgttgaccccaccaacgaatctttgttttgggccctccgaaagacgaagggacggaacggaggagggat

SEQ ID NO: 2242 - DNA, 6680 bp, Heterodera glycines
  unsure (1)..(6680): unsure at all n locations
taatatattagtatattggtttggttttcgctttatcttttattgttttttatgttattggttcggttgggcctctaaattaattaggaaatttcgttttattttcatttgatttcaatttcaatttattaatttaattattctttcctattttttattcccttcccataaccaccataaagtttatttgtttttaggtatttcatttgtcttccaacaataaatattatttttctgttgttcctttgcggacacaacattttattaaattaaattatttttattttagaatatatttcttttattttcgattttctttgctttttggttattattttgttatattatattgtcctttttatctcttatgcaatgtaatgaagagataaatattatttgactaaagttactaatatttgggcaaatattttaaggctacgaattgccaatatattttcatttttatcagattgttttgcggtatatttcaaatattttaataatttattccataattttcttatttatcatgttaaattactttacttggtaaaacaaattatttttgtttataatttatggttacattttaattactaataaaaattttaaatttttttattatttatattttactaatttactattttaaaaaataataataagtttaattttatggtggttttttattttatttgcttttttctttttgttgcgtgtttcaaatttaagaaccttggaacagaatttatggatttttgtgaatttaataaaaaaaattgtaataaataatttaaaaaatttcttctttttttggtatattctaaacatgaatttcctgactattttaacaaattgaatcaccatattcacaattataaaaatatttttatctaatctataataattaatataattataaaatttataaaatattaatacactttcttcgaaatagaaggatattaatgttaatttatcaaatgcctgatatgaaacttccttttacaagtaatattgttttaagtatttgaatttaactaataattatcagtagtaacacacccgggacctctgtggattgacactaattagaagtgacaggtggcggggggaggggtgtcaattagtcactaattgggggggggggggtactaattggtcagcagtcaagagggcactaattggtcagccgtagggtgtggggtggggtgtcaattaattaattaattggggggacccaaacctattgaacggtttcaaattgtcttgtactttttttgacataaaatttgattgatttaaaaagtgacagccgagggggagggggaatttgattggtcagcgaagtgacagatgagggatgaaattcaaatttctgatggggagggggatcggaaaattatgattgatcaacaatgtgacatttgcgggggcattcaaatttgcggggagcggggtgggatggtagagagggatatttctcatcttttctctgtccacccctgtccaaacagagcaatgcatatcgatttgacgggggaacgccgtcactttctcaccgctttactcattgccattaaatgaccaaacgaccttttccataattctcccctatttttaggtgtgttatttttccatatttttctcaacatttgttcaacaccaatggcgcccgggggcaaaacgtatgctcgacttaaaaatgtgagtaaatgaataaatttttgatttgtatttttcgtaagtaaatgactaaattttgttatgtcgttaacatgtttaggcatcaaagcccatcggctcgtcaagttcatcgtcagaggatgaacttcccagcaggaaaaaaaggccactaccaaccatgaaagcaccaatggtcagtttaagtgtttaaaatttttgaaattttttcaagtccttttccgccagtgaaaaggatggattttaatgagaaaaatttgtaccaaatgaaaaaaattttttttcttaatactttagaacgttgcgaatcgaaccggcctgggcaccgacactgcactggtccaacagccagcaccaaaaaaattgcccattacacgcaaaagcgtgggtttaaaaaattaattaattttatcaaaataataaatatccgtttttttttttaaaataatttcccgttaattttgtaggccaagggaaataccgccgcaccatcctcctcctccgtttccgtccgcaatccaacgcgccgcgctccttcaacccgtaaagctgttgcacaacaaccgcaacatcacaaattggaaaagcgaaaagcggtaaatttgcgctgaaattttttatgtgatttttcattaaaataaaaatgacaataattgtattaattttggattttttttttttgaatcaggcaacaccgcaactggacgacaattgcccgggggaccaccggcacccatcacagaccctgttggagcagcagaacaatgcgttgtaccggctcctcttcgatggcagcaacgagaactacttcacccatttggagcgagcccgtcacctcgtccacacatgcgccgtgtgtgagaagaagtacgagttcgtgttggtgcggttcccggacacaggagtcgagactccatggcatcctgtgttaccaacgcatcgcaacattcgtgatggttggacgttgctagacctagcaatgttggtaagcgaaatttgtttcaatttttgaaattggtcatcggaaaaaaaaaaatatttgaggagcccgacacaatttacgcttttgacgcagcatggcaacaatgtgttgcacctgatgatgcgattggagggaatgaaaatgatgatggtggcgatgatgagaacggcagaggaaacaacagcggaggaagaaacaagaagaagggcggaggaggtggacagaaagacggaggagggagcaaagacggagcaaatggaggaggaagagaagaggaggagcaaaacgacaacaatggaaagaggggagaaagagagagagaagaggaaagaagagaagaggaggaggaggaggagcaaaacggaaacaatgaagagaggggagaaaaaaagagaagggaagaagggagaggaaaagaaggaggagaacaagacagaagagaagatgaggaggacgaaggaagaggcgaagaagaaacaagagagagaggagacgaagaggaaacggaagaagcaagagaaaaattgaagagaggtgaagaaaaaggaggaggagagaaaggaggaggaaaagccaaagaaggacgaagcgaaggaggaggaaaagccaaagaaggacgaggaggaggagtaggcgagaagaaacagccgccgcccgggtcaaaaatggtgggacatttgttattttgtgaaatacgaaaacgcaaatgtgtattggccatcggaggtcaatcctttatgagtattggctaccgaagggccgggtccgtgggagtgttggtcgccggagggccgagtccttgggagtattggctactggagggccgagctcttcggagtattggctgccagtgggccgagctcttgggggttttggctaccggaggaccgaactcttagggatgctggctgttggtgggccgagctcatagaggctttgactgtcgaagggccgaactcttggggattttcacagattctaaggcgtaattttatctggccaatcaaaaatttcaatgttaaaatttagacccactcacagtggcgcagagtgatgcgcattaacaaaaagaaaggagtgaaggatggacgagccaacgcacatccgacaacaattttcaatgttttataattttttcgacaaattttcaatgttttatatattttttttttgtttaccaacaataacaacatttcttatctcccattcaaatctttagggatagtggatcaaaataacaaaagaaaagaaggaaagggggtttgggaggggggtccaaaacagatccacgctcattcattcattattcacatttattaaaaaaatggaaccaacaaatacaacttggatcattgagcaaaattgttcttgcaacaatgatttgcttcagtgcgtccggcccctgtactacaaatcacccgtattgtgtgtgcccattgaatttggcaccaattttgtgcaccatttgacccaattttcaaaacccccgtccctcaatgtcccacttgttgttatgatcttactgattctgctccaggtataaaccccctacaaattatttatgtttgtatgtgcaattaatattttacagttgtgtcaaatcatcctcactttgttctatggttatcgccgtcgtcgccgtcgaccacgtgtccgttttcctaccaatgtaagacccttcacaaattttggcaaaaatttttttcaatttttaaaggacactccgctctcgccattgcgccgctttcctccaccaccgccgccctcaattgcaattcgggcaacaacacagaaagtgtgtttaattttgtttctgtttgaacaatttgtattagcatttaacattttcaacaggatcagcaccacacggatgagcgcaaaaatgaacagttcaaaaagagggaggaaccgaagggggcggaggacggacggcgcaatttgcacaactcatcggtggttaaaaataaaaccattgttatatttctaataaaattaaagaagcccaggacgtttccgttcaacaacaaagcagtgatggatgggttgccaaacaacaagcgcaacaaggacaagccgttatacggtatttgtttttgttgaaaattaaaaaatatcacaatattattattattattcagctttggcaagcatcccggaggaggaggagacaaaaaagaatggacgtgaaaagacggcgctcgtgaaggatgacaaatatggggacaattattttgaggattgctattaccagtccacttgggtctaggcaataatttttcatatgcatttttttttttttgctaaattcaataaacatattgtttaattgtgccttcccagatttatttaaaaaataatcccatcaccaccaaaataattcccatcatcaataccgattcacaagcagtccttctcaatttgacgaacagttctttcgagctgctccttgactattccataaaggtgcgccgcttgcgggtcgggtagtccgtttgagcgctcttcgatttttgtgattgtgaaaatcagattcgtcatctgtttgtcgatttcttctttcagaaatgcacatcctaaaattattaaaaattacagtaagaactgaaaatgcatatcaaaaattgttctaccgaaggactttggtccatttattggtccaccaggcaggggtcttgccgattccgacatttccatactctgaaatgccacgcacatttcattgaaatggttttgttggtgccgctgctggcgatgtttttgacgcttcacaatatgaagccatttatattcggaattttttttctgggggcgagatttaaaacgacggcatggggacatttttgtggatttgggaatataattgaaatgagcagtttatgcggaatggcgtgaccaatggaagaggaggcgcgcgatcatgaaccctcccactccccacatctgcttctgcacttcaaatttaaaaatgtttattggtagtcaaaattatccaaataatgcgaaaaatttgatgaattatttggtggtttttggctttttcttttgatcagcaatcatgtcactgacacagcaattgattctggcacattcttcacacatctcgagtccaatcgccactcgcccgtcttccagccggcgtgccttgtctttgttgtgaaataaattgttccagtcctctgaaagctgtcaattaatttggtcgtcaaaaatttgattaacctgagcacagccgaatcgcaagcacaaattggccccgcgtgattttccaaagaaatcgctcatcaacgtgtggcttcttagctttcacttgttgctcctccgcagtttcgggttgtacaaattgttctgccatttgatgatgattttgcaagaatgatttgattgtgtgagaaaatctcggcttaaatagctttcaaaagtgggcgtggcctaattttctgggagtataaaagccccggcaatttgtcagctatgtctcatttgttctgctacaatggtccttgtcatcgaattttgtgcccaaattctcggctgttccccgaaatcactccgcgacaagctcaatcatcctgaggaccgagtgaaggcactgaaggagctggtcggaaaaaaggttcggacgacataccaggaccggaatggaatgcagaaaacattttttgtcgacggaatatcggaccatggagcggctttgaccccagcatacggcagacttcgacaaccatacaacattaacattgctgcccatttctacgctcggcaccgtatcaagctgcatctcccatacgtgccatgtgttgtggagaaatattctggatgtggcgaagacagatactacccaatggagctactcgaaattgtggacgaggactacaccatcaaagagcgatggcttggcaactgtttaccgaaatcgaggacgacttcattcctctcaancgctgtggtcgagttgacgaagacgaagaaattgacgctggtcgtttgaatgcag

SEQ ID NO: 2243 - DNA, 1431 bp, Heterodera glycines
  unsure (1)..(1431): unsure at all n locations
tttttgtaaaatttttggagtaattcaaatcaaacccccgccccccgtcccgcgggggcgaattttcgtgcccccgtcnccgcccccgcgactctgaccaccgccatcccccgcccccgtgaaaagccaccnccgcccacggggtccgaaccctaataaaaattaaagagaaactaatatttataagaaatttattagcatacttaaatggaagctttttcaattcataaagaatagaattattcaattgaaattaaattaactaaaaatgaaaaaaatttttcttcaactcaatttacaattatttatgggaataaattaatagtgaaaacaaaaacaagcaataaaaatattataatatgaatataaataattcatttataaatatataataaagcaaaaatatttaattttgcgaggaatcaacatcatccgctatatcttggacccaacaagattgaaaatattaaggaaaaatttatttacgactcttaaaatataaaaataatcaaattaaaaataataaaataatttatcaagcatcaatttaattacaagaccgaaatcatgaatatattaaatataattattttaaaactgagtttaataaattaattataaacagttagttgaaaataaaaataaaaacgatatcttttttagaacatgccgccaaaaaaatgtcattgcgtcaaaaatgatcattttttattgcatttttgttaatgaatttctgaatttcataaaaaatttgcaaaatgccaatacatttataaaagattgacaaaatccccaaaatattcaaatacgaatattaactttattttaggtttcaaaaaacttcgaataaaaatttttatttgttgagcacgggaaatttaggctaattttggaaattcacaactcacttagggttgaataatgttagtgaaatgaagcttaaaaaacataaaaaactggaaggatgcgcaaaccgcgggccgatccgagtattttaaaaaaagttattcgtgatttgcgtcgaatctgctatttttctcttatagagtgaaccagggcccgaagggccctgctgaaagcgccggggccgctttcaacactgggcccagcaggggccattaggacgagaaaaagccaaaaaagcaaataaaaatgaattggcacagaaaattaaaatcataatatgaatatttaaaaaataaaaaataacataaaattatccataaaaataaattagtttcaaatttaattattaaaatcggcagatcaatttgacagaacaaaatatatatagcgttagcgtaatttaaatgaaaaccttaaaaaaattcaactgggtaaaatatttaactcaattgtttcttcaacaaaataaaaaatagatgagagggggagtaaaaaattggttttttcgttgcaaccctaattgat

SEQ ID NO: 2244 - DNA, 2093 bp, Heterodera glycines
  unsure (1)..(2093): unsure at all n locations
aataatttacaaatgntgtcttccatgcnttaattatgcatgtattntataaaaacgcnaaataaaatgacaaaattacacaatttntggtataaaacatgaaaaacaaaggtggtacatgcgtgtgtatgggtatgtgtgtgtgtgtgtgtgaaagatacaatgaatggtgaacaaacaattacaaagtgtgtccaaaattaagcacattataattagagcccactatccctttgcctacatatgggcgataacatttttggagggggcctgaagtgacgtgtccgccacccctaatgtcgggtctcaaaaagttggggtacatcacatttattggctcatactctccggtttgggcatatcgcaacacttcttctttgaatgtgtcgtagcatagggattggttctgcatcacgtcgtagttcagtgtgatgcccctcagcttcagcacaaattcgtcctgcccattacgccggagtttgagtccatactgaaatgataaagtaaattattatgcactaaataaacggtaaattaacctgcttcgctccgccactacaatactccacaatttcatgcttggggtattcatcggtgaattgtcccaagtgtggtcctgtctccaacgggttcatgccgatcgggtggacgaaaatcagcgagtcggtgtccgtgtagaggaggcggcatccaggcgttctcatcaccttctgcatcgctttcaacagcagaaggcgggcctttgatgttgtccagagtgagatgactgaaaaatcccaaaaattaaacaaaatttctttaaaatctcaccaatgttggagcactcgtgctcctccacccactcctttttctggacgtagctgatcaattgatgtttttcgtccagctcatcaatggaaatgatgtcgattgagctgttttccacgtattcagtcaacactgaagggtcgtcggtgatcaacgtctgggcgagaccgaagttgcgcagagagaagcgcccccacaggttgttgagacacagctttgccaacgaccgcttgcccttgttgactttcatgttgtccttgtcgattgaaattccgaatttctccgcacattctgtgatgaactgctgctccaactccgtatttcccttgatgctggcgtcaaatccggaggcttcaattttctgcgacatgaactcggcgatgtatgggcggaaaagtttgtcgtcgccatgcctgtacttcagcacccggaacactttggtcacgcggtagccctcttctagtgctgcgtccaattcaattgatgtgcatgttgtcacccatccgcgttgttggtcgtcgtgttcacaatggtagtcaaaatcaacgcctcccttcgggtagtctagacaacactgcatgcacaacggaaaacagagccgtttgttgactttgacgggcagcactggcacatcacactttcgtggcggaatcacccacaccttgagcagagacaatttgtatgggttgtcccgtgcagttgtccattccacatcctcattcaagatgagcacttttgggtgttcaattgggtaagtggtggagaaactgaaaattaaaataattatgaattgtaaataatgatcgaaacaaaactcacattacgtacgggtagagggacgtgaagtcatagtatgagattttctcgccctctcccgccttgtggtacagcttcagtggtcctgttcttccacccatgaacgcctcgcgaatgttcagtggcccgtcatccacataatcaccaaaactttcgcgcatatacgggtcacggtgcagcattctttcaatttggcactcccagtacacgtccacacgagaaacttggctttcgatgaattccagccgcttctcatcccgctctcgcacctccccagcagtctttccgttcggcatcagcatgttgtcgttggggaagcagtccttgcagccgtgccatacacatccattgacttcgattgctcttctttcttcctccacccagccatccacggaatactgcccaattttcttctctccgcctgccgaatgcaccgtctgcaccacaacgccattctcctccgcgtacca

SEQ ID NO: 2245 - DNA, 2704 bp, Heterodera glycines
  unsure (1)..(2704): unsure at all n locations
gtgaggtctagaatgagattatgagtgacaaaaaatatcagattctatatagagttttttgtttgtgtgagtgatagggagagttctttatagggagagggagtgagagagagagagcgagtgatgtgagtgatagtgagagtgagtgagagtgtgtgtgatagtgagagtgagagtgtgtgagtgagtgtgagtgatagtgagagtgagtgactgagagagtgagagtgagtgatagtgagagtgagtgagcgagtgagtgagagctagagctagagtgagagtgagtgagagtgtgagtgagagtgtgagtgagtgatagtgtgaatgaatgtgagagtgagagtgagtgagcgtgaatgagagtgagagtgagtgagagctagagctagagtgagagtgagtgagagtgtgagtgagagtgagtgagagtgtgagggagagtgagagtgagtgatagtgtgaatgaatgtgagagtgagagtgagtgagcgtgaatgagagtgagagtgagtgagagtgtgagtgagagtgagagtgagtgagtgagagcgagagtgagtgagtgtgaatgagagtgagagtgtgagcgagagtgagagtgagtgtgtgaacgagcgtttgatcgagcgtgcgttaagcgtatgagtgtgcgcgttatacatgtgcgcgtgtgcattaagcgcatgcgcctgtatggccgtgtatccgcgtttgaacttgtatgtgtgaaaatgagctgtccaaataaatcccccgcagcaagaaaataattttttataatttttctgccaatcaatattcttcgtgacagccgaaaaaatcggtgccacccaaaaaaatcaacgccagcagttaagaaaattaagagactcccatctctctaaattccatcacctaataccctcaaaaactgttgtaaacagcgaaccatttttattttatcgatcaatatgaaaatagtaatagaaaatgagacacatttgttttttaatattgtgatttgtgatcattatattatagatatgcacttagacatctcttctgtttaatgtccctattcttccctagaaatcccctttttttgttttcaacacatttttacacatattttcatattaaacggtaataccaacaaattaaatagtcgaaatgtcaacattaaatccgcgtccaaaattaccaatttttaaattttcttatcctcctggcattcttttacccgctgtcaccccttcccctgcttcccttagtacatcaataaaaattgtcgttcgcccagcggaaaatataggttggcgtcagccgttcatttaggatattgattatatcaacacaacgagaaattaactttttttcaccaaagatattttattatttaatagaaaagaataaacagaacatcggcaactaaattgcaagaaaaatcaaacaaaaaatttaaaatagtacataatatggtaaattaatcaaggatcgattaggttcaaaattatgctcaaccggctgatgggtgggattagtatttgtaaacaataaagtggaaagatcataagttgaagaggccctacaattataattaatacatcgatatctaatgccacgcctaattcccgtttctttctcgattaatccttcacttctaaaccaaatcccggacagtagtacatactttctcggtatgatgtcatcagattcggtgatagtcgggcgacagtttgggtagataggatcgaacccatgcccatagttcaatatgtttttatacttggtgttccataattctgctgctcgagcggtgtcaccatcttcacatttaagcacataaagttttgctagctcaaatgcctctataaatgcatatgtatagacgccagagcatggtttagaatcaattctatatggaatccagacggtggaccaacattgtacgcaacagcacaatttaatccctaatatatatcaaaaaattttggctcaaagtttttttttctcaccgttgaaaacccaaaatgcacagaacccgggagagttattataccctcaccagcacgctgaacctaataaaatataaacgttttttattataataaaattagggataatattttatatattaaactgatatggttataaaatttctttaaaaaaaataatttccaatcactatgataatgtttttttgctagtcacaagcttcgaaaaaatatacaaaaaaatgttttagataccaaaaattactaaacactatgtgaaaatatatttttcttaaaatcttatctttattgataactcacagttcggatacatcggatcccatttcacggatgatattagggttcaccaaaattgacttattccgcaaatattccggataatttgtgaattctttaacaaaaaaggttgagagcagatttttaaatttcaaaaaatctgccgccggaatcgaatacctgaaaatacattgtcataaaaagacccccccccccccactaaaagtaccatatagttatgccaacattgttagttccgcttgaagggcacaataaattcacactataaaggtcagaattctcagtgtgngcggtaaatatgagccggcttttcgtaaatanaatagggcgacgtaattccctncattgnaaacaccagaccacccattattgtcgataaaactgtagttctaagatggagccaaagatgg

SEQ ID NO: 2246 - DNA, 5094 bp, Heterodera glycines
gtttaaatgctaacctatatagctggggttgtcagttaaccaaacaaaaaaaggaattttaaaaaacttttttttttcaaactccacaaaaaagtgtccattgataattccctgcttaaaattataagttaacaaatagaccacacctttcatattgatcgatttccagacatggccactgtgcattttgcttgtaatcaacaatcgttttgtactcctctgataaaacgttttgatgataaaatccagaagcgcgcttttttaattggcattgacttaaaaaatataagaaattatttgatattaaaacaaatataagaaattatttggtaataaacaaacataaaaaaaatatttgatatttttaagacaaaccgaacaagaacacggtttcggttagtaattctgcatataggaagttgaaatgattccggtatgcgaaaacgaataacaccgataagtcgcgaccagacatttagcgatatgatgttatcaaaaaaataatcaatatttgagcccaaatcatcagagcttggggtgatcgtcttggcgccgacaatagagtcgtaatcacacatttcgagattctaggcgaaaaaaatacaaaaaaaagcaaacaataaattttaccagacaaaaaggaatataaatgaacacacagacccctgcccccaccagcccccagccccacgggcacctgcccgccagcagacccttaaccccatcagcccctagcccccacgggcacctgcccgccagcaaacccctaaccccaacagcccccagccccacgggcacctgcccgccagcagacccctgaccccaccagcccccagccccacgggcatctgcccgccagcagacccctgaccccaccagccctcaccgggttggaagacgccgaaaaatagcaaaatatgggtgttaaactaaaaaccccctaaatatatttatacgggcttaaaagttaatccaaatcaaaaaaaatttttgacgcaaaaagaatttttgggctcctttctcaatagtgtatgagcaaagaaaatatgtaaatccatgcaacgcacaactctcgcgattgttaatccatcaaaaagcgtatgagcaaagaaaatatgtaaatccatacaacgcacaactctcgcgattgttaatccatcaaaaagaagaacgaatttaatccaaatatctatcaattttaaatggtgcagaactaaaaataatcaagaagatattcaaatatttcaagaacaatacaattttagtatatttgaaaataacttaaatttcgagttagaaataattccccagggtttgatcggatctgaaaaacctaaaagtggtttataaagtttttgaagctctatcgactcaataataaaaatttcgaaaatttttaaaaattttcgagttttccttaaaacccctctaggattttcggaggcccctttggtcgaaaaaaccaggctaaaaaatgtttttcgggggtaatttaggtacctgattatgtttctgacctttatttttcatttgggaagctttgaaactgtttttcaaaaaattcgaaaaatctcaattttcggtccctgaaaatttgggcaaatgtttaaaaaaccgtaacttaggtttgacaaggtcatttcttgcatttaaatattcaaaaaaaatgtagaaaaatacagagatttttatgcacattatttgatgtttttatcttaaacaagaaaacaaatattcaaaactttctgaaaatttttcgatttttcagaaaaaaatcagaaatcctttcagaatagaaatactggattttttaaagattcaaaaaatccataatttttttctcttcaaaaaagtcatttacactttatagctgccatttctttaaaaaaatatataaaataaatagcgaatttgaatttccaaacaaaagggggacccttttggttttcaagtggaaaaaaaatttttttcaaaatagtagctaatcacattttaggggttaattgggtcgctgagtacgaatatcaacttaattttgggtttaaaagattccttctatcgaaaaagagagtttgaatacaccaagatttttgacctggtcagggtttgaatcctgttagcagcgaatgattttcaactcatttgttcgaggcggcaaagcggccgaggagatcgtgagagtagccggaggccgctccgagacccagagcggccgagggcgtatgggggaaggagccgaaaacccttcgggaacctatcggtttcggattcctttaacaacaaataatttttaaacacatattttacatattttttaattataacaacatccaagcagtttccaaggcccacggaaatctaggtagcgaagctctcgaagcgcgaagcgctttaaatcactaaagcacgcgcaagcacgcacccgctagttatacgtatttaatttaatttcttagttgtacatttacgtaattttataattttacataaattttatattttttttagatttaatcaagaatgtgtcttatatttagagccttaaatttgctatgatattctaagaaaaattgtgcaatttaatgagagagcgtcagcgctctctgcaattccgctgagagcgtcagcgctctcagtggagaatagcctattttttaatacaaaaatttttaattaaaatctgtaaaagccaaattatctttttataccatatatcgaataattcacgtacatattttagtttattacttaagccattttttacatactcctttcatatctctttaaataaaaaagatattttttttatttttgtaagcaacaataatctttaaacttttttttttagaatttatttgtatgaaataactttatgaccaaagattttcaattataaatactatccttcatggaatatcgaaacatttattgaattaaaaaatgtagcaacaccggatacatttaacaaaaaaattcatatgatgaaattaatcagctcccagccccatgggtacatatccatcaccagacccctagcccccagccccatgtgcacttgcccatcaccagacccatagcctcatcagcccccagccccatgggcacttacccgtcaccagacccctagccccatcagctcccagccccatgggcacatgcccatcaccagacccctagcccccagccccatgtgcacatgcccatcaccagacccctagccccatcagcccccagccccatgtgcacatgtccatcaccagaaccctagccccatcagcccccagccccatgggcacttacccatcaccagacccctagccccatcagcccccagccccattggcacttacccatcaccagacccctagccacatcagcccccagccctatgtgcacatgcccatcaccagacccctagccccatcggctcccaacctcatgggtatttttaataaatgttcggtggaaggttttattctgttttaaagtctgacatcataaggcaaattaataatacgatttgggttcaaaattatgtttggttaaaggactttttttcatttgttatgtgcattaagcaatattttcattttttcccgttacattttttatttttctattcattttttcttggaaatgaataagtactaaaattatagtaattaatccaatatcgtcaagtattattccatcaccaggaagcattataaatacattaaaaagagtgttggctgtgattttgttgagcggacttaacgggatacttattggtccattgagacaattacaataaaagtcgacagaaattttttccattttccaccctcgttttggcttgctaattcgtgcatcatttaacattttatttaagataagctcaaaatttgcataattgtcctcatcttctacaactctaaaatgaaagcttgtcgcatgttcttttatcccaaatttttcgttttctcttacacagcttccaatcggatcataaaaactaccaaatagtgacattattttattgtaattatcgaaaaaatgtatttataagtttatttgcacataagatcacttgagaggatatgcaaaagtggtcacgatcacagaaattctttcgtccataaggtttacgtcgccaaatgattgctgacgatgcataaattcgtttagcacaacatccgaagttacttgttgtagtggtctcactggtatcataacaggatcagacaaagcagcacaatataaattcagcgaaattctttccgtcttccatccttgtgcaggttctttttcctttgcctcgtgtattagtttatcgataattattctaaaattattttccgcatcttcatttggtgggcatttgaaataaaaactagttacgtgctcccttataccaaacttggctcgctcgttgacatggctctcaatcttttcgagacactttcccttgtcaggggttgccttgaaaaagtggcgggtgtttctcgcacgccgaacttcttttggcgtattttggaacgacattcttaaagtatttttaattgataaattctgccataaatagatgatgattgatacaattcatgccttaaataaagaatgatttactttttacaaggcggaggaataaaagcaaaagtttattcaaaaatatccaaaaggcaacacattaaagttttcatcaacaatccctttcctctgcacgggcccatattctttctttacatccttggagagtatcctgctatcccttgtcggcccaattcttttccggataacgaaccggtctattcactcgtttctggtaatccaacaccatctccttgagttattcataccgcgtgtagttgtacttatgcatcgaagtgacttgaacgtggtttgatgaaatgtctgcgaatctttgccccctgacctccaatttgtgcacgacgatatagcaaaaaaaatcacaccgagaaagccctgcgaagatcacattttggtcctccgaacgtacacccaccaaaaagcaaagtttttactatttttaatctgtcgatggcccagtgaaatagaatcgccagcctcccggggtcatttagacagtaatac

SEQ ID NO: 2247 - DNA, 1594 bp, Heterodera glycines
gctgacacatattccaaaatctcgctatcggaatattctcgagtcatctcccttaaaaccaaatttaaagagtttcaaaaatttttattttaccccaaaaatttcccctccttcaatggacaccgacccttccgatgagcaaaggccagagaatctaaatataaaattttatggaaattttttataataaaacacctgtatcacaatacagtggtttacatccctcctccctgtagacctgctccatatactcgtacaactttatccttgcagcgctcgtagtccacaaagataaaactatattcgacaccttatgctcctttatgaactcctcctttttacgatatacaacacgctctactccttcacatatttgtattggcgtcgaaacatcaagcgtattgtcttgtgacaatgcgacccaccgttccatgctgttaaaaatctcattcgtagaaagcgtgttgcgcatcgaaaacttcccccacaagctattcaaccccttaattttaattgttattgttattaataaacatttcgcaccaatttcgctatcattcgaagaccaggattaaacacaatcttgtcatgatcaaggcagatgtcgtatttcgccttgtacatatcggtgaatgcacttttttcctcctcactcttcacttccccgggccaccctgacgcctccacctttattttcaagaacatccgcacatatcctttgaacaattgattgtcaaattgttcaaagtgatatgcccgatataagccaacgatcctatatcccaactccaatgccttccgcagttcaatcgaagtgaacgtccccaaaaatgccctctgctctggccgatggttacattttttcacatccttcgtcgtaacaaactcattcttggcctttctcgcacaaatgccacaattgggaaagaggagcatgttgtcgatgtgcacggggaggagggggtacagcagttccttcggggggacgaccttcacctttagcagtccatcataaggaatatcgtcgggcactgtccaattcacattaaaatccctgctcactacaatttttgggacaccaacgggatatggagtgtcttaagtgaagggcaacattaaaaaaagcaagcggttttttaccataattcacataggggtacaaactgattatatcgaacatcgaaatctcaactgcttccgtagcctttgcatacaagcaaaaaggcattggtcgtcctcctgcgtaagcatccctcggattgattggtcccttgtccggcacactttcaaagaagatcttcatcgctctgttccgctttcattccgctttcacctccacattcctaaaatttgttcaatcaataatcaataactgttggaaattggcaaaccccaaacttcctccccccgagaagtttttaaacatttctctcaatgcttccatccgattctctggccttttgtaattcctttccatggctaaaccatccggtccaacagcccaggggataaaacaatttttgcccccatggaatgccccccccttaaagaaatcacatttaagggaggatttttattttttgaaaacctgaaa

SEQ ID NO: 2248 - DNA, 5564 bp, Heterodera glycines
  unsure (1)..(5564): unsure at all n locations
cggtgttaagccccctttctgtcagcacacgaaggacgaaatgtgagtcgaaccgtccagcataatgagcaaaagcaaccgtttcaaattgtttgaagcccataatccaatcgataaatccgccaatagggtcctccacatctgctgccgaccaagtcagcatactcggttcctcacaaatctcacatttccttttctctccaacgcactcactgcatgtcaacgccgcgcaaacgagattcggtgcatggactccgttatacaatgtcgtctcaagatcatatgcaacaattctgtatttcctcgttgaacgaatttttaacttctggatgaaacagccccgcttcggatgatagattttacaaattcggcagaatttctccccacacgtgtgcttcgatcttgtttggtaagtctcatcacatttttcacattttttgtactccctacaagctgtcttcttatgcgattcaaaacagtcggtgttgtagaaatttcggttacatccctcacaatgaatctcctcacatacgtccgcacatggaaagccgaaccccatccgacagcacttcttacagcgctccttgcactccaatcgatgtctctccggcctttcgcaagtcacttcacagctgacacaataatttctaacacaaaagaactgcgtcactgatttgatcccatcccagtggtctccttcttttatcacgcatacttcgtttttacgaattccctctcccttgaaaattggtttgattcccgttctctggaaaataaaaattttttcaaagtatgtagtttttttaccatatcaaaggccacaatgcgaaacatgtcagggaattccttgtcccaaaagatttggatcatttcaagatgttggagaccaaaagttttttcctccgcatttatccccgccttttccatcagtttgaaagtcatttcactttgttttttctctgtttccataaaataacggaaagccttcctagagattccattatcgatcagttggtaattacgagataattcgagggcataaaaaaggcctaaaattcaagtaaaagatttgtaaatcttgtgctgaagttaaagggatctcaaactcacaaaattttcccttcataacggaaagacgtcccaattctttggtttcaacgagagggcaaaagcgagacatttttcgagaagaaagttgagcagaaaaaatgaaataaattcaataggagaaaaaaaagtcacgacgaaaaaggatagagataagaaaaattgaaaaaggaagaaattgaagtaataaaaaaggaataaattgaagtaataggagaaggtttgttgaaaagctgattattgagagaagagtgaatgaaaggacgccaattccggcaaaatgtgaaggggcggaacaattagcgaagcgtgatcgattttcagtgcggtatgtggcgaaagaagggagaagactagcgaaagaaccaatttgaatgacaacgagaagggaactggcacggagagaaccaaaatttgaattttggttggctacgaaatttgattgacaggtgggaaggggaatggcacgcagagaggggaagttttttggtgtatgatcagactagaagggaaaaggaagcctgtcccaaacgatggaaatttgattgacaggtgagagggaaaacggtatgctagagagtcaaatttaatttggtcggcgacgaatgcaaaaggaagccgtcacattatttaactgctgcgtactgcgtattttttttgctggcacgattttttttttggctggcacgggcgcaaaatgccgcttttgaaatgtgattgaaaaaactgacaaatcgcatcataacgcaacaataccagtcaccccatacctttacatcatgaaaattttacaccattttcatctgtttttcacattatttcgtttttttttggtctattttggcctttgaccttttttcaccttgttttcagctgttttacactggtatgcctgttcttcacctatttttttcacttgtttcacatttgttatgaattgtttcacctgttttatcaccattttcaccttttctgacttttttttcatctgtctgacctttttttttccacctgttatgacctattttttttcatctgatgcgactttgtttagatttcttatcccaattttttcacctgttctgagcttttttttcacctcctatgactattttttcacctgttctgccctttttcacctgctatgacaatatttttcacctgatcgggtattttttcacctcatatgactattttttcacctgttctgagcctttttttcacctgttatgagcgtttttttacacctcctatgtctatttttcacctgttctgttctttttccacctgctaggacaatatttttcaccttatgctttttttcttcacatatattttcacctgtttcacatatgttatgactattttcacctggtttatcacaattttttcgcctcccttgtgattttttttcacctgttatgccctattcttcatatgtttttatatttttaacattttaactttttcgcctggtaatcagtgcgcagttttaagagcaacatttctatttgattacattcaattttatccttaatcaatttgcgcaagcattgcgcataagcgcggcgaaagcgtggtgggggggggtggcggaagaccattggtgaatcgattaaatttagttgaacggaaatttcaggagggccaaggggggggggtcaaagagagaagccaatctacggtgagaggaggattatcattgatagattttgtttttataattaattaaattaatatgtaagttggcaaatgtagcaaaagaaaatacaaaaaaaatagaatctttagatggcatttaagttttagcatatttaatctttaaataagccttcgtaatttaatcattttgagcattcattccgctgaagcgcagaagggggattgaaaatttgcatcgattatgcgactcggggaacggaaagggaggggccaaagaatgcaacaaaagagcgtggagggagatattatcaacaaataaattgggttcaatatggataattttaagtgaaagagaatccctacaaaaagcaacaataaattcatttgaatgataaccgccaacaaaaataaattagcagtattttaatttacggtgtcaaaaataatactagagaaaaatttatcgaaaataaaaataaattcaattttaaaagtaaagggaaatttagggtttttgtcatcaaattaaaaggaaatatttgcaaaaaaaaaaaatgaaaattttgatggtaaaaatgaaaagcctttaaatggttacaaagaattcaattttgtttaaaaattagaaaaatttttggtagatattaattcgaaaaatactcattttcaatttatttttttcctaatcaatttgcgcaatcttttcatagaagtacagccagggcagcggcaggtgggggggggggggggaacattgacgaatccattaaaaggtgaacggaaatttagtcgggggtcaaatggtgaagcgaatgagtgggcaggggtcagcgaaagaaaaagcgggaaatggcggaggggggagggggttagcattgaaaatttggggccagatttgtggacttatactactaccgtatcggatttttggccataatcggaatcggcgatttaatcggaatcggattttgtctggctcggcacatccctgctgtgtatgtgtaaataaaaagttattgttgttgttttttacgtcaaccaattctttcacgcattccctttcgatctatgtaaatttgtaaatcgaagtcgaccgcaaaacagtaaatttagttagttttaccatttttgatagttttttgggaaaaacaaaattattacctcatttatttattattataatttccatattcaacaatttttattgccattttttcttagaaatttcaatgtcgagcaatttgctgggtcggtttaagctgatgttgagcacgggcgatggggcggacgttcactttttggttgggaaggaaaaggaggtgagttgaacacaaaaaatttaaaaaagagaaaaaagctccagtggtagcgcgcaacaattatttagatggtctaaaagtcgcaattatacataaatctactcttaagtcgataatttaagcactaagaacgggaaaaagaacgaatggcgttgttcaaatgctaatttataccgctggacacacataaagcgcgcgtcgctttttaaaaatttggaggtgtggccgcatggtcgaaaagtaccaaaaaatgatactttctgacagactgaaatgagtgaggcctctgaaatttatcttttgggtttaaaacttcaatgataaattcatttctattccgagttttttatttagcttttgaaagcacacaaatgcgtgatgatgttcgcttctgctgtgtttgggtcgatgttccgttttgatgacaaaaacgcaaagataaaaagttaaaaaaatcgaaatattttttaaaaatgtttttttttcatcattttttagcctctgccgactgtcctcacgtaattgaagtgaccgatgttgaagcagaagcattcaaagtgatgttgagcttcatttatgcggaagatttgagcgaattgaacggacaaaatgccatggcagtgctttacgcaggtgaaaaatttaaaaaataaataaataattatatttaaacatttttagccaataaatataacgtttctctgatggtcaaagccttgttggatgttccgattaatgaattgccaaatgttttccttgcttttgtcgaagctcgtcttctcaacgaacatgtcagaatctggctaataatgaagcttttccctatttttaacaataaattttaggtaccataggttttcagaccccctccaatttttttttcttatttcactttttattgattcattttaaggatttctctcgtcgctgcttggattacattgaccaaaatgccgaaactttattcgaatcagaagaatttttgcaaattggtcaaaatttgttgtgcaaaattttcggacgtgaccaattgaaaatcgacgacgaactcaccatttggaaagctgtactaattaattaattattcgattaaaatgctaatttttattaaaaaattattttntcaggcactccgttgggctgacgaacgctgtgctcaaatgctcattgattgttccgctaaaaatcgtcgagatgtccttggcccaacactattcaaaatacgtttcccactgatcacaaaaagagaattttcaaaaattattggtaaatttttttggtttaaatttttccataattttgtagggaaatttaaattaataaaaaagtctacaaatgttcttaaaaaatagctgacacagatccaatttctggtctatgttggctgctcggataaaacgcggagaacgggagttgataagaaaagctagggatttttagttgctaaaaatgctgaaataggtactaaaaattgga

SEQ ID NO: 2249 - DNA, 5314 bp, Heterodera glycines
ttttttaattctcataaaaatccataaaaaataccgaaaccaaatgcatttgttgcccgtagaacaacaattcgtcggacgacgcgagttttgcctttgttgcggaaagggcggacctatcaaagttaaaatcaaaattcaaaaaacggggatacttattcatcatacttaaatgtgacggtgcaagtgccgtgccatttcttcgggtgtttgggcaacgttgcgtacagcgacgtttcaagacgacgtttttcactcggaattcgacaattcagcaccttaataaaaaaaaaattaaaaaaattatttggcaacaaaaaaaaaagaattttgttgcccgatggccgccggggacgaggaatggaaaaatgttcgaataaattggatttatggtgttttgttttgaaaaaaagtctgggccagtgattcattcatgtttggcgccacgggtttggatttctggaaaaccccatgcctggagcagctcgtggtacttttcggttttggggcctggatttgaatttttttttttttttgatcacaatggtgcgcaaaattgcgcaaattgtggcaaatttccaacgaaaattttttaatgaattttttttaaattagaaaattagtacattttttttttcttcaagatacaacattcaaaaataaaaacctggccaaatttgctgaaaaaactgagcagttgactcttggtggcccgtgcggacacatttttgacaaaaattttgcgcaaatcctccgcaacggcagcggacgacgacgacaacgcattgttgttgttgggacgacggtcactgaatggtttcaagccgaaaaggccatctgttgactcgggcggcaaaggggggcaaaaatgggaaggcgcgagggagagagggcggggtgaataaggggggaataaataccgaataaataaaagaagttttatttggtaaatataataagatgtcagatgaaaagaatgtgttgaagcgaaaaacgtgcgtgtttaaatagagaggaaaagcggaggtggagcaatttagacagaacgatcaacaacaaaaaagagtgactaatactaagcacgaaaatcacattgaataggaaatatcacaatttagataataagaaaatcaatcacaaatattaaattattccaattaacacaattaattcttcttcctcaattctctctctctttttccattttccatcatttcttctttttctcctctttcttagtcgctttggcgacactcgccgccgaagatggttcagccacgattgtgccttcatcagacgaggcaaccgacaaagtttcgacgtcgggtggcgggtgcagtgctcggcgcaacgatcgtaactcaaccgcctggcgatcgacttcagcttgcagaagagtgacggcaatgaccaagccgtcactggtggagctggccaattcgttcacaccagcagctatcgagccgacactttcctggacgtcgtccagcgccgttctcaggcgtttgatgccgccgttgaactttttgagtgcatcgtgaacaggcacggcgacatctcgttttttcttctgcaaaaaatgcacggcctcctcacgttccattgcccacttattgacgtgaccatgcaaaaggtcggccatatcggagccaacaggtgatgggggtggtggaggcacgatgccgagcggcggatgggatggctgagtagtcggagcatcagaaagagctgccgccttaggtcccttttcctcgggctcgtcttgaggggcgggctcgtccgaactttggcacttctttggacgacggctcttcccttccggcacttctttcttagctgaggcgatcatctgttccagctccattttccttctttccaattcggcaagctcctgcgagagaagattaggtttggcgggcatggcacagaaggtgttgagaattgggtagtcggagggaaatgaatggtggcccgttcttgcgatccatggcttaaatagcggccaaatacgaactaggccagagagcaaaaatggcagaatggcagaacacagcggagagatgggtgagtcagctgcttcggcatagctttcagcgaagtgttcgctgccaggaagcggtgagtaagccaacgaagcaaatttgttcgtgatttgcacaaaatcaaacgcggaaggaccaaaaagcgacggaccaaggcaagaaaatttgtgcagccgtgaagagcaaagggcaaaagaatgagcagggcagagaccggcaatagatgattggccatcgacaagggcaacagagaatagggcaagaagaagggcaccagcatagattcgtagaacgagggggccagagatcgtgagttcgcggccaacaccgatgcggtattcctccgcggcacctcgactcgttgaatcaccatggggcataacgttgatcaccaattctcgggaccggggcggatgatcaattctgtcccagagcgcgaagtgagacgggcgagggcggggaagagggcgtgtggacaaaccccgtggtgtagaaacttggtcaggggccacgactcggatcatttcgatggggaaaaaatcatggtgtccattcccgccgggctccatcaggcatggggcagaggggtggcgaagagtgatgccatgtcgagagcggtacagctcggagacagttgggccacgggcacttccattgtaggcaccgagacgattcgcaccacttcggctcagctcagatccgtgaagtcgcacatttcgctcacgtgggtgcagatgcctcgtcttgagttcgtagccgcgttcatgcagtccctcaacgattgttcgggcctcgttccaacggctcagcgatgtggtcacggcaagaccaaagcgttccacctcgatgttcattgtgttggcgaggaaagagagcagtgtggccattggaaaaggagggaattgggcttgggtttgaatgtggaaggccgattcgggaatttgtaggaatggtgaatggactggcacagagacggcttttatagcgaagtccattggcgatttttggtttttggcgagatgaatggtcccgatttgtgcatcaaaaatgtcgagagtctcagtcacacgtcttgacaccgaagaatggccttcaaactgcagctttggtgctgaattttgaatgctgagtagatggctcagccctcccgctgcagaagaatcagtcgtaggccaaagagcaaggaacaaaaggacgactcggcttatggctctccaagatcgaagggcagggttgcaacgcaaaaggatatagacgatgaaaagggccagagtgatgatgccaacagttcgtagagcattttggaggccaaagaaataccaaaagacatcggaaaagtcgaagttccaatctgggcaccaaattaggcatgagttgctgggtttggccttcgaggcaaatgagcttccttcattaggtgcttggaagtgttttggcacatagcggagatgaccattaatcacgaatgggttccgtcctccactgcattcaatggtgcaattgatgtcgacctcggcacggttgaatgacaggctgacattcaaaacttctggtgttttgtggcagagggctgtgaattctgtgccatccgaacaacgaacgtagccaagtgcggagccaaagtcggtgtggcattgcaaatggagatgagctccagtgtggcacgaatagcatccgaaaagacccttggacatggcatggcattttgttaggtcctcttccgtagcgattcgaagcccctcgaattgaatggacaactgaatcggcgcgtaggtgatttcggcaaaaatgtcccgcctttcgttccggagaagcaagtttttgagctgaattggtaggcgcttctcaggatcggcgagtgctggttcgagtttgacatctcggcattggcagttgatttttgctgaatcgtggtcaggcaggcacatcggacatgagccccatctgagtgtgcagttgaggcgtttggcattggcacgactggggcattgaaggtcactttggatttcatcactgattgccatgttattgccatccgagaggaacttggttgccatgattggggccggaggaaccgaagaggcaataggtgtgatgctcaaatccttccaacggaaagtaatgccgggtgtgagcgacacggacggctctttcgtgaagtttgcgttgaccgacagtttgagtgaagtgcgcaagcggtattcccatgtgggacaggagatttgctcgtaaacaattggcgagttagcaatggcatgtggacggtagaagatgcagctggcaccggcatttaaacacccgcaccaccaaaaggagcaagatgctgagcatctgttgaatccgggatgcttggtccattcgctcagctcatgaacttctgtcttccttccgttgttgacgtcatcgcagaactcgcgtgtacaatttccacgactcgggcaccgttttaccgaaactgtctcaatgtgataggaccgaagccattgctcagattttggcaggcaatgcaaagtcagtgagcgcatgctgatttcaagcgtgccaaggactctctcgtcgggatgtcgaaggagtagacgtaccggcagacccgatgggagaagagtaactgttgtcgagctctcgagatggcacaccgagccgaagtcggacctttggcatttctcagcagaggcagtgattgagacaacttgtgccctggcacatgaagtaaaggcacagggggtcaataacaagagcgtcgtttgaagttttggaaaagggcgaaaacgactgcgactcatttggcgcctgcgcggagtaggcagactttggaaggcaaggagaggggattcttctctctgcggtgcattttggcttggccaaaaacaacacaataagcgaacgagcagggtgaaaagatgctgtaggatccaaaacatggtgacgtggcacatcagtggcagaatccagaaaaagaagaggaaagtgaagaagctcgctccaccaatgagtccgaaagtcacatctggacgacaatcaggatttgctagtcgttcgaggcatatccaacaatcgataagctcgcaagcatctcggcctggacattggatgcttccaattctcttgttgccccgtttcgtccagtacattgcttcgcaatcgtagtcgaaaagaagatgttccttgggcaaacgatgaaaggattaaggaacgcctgattgagtgatgcactgagtcccatcgtcgtgggcatagcaagaatttggcaatccccatttgggatcaaaatg

SEQ ID NO: 2250 - DNA, 5176 bp, Heterodera glycines
  unsure (1)..(5176): unsure at all n locations
acagggttnggggaattgaactttagaagaagaaaaaagtatggaaggcacaaccaccaggccaccgacgctcacattggctttacattctttgaaaatgatattgaaaaggcaaaaaggaaaagcttcatatctcggccagaagcttcatttagcaaaaataaaaaaaaatttataatacaaagggggggtaatctacctaccctgaaagtttcattcggaagtcccatggtcacttgggtacctctcctttgtgagtcccatcggcacaacatagcaagaatttggcaatcccatttgggatcaaaatgtccacgccggtttttgtgcaggttagttcgcatccacgacaacgaattggatggccattcctacgctttggcttagtcgtgctactggcgttggtttgggaagcgccaatcagaaataggcacatcagaatgaacagaacggaggccagtgctttggtttttgagcgagtgatggcaaaatttgagggcaggtccggcggaaaattcttccatggccatcctacgctgtatcttccgtttgccaggcgcgtagtcgtctggtcgaagatttgttgtgccgtctcgtcatcgttttcgagtggatcatctctgatgccaatgttttgaaggtcccagaattgtcgtagcgagtcaagatcagagatggattcgtttctctgaattccgctgacagccgtattgggcatctcgtcttcattggcaggaacatggacagtgacgggcataacggacagtggatggtcggcagttgggcgggatggaatttcatcgcgtccgcagacagtggaaccgatcgaagtttggactttgaaaagttgcggagagactcgttggacaccgttgaaaaacttccaaaagtctgccattccaacgagaatgtccggttcttcatccacaggcactaacattccctggaggaatgtggcacggcgcactgatggcactatccaatccgtccgatgggcaaccagagtttcgtatccgccgtcctctcgttggacgcacaaaacgtgttgcggcgctttcatcttgatgggttgccgcgtgtggaaaggattcacctctagctgatcgtcttgtagtttcggaaggctcagttgccttatcaatggtgtcttgaccatagtgacttgcgcaccagggtcaaagaagaagagtgcgtcacggcgcttgttcggtgcggattctgagaacacaggagctcggagggccatgagcatgacgagatgaggaacggatggggagacaattgccatgattgtgttaacagttttcggctcagggattgagtcagcctcattggcaaccgcggatgacaccaatggccttgagttgcgctcatttccgaaactctgtttgttcctgggcgagggcttctgttgctttgaacgggcagaagatgtccctttggcactagggcagattgcagaatgatgccgttctttgcacactcggcatacttgctttgaccggcactccctcaattggtgacccttccgtaggcaattgaggcaccggttctgctgcaaaaggcaacgttttcgagtctctgcatctgtcactttgttgcactccgaggcccaatgctggccagggcagaacaggcaggacggaactcgcttgtcatcagaatttctgacggactgagcaacggaaaaactcgcgcattttcatgccgttctggtcgctgaggtcgatttggccttgcttcgtgccgaaatcgtgtttgtctgtcggcattggcttcgcgcaggcatcgttcgacctcttctctgactccgagaacttcggcaagtccagctctgagctgaggagtactccatggaatgcctgccgcacgttccattttgatgagttcggacagaacagtcgacggcaatttgctgcggatgatttggtacatgaatgggctgtcatccggcatgttgaggttcaaaagttggcggcacacacgctccaaagtctcgaggaagtgttgcagtgatccaacgctatcgtccacaggccggagattgatcagttcggactgaagtgcttcggcaattttccgtggatctccgaagagtcgcctgagtgcggcaacggcatgggcgtaattctcccctccacggtaggcggttacggcacgagcagccttaccgcgtaggcaaccgtgaagatagttgagtttgtcgacgggctcaagggcggcacggtcgacggcactctcgaaactctgccaaaatgctggccattccattggttcgcccgaaaaaatgggaagactgagctgtggaaggcgtgcagtagctaatggcacaggtgcggcattgattggcaccggtagtgccagattggcagggttggcaacagcaaatggctgttgaccatggacaccaccggcattgattggcatcggtggtggttgatttgcagcattggcaacagcagctggctgttgagcattggcaccgcctggaaatacggcattgttgacgaatggcacggctggcacgggtggattcacagcaacagctggttgctgtcctcccgccgcgatttgctggttgggctcatctgcgagttctgctgctatgtgagccagcatttcccgcgcatcttccaaccactccgtcaagtgccggtcatctcgaacaaaggcagtgaagagcgcttcctccgcctctctcgcagggccttgcagtccgttcatgatggcaccccacgcgtccagctcgacctccatccttgacaggatacgggtgatgtgcccccgttcctgttcaaggttttcggtcgtcttggcattgatcacgggctcgtccagcaaattttcggccgtagtgacatgttgccgaagtcggaacagcgcgggccccaaagccatccggcatcgagctgaagacatctttgtttgctagcggcaccacttgttggctcggacggcgagatggggacaaaaatgggaaggcgcgagggagagagggcggggtggaataagggggaaaataattcccaaataagaaagaagtttatttaataaatataatataaagatgaataagatgtcagatgaaaggaatgtgttgaagtgaaaaacgtgcgtgtttaaatagataggaaaagcggaggtggagcaattttaggcggaacgatcaacaacaaaaagagtgactaatattaaacacaaaaatcacattgaatgtaaaatatcacaatttagatagaaataataaaatcaatcacaaatattaaatattccaattaacataattaaattattcttcctcaattttcttccattttctttctctctctctctctttttccatttcccatcacttcttctttttctccactttcttagtcgctctcgcgacaactgccctgtggaacccccgagtaagttttaaagcttttggaaaagttttctccaattttaacttgatatgacctgcatatagaaaattttggagaaacttcaaaatttttccagagatacctatgttctgaagtttaacaattaacaaatttattggtaccgaatcaaatgctttttcaaaatctataaaaattatatcaatattttgtccattttctattgatttttaaaaataatccagggagaccaacaacagtgtggtagtagacctggttttcaaaaacccaaattgttcatctgttaaaatcttgttttttcaagatgtttaacaatattccatgctaatagtcgttcaaaaaccctacataaagtacatgtcagagagatgggacggtaattatttggattagatttgtctccttttttataaattagaatgataaaagatgtatgccataagtttgggatttccccataatctaagattattcggaagagttcacttataataggtgccaataaatctgcaatctgcgcattgcttattcaatatataaggtaacccgtctggggatgtcgagtttctgtttggtaacttcctaagtgctttccagaccaaggcagcatttaattcgatatctgtaatgctatttatcttattattaatgggataattcatattacaatttttttgcataaaattttgttgaaatattttaccaaaaagcatacatttttgcttatcctcagtatgaattctgccttggtcatcgaaaagcaatcttattctctatcagaattaaatttgttgccgatgtatttaaaaatagccaaattgcctttattaacaagttggctttccttcttatcattaatgttttttaattcactttttagattcctacttaaaattttgtattttatattgtccgtgatcagggtattttttaataagcctctgtatttttaatttttcggagtataatttttttattttttgtgggtaattggtttatataacttttttaatatttttttaggaaataattgatcaaaggaattataaagttcgccaacgagaaaattgctttttcgtcatctttaaataatttcggtaaatttagatcaatgcgtttttgctgaagctcatttctaagttttaaaaaatttttgttttaaactctctaataaaaaatttttcttttttggtgatcgaaaaactcccattaattttaaattctatcatgtggtgatctgatgttgaaaactttttgtaacatttgtgtcataaactaattgcttaggatttgaaagcactaaatctaaaatgttgtcaccacgtgttgtttgttttacatgttgaaccaattgtttttgtgcgacaaaatcaataaataattttgaatgattattgttctctattcggtaattaatccaatcaattcccggtaaattcagatcaccacagataagaatattattataattaagcccataatataatctaataatttttttaaatctggtgtagaacattgatgcggcttatacaatgcaaaaaggtggaccatttttgccaaacaaagtttaatgtgaataatttcttttggttgcttattttcaattacaaaatttaagtcttctcttcgactttactttgatcagttccgagtcgacgatggcattgttgaacattcgggcgatttgggatggaccaaattgcggaggacagccccaatgaatttttggtgcaactgtgggagtactgttgttgcgtccatta

SEQ ID NO: 2251 - DNA, 3752 bp, Heterodera glycines
agatacaatcatcattttcttgcttttcaagcttttgtttggtcattgacgcggacggtctgttcttcgtcaagaaatgttcgcagctgttcaaagggtgcacagacaaagtgatcattacgccaaaccacagaggcaaaacgcaccccaaaagcaaagcaaacaaaatgcatgtttcttaagattttgttcgggtttatacccaaatgttccctaaccagcagaagggagaggacacggacgaattgaaaattcaatgcgaaatggcggaacaattggcaaagatttggaagtgactgtgatgagaaagggtcggtggcacagaaacgcaaccgaaaaatatgaggtttggattcaataacaattgtcattggcactttaggagagagattgacatagtctccacagcggctaccgttacttgctgttggcggtggatgttctatcgaggcgaatgttcggcgcgcccgtaaagagtaagcgccctgtggacatgaaaagggcttttgaagagctatttgagcaaatgccaagggtgccagacacaatgtacaccgatcgagggctggagtttgtggcaaaaccgttgaaggagttttacgcggagaagggcattcaaaagtttgagaccagttcaaagaagaaggccgccgtggcggagcgtgccatccgcaccctaaagactcggctgtacaaatatttttccgccaacaacacttcggtttgggtggatgtgctgccaaagtttttgagtgccatcaacaactcggtgtgccgcgcgaccggccttaggcccaacgaaatcagcgacgccaatgcgagggaggtgtggaagagggtgtacggcgaaggactcgcacaattggacaagtcaccaaaaatcagagccggggaaacggtcagaattcccgagcctaagcacattttcgagaagggtactgtatttcacacattttttcggtcaatttattttaattttaggttatatacccaattactctgatcacgtttacacagtggatgaggcccgctcaaccaacccccagcattatttgctcaaagactattatggcacaaagttgaagagaaaattttatttgccagaattaacaaaagtacaagtggatgaaaacacaatgtatcgaattgaaaagaaatacaaagaacgagtgagagatggtaaaagagaaatgttggtgaaattcattggatttccggaaaaatattgggtcacaaatgaagaaataaatgaataaaaatattacaaatttaatgaaaattaaaaaataaaaacaattatggcataatgtcggggtcgttcagctcctcttctgtgaacatgttcacattgaggtctgggttgaacagacaggtgcaagcgccagggcagttccacttacaccactcttcgtcgctgtacccaaagggcaccaccttcaacccgtgatccctgaccacccccttattcacggtcgggttgaactgcttgaccaaggggacggtgaaaatctctcccttcttggtgatccgaaagttcttcgttgggtagttgaagcggacgttgttgtccggctgtcccagcttgttctgcaccatgtccttcatcttctcgaaggtgatgcgctcgcaggcatccgagtcgagcgtgatgccgcgcaccttcagcttgtactcgtcctcccccgttgcgttgttgcgcagccacaatccatatgccttgggtccggccggctaaacaaacattccatttattttgtttaatttttaatgagtcttaccacaaatgaattccataatcgtgtggttcgggtactcgtcggcgagctccccgagctgctcaccacccggaagtgggtcacccagctgcgtcaggtagtcgtagaagatgctgtccgtgtcctgattataaaaattacttcatattttcatttatttccaaatttttttaccatgtagagaatacgggtgtcgtaccgctcaacacccggagcaggcccatacaactttttcagcgattccagcagatggattcgcgcagcagaggtagtccataaggcaatggccacctgagaaaggcaaataaatttcaaattttcaaattttttcttacgttgctcgtgctgtgttccaccacatgctcatccttggccttgtagcagaccatccaaaacttttccgtcagctgatcgatgctgctgacctcaatcttcgagtcgttcagcagtttggccagctccgcatggcactcgacgatttcggttttggtgagccgatttctattgattttttttaattttttataaatttttctaaaaagttttaccgaagtgcgaaccggccccacagcgaattcaaacacagcttggacaggtagcggagtccggggttgtgtttgattcggtccgcctcaagagggacttgggccttttctttggccttgtcgatgtgttcctgctttctccgtgccgactcctcctcgctgatgcccgcctccgtacaagacgctggatatccgcttgcttaaaattttgtttgtttattttttttttttttttttttttattaagtttttcaaattttaccctcaaatttcattttgaggaacttcagcaggtacgagtggaacagcccattgctccaatcgcacgccagaggccagatataggcacggtacacatgcgtcaccttgtaccacgagcggagagcggcttccagctcaatgtgtgtgactgttgtcgaaaagcctattaagaaaaaatatttgcttaattacaagcttcaaactcacccctttcagagtcctcaaaatgatcgcaattgtactcggggtcgatcaagccgcgcgggtacatttcggaacacgtccggcagaggggaaacagcgtgcggttgttgagccggtacggaaggaccgggatatcgtagtggcagtggcggggcggcactacgaagcacttgatgattccctcaaggcggatgccgtcgtcgccaacaacgtcctcctgacgcctccattccacgtccttgtcaaactgcaccacggtcgggtggccaaccggataattggtgaacatattccttaaagtgccaaagatttttcaactattcatttttttttccgacatttcttaccgcgacggataaagactgttaaagtccttcactttgatcgtacggctcttccagtcgcccgtctcagggttgatcaccgaagcgcccaaatattcgggccctgttcgacctgtgcccaaaattattttgcaaatttaaacccaaaaataccgccaaagaaggcgtcgtggaagtcaattggtccggagtccgggcagttgtcgaagaacgccttcatggctgggctgtcctccagatattgcaatcgggtggctctcccaatcaactgcgacctcaatctcccgttgaatagtacggtgtttcttgctgtcttctcttgtgccttccatttgacagatgtctttgaatctgttctgcacagaatcgagttcgcattggcctttgggccaaaatttgtccaattgaacggcgtacgttctgatggtgtcgctgtgcctctgtgtcgagagcgatctcgcacaattggcaacagcggtggttgattcgcctgcccaccccgatgctttaggtaccgttatgaggccaatgaaatagctatctactcgacatcaaatcgggtataaacgaaaaaatttatctgattatatttaccccgaacttcaacttcttatttaaggaaa

SEQ ID NO: 2252 - DNA, 1956 bp, Heterodera glycines
gcgtagcacttgatgatcccctcgaggcggatgccgtcgtcgccaacaatgtccgctggactcctccattctacgtccttgtcaaactgcaccacggtcgggtggccaaccgggtaattggtgtacatattccttaaaaagccaaaatttttcaattattaattttttccggcatttcttaccgcgaaggataaagactgttaaagtccttcactttgattgtgcggcttttccagtcgcccgtctctgggttgatcactgaagcgcccaagtattcgggcccagttcgacctgtgccggaaaattagttaaaaattaaatggaaaaggtaccgccaaagaaggcatcgtggaagtcaattggtccagaatccggacaattgtcgaaatacgccttcatggctgggttgtcctccagcattgcgttcaagtggcactcccaaacgacttcgacctcaaactcccgcgcaatgtaccgggttcgttttgcgtcccgggccctccctgagggccccggccgtttctcctccgcccacaatcgccgcatcatcgggaaagcagctagggcatccatgccaatagcaactttttcaatggtaaattggtacattttatgaattctttccttacccgttgacctcaatggccaagtttttgtcctcatccggccgctccatcatcccgtccaagctgtagttgccgaacttgaactcccctccagggctttcgacatggcgcaggacccggccgttctcacgcaactcctcctcagcacgccactgagagatgggaaaatgtaaatttaaaatattttttggcacaccttcaaatatttcctggcgatggagctttgcttgccgcgcttctcgtatcccaagtgaggaataatggcgacgcgctctttgtcgtggtgtgccaactgcacccaatacttcatgcagccggatgggatggtaaccgaatccgtgatgtcatgccgagtctcggacaagaacatctgccgcatttttaccataccatgtgccaggatttgaacatcttcaaaatatttgttaaaatttttcttatttatatatttttttttaccagtcttgcagtagtccgcgatgacctcgctcagctcaaacccagtttctcggttctcttcgtaccactgctcaaactttgtgcgctctgccgggaagagtccacctgggtaataattctcaattggttgcagggtgtccaacacagtgccataattttccgcctaaatttttattaattttttatcaatttttcaataaattatccttaccttattgaatttgtgtggaaaatatttcttgttttccacgccctcaatttccaggccaaacgtctagacaaaatttgccaatttgatcggtatcagcttataactgaatgaataacaatttaaataatttaaatcttcgaatttttacctgtcccgaaacacggtgggtgtgtagactcctgttttgcgcgccttcatttccaggagatggttgccttggcggatgagttcggggcgggctcccatgcgcaacatttcaccataaatcagcacgtgatcatatcgagatccttcaatttattatgtttacaaaaattttattttcaaatataccggcgtgggcgtatgcgtacgttgtcaccgactccggcttctccccggcttcttcataccccagcatccagttgttctcggcgtcctcatctacggcatcctcttcttcttcgcattccatggcttcgccgttggtgttgtcaatgtttttcctctttctgcgcttcttcgctccgggctccatgccgagaacttccgtttcgaagttcagaagccatttggtgaaagcgggcagcgggtcttcgacgaccttgcggcattccacgtccgtgtgccagaattcaaagggcgaccaggcatatgtgcggaagcgaccgcagagcgcgc

SEQ ID NO: 2253 - DNA, 4788 bp, Heterodera glycines
cgcatgagttgcgggtccggctgaaaatccgttgtgcattcaaagtcaaagaagacaaagcgcttttccttcttgactttgggccggtattgaatgtagcagtcgcggggggcgtggaaaccaagacaaattttacaaaatttgtggccgcagacatgcccatttttcttgtcttgggcctgttttttttttgttttttttaatatttttaatgttaataaacaaaacattaccgccacgcgatatattataccggagtcaacacattttttggaacccatgcagattgatttttcagtattttcttgctcattgcctcgcttgaccctgcggtgtgagaatttggcatgatgatcataacaatcacggcttttgaatgtctaaagaaaaacaataataataataatatttatttattagcttttatttatttatttttactttgttacaggccaagcaagtctcaaaaaaaacatcattaacacattcacagtttcctcgaaaggctccaccaacacgctgacaattatggcacttccatttacattttgatgtgtgtagattctggtggttatatggcatttcacactataaaaaaaaatcattttattgtattttattttatttgatctattaccccaaagcaataatttttggtgctgaaaaattttccaatcgattttattgcgtcgtaatgccccacaccgccatcagcaccctcataaaaaaccacacagagctcatgcatgtattcattgatattcgctttccacgatggtttcatttttccaaatgtgtcaaagcaaaaaagtcgaaacattcctggatgaagcgcagcataatattccttaattaataacttaacttaataaaattttttatcaatgcctgaatcctttctccgtattcctcaatggaataaaagggctgattcacgtcaatgtcgcatccacggcactatgcataaacaccctcaagctgctttctctcatccctcttgtattccgaaaatcgctgttgcgcgaggacaaatttcatccgtagcatttcaaacgaccggaagagacagagattgtcgttgttcagaagctcatacgttgcaccatcggcgatacggtaatcgatattgaggtcgttacgcccctttccagccattttcggtttggcgcacttgctctcgatcgccgtgatgtcaattacaaaaggctcctcgaggagcgacggcctttccttagctttgttgctttggtcgaccatttcgaagcgagttagaatcctctcagttgccgtgttgtcgatttttttaaagtgtacagccacttcgtagtcaaggtgttttgacgtcaggaggaaaatgaagtggtccgccgtgatcttcattgactcagctccttcaatcgcataggcaaggcacatggtaaacaggttgcgcaatatgtcctctgggaaaacagcgccgaacgaaatgctcatcaaaaattggccaataaaccgaaacgctaaacggtgtattaaaaatatttcgttcaaaatggacaataattgaatttgaaaaaataattttacaaatcttaattgaaaattcattaataaaattggaaattttaaaattaaaaaaggttgggattacaaccacacctttgaaccgtccagcttccgcctgtgcggcagagagacaagcaaatccgtcaccgttgaacaactccgcgtccagctcgcgggtaatcgatggctcccttcgggccttgcactcattctcttccgacggcacaacctgaaaacgtctcgcataattagcaatgaattttagaaaaacattaagccaaaacttacggtattaggcatgtgtttgatgatgtcttctagaggcggcgctttatccatcagttcggtaccatcatccccaacaggggaatagggcccataaagcattgggggctgggaagtatcagaaaattgactcattgtttttttttcttaaattgactttgattatttcattaaaaaacagaaaacaaatgaaattgataaaaaaatacaaagaaaatggccactcaataaaaaatcgggcatgacccctctcctgagcaatgatttgggccatttttggagggttaaaaacgcgcataggtcaccccctacacgtgtttttttaaccttccggcccaagccatcacattggagggcatgcccaccaactatgactatcatagcgagcgattatggaaccgctcatggaactcaaagtgtgtggcactaccatcccaaagtgcaaggtttggtataggcctccctatgttgggtaattactcccttcataaggcacttgcgccaacgcccacagcacatatgagttccgtcaacgcggcttttaatccggggtgttgagtttgagcagctgcgcattcgacactgctcagtgactcgcggtcctccgggccagccagtcccggttattctctcgctgtaccaatgcagcccgtaggcagggcacattagggctaggaaccgccacccccgctgctaggaacaggcacaccttcaccctcaaggccagtgagtgaagggcccccgtccacaccagaccgactatctggttgggcttaaacatcgctgtgacacccggcgggctatgacggaaactgagtttcggtcagtcactgccgcagccctggataccagcgggataagccccgtggacagtgaacgcccgtgccagcccctctgggaagtaacccagtaccggggcagggctcctcggtttaaggatggcccccaggatatttgaaaaggcttaacaaatatcctaaaggggtttagtaccgagtaaaccaacaaaatgaaaaaatggggagagaaaggacagtacaaagtacttgtgatcaaagaaaatgaaaaaaacaagggaaaaatgaagaaaaagataaatttggcaataataaaattaattttaaaagaggaaaagaaaaaatttatagaaaaaatagccaaaattggaaataatttgaagttaaaaattttaaataggacaaacataatgccaagagtcgaaataaatttttaaatttaaaaaaaaacagaatgccaagagtgaaaataatttttaaatttgaaaaaaacagaatgccaagggttaaaataatttttaaatttgaaaaaaaaaaaaaatgcaaagggttgaaataatttttaaatttgaaaaaacagaatgccataatttaattttgaaaaaaaacagaacgccaagattttaaatattttttaaacgagaaaatggggaaaacaaatgcaagaaattggccagaaataaataaggaaatttggcacaaaaatgtgcaaaaatttggcaagaaataaatagggaaatttggcacaaaaatgtgcaaaaattggcaaaagaaagggttaaaaattgtggcaaaagaatgccaaaaattggcaagaaataaatagggaaatttggcacaaaaatgtgcaaaattagcaaaataaagggttaaaaatttgggcaaaacaatgccaaaaattgacaagaaataaattgggaaataagggggcaaaacaatgccaaaagattgcggcaaaatggcacaaaaaacggtgccatagtaataataatgccaatctggcacataaataataaatggcaaaaaaacaaatgccaaagaaggaaaaattaatgcataaataaatgataatggattattgattggcttttccttccgtaaagtgaattaaatgaaatgaaaatgaccaaatggacaaaaaatcaattaataaattgtttattgtctgaaggtatcaaattacataatgggcatgcgggagtgtgggcggcactacaaagtacgcgaccaattaaaaaatttgatttgtttatttggcaccgttccaacaaccccgcccccttcataattgatttgtttatttgaccccctccccccttctcgccgcccgctcttgccccccctcccgccgctggtgacgtcaatttttccctttatgagagcaaattaatgtttatcatcaattgccaatgtggccgagtggttagtgcgtcagtctggccgcccccctggggttcggatccgcttggtgcggggaatttttggagaattttaaatgaatttaaattcaacgtctttgacctttaagacgtttaaaataatataaaattaaataaatttaattaaaagaatttgcataaagtcgcgcagtcaaaaaagtcgcgcacccccctgcaataggtttgggtttgcaagaaaaaagtcgcgcaataggtttgggtttgtaagaaaaactcgcgcaataggtttgggtttgcaaaaaaagtcgcgcaataggtttgggtttgcaaaaaaagtcgcgcaataggttttggcttcagtactgaaaagtctggcgctcagatggcccgcgctcacttggcggcgctcaaatggctggcgctcagttggccatgcacccctcccacacctatggggggctaccgtaatccggtgaaaatggagtctctaactactattaaaatttcagggaattccattccattccacagagtgattaaggcaattttcaaaatacagcaactataataattttggtcattaaactaatgtaacatttatgtattccatctaataggccctaaaacccgaacaatgcccaaatatacactgcaaaaatggcttttaactagagcccggaaatttcaaatttgcggatcccgctgcgggattggtactgaaaattctttgcgggacgggatcccgcgggattaatcccgca

SEQ ID NO: 2254 - DNA, 3788 bp, Heterodera glycines
ttcggcatgctccaaaatgtgtccatttggcattttgttagtctttgtcaaatcacattgatcgatcagaatcattgccggcgaacgtttgagcctgaacatcgggcagaatgaaattcagggttacacctcgttcaagacactcgaaacagaaataatatatccaggtccaattagaaagtattcgatccattgaatcaattgtgatttctttaattgcctcccctctcctagaacacaccgatgggaagcagtagctgcaccaccaccaccattctgctcctccccctggtcgtgttcagcagcggttgtcgttgccgttggcaaagtgtgccattggggcggtggcaagtcattttgttgcacaatgtttgtggcatgtttgtgctggttcagctgctgcagttgctgttgcaaatggaacgcagcgcttaaaggttttgctgccggttccgtggaagaaacggacggcgacgacgacgataaagtgatgccgacagctgatgccggtgccacttgtgattggtaattgcgatcaaactgtcaattagcggaatggtaacaagatgaatgtggcataaagccatgttcaattagggatatttggaagccatgatttgggaatggaaagactaattaggaggttcaatgagttatactttcggaagtttagagtatgggtcaaattggaactagaaagacctctctggatcgagatgtatgaaccacctagaatggcattcttggcaataattgttaatgagaaaagaaaaaataattagttccaacattccctgaaataacggtgtcaaacttctgatgccttcatatactgtagttgggtgctaggtcgtttcgtaaatacgccaagggattaaaaacaaaaaatgtaagacatagctattgaatgataccatgaaaattaatttgcttgcatttgagcttagttatgaatttatacgtgtcagtcacatctttcgtttttatacattttggcggatttacgaaacgactcacaaatgtgcaggataaagttgtaccaaatgatgaatgcgaaattagtaaaataagaaattggattggtcaagatttgatggcattggccccgagagattttgtctgatgaaaaaaaaaatcaaaatttgtcacctttccaagcagctgccgcctgcctcgtacagaatcgggcggaggcggcgccgcccggacgggcgtcaaatgcgtcagatgtaccgacgcggcgactgtgtcgtggtattgttgaacctcctccgccatggactgtgccgccgttgatgtggtcggtgccgccgaaacaatggcatcaaatgttggcgtttcggtgcgcgaggggcccgccgttgtcgacctgtgccaatgtgacgggaaaataattaaattaatttgtgcatttccctcgtaattatcgacatttgggtttaattaatgacccacccacctgccactgttgcttccggccgactttcggcgcgaagcaattgcctccggcgtaaacagtggcggcactgtgtccgaatgtaacggttttcgctcaatgcgttcagcatggtaaatgccctccaaataaaggagcaaattaattttaaaaaaatgaaacataaagcaataaaaattgtttaatttttattaaaatttaacaaatttacttcacgattaagcactgtctgctcctcctccgtgtcctcaattgtatacactgaaaacacattaattaattataatgatatttattaattagtgaattattattctttgacattggcgcgtcgtcctgggcgtataataaaagttttggctgtagtagtgttccaattcctcctgagagttgtcatcggcatccaacacctgaacatatttacgcgttgcttaatttcggctttttggcacatgggccaaagtgttttttgctaaaaatatatggaatagtcatctaaaccctttttgttttgtgtttttaaaacatctatatgacatattcatctaatccctggtacgaaattcctatttatggagtctgaataccgatgtccgaataatttttgggcctcggaatgccatcactggtacgtactcgtcgctccccccccccccccccggaccgtccctggttagggccaagagaaaagattagaaaaataggataatatgaatatttaggtttgagaccctagatttcctgagagaaagaaaccgataaatttctccatttaaacaagagccgagactctcgaaccgccataataatttttcgaaattattggcatttagggagttattcaatggtggcatttaccacttgtcgcacaacaatgccgccctcatggccctctccgctctgttcgtcctcctcctcctcctcgtccccgtcgttgtgcagcgtgccgttctcatcgcttaggaacgggttcgtcatctgctgctgttgctgatttcgataaacaatggttgttgatctgctgctgctgccggacgcttcttcgcaagcgccgccaccgtcccgttgctgctgaacttctccgctttgtgcagccgactgatcagtgccggagcatcttctggcaatgccgattgactttgccgatgctgcttcttcttctgcttcgggcggtgaataaacattagcttggtcctccaagaaaaagttgtcccgctgctctgttggctgatgcatttggttgtcgtcaacggaaatctgtgagtcatttttttcagaaaactcgagaagaacaaagagcgagaattaaccgccgagactgaaccattaattgagttaagccaagactgagaatcccgagtagcccctgctttatacccactttggtcttcggcttggcccattggacgtcgaattcgtcgtcggccgcctcgccaaatgcttggatttgctgcagcacttgggcagccattttttgctgctccatctcctgctgttcctgcagttgtgcgatggttgcggcagacacagtgggcacctgtaattatacttaattaatttaattttcctttttttaaattatttctattttttgaattcgaaaattattcaaagcgatactttatgttttaatgattttatcggggtcagaatcaagggaattttaaatattatattgttatacatctcctattatctttttcgaaaaaacccaaaatcagtcagaaaaggtgcaaattttcaaaaaagaaaatagtcgagactctcgaaagtttacacgctaataaacaaattgaattctgaatttattaaatagcactgatcgaacccaaaaattggtctagacataattggtgtgccatataatttttccaattcaccggctgcacagtgtccggataatcgccgtcctcctcttcctcggacgagctggaactgggccgccggtggtgctcgtccgccgtttccacctcctcttcctcctccgagccctcggcattggccctgtcatccgttgtcgttacggtaatgatcggtggcaccgggtggggggccaaagatgctgaaaatgatcgactgatcagtcagtggcctttttttaaatggctctaattttggtgaaaaattatcattgttagaataattgtcttaggttgattatgcgccaataatgataagatcaacgactaatactttttgtgctttttgcgtctgctgcaccgccgtcatccatcagcagcgaattgggcggtgcgcaaagtgacggagaccagggatcttccatttcaatctgtaacaaataccaaaatgatcatggtaaaactgatcagga

SEQ ID NO: 2255 - DNA, 4388 bp, Heterodera glycines
tctgcccgaaaatcggttgtgtaaatgcttctggccactctggtcagctcgtcctcctccatcatcatctgttggccttccttccgcttatcaatctgatcagtgtttattcttgccctgccaaactgattagcgattctgtcgtcgccgttgctccgctcccaacacccgcgcactgtttccatgctgatttgctccaacagttcgtcctcctccgtctcctccgcatttggtgctgctactgctccgtcagcttgtagcacattcggctgttggtgttgttgatgctgttgctgctgatcagtgtcctcagtgaacaccgtagtccacagctgtttgcgcggtgttactgtgttcatgggcatgtcgtcccattggtcaagcggtgcctttgaatttgaaatttaattacgcgagaatagaaatctaattttaaattagagaaatatcgcaaaattgtgcattccgcgactcggcagagattttcaaattaaatttcagtctcaaaagtaatttaaatcccaaaaaaatcattaaaattttgttgcagaaccaatctgagtccaaaaggccagtaaccgaggcttggggatttctcggattaaggggtcagtcacaagttgtgccataagtccctaaaaactgatgccgaaataaatatttaccgtgaatttctgggttggcggttgcatccatggctcatcgtcctcttcgatgttgtgccgcttttggtcctcaaccgtttgatcttgtcccttttccgctgcactttgctcagtttctgtttggaacagaccaagcggatggccatatcgggcaaggtcaagctgaactgcagcagcagcagaagtgtcgatgaacgcagccgtgccaagtccgttgttaccctccgcctcgtcagcacgtacttctacggccaattcaattgctgtttctgctccagcattgccttgatgctgttgatcagcaaatgctgcacttgatgatgggggaacagcagtttgttccgcctgagacggttcaaatttggccaatggctgcgacataatgccaaaagcggtgatggtagtgacatcatccgtagctttgtgccgcagcgcactcggtactgtttgtggaagtggtggtgctgcttgtaccgcttgcgctcgttccgcatccatttgggcgtcaagttcggcacattgcatcactgaaatgatgcacaactgttcctcctccgacagatggtcaaagccgggcggaagcgcaacatcgtacagggaggcggatttgttcagcgaagcgctaccaccgccagtgcccggggcgatttgctggtctccgccagcggggcccgcggcggacagtcccaacgaggaatggggccgttgcggcaccgtttccggttgcagctggacagtttgcggttgttggtcatcctgttgagacgaagccggaatggtggtggtctgggaagtgggcgtgaaattttgcacgtagaaaaacataagccagtacaacaatatcaaatagtttaatccattagccctggtctggcaagcggttaggctttgccggacttgacaaccatttaatgatgtgatgacccccggggggagcttttttttattagttgtcaaccgaccatggccgtttccagcgtttggcccgcctgtgccatcgccgtcaccgccatttccttggcctgcttggcacccttcagcgtttcggaggcaaatttgccaaatttgttgccaaagccggcaaatgccgtcgacgtggctgttgctggtttttgggcgcttgagaagaacattttgccaatatttaaggatggtgccgattgttcggcagatgatgatgcaatggcaacaccaaaagtagaagatggtttgggtggaagcggcggtggtggcggacgaggcacggcaggacgagctaatcaaaaaatatgattttttaagcgaaaaattatttaaggtttattttttttgattttttaaataaaattcttgtaaattgcttttccttgagtgagaattttttaaagaatttgaaaatttgattcatgacaattgaaaaaatttcttaggctaaggaagtgagacagataaataaaaagttctcgaatcaaaaaccgagtccttcttcacccacatatcactgaacaatcagcctaaaaaaaaattgcaaaaaaccgatgaaattttgaatcccaaccaaattcccgttcaatcccaaaataatccggcattttccgcgccaaatttcatagtttttcatttgttttcatttatttccttgcttacctcccgccgctgctgcttttgcaattggcactgcttcttgtacagtatgcttctgcttctgttgctcgtcttcaccttcttcgtcccctacaaatggtttcggcactctcttcccatctttttgaccaccaacaaattggtggtgccgttgttgttgatgatggtaattagtgccgatggcagtggttgttgttgttgtttttgatgtggtggtatttgtggacaaattgttctgctgcggttgtccctcttctgtccaaaaagcatcgccaatttcttgcgctacgcttaatgacctaaaattaaaaaacaattataaaaataataataataaattaaaaatattaatttaagggaacggtttggttgatcaatattattatacttaaatttttaattttaagggcattaaacattcattgaaaagtaattaagtctaaaaatggcacttttattgcctcggcaatcttctcgaaaaaataaaaacaaataaatattttaaaaccaggtaaaaaattttataaataaaaatttgtttttattcgtaaaattattttaaaataaattattgtattgcctaaaatgaatttatatttttaataattaaatgaatttacctatacaaatgagacagactttttcaaaatggcataaataaaaagaattatttaaacccataaaacttcttttcgaaatgatgccaaaaatggcattaataagaacaagcaaagactgactaacaataagcataccattcatatatttactttcaaattggccttccattttcttatgcccccccccctacacaatacaaatgcatggtttacttttgctctttcgtgcttccgccgtgttgttgtccatcggctgactctgtgccgtgttcagtttcggcattttgccgttgctgctgatgctgtttctgttcttggcttacaattggcaccgctgctgctgaacaatgggaagaaatagaagaagaagaagaagcatccgccggcggcacaatgaaaggaaagggaaaagcaacggcggcggcagcggcggcgttttgctttgttttttgattttcttcttcccctttctgctgctgctggtgcactattgacgccgcggggcaaggaaattggggtaatgagaatgggttagcatcagcaagcggcggtgccaccaccgccgccgatgccgtagacgtcgtcgtctttgccggggacgagggggacagctctaaaccacgggaagcgatgacagagagggacgcgtgcacgggttggccactgctggccatgacatcgacatttgcaaagcttctcacacgctcgtcgtcttcccattctgtggtctcaccaatgcttctcacattctcatctctcagtctctctctagcattggcaaagcttcctactatttcgtcaccctctttttctctggcatcacccgtgcttcccactttctcgtcatccgctttttctttggcatcggcaatgcactttccacctctctcatcgtcctctctttctctagcatctgtaatgcttcccattctctcgtcgtcgtcctctttttccatctgccacgccggtggcacaatttgtccatcaaaaccaccatcaccggctaaacaaatgcctctttcgctgtattcgcatggcgttggcattatttgaggggaagcacagttgggacggacgacggcactgccgctggcgttgaaagaatatgccaatatgtcgtccccgttttcttcgtcttgccgctccattggctgtgccaatgtcaccgcaagcggtgcggcatcattgtcgctcaattttccctcgtcggactctgcttctgtccccatgtcattctcagcgatgcttgttctctcactctttttctctttttcctctgtccccctcaggggtttttctccactttctctgcctctctccattctttcgttcctttctttctcttcctctgctggttccacactctctctttcttcctcttcttcctcatcactctcatcatcttcttcttctttttcttccgtttgtttctcctcttccagctcttcctcctctatgtttttctcagtccgtgaagcat

SEQ ID NO: 2256 - DNA, 1078 bp, Heterodera glycines
cggctccgtttcgctgtccatccgctccagttgctccatgtacatgttcagttcgttggacacaaaacgtgccgtctgctcaatcactgattgtcgatgctccttctgtcgttgttgttcttcgtgccaagaaccgggaaatatgatgctgttgttcaccagattctcttctctatcaaaaatttcggaaatgattaattatgccaatttggccaaacattgagtcgcccagcccactgctgcttgaatggcttccatcgaaaagaaattgaaaaccgtttttggcaccaacagtgccgtcaaatgattgttccacagtgtcttgaggggctgaccaaaaatcgggcgtacttggatcgacagacgaggaaatcggtggtttcgaggtacaattcccgttgttgatcgcttgtttttggctgctatgatctgctgtttaatattaaattagtcggtcaattttaaatgtataatgctgatcaatcaaaggactatttgtgcttcgatcaactcagaaaccaaaatcaacaatttgtttgtaaaaaatgaatccttccaattaaaaatgttcgatcagtctcagaaatgaatgtcggcttccccttttcgatctcatcatgtattcaaattgtttctcatttcttaccaacattctcctcgccctccttcgtgtccctgagccatttaaactgatcagacaacgaatggaggtcaacattgcgcttgatcagccccattttagtcgaaatgctggtgggcattgaagtgccaatttgtttggccctcttctcaacgctggcggtgaacatgttcagccatccccctcctgcttcctcgtccgtcgacttggccatttcttttggctgatccgacccaattggcacaatgctaaggcgttcgtcggttgtttccgctccatttgaaatttgacacaatgccattgatgacaagtcatgccgtccttcgggcttgaacgaagaagcttcatagagttgtgcttcagccgctttcaccccttcatcacgttcttctccaatcgacacagcctgtacttcctgagcttcttggactggctgct

SEQ ID NO: 2257 - DNA, 1878 bp, Heterodera glycines
cgcgcagaatgtgctcccgctcttccgtgctgagcccggccagcgcactctcaggcaactcttccgtcaccgccgccgcgccatcctctggcgatccgccgttggatgtcctccgcaacagttccatgatgtcgccaccaccgccagcggctgtttcgcctgccgccgctccgccaatggacaaacgtttggtggtggtgttgctgctgccgcttgtggcggtggttgtggttgtactgatcgaaaatgtggttgcccgtggggccaaaaaaggtgtcaatttggcggaccagggacgagcactacttgatgactagaaaatgggcgaaactataactttaaattttaaatgtgaaaataataaaaaattaattgtacacattcctaattgatcgggaaaaatgtattattttgatcaaaattgtatgttgtcattgattgttgaaatcaccaaatcaccgcgcaacacggcacttttttttattgaattcccataggcccaccgggataggttataagtttttggtgataccagaaaaccaaggagtcttatttagataatcatggcatttaactcccgaaaacaatgtcgagactcagtttcgagctatcaaagtttcaatttcccagaatgtccagaatgacattgcgcatgctcaccgctgtcgttgttgcggttgaactgcgtcgcattaggccagcgaacacgttcagtccgctgatcagctcctgcttgaagccggcacgtgccgctgcttctgctggctgctcctcctgctgctgctgttcgcccatttcgtggtgcacttcatacaacaatagctcctcctcctctttgttggcatggtgatgttctgccgttgcttgccaacatgacatttcggcaccgtccctttaattgttttatgggcatgatcatatgaaacgtggtcaatgagttggcattgattgattggcatacggagcttatttaacctaattaagcagataatccaactaacaatgagaaatgaaaaacactggctgattggttgtaaggcgtcgctagtgatcaaaatttaaaattgatcaaaaggacaataataaaattaatagccgcaaagataatgccagaattcgaaatgcgaaaaattccggctccaaagggtgccgaaatgcggttaaaccatggttcatagaatcgactggaaaactacagtacaccccaacgtataaaatactgtactgaccatccgtcggagtcaggcgatgagcacatttgttgcggttgttgctcatgcgaatgttgtggcccatctttgagcagttcacagtatttgtcatcaaagtaaagggcccttggattttgttggatgtgaattctgaaagaggcacaatgtgaaatttgaaaaatattgtatttttcacacaacacattccaaataagcaaattagagtcggtttctttggttaatcaaaattccgagagggttgacgaaaccgagacccaaattcaaaatcccaagattaaaaattgaacttggacaacaattcgtgcccaaggcgtagacaaaccctaataggcgctgacagaatttttgaaaaattttgactaaaaatgactggcaaattttaaggatttggggctgaatttaaaaaagatatttaagtaaattttgtggcgccgccggaaggattttaacgatttgttaagaagaacaatatgaagtgctttttcaacactcaatttatttattaaaaaaattttcatttttcgtttcggggggggggggggggcttttccccttccccggctaagccccatgggcatgtctcggcataatttgtgctcacatatttgttatgtcccgtgccgcttcttccgccaatttgctcaga

SEQ ID NO: 2258 - DNA, 3166 bp, Heterodera glycines
ggttaatcaaaattccgagagggttgaagaatttcgagtctccaaattcaaaatcccaatattaaacattgaccttggccaactatgtcgtgccctaggcgtagacttcccctacataggcgctcacagaatttttgaaaaatcttgactaaaaacgactggcaaattttaaggatctggggctgaatttaaaaaagatatttcagcgaattttatggcgccgtcggaaggattttaacgatttgttaagaagaacgatatgaagtgctttttcaaaactcaatttatttatttaaaaaattttcatttttcgtttcggggggggggcttttccccttccccggctaagccccatgggcatgtctcggcataatttgtgctcacatatttgttatgtcccgtgccgcttcttccgcaatttgctcagaaagtcgctgagcgaagaaattcaactgaaaaaatacatttttacggcattcttggtaagcctttttggtaaaaaaaatccctggatcaggttgatcaattttagtcccagtgatcctggtcccgcccggtccagctccagtgcccggcttaaacagcccaattttttggacccgggtaatttggaggacactttgtgggaaatctgatttaaggagtcaaacgacataatttttaattgtgattggcgataaacgaaaaattaacgtgttttctgaaatttgtcgttcgtattatgattggccaccgggccatccactgattaaactggctcttactctcgaaaagccagatcattttcaatttccatgtggcgcttttcaaaatgccgggatctcgtcattaaaactaaaaaaacaaaatgccgcttactttatacatgaagtcgacatcgttcgcccagtccgtctgttgttgctccgcccattgtttgttggcttccgtgtctgtttcgtcatccttctccacacttcccccattttcggtcatgcttttctctccaaatgccattcgatttgttctctgtaaaacaatgctgttcctgttgtccgtgccaatgttgacagtatcgacggcaccgtgccgacggtactgctcaccctcggcttcgtgctgcttttcactatcatccgcctgatcgtcgcaaaatgatcgacgcaagcattcgtcagtgaacatgatgttcacgttgctggatgtgcagctactgcttctgcttcggctgttcgtcgcctttgtactgctgctgttccgcttgaactgttgctgatgctctaccaccgctggttcagctacatcagcaacaatattcttggcattatcaccgtaaagttttgccgtctgtagaaatggtaatgacgggagcggcgtcagtatattgtctccaccgtcgaagctgtctgccatcatgccggagacggtgccgagggacaaccaccgttgttgatgccgaccagacagcaacatgacagtgcaactggcatcaccaccaccagattggcgccgcttatgactcattccaacaaggttattttcatagtcagtttccattggcacgtttggaaattctgcaaatggcaataccaatggttgagttggcaactgttccggcggcattgagtcattcccttcttgcgacaacggcacatcgaactcagacggacactcgttgtacaatggcactcggctttgtgccaaagttttctcagattgtgacatcgttgtttcggcactcaaatccggttcaactttttgtggcagattttgtcggtgttgagcagcatcaagtggttccatgtcattgtcagaaagcagcaacggagttgatggctcgtagagttgagaatgttcggcagaagaacggatggaatcggcaccggaagttgaaggagatgaagaaggagctggagagggacatgcagcatccacaggtggttgttgttgctgttgttggacagactgaacttcatgaacaatttcatgggggtcatgccgagagtcaggcggaaaagcatttgtcgaaagatgtcgaaaatcttgtcgaacaaagtgatcaccatgaaattctttaattgaatgcaaatccgttgatgaatccaacggggaaggattggagtcagctggagaagtagaagatgaaatcatttcatgttcatcatcatcggtgcgattgaattttttaattgcatcatcggtaagttttagcacctttcgttcctcttcttgtgcccttctctggactgcttcaattcgtgccatctcttcttcttgtgcccttctctgaacggattgaatttgtgccatttcttcatctgtcagttctggcatctttggttccccttcttttgcccatctctgaactgcttcaattcgtgccatttcttcttcttgtggccttctctgagctgctgcaattcgtgccatctcgtcttcttcagcccttctctgaacggattgaatttgtgccatttcttcatctgtcagttctggcatctttggttccccttcttttgcccatctctgaactgcttcaattcgtgccatttcttcttcttgtgcccttctctgaacggattgaatttgtgccatttcttcatctgtcagttctggcatctttggttccccttcttttgcccatctctgaactgcttcaattcgtgccatttcttcttcttgtgcccttctctgagctgcttcaatttgggccatctcttcttcttgtacccttctttgagctgctgcaattcgtgccatctcgtcttcttcagcccttctctgaacggattgaatttgtgccatttcttcatctgtcagttctggcatctttggttccccttcttttgtccatctctgaactgcttcaatttgtgccatctcttcttcttgtgctcttctctgagctgcttcaattcgtgccatctcttcttcttgtgcccttctctggactgcttcaattcgtgccatctcttcttcttgtgcccttctctgaacggattgaatttgtgccatttcttcatctgtcagttctggcatctttggttccccttcttttgtccatctctgaactgcttcaatttgtgccatctcttcttcttgtgctcttctctgagctgcttcaattcgtgccatctcttcttcttgtgcccttctctggactgcttcaattcgtgccatctcttct

SEQ ID NO: 2259 - DNA, 1592 bp, Heterodera glycines
tttgttgaatgctcaagcggttggaaacacccgcccgctttcgttttcagtctcgagtgtcgattttcagaaaattccgattgtacttatgggttatgttccccaccccggtacacccccaaaactctgccgagacacaactcatctgatacaaaattgtcaaactttgaatttttcaagaaaaaatctcacaaattttcttcgaaaattcgaagaaaatttatttttaaaatttccagctactttttgaaaaattttgaaaaaaacctccaaacgcgacttgcgcgcaatcatccgagcggcggtggtggtcatcggttttgcaaatttaaacattttcaccaaaattaaatgctgaaaaaatgcggatattattgttgattaaaataagacaaaaaaaaaatcgttttaaacatttatgtgtggaaaatatttttctgagcgcttttgatgtcgctgattacgaatatggcatcatttggacttattccgagtctcgcgacccaaattcaaacaataagtcgatagataggacatattacgattgacccctttcttttttttgaaattttcgaaataaaatttatgtattttgaaggttatcggggccagagggaagggatcttttcgacttcttgttcaagttcggttccgcgattcggaataggtcaaaatgacagcgagcaaccccaaaaactattgaaacatattttcacgactttttaaaacaccaaaaagttttctgctaaaaaaggaggtaatagtttagatggtagccccccattttcaaaaaataaaattttttaattttttttttcgagaaaagattattttaggggtttaacgggttgtagaatccgaatctgacattaatttccacttatgtcgaaccccgataacgaattcgaacaataaagcctaaattcacattttccaattccgaattgttgatctaactccggcatatttgatgtgttgttatcgtttggcgaaatcgtacgatccctaagatttttttgaaaagcgaaacttctgactcaaaacactcaaaccctatagaagtgtcgttcaagctacgccatttttgctatggtgcgctcttttgccgaaaacgtacgatcctaacgagctttttgaaaagcgaaacttctgactcaaaacacctcaaaccctagagaagtgtcgttcaacctccgccctttttgctgtggtgcactattttgccgaaaaaggacgatcccaacgagctttttgaaaagcgaaacttctgactcaaaacacctcaaaccctagagaagtgtcgttcaaactacgccatttttgctatggtgcgctcttttgccgaaaacgtacgatcctaacgagctttttgaaaagcgaaacttctgactcaaaacacctcaaaccctagagaagtgtcgttcaaactccgccatttttgctatggtgcgctcttttgccgaaaacgtacgatcctaacgagctttttgaaaagcgaaacttctgactcaaaacacctcaaaccctagagaagtgtcgttcaaactacgccatttttgctatggagctcttttgccgaaaacgtacgatcc

SEQ ID NO: 2260 - DNA, 2471 bp, Heterodera glycines
tgttcgaattcggtttcggggctctaaaaggtcgaaattaatgtcagattcggattctccaacccatcaaacccctaaaataatcttttctcgaaaaaaaccaaaaattttattttttaaaaaaaggggggctaccatctaaactattaccaaaaaggacttcagtttattagttgaacgaatagaaaaacggagaaaagaaatgaaaatgaccaacagattggaaatggaaaacgaacaaaaaataaaaatatataaaacgccataaaaattttaacactatttttgaattttattcaaaggataatactcaacttttgccagtgcaatttgaatttaataaaaaaaacatgccaaaatcacgcgatgcccactgccatactttttttcagattcaggataaaatttaaggactaatttagcgagtttgagcatttaaaaaatttttggtttccggtgccgaaaggcaccgcatggaaacttctttgaaaaaatttgaccaaaatatgggacccaaactccattagtacccttttttgaaatttttacaacatacctattgcctttttacacatttatcggagactccaaaattcggacgacatcagacatatttttgaggaataataccaatttttacaacggaaaattcttgcaaattttttcaaattttgatacatcacttttaaacagcgttcagtaattacataaaactcaaaatagtaattttgcgccacggaaaagccaattttatttacttgaaggtagtaacaaaagcttaaaacaaaatgtaaaatttacgatggaaaaaagacaattattcatgattgccgatgcagtggatgaatacataggtaagtaaaaatatcgtttagaaaaagagaggcgaggaacaaataaaatggacccaaaaatgaatgacgaagaggtggcgagggagggacccgttgtcttaaaaagggaataattttgtattttttccaggactttcattccaattgtaaggacaggccaatccataaattattttcgaatttattttcaaggatattttttaaacattttccctgaatttcgtataaaaaattgcagggttgtgggccagaggaggacctttgtaacaatccaatggaattcttgaaaaaaggacccgttgctcttgtccatgtgcccttcaaaataagggcaaattaagtgcacatagggaggagccctgacttggctctatttttttcgtataaaatgcggaatgaaaaattgtttcgattggatgcatttatttgtatggcgaataataaatgtgtcatgaaacagcggccgattgttctgagtccgacggcgcggcgacgaccgtttgctgttggtgcaacattttgtacgccgatttgtgtttttcattgatcccttcgatgttccgtgccccttcaattgcaatgaaaatcaccttaaaacgtgaacgttgtttaaacatacatataacgatttgagtaaacgttgattttaatagagaccaccgaataaaagtggggggggggggttcagtcggaatttcaaaaaaaaaaaaaaattttggatgttttttcggttaaaaactgactctgctgttggtctctgaatttaaacaaatgtaacataaataagtttcaaaaactccctattttgtgcttaacagaatccaaaattaaggagacctttcagtttgggaaccaatttgatgggcaaatttttacactattccagttttcgcatccaaaaaaagttattcgtaaataaacttctaaaagtggtgagtttaaagtttttctgtgtattaatgtcagcatttgtccttttcgttaatttataaattctagagtttgccggtttattaatgaaaaaaatacagttctgagccgcagccacaaaaaaaaaaaattttttttacattttatttgaaaacaaatccgtggttcggaattgatgccaaaaagttttgcaatattccaaccaccgaaaacaaattaaaatgccagccagcagcatttaaatgccaaaatttcatttccccaacggcaaaaagtgccgtgccgaaaacaaaacgaacaaaaaaccttgttggtgatgattgtgttcggctcgtcataaattccgtccgcgcgtatccttagcattgtgccaaagttgtaatcgtccaccgttttttcgaacgcttcacagaacaaccgccacttttctttgttttcgtttttcaattcattttcgtccacctaaaaaaatttgggggaaaaatagggtaaaaaaccatccaaattttttgtccctataattcgacagctaaaatttttcgattgtaacagtttattgatttttttgtgtcaattctctacatttcagatcttggtcatcatccctaaatatatgcaatttgtcgacaaatcggtactaattaagttaagctacacctaacagtgctcgtagggaacctaccaaag

SEQ ID NO: 2261 - DNA, 1595 bp, Heterodera glycines
agtgattgaaatgatggtgggttttagtcccagtgattggaatactgtttgggttgagtaccagtgattgaaatgttggtggattgagtcccagcgattgaaatgctggtgggttgagtcccagtgattgaaatgctggtgggttgagtgccagtgattgaaatgctggtgggttgagtcccagtgattgaaatgctggtgggttgagtcccagtgattgaaatgctggtgggttgagtgccagtgattgaaatgcagaattgagtcccagtgattgaaatgcgggagggtggagtcccgttgattggaccgacaaatcattccgtattgttttataatgtcattttgcccacataaatcatcttttcttggttttggttaccccacatttgcgcctatgttcaaaatcgagttcaaacttacatttttcaatccccggatgacttaaacagttttaaataaacgataggaagtgattgtacccaatggtcgtcagcaaattattgaagaaaaaataaattttccggacacggcttggtttcaagtttttgtaatacttggtacgaattttaaggccattctccctcatcattttctaactcaatgacaattcgtatcataaccatttttcgaaattaatgcctagcctaagctagtctcaaatgcttttgtcccaaaatgaccgacttttgtacgattttgccaatgacacccatttcatttgctcactttaaaaacatcaagatccggaaacagttgtctgaaccgtgtgtacacttcgtcctggtgtttgttcaacttcagctttgttgagtcaacagccagcagaatgttcatctgcagtaaatggcaaaaaaaaacactcattttttggaaccatttttggcatttctcacatgaattgaggcactttcggccgctttaatcgcccacataatttcgacgtttgcatcattttcatacttttcgacattgtcgtttaattgcgagcacaaatcgaccattgaccaccaaaatttgtgatgtaattgagaaaaaaaaaagctaaatgatatgcactaatttttatatgtaatccatccaaatgcaatgaataaataggaaaatgcgaatttttaaagaaaagcatacgtaaaattaacaacatttgcactggaatttaaaccattaatttatcgtcatatttgaatttgccatcatcgatggagaaatgttggcttacatgatccatgggtacttatatggttcgtaggccacaaatttaaaattttttaaaatctgcttaggttgcttagaagaccactaatcgcataagcggacacacatgagccactcagtcaaacaaggtaactgttcgtcatcaatgacttcaaacacaacacgcaaggatgggcttgccgaaaaataaaaaagaaggcaaggaagttcacaactctttccggtgtgcccgtcgttgaaccgctcgatcccgaattgctcgaaatgcccgtcgatgaatgcaaacgcatgcaggaacgcaaaagagtgacttcgacatcctgaccgaacgcgatgaactttgccggaccgaccataccctccaacttgactccacg

SEQ ID NO: 2262 - DNA, 2186 bp, Heterodera glycines
ttttcattgtattttcaaatctctagacatatgtactcagaacttatgagacacatttatgataataacattatccaccggacactatcctattttcctaatactgccccgatatgctggaaatggatagtgtgtctccttaatattgaattacataaatgtgtcttggcggcgcgaattcagtgctgaaaagtgaaaatttacgattttcgactttttgttcgaatccgggtccggggttcgaaattggtcgaaatgaatgtcatattcgtgatcagcggccccgaaaacccccggaaatgtattttcatgactttttttaaaaattttcaaaaaggccaacttttacactagcgccaaaaagtttaatgaactaacaattcgctgtgtttttttttctctcaacattttaaatccacaccaaaatgaggtcacttcaagaggtttttcaaaaaaccaacttaggtatgtataccataatttttggtaaatggagctcattttcgagatgacgtttcggagatgaaatcataacaacaataggcaacaatggaaaaaacaagaaagtaaatacaatattgaatacgcaaattgtctctttcaagcattttagtcatctcatccaatttgtttagtgactcctcgaaagatttgcgtgagcgctgcaatcgcgcctaaaaaaatgaagaaaataaggcgtactattttataaaccctttcaatttttggcctcaaaattgaaaaagctgtagctcagtggtttttgtgagaaagtgagaagaggggtggtggaggttcgagcccgccccacgaaattaataaatttaatattttttttgataaaaaattatgttttgatattatttttttttgtacaaaccaagatttctccgtatgggtcatgtaaatttttatttgttgacttattgtacctccaatgattccaaatctgatgcctctcgtgaaaaaaatcggttggaattgcattggactgacaactgacgacgtccaacggcacttttaaaatcggatggcattttcttcggattgaactaaaaattggcattttcagaacagtgccaacacattttctcctcatggtaataaaaccttttgcaaatcttttccggtcgccaaaaagtgaaacgaacgagaaaaggacgacaatttagaaaaagagcagcgattagcaagcgtattcatattgcagaaaaaatgctgaaaaatttttaaattcaaacttaaaacaatataaagtcgggaatttggattggcctgagaccgagataagattacgggggattgaaactccatttttccggaatttgagccctaccccgggactcaaatcctgcttttgctggggtcccggtcctgagccgtttttaaaagccgggatatgggcccagaaaatcctgcgggatccaggtcccatcccggctctaattagcaaatgattattgaaaacaaaaaaggtcgaaaaaaagttgaaaattttaaataagtttaaaataaaacgccataaatttgatttcccaacgcaattttcaaattgtaattgaaactaacaaacccaaaatttggccattttttgtctaataaaattaaaaacaaccaaatacgcccgcttttgactttcattgcataagcaaatctgtgccatttgctttttgccttctctaatccaaaatttcttcattgattcttcatcatccccaactctctctcttttttggtcatttctttatcaaattatcatcatcatcattggtaatcatgtactttattggtccctaaaaaaaatttaaaaataaagggttttatgcgattctgagtagtactgggggtttttgagggcgctgatcacgaatatgacatccattgcgacctatttcgaaccccaacccgaattcgaacatttttttataaaaatattttttaattgttaaaaacgcctttcctgttcttttcggggtcgctaatcatgaatataactgcaattttggtcaacgccgaaccccagacccgaattcaaaaaaaggagaaaattaatttttctccaaattttacatttattttcccaaatctatttaaatggacggaatataatagaaaataaagattcacggccatttagtgcattgaatcaaggtttggacaatatgagaattttggtgaaatattaa

SEQ ID NO: 2263 - DNA, 5752 bp, Heterodera glycines
ttgttcgaattcggttgttcgaaataggtcgaaatggatgtcatattcgtgatcagcgccctcaaaaacccccagtactactcagaatcgcataaaaccctttattcttttcttttttagggaccaataaagtacatgattaccatcatcatttccatcgcttggcccttatcagcaaaaagtgcgtgcgcataatgaaacatttgcattggactttaaatgtaattgaaaatatttctttattgtcatcatttaaatttgccgtccgtcatcaatggaagaaaatgattaacataaaacataccatgctcaaaaaatgatagatgaactagcaatttgctacgttttacatactttttttctactggataatgggtcgaagattataagataccaaacataggaaacaacgaaaaaacaaaaaaagcaaaagccacatacaagaataacagtgtttcgtacgactctttttgctttttgtttctgctcgtcagctttgcgtgcgcgctgcaaatccgcctaaaaaattaagaaaattaggcatatggttttacacatcctttcatttttggcctccaaattttcaaggtcggagaacccgatttcaacatccatttcggcccattacgaacccatgacaagtggattatagcaaaaatttgaaatttaattttcgtcaaaaattcaaaatacgcaacaaaaccgtgaagcctaagcttgggcctaagcgtaagcctatgccaaagtcagtgtaatttttagtttcgaattttgttcaagttcggatcaggggttcggtattcttctgaaaaattaaggtaatactcgttgatcagcgccacaaattaccatagaaaagagaattttatttaaaaatttgaataccaaggaaccactggcatatttccaaagaacaagtttttggtcgagcgcttccaaatccgcagcgatttttttgagttcctcgaatcttttgatttcttcttcgccaagtttgcgattgcgttgcaattccaactaaaaaattgaaaaaataaggtacacgaatttatttttactagaaaacccggtgatattgtcgatggtagccccattttcgtaaaaaagaaaaatttaaaaaaaaaatttcgagactgttttttgggttttgaatttttgttcgatttcaggattcgaaatggattgtcagccatgggttctgcgaccctgaaaaccaaaaatttttttcttttttagacaaacaaatttttgatcgagcgcttccaaatccgcagcggtttttttgagttcctcgaattttttgagtttctcttcgtaagctttgcgtacgcgctgcaaatccgcctaaaaattaagaaaataaggtgacttttactttacttaaacatagagttgagcgggaccgggaattttgggcaaacccggaaccggggacctattcgggttgaaaaaccgggaaaacaccgggactagtcccggtcaaaatcgggacttcggtactcagttgtccgtgttcaggtcccggtcccgctcaattctacttaaacattcaattttggccacaaaattcagaaagctgtagctcagtgggttttgcaagaaagtgggaagagggggtggcggaggttcgagcccgcctcaccacaacatcaatattttttatgccctggggcataataattcaaaaaagttgaattgtgtatgtacctcagtaaaaagttcgtcaaatgatttcaaatttgatgcctctcgtgaaatggaattgctttggactgacagctgacgacgtccaacggcacttttaaagtcggatggcattttcatcggattgaactaaaaattggcattttcagaacagtgccaacacattttctccacattgtaataaaaccttttgcaaatcttttgccgtcgccaaaaagtgaaacgaacgagaaaagaaggacaaattagaaaaagagcagcgattagcaagcgtattcatattgcagaaaaaatgctgaaaaatttttaaattcaaacttaaaataatataaagtcgggaatttggattggcctcagaccgggataagattacgggggattgaaactccattttgccggaatttgagccctaccccgggactcaaatcctgcttttgctggggtcccggtcctgagcgccgggatagggaccaaggaaatcctggcggaacccaggtccaatcccggctctaatttaagcaaatcatattattgcaaaataaaatgatcaaatcaggaataaattaaaaataaaacgccagaaaatgcaaaaatttttatctttcgatatgcaaaatttggtgcaaattgtattttagttatttgttcaaaaataaaacaaaatacaggtacaacatgcacaggattcgaacccaggacccctttttgtttaccttctcgttaccactgacaagggaacattccgagctgtaactcggaaaacatttatttttgcttattttcactaaagaaaaattatcatatatttttttagtctaaaaaatcattttttaaatgatttaattatattatatcttaattaaaatttatttatttttatgttggatttgaacccgagctccaaaaatgcgaatttaaccaactgaaaaccaattttagtgaaaacacagccaaaatttcgatttttgaggcctcataacttttttatttttgatctcacaccgctaatattaaaaattcacaacagcagaagtcgaccctgctctatccaatgataccaaatttatacctactttttaactaacagttcgcgaggttcccttgtaagccaatccttaggaaactgataaattttacaccgtttggatggtcatattagtattttttttgatgttgtcaattatctgtgctcctctatctttgtgtttgtaccttattttcttgtctcgattctcggaaaaaaaatatttctcgcaatgccctacttattttttgtaaattcttaaattttttttgatttaaaaagatattttcattacacacctacatatttacccatttaaaaaaatcaatcatatccacgtatttatattatatggccctattcgaatttctgtttttttgccaattcataaagacatttatcaataataaaagcatattttaatattatatttcatattataatttgtctattatatattaggattttatatgtaatattaaaaagaaaatttaaaaaaaattgaaatttatcccattttcgcaaaaataaattttaattacctaatttaaaaatatacaggtgaaattttataaaatattcattgaatgtctactttcattatacctttgcttctgtttataattattgaattcagcagttccgtctgctccgaaattggttaaaatattattaaaaaataaaataaataatttttttaaaaaatttagcattgagcgtggaagaattggacaatttttatgcaaaatttctcattttatgcgcagaagaaaataatgcagcaatcttaaatattaaaattagacaacaaataaaactgcgtttaactgcttcacatttttgcaccgaaattcttttttataagtataatgttttgtcgacgaaaaataagaaaaaaattgcaaaatttggccaattaggaggagaggcgctcacaaaaatggacaaattttcacacataaacaactgcaaaatgttgaaatttcgcggggaagtcatccagtttatgggtgggttttcatcttaaacatacattttattaaattttttataattaaaaattttattttttttgattgaaatttcaaaaattttcaaaaaaaaaatttcttttggtgtgggtcagaggtggggcgcggacagaaaagtcccgcagtcgcggatcgctctgcgcggattaaaattgccgcagtcgcagatcgatcttcgcggactcaaattgccgcggtcgcggatcgatcttcgaggaacataattgccccagtcgcggatttcgccaaagcggtcgcgaatcgcggattcaaattgcttcggtcgcggatcgcgccaaagaatcccgcggtcgcgaatcgcggccgcgtcccacccctgctgatatagttataaagtcaaatcttttttatgatattaattatctcccaaattaaagtggaaaatcaattgatggatgaagatgattctttgtacacgaagcggaacctattgtcaatggcaaattgtgccaaaattggcaaatttctggaagaaaatgaacctaacaaaagcaataaaaataatgccgtgccaccggaagtagcggagtatttgaatgaagtgaaagaggcacattacaaagtttttttcagccttttattttccgattcaatttggtaataattttgcttttttttaattttctgtatgtttacctttttttttatttaaaaaaaatatcatttttttacaaatttattattttattatttaaaatttaaattattgaaaaatggttttggttttttgaatttattatttcaagtggccagtgactttttttgaagttttcaaaaaatgattaaataaattttaaaaaataattgaactcgaaaatttttacagttcgacttatgctcgagtttttgaaaagcttcggtctatttattgaataatataaataaataaataatttttatattattaatttattacggatttgttattattaaaatttcattttcagtgatttttcacaatattttgactcgaaaagaatggaaaacgaaaaaaactttgcgtttagcatgcgaatgcttcggttggaaaacttggagtcaaatgaaaaaattgccaaaattaaaactaatattgaacaagcattttttgacactgaattaatgcgccaaattgaattaaaatttccgttttacatggcaataggtttgttgaatcaaataaatttaatgacctttttattaataattttgtgtttcaataaattttcttcatcttattaattattttacataaattcttaataataaatttagcttttaattttcgttgctattttaattttctgaaaattatttaatttattgttattttttatattaatattttgcgattctataagaattatgtaaaaattttaaaattttgaaattttttcattaatttttttgttaattatcccatcagatatcattaatgatcacagcttagctgagacatatgctaatattttgtcaagagacgaaacaacacggcataatgctgaacatttgttggccattcgaatttgttccgcacgaatttggcaaatttttcagcaaattcatttggcactcaagcagcagcataatggcaaaaaagccaaattaaaggatgccaaaacaaatgaaattttggcacaaattcaatcaaattggcgtcgcttttggaaaacacggcacgcaacttacaaatatatgccaaatgatttgtatgcacattgggttgcagtgcaagatcaatggcaagatttgacatttttggcgtgccaattagtccaacaattagcgaccgataaagataatgttgctaaatattttcaacacataaagcaattgttgccagagcggaatctgttttatcagttggctgaggagcatgccaaaaacataaccaggtgaagggagaacctttgatcactgatcagatatcacttatctcaaatggaagttttaggccactactgtagtttgctgtatccctcttaaaacgaaa

SEQ ID NO: 2264 - DNA, 1864 bp, Heterodera glycines
ggccggtttcctcccaccggccggtttcaccgctcggggccacgcattcggctccgcggctcgcacgtcagtcgcccggggcatttttccgctcgccggtaacatttcgcggacgcgccgacgcatttccgacggctccgcacggctccggagcagggcgaaccagtaaccccagcccggaaaacgccaatgggcattcaaaatgcaaatgcaaaaaaaaaaactaggaaaaatccaaaatgtgccaaaacgactcgggtaattaagaaaatagaagaaacctaaaccggccacaaaagtacaaaagtaatgggaccggcttggcctccgagaaaacaaataatatttttcgaaaatataaaacaaacgatgaaatttcctgaaaaaattctctaataaaaactgaaatcataaaagcgtaattttttcaacaaacacctaacataactaaataactcggtttaaaattgaaaaaattaattttgaatcatttttttttggggggggggggggcggagagagaagtttatcaattttaaaaaattttaaaatttttaaaattctttttttttcaaaattgatcaaaaaatcgtaggctatcatagataaaaaaaaatcaagcaaaaaaatattatacttttcatttgaggcgcataattttgaaaaaaaatcttcgaattactcgccccgaaaattttttttctggtttttctgataataggtctgagcttgcatccaaatcgaaccgaaagcctataaattttggatttgcttcatccgtggatttttcagcagcgacagacctccccacgctgcgtcgggcacggcacactctgcttcgttgcacatggaggacttaaaaaacagattgtgtgttaatattcaataaatggtgactaaatttcacggctttttgatggtcgagagtattgaatttcgattttcttttcttaattgaataatttttttacgagtttgaaatttcggttttattttttttagtgaaatattttttgagaatttaatcccttttaagttttcaaaaaatgatcagaagcgcaaaatttttcaaagagctgcactattaaaaaagctaatgaaatgctaactaaccatatagatagtggggaaaaacattaacaaaatccttaaaaaatttttttaaataaaatgttaaggaaaaaaatgttgaataatttttctatggttttttcaaaaagaactaaaaaaaattaattcagtctctttctttttataaaatttaatcaaataaatggttcgagtcgagagtctcgagacaataatttagcaaccaaaatttgatcgttgccaccccatgccacaacttttgccgcccacctcaaagtgactgcccggacagctgccgcggtggcacgcccgagtccgacgccggacgccgttgccgcaggacacggagcacgggccccactcgccccacacactgttttttttggaggatggaaaatcagtaaaaaacaaacatcttttaataaaatacagtttcgagagtctcgttctcgacctctcaagatcaaatgctatgagcggggggaaatttaaaaaactcaactaaaaaaatttttccagtgatatttctaaaatttttcatttttgggaaagataaaaaattgaacagatttttattgtcagatttaacgccgaaaatgaaatttttttttttttttgaattttgggccagattttgtaaaaaattcaattgaagcggcaggtgctctggagatttttttataaattatagccaaatcagggtttattgatctgctgacggaaaagaaaatgcccaaaattcattaattgtggaactaagtctcgcacatcccta

SEQ ID NO: 2265 - DNA, 1741 bp, Heterodera glycines
ataaggaatagttttcaggaaatatttcgaaatccagacagaaaaattctcgaattttttccatttaacagttagtttttcttaaagggcaaatatttttttttggctttacctccaaagtggcgcttggctgtcaagcggcaggtcacaaggctgctcattgcatgactgctgctcaatgccaagcccaggacaggccgagccggcaggacatgtgctggaaaatgtatggaattcaaggactcagtctcggcatttttaaggatgccaatcatggcaaaatgggtgtgtgccaaattttggattcttatgaacaccgtagtcaatgattacggtttaacacaaattaacaggctgattttgttcccccccgcagggcagagacgccgttcccgtaagcaagtgcaataacgggccaacgcacagccgtgagggagcaagctccctacaacgaccacttcccaaaagttaaaaacactggggagtaaggactccgaccaagtgtacaaaactatagccaaaaggccgagaagcgataatcatgtagcaaaaataggttttcaaatggaatgattaagaaatgaaagtgtataggatgaacatatttgtgcacgggagggagcagagatattgatgtaaagaggggaaatagtgtgagtgagcggagaggaaaagaagcatgagatgaggaaggggacgaaagagtgtgtgagcacggtaggggtcagttgcgtctggccagttacgtctgagccaagcataaagcaccataacttttttctttgtttgtcaaattttataaatttggcatcattcgaaagctctacatgtttagaagcttttgataagatattgctaagcgattgaacaacttataaaaaagttgcaacatgaacactaccaaaaagtcagaatttttgcatattttaatttataacttttttatatgtcggtacgtctttgtgatttttggatagccgatagagcttgttaagagctttcgaatgataccaacattgttggatttggtcaacaaagaaaaaagttatgatgctctaaacttggctcagacgcaactggcccgtttcgtgtgagcaagacgaaaaagaatcataatatgcaacagtatgcgcttgcgcggcagaatgctgggtcgtttcgtaaaaagcgccaaatttatagatttttcaagaaaaagtcgacattatctttgtgtcattcgatagctcttggattgttctatagcatgaaaagtttcagaaaatttcattgaattttcagaaagttatggcaattttttgaataattttggtcattaactttctgaaaaatcaaataaaattttttgaaatttttcatgctaatagagcacaatcgaaaagctattagtttggttgttttaagatatgttatgaaactttttctcaaaaaaattttctgtaaatttggcacttttacgaaacgcccgccccatcaattgacccatcagaaaatgcaccactcaccgactcctcgatcgcattcctttgccgcacaacaatgagcaatcactccatgccccctggccaattaatgagcaatttaattaatcaattaggtagttaattgcccctaattagcgcgtagattggcagtacctggccccaaaaatgtgaacttacccactgactccatgtggcacaatccttcagattacaggccaacttttgctgcgacatgccatcacatggttcctaaaatg

SEQ ID NO: 2266 - DNA, 1071 bp, Heterodera glycines
ttggccatatttgcgtcgttgttgttgttgctcacacggcacctcttcacacttgcgcatttcaattgatttgcctttaaaattataaacaatattttaaccatttttctgccgtaatcggtaaattgttggtacggtaatggattctaattggtttaatccggttctttaattaattatatataattcgtctatattcaattgatttccatgtctttaattacggaatcacgtcttttgattgatttgtctaattattttcacgaaattaacacccgtgattgtcacttctttaattgatttgtctatgtctcgtaattaattgataatttgtccatcctctacctggtgagcatgtataggacacggtgtgctgtgtgagtgttgagggtgttgttgtgcatcgacggtaacgcgcttggctgccacgaccgcagctgacggaacaccgtgtccacggggactgaaatgggcgtcggagtaaaaattaaaatttattattttaaaaactgacccattccgaccatttgacagcatcaccagccaaaggtgctggacatgctgaaataaagacaaaaaaataaaaataataatttatgaatttttagctcattcctacgggttctattcatttttgtgtcaatctatgtccttgaaatgtccttgccaaggttaagatgaaatccaaattttgtatatgtggcgcttgatcaacaaaataaaaattttcatcgaaaatatttttaaaaaatcgaattttcgtaagaaaatctggccatttctctcccaaataaggacagtcctagaaaataaggacaaattttgagccatccctctcactgacagatccgattgcacggctgactctcgctgctcggcccgccatcgcaccgaccgcccgcggggcacacgcgagaacggaactgaacgccagcacttccgcacgatgccgtacatggggaccatgaagacctcaaagttggcacaaaactggactcaatgatcaaaaaatgaaaatcggaattttgatcgatcggataatgtgatcagattgatagtggtcgagtgatt

SEQ ID NO: 2267 - DNA, 5286 bp, Heterodera glycines
taatcaaaacattgatcaaccgatcagttagcttcagagctcccaagtgatcggagaaatacagttagatgtatacactataccattgctcccactgcccaatggcgaaatgccgtggcatgttcaactgtgccgccgtttttggctcgtcgacggcacttgtcgggcaccgttcttccttggccggacaatgctcaccgtattcaccgattagcaacagcgaactatcacagctgagcgccttcacaaaaacaattgactttgatcagtgatcaatagggaccggatttgtatggattatttttgtacacttatttcggcaaggaaaagatcttttttgcttgatttatccatattttatatcgatgtttcggcattttcacaaaaaaaaaaacgaaaaatacacccctattaatatgaaaaattttggaaaaaataacaatgaattttttgcaaaatttactaatttttgcaatcttttttctttgttcaatatttttcgtaagtctcagttaacaaattctataattcatgtattaaatgatttttttttcctcttgacaaaaaattttgtgggtttagattttacaaaaattcagataattttcagaaatttttgtccatattttcgtattttttgtccatataaattcggtccctaatgattaaaacagatcagagatcacagagtttataagcaaaatgccaagaaataaaaaatgttattacaaaaacaaaaaatagagtgtttccgtcacaagcaacaaaagtcccccgtattctgttgaataagtgtaataagtgtgtggtgttagctaattgtttgtgagtagatcaagttgaagccattttctgtcctccaacaccaaaaggtcacgccaacgctttggtccaacgagcacgcccgagggaatgccagagtcgccggcgtcgttcggcgactcactcaaaactcgccgatcgctgccgcccggagactcgccgccgctaaaaatctttcggtcgctgtcgctcgacgactcgccgtcgctcaaaactcgccgatcactgccgcccggagactcgccgccgctcaaaatttttcggtctctgtcgctcggcgactcgtcgtcgctcaaaactcgccgatcgctgcctcccggagactcaccgccgctcaaaatctttcggtcgctgtcgctcgacgactcgccgtcgctcaaaactcgccggtcgctgtcgcttggcgacttttcaccacttgtaactcgccggaatggtgcgggtgtggcgacagtgctggtcggcgtcattattgtttgttgccgaaggcaatcgcgccaaaagtatttgtggacaatctactgatggatgagagaatgtttttgttatggaaacgaaaaaggcaaaaggtatatggtagcgactcgttactgtatacagtatatatatatataatatatgcatatattattttatatatattatatggtaattaaagcaaaattgttattgaaaacttaaagggagaagggcaaaagcatgggaggggagcaaattaattgataaattaaaaaacgaagtacagtaaccggcgatagggtaccataccgtaagccaaacccaatgattttgtaacaaaaaagtgtgagtcccgttgaatgttattggtttaagtggcatgtttagtgccaaaaataatggatgaaaatgttaataaagaataaatgtgtaaaaacaaaatgaaaatgaaaaaattgtatttcaaaggcacttaccgtacactcgccgttcagacagtaacgattccaaccgcagggagctgtcaatttgtaaaattacaatccatagtcattattaaggattctttttttaggcacaaaaaatcgcgaaataggcacctaaaaaggcacaaaaaaatcgcaaaataggcattaaataggcacaaaaatcctcaaataggcactaaaataggcaaataggtagcaaaacacataaaaacttcaattgcataaactttttttcaaataaggatacatttttagagcaaaatttttattaaaaaaaaataaataaattttggtgatcaatttttaaaaatattttttcaattcttaggggatgtaatttctgaaattttttcgggccttttcttaggggtgaatttttcgtttttattgcatttttgttaaggattttttcgaaaatccttaaataggcactttaggcacaaaaaccccgaaataggcaaaaacaggcattataaaagtcattgtagacgacaccccaaaccaagcggaaaacgcgttttttgtgcttatctgagcgtatcaagtgcgcaaaaattttaggcatttgcctaaaaaaagaatccctagtcattatttaaatgaaaaacaaaatgacgaaaattaatgaacaaatgtgcaaaaaaaaaagttccaaaaaaggacttccgcgagtcgaaaaaaaatattggattggaattcgggtcgagacgaccaaaaaacttggttgcgagaaaaatgtcgggtttcgagatttgagggtctaacctggcccaggcccaaaaaattaacttttgggaattttcaaaacttataattaaatttgtttactcaaataatgaaaaaataatttttttttggggtagtaaaaaaattttggtgggcactccctttagttttattccaacccctaaccgaaaagtgcgtaggaaaaccagtttattgattagaaaaaaaatttcaagaaattcctaaggcttaggcctctctcacccccgtccggcaagtcgtccccgtaaaagcggtagttgcgcggcgctccgccttcatttttgacgtcacaaaacactttgcatgccctctggggaaagcgggtcagctgactgccggtgccggtcagctcggggtcctggcgaacgcgttggtgctccgtgcattttgccgaaatgtactggacagttgttgtttgttatcattagtaattagccaatttgctaatgacccacacttttcataatgagccaactcgctaatgacccaaacatttataataagtcaattcgctaatggcccaaatatttattatgagccatttgttaataaataacccacacattccctaatgaatcaattggctaatgagccatttgctatgagccaggctaatgaccactaatgatcggaccgttaatggaataaactcgctaattaaccaatttacaaaatgacccaatcgtgctaatggatgaagagacttatcacgaataaattaatccgttaattgataaattttcttgctttcccaaaggactaaactcatttatgacctgtctcatcaatggcatttcaaatatccattattaaattcagtgatatagccgaaaaagtatttcggcaatttcacgagtggcgtcattgaccctaattggtccacctggttgaccgactggcgctcctgcgggcatttgcgcgaacagacggcggcacgatgcgcaggcccactgcactcggcacctccgttctgtggtgccggattggagcagttccgttcggaaagtgtctgtgccaaaggacaaaaaagttattttaaaaatccgcatgcatcccgaaataaaaggatttttattgtgataaatttgaaaatcctaagcaattaataattttggcggggatcgtatcccaattatttgtttttaatcttcgaaatttttaaaaaaatcttaggaacttttctttataaaaattttaaaagtttttttaaaaaacttccaaatttgaaaatttttattcggccggaggggaggggaactgatccgatggaaatgccgtaaggggtgtaccttttagaagtcaaaaaaatgccaaaatgccccagatcatggaaactttcatattttttcaagggtgtggccccggaatctgggccagaattcttgggggctcgggaatgtgcccaaagttgggaattcgggggcattagtgttccaagtaattcatgatgtctgaaatctcaagaattttggattaaccggcaaaaaaacccacaactccaatggcaccgctgatgtccgagcagaagcattgatggcactcgaacggtgaccagtcggaccattggccgtcaacttgggactgaaaaggacagggatcaattggaaaaaagattgaatttaatttttaatcgcaaaatttccgccgcgtgcaaattttcgcatttaattaaattgtgcaaatgaaaggggcgaaagggcggagccaaaaacatcgccggaggggaaagtaaggcaaaaaaaatagtgcaaattttaaaatttgacgagcgccacactttgaaacggagcgagagataggcaaaaaaaaaaagtgggaaaattacaacaagaaaatacaggtaattatgagggaaagagcggaaaattgcgagaaaaaaaaattcaaggtcaaacggatacaataaaaaagagagaaaggctaaagatcaaagggagacgaacaatcatagattaaagatcaaagatcatcaaaagatcaaagagcaaagatcactttgaaaagacaaacaaaggtcacttatgtggacaaaattaaatttcctttaaaatttaattaaaatttttaatcaattcgtaactaaaggttgggcagcagggagttaaaaaatggtttgtaaacgtaattaattaggaaaagtggtacataattagttaattagtttatccaaaaaaataattaaatttgacaattgttgtgaatagtgcaccgaaatgagtggggctcgttttggaccatcgttttttggcgccagcccgggtttttgggttgtaactttttttttcttttatcaaccaaatccaacaatcttggtatgtatcaaccgaaagcttagtgcatgtttagaagctgtttgtatgctattgcttggagattcgacaattcccaaaaaagttataacacaaaaattgcaaaaaagtcaaaattattgaaattttttcgaaacctcttttttataagctagaaaacacttttgtgatttttctaattgtaaggctaatagagccttttaagagatcgaataataccaagatttttgatctggttgacaatgaaaaaaagttaaagttaaaaaacttgggttggcgccaaaatgactcaaaaaacatgaaaaaaagtgctttggtgttcagctgatcaattgagcgtgtcattttaagcaatatgtaaaaagaaaaggccaaaaaataacataaataaataaatatatacaaaaatgattaaacattttgaggggattaaaatgaaa

SEQ ID NO: 2268 - DNA, 3195 bp, Heterodera glycines
  unsure (1)..(3195): unsure at all n locations
catagtcggcccgctcgcgctccgtccgcgctcgccactcggccagcgtacgcatgtatttggcacggatttcctcctgccgcgcgttccatgccgcattagaactgaccgtcgttgctgngcatgactgttgtcagcattggcacggtggccaccggttgcggttggagtggcggtcgcggtgccaacggcgacgccagagccaccgctgctgccccatggcatgcaacggccaagcgaacacctgcgcagggggaaaagcgcggactgagtgccgaaagggcaacaaaacaacggcatttcttacattccttcccccctagcatgaattattttttaaataaattttccaagaattttttctgatatgaaaattttatgctttttgagaattttgtaattttgtttgcaaaatattaaaacatttgaaaatttctttatttattttttcattgctaaaaaataatttcgtcatggtgacagtaatactatatctgtacggtatttgccatatttttagagtcggtgccattttttcaaaactcatatttttgtatttgccatatttttacgccttttgaaaatatcggaacgattttttttctggtaaaaaatcccatttaaaattcaaaaaaaaaaaaatttaaaatcgacttatgcaaaatgccaaaaacggaccattgatttgtgccacaaacagtgccctccaaagcgggatgagaagtgatgatgcgtccgtagttgctctgaccgcaccacatcatgtgacagacgccatcttgggtaaaatttgggtaatttaaattcggcgtaaggaaaattcttttttggcattctgctttaccgtaatggtcatgccgtggcgacacttgcacatacgatggtccatgcatcagccggcactgctctgaaagaagaaacacttaaatttggttatctgacaatttgtacattttaataataaaaaaaaattaaatttaaaaatttattgtacgaattgccaacaaaattcaatgtttgatcagtgtttaatcagaaaaagcgatcaaaaattttgtaaaatccagaaaaaagggattatgagcccgctttggagtccttaaatataaaatattcttaaaattttgaccgtgggcatcgtaaacttggccaggcttcagcgattcggtgattggaagctgttcacgcagcagtgagcttcgcatgcagttgttttgacgtgcactgtaaacatggggagaaatggcaatttgagcaagggcgtaggcagggcggggggggggggctgagggcggtaggggtcaactccgtctcagcaatgttcaaaaagctataacttttttctttgttggccaaacttcacaatcatggtatcattcgaaagccctagatgtttagaagatatttataagctatttctcagtgattaatcagctctcaaaaaagttgtcagtttaaaaccgcaaaaaaggcagaattttcaaagttttttatttctatctttttttatagttcgaaattttctgtaatttttagtaggctaatagagcctgtgaagagctttccaatgatatcaagattgtttgattcggtcaataacttcaagagttatattgactcaaagttggctcagacggagttggccagacggagttggcccgttccggctgagggggctaaggcccccccccgaaacccaaaaagtaaaaattttcagtaaatttttttgaaattttaaaatcgagcttcagctccctccgaagccaagggtctggctacgcccttgaatttgaggggtgacctaatgccatttttgaaatttaaactgccctttttcgtggtgatcagtcccaagaccggccccgattttcttcgtgcttactgatcagtcccaaactttgtccctatttttcatggtgattactgatcagtcccaaactcttcccctatttttcttggtaaccagtcccaaacgttgtccaatttttcatggtgatcaatcccaggccctgtccctattttttatggcgattatttctctttgtgatcagccctaaatcctgtccgatttcttggtgatcaatgaattccacccagcagggcaacccactcgaggcgttggatgaacatctgataatcacgtgttgaacagcttgaccatgtcactttgccggggccaagtgatgcgctcattatgtgcgtgccgggacagtagggctcatcatggcgcatgccgaccgcgtggccaagctcatgtgtgccgatgaaagccgatgtgaagtccaggccttcggcaagcgtactgaattttaaatttgtgccctcgtgggactcatttggccgtgttttaatttaccaagaattccatgaatcgcacattccatctaaagggagaatggtgccaatatacatatgagtgccataatttaattattcggtggaatactcagccccgagagcgggggacggaggggggtaattagacgagaaaattgggtaccgaaaattcggcaccaaataatttttagatgaaccatatggaagagggcaaaaatattgtttattcgtaaaaataaaaaagtcatcagaaaggcgaaaaccacttactctgacgactgttaaatttgggtggaaaatttaaagtttttataatttcgcaacatcctgaactacttaccaagcctggcaatgccggaaattgatgtggcaccgtagccccggtggatgtcaaaaccggtcaacatcagcgcatggtcccactctcgggcacccaaattgcgctgatggcgacaaaacaggtccaggtagcgttgggcattgccctgatcagaaaaaagagaaaaattgatcactgatcagcgagcgagcagtctcacattttcgtgcaaatatgaggcgatggcactctgaaaagattgggataattctaaatgtgccaataatgaaaactgaagaaaggcactaaccggctgagtctggtacacttcgtagcgaacaatcctggtggaaaaatgtgtggaaatgattaaaaataattccaagagccagaaattgtgactcaaatttaaagggttttaaatgaaagggttttttcaaattttccttgccctctcagaggatggacggnccaaacactaagaatggagaggcctgtggaggcgaaagttttacgttttcgggtcgaaaaatttcgct

SEQ ID NO: 2269 - DNA, 5574 bp, Heterodera glycines
ttgatcataattgttttttgactctaaactttcgtcttttcattccacaatcatcatcatcacccaattctgtataattatttatccttcatcaattgttaatggtcattaaagacatcattttgtgtgtaaatgctgccaattcattcacatgtattctctcctctcctctctctttcatttcatgtaaaagatgcaatttgtctttgagagaatcgtcgcattacattcatttgcttttgcattggtcatcagggatattgtcgtaataaagactttttttgctttaaaaccaaaacttgaagaattggagcttttggagtccccaattctttacgtaaacaatgaatgggtcagcggtagagttgcacgggaccgggtcgggaaatcctggttttttcaggtcccggccccgatttttggaaaaacagaaatcccggtcccgggtttgccagtcccggcgggactaaataaacactggtaagaatggggtctgggtgagaaaagagaagggaattggtggagaaagagaaacttttgagtaaaaaaaattaacttatttattacatttacatcagttgttcaaattctaatgtggactagtggctgaccttctgactttcagcatttgtcacttcggatcaattccacaatgtaatatatactttttcctattttctttactaagtacattatttcaattgaaatttaattaataaatgatatttctacttaaaaattattagtttttctttttttaaacagcctagaaccacaaattaaccaaatatttagtcatttttaggcaaatatttttttgaatataagcaatttttcataacaaagtgcactcaaattttcaaatttttttcaaaaaaattttctcttgcgaaaagtcccggttattcccggtcccggtttttctcgcggtcccggacgaaaatcgaggtcccggtcccgacttttctggtcccggcaagtcccggtttttgtcaaaattcccggtcccgtgcaactctagtcagcggtattcgaggaacaaaaatgaaataaatcactgtggacggaaatgattaattttaattgccaccaacagacaaaagaattattgactcattaatcaggtaattaggagttgagcatttcgtaaagcgacactgtgaatgagtatttacttttgagtgtaatgttttcgctccaacggaactgaaaagggatgcgtagttattattgtttgacgcgcctctttcaattagtgggccattagtgttaattaattaattactcaccactctaccaattattattaatcgtcatttattagaagaaaaaaagcgcagtttttatttttctgaactaacttcctattaaatacgtaccattttttaaacaattaaaaaccgtatcaaattttatacagtacatttcttggttaattaaagcggtcattagagctcattaatttgactgacaatgcttttgccatcgtttaaccgtgccggattcgttggcctccttttgctttgccaattggccttggctccgtttgccacggcatttccattggcgacggatgcgcagcgaatggccacagaagaaagtgccgtcgttaaaactcaacgaaggcatgaacaaagcaattaaaagggggccaattatcggcttcttttggtttagccatcgttcgccgggcctttggaagaatgtggcggtgggtgccgcgatcggagttggcggcgcgttgctttaccacgcgtacaaaaagagcaaaagcgggcagacggcggcggcaccgacggagggcaaataatttaaataaatcgcaaaaatccaatgaatggcactgattaatgatgaagccttattcagatgcaggcacagaaactgaacagcccgcaaatttgagaagaggctaaaggcgcagaagaagaaaaaaggggggggcaatttggcgaaaggaaaactcattaagaaataattaattaataatctacgacggcattcttttaactgtgagtgttttatcggtttttactttgcataaatacataatgtatcatttcaagtttaattgttgggaaaaagagacactgaacggtgccgggcattatcggctctttcccaacggcactcgttttttgccgagcaaataacttccaacttctcactcgttgacaatagtgctgcgcgagacagaaaatttcccggaacagagacttgacctcgagaccgagaccaaaaaaaacccgatacttttctcgagagcgagactctcgagcagcactcctgacatataattttgaaatttgcgcaaataaatgatattttaagtttctttgcctttttcattttcaattcttcccaaaattgggcaaacaaagcgaataatattaaaaaaagaatggacaaaaaataatttccggttgaagtggcacttttaatgtgagtgcccaacacaaagagagattatttatgtgctgttgccgtccgtccgttctttctcacggccttttttcgtgccgtcgtcgaatgccccggggagggggggggggggggcgcaatttgccaccgattttcccaaaatgctcacatttcagcagcaattggaactcatggggctgttcgagagcattgagtagaaaaatttcccaggctttttttggggtctcgagcctgattaaaatattaggctttgaaacagccttaaaatgttgtaaaacccagaagaattcactatactattttgttgtctctctctcttttctcctctaaccatttatcacagtctctccaatgtctgaccatttagtgagtgtctactatgtactatctcttctttcctttcttctctcctcctcatattctccttccttttttatcttttccttgcaactgtatatcattccaatggtcatacacacaaaacataaataggtaaatggtgtttgattttgtagttctcgaggtaaagtccgacctcgagactgaccgatgaaacggtgagtcattcgtctcattctcaaataaccctaattaaatcaaatacatttataaaaaaaattattaattttttagaacatcaattatcttgacaaattgactcccctccgaattctttgcaaattactccttttctccccaaaatatggactttaacctgaaaagattggccggggaggcgtccgggatgttcagccgagccaaacaagtgccaaaaatattgaaaaatgtccatttttgaaaattaaatttcagctaaccgaggaaaagctattgaacgcggagaagacggaacttggtaaaagtggaaatggaaaattaaaattgcaaaatggcattggcattttcagaccctcatttcgagcaattgctcgccaaggcggataaaacggaggaacagtcgaagaaactgttgtccgccatggaggcgtatctgcagccgaacccaggccagtgccaatgatggcgggcacttttgttgcaaaattactgttttttccgattttagccctccgaatgggcgacctgttctatgaaaagatggaaatcacttcgcccgcccccaatcgctcaaacactttggaataccttagcgaggcgatgcaggtgaaaagcgattgttggaaaactgtgatagaaattaaattaaaatgtcgcaatttttaggaggctgcccaatcctttggcaccgaaacgccattcggaggtacaaaaaatgggaatgattttgggatcggcgggagagaaagaaactagcagtttttaagtgcagttttttagatttttttgtccaaaatgaccaatttgggattttttagattctaaaacgacccaaattagtggtttttagtcaattttgttgtaattaaggtgctttgcaaaaaattgcgcagacggaagctaaattgggcgctgccgaaagggaaatggtacaaacgacggccgggcaaacgctggtgccaatcaaacgctttttggagggcgaaatgcgaaacattcaggcaaaatgccaaaggatttaagggccaaatgccaaaatatacgcaatttgcagagagagcgccgcgttttgcagaagaaacggttggatttggacgcggccaaaagtcggctgaaaagggcgcggactttggagggacaagcgaccgtaaaactaataaataattaataaaattaaatggaaaataaaatttaaaaatgaaatgtttaaagaggacagagaccaattatttgtttgttgaacaggtgggcaaatgcaaaaacagtgaatcttttgtgaatgtttcgtcttacattttgaaaatgtttttcttttttgtgttgtcatttgtatgtatttttggttgtttttttttttgctctctgtgaattgccggagggataaaacttcattttactttaaattttctaaaattttctttttttaaattttttagtcctaactttttaattggtcatttaatttttcatcaagagctaaaacttattgtcctttcgccccattaaattcgaaattattttcaaataaattatagtaataggcacccaattcgggcatttttttcatttttccattcgaattcatagatattttttcaattttcaatttgcttccgttttccaggccgaggccgaccttcgcgttgctcaggccgagtttgacaaacaattggagattttgcgcattttgttggagtcactgcaaacggcacaagtcagaattggcattttcgatcatcactttcccatcatcaatggcattttgatgccttttcagaaccaacagtcgaagcatttgttggaatttgtggaggcccaggcccaattcttttccgcctgccaacagcacatggccgacctgaagcgcgagatcaattcggccagcggggaacggtaaaagggtggaaaggaaaggatggcattccgtgccaaataatgaaatttccttttttcagcttcagatccaacggaattaatggcggcggtggcatttgaggggaacgaccgacggacagcgaaagaacggccgagggaaatgccgcaaagcgaagaatcccccaaaaaacgcattattttaccaataatataaatgagaaaatgaatttatttaaattatgctttcatttcattttatacactgactgctaattgcatataaacgaacgaatcctttaaatgaataaatattctatttcaaataaatttattaaaaatgaaaatgttcagttaaatttcatggattgggctatgtaaatgtttaattattaaaataaatttaaaaataaagttcgtttcaaaattgcatttaatttgggtgtttaatagccgattttcccgcaggggtgggataagcgttaattgaccaattatcgacggattggcggattatttacattttcccatgtttaaatacctatatgatcttttcaacgctcacaaatgaatattttgttagtttgattaaataaaatattttgttttatttttaaaaatatttccgcattttgcctgagtaattaattataaattaaaattatggctaattaatttcatttttgggtttcccaaaatgac

SEQ ID NO: 2270 - DNA, 1491 bp, Heterodera glycines
cacaaaagcaaaagcgttggggggcggcgggctgaccggcctcggggcgacgatcatttacaacgcgttcaaaaagaaaaaacatgaagcagaaaattgaacttttcttgatcatgttgatttatttgaatgaagaattgtgccaatttccatgaccaatcgcaacaaattaaacaattaattaattagtcaattatcaattataattgaaatattttgcgaggtgaaagttggtgaggaggggctaactgttgtccttctctgctcaaggcgaagttcgtggctctctcccccccccccccccattttggcccaacaataaataataaatcactgtttaataaactttccccgccctaattgttccctcccgtcaaatcaaaacccaacctgtttcttcttccttctttccttcctaaataattgttgatgggtaacggagacgaattgtccttttcagtcattttaaataaaaaaaatgacaaaattttgccgaaaaaataaactgaattaaattggatttatttttgaagctcttagtttgccatgaaaaagcttcttctctgtgtgtttctgctgcttcagtttctgctcgccaccgatgcgatttcagtgcaaagcgaagttggccaaccattttttgaccaacagagcgaatttggcacagtgccattgagcgaaatggaaaagtgacaaagaaaaataaataaataaataaaaatttaaaaatttagacgtcgccgtaggcgcttttccaaactaaaagccgccgccttgggagcagctgccggattgggagccgccgtcattgccaaacacgcgggatgaagcggaacgacggaagggagtaaaagaaaggagccgaagatcaaaaaaataaattttattttgtaaattagatggatttgtaaatttgtttaaaattgcttaaatgagaatcttgagaattaacttcctcatttttggggtgctctcgtctcgcgtagtcaattaattctcgaactcaatcttgacttggtttgctttttgcctatgactccctctcgccgttttccgtaacccttcgttagcaaatgatccaatcttttgcggaattgtcgtcctcgtgtttcttgctcatctaattgctttgtttaattgctctaattaattaattgactatgaaaattgcgttaacaaaagttgaacccgcccattaaaaaaagtaaattgtttaaggaattaacaaaaaatgagctcatcattcatttatttattcattaactgcaaaaatagatgactcacaccaaatttctccactataaaatgcttttattttcccacaattttcaatcattttataattttattgcttaattaatttatttaattttcccgacgcttgccttaccatgaaagaatacaaccaaaattgtccttaatttaacccggttggcaattggcattcgcaacccgagaaactccgtccctctccccctttcccattcactt

SEQ ID NO: 2271 - DNA, 1779 bp, Heterodera glycines
ctttttttatattatatattattaccaattgaaaattgaaggcaaaaatgcgtttgttcattctgactttgctgcttgcccaactcttttccgcggtttttgttcacggcacttccgtgccaatccaaacccaattgatgctgggcggggggccggcagcggcgcagggactgccgccaacgcaaacgaaagcgtaaggaaaagggagctgcccaatattctcggccatggtctcgaaccaagaaatttctcgagtttttcgtaattcaatttcgaaataggaggcattttcagtaccgagtctcggaaaattcgtctcttaagatgacataggccaaacgaatggaataaaagcaaaattcagaattcgacgacgaaaacggggcattaaaacgtccggactgatcgccggggcactgatcggcacgggggcagccgttggagcgaacgcatacaaaaaatacaaagcgaataagggttaagggagcggaggacagacaaagagagagaaagggacaaatggaagcgacggagaattaattggaagtgatcaattaacactaatatgcatcattaaaagaccaattagcacacaattgacatttattatgaaccacatttaaaatcattttaaagagaaccatcacagtacaatattagtttctttgaacgtacaatgaaatataacttactgtaccgtaagttagtgacttaaagaaatatttaaatttgaagacattatgccaaaataaaaagaaaataatttttaatttacctagtttcgattttgtaatttttattaaacttttaaaagattggttggcttcaatttttgatattctgcaagttgagtttggtaaataaattaattgaaagggaggatcacaaatgttggctgggattttcttgcggaatcccacgccgttcccgtaaaatccctttatgacaaaaggagcacattgcagttgcatttttaatgcttatgtcatttttaattttcactcttcagctaaaatgaaacgtaaacgtacttctaatacttcgagtcgcccaattaagcaacagtccgttgcccgttcttcgggttccttttttacgccttgggggcagaggaaaagtgcgcgctttttgaagatgggcaggcgaatgtgggaatttgttttattttttccgtcccgtggttggttcactgtttttcttcagttacctctgcaatgatgttttgtacgacgttttcgccgacattgacattgttcggcttggccttggcattgcccccgtctccgctcacttcgatgctttggtggacggttgtttcaaggttctcgtaattaatgccattccatatttttaataaaaaatggtgtaaggctggagaatctgggctccaaaaaaacattttctatagtaaaaggccagctcgccggaggtttccggggctttgatcacgaattgatttcagaatttcgacatttttaattttagaacatagatttcctgaatttccgcccgtgtttttagaccaaaaagcgcaaattgcgacgcctttggatccgtcaggccattctcaccatgcgaaggtcgatccagcgcaaaactgacaaggccgaattggtcaattatgagggcaaacaattgccatttgccaaggcgccgcctccgaatggaattgtcggcttcaaatccatcagcataaggcaaggaaattggtcaacaaacagcaaaaaacgcatttattgtgaaaaagcacaaaaatatgcacaaacgaccgataaaata

SEQ ID NO: 2272 - DNA, 2125 bp, Heterodera glycines
atatggacaaacgaccgataaaatctttttttcctttaattcattcaaaaattaatgaaaaaattcataacataacccgaataaggagtggtgggccaagggggaaagtgccaaacaaaggttccccttttcaattacctcgatgctgatgccatgtcatttttggagcacagtcagcccctcttcgaccgcgtggacatctttttcaaatgcgacggagccatcaaagggcgtgggaaggaatttgtccaaatttggccccttttccgtgccaacatcgtcaaaatggctctcagccaacgtttgttggttcgcctgcgccgtctctgtggcccggccgttctctgcgcctgtgccaaccttcgcttcgtcaacgtcgatgatgaaaactttgccatgaaatctccggcggacgacgccgccggcgcttcgccgggccaagcgctgctcaaatggctctacacaccacgggaggacgggcagccgaaagtgttgacgatgaaggagaagccgaaaaagatgatggacgacatcgcaaaggcaaaaaagggtctcaaaaagcgaccaaatccattgggttttaatgccttttaggactgaattcatacatgaaaaaaagggggagggtgagggtcaacacgccaattttgcgaatgcgtccggccatgtatcgaagaagttttttttatccttttaaaaacgctttttacggcgccctattttccaaaaaaacttttggggaaaggggtctgtaggcgctgttggaatttttttttttgaaaagttgactgattttttaacaaattttatccaaaaaatgacccatttttgcgatttgaaacatttttcgcgcaaacatttccatggtaacacttatttccatgtccctcctttaaggaattctccactgccaccactcccgtcagtttcattgtccgctttcgcaaatcgtcctgggatgcctacgatgacgcggccctcaagccgtttgagctgtccaacgaattgacgggtgagcgactgacacttcgccatgtcatcgaccagcagagaaacgacctcggccttcctgctccgcctccaccacgcccttctaacaataagaagatgatcacctattcttctgttgtgtctcgccgttccaagttcgacatttggctgttggagcgcactccgagcgaaagggacgaaaagcaatggacgcattgggctaatgaggggccattcgacacgtgctattgggaggaggacaacgtggtttatgtgaactttgacgagcgacgccaactcgggtgggttcggattcggaaaaggaagggcacaaatgctgtgatggcatagtccgtcttgatctattggggccactggaattgggtcagacaaacagtttattgttttgtagttgagtcttggctatggtcccaaaggggggatattaccatggtgtgaccggggctggctgtcaaaacatttcgggcacccgaaaagcgtggaactgggtcgcctccgattaaacaaacgtcgattacacgctaattataatagacttttatacccgttttacgaaaaggtcttttgtcagttgagttatcttttccaggccattatggaagcatttgacaattcacttttgacgtttccaggccgagaatggtccgacgaatgatgtgctgctgttatcgacgggtgcccaatgcgccgggggtggcgcccatttaaccgacaagagcttacgcggcattctgatcccttatcaaagtataaattgatgactcttttatgtgagccttctcattcctcaattgtctagtaaatgtattttatgcttttggtgccaatgcatccgcaattatcatttgataaaaacaaatttatttgttttgtaaatattttcaatttgtctcttttcctccgttttaccatccgaactctcatccccccccccctcactttccaatttccaccgcattttccgtcccattgatcatttgatatatttatttatgcaaatttggtacatgattttggtgtccccccccccccaataagcaaaaactgttcctcctccgcccgccggttccatcccccgcggcgatttatcccccaattccttcgaccaatttgg

SEQ ID NO: 2273 - DNA, 1431 bp, Heterodera glycines
tttagtggtggtagccgatcgacagcgacaaatccgagtaaagcggcgctcaacagccgatccctccccccatcccatccgatcacttagctcttctttcccccacccgatcactattacccccccccctttccccgtcccgtccgactgatcactcactctttgtccacccatcccttcgtttttcgcctgtccattcgatttgtcatcgcttcgcgcggcgcatcgttcaaatgggcgggcagcggttttttgaacgattgatcacttcttttacccattttaggctccttttgtttttttccaattaataagccgcaaaaggaaaagcagcaaattgcagcaaaaataatttaaaaaggggaaaaagacgaaaaaatgaaacgccactgaagccgaccccgaaaaagtttatttcgttcgtccaattgaacacactttctgaacagagacagaacaagcaaaaagctgacaaaacaatgggacagaaattgcaaatggagggaaatgtgtggaaaatttgatgattaattaattaattaattgcttaaagggtaattaacggcaattagcggggcgaggcgaaagcaaatgacagaaacgggggggggggagagagcagctcaaagcaaatcgttcggtgaattttcaatttattccctccaatttgttttcttctgataatgtttgtcctccctccctttgtcggcaattgtgtcgttgctgtgacacaacaaacaccgactgatcagcgggcaacacactcacaactgatcgcaatcactgattgagttgagttgagttggtccctcccccacccattttcccctttttctccccaaaaaataacttttcccatccttttctctcctttttatccctcttccctccaacagtgacattctccccccccctctccaattttctctcttttcccccatttttctccaaaaatgtctttccccccccccccttctttctccctgctgaacttcgctcttcttccaattgacgcgacctttcaaatttcattatttgtaacttaaattgatgcgcagagtttgtgctgtccgtccgtccgtcttttccccccccccccccaatttttgttttgtgcgtcgtccgttcgcatcctccgctgcttctgctgcgggggcattggcatccgaccgcgcggggtagggggcacgggggatggatgacctccacccacccaacccttttcattactcccacacacacgcggggatgaacaggggggggggggggaatcagcggcacggggacgcgagagtgagcaaaatattgaagcgagagaggaaagaaaaggggataaatttggaggggtgggcgattggaaatgagggtaacctcgagagtatccatgccccaatgctctcggtccccctttctcccctccccctctcccct

SEQ ID NO: 2274 - DNA, 1266 bp, Heterodera glycines
  unsure (1)..(1266): unsure at all n locations
ttgttgtgtctttgtaaaaacttatttcacnacacacanaataataaatgaaaaggaaataagaagtggtgagagaagtcggaagaggaatgagtttgaataatgaatggaagaagagagagggagaggagaagcgaaaagtatttatgcacttggtctgtgggagggcattattgattgggtacagagtacaatgtttggaagagaaaaatgaatgcataaaaatataaataaataataggtcagtgattgccctacacaacacctccctctcttaaaagtctgatcactggcgaatattgtgccgttgtcccgtcatgcttggactcaggaaacggacacgttttggaactctttctgatcgtcgaagcactggtgtttgctgttggttccgttcttgttcttcgttctgttcaaattgatcatggtttctttcggctggtggtgttggtgtgacattttgctgaatttgtggtgctcgaacgggtgatctgttcttcttgggctcttcatcaaaatttggccatgtttgatcagtgcccaatgcttgtgtgagtcgcatggcatttgcatggcgagtgacaattctgtttgcgatttgtggggaacgaatgccaaaaattaacccttttttggtgacaacctccccaaataaccacaatgtttttccatcacggtaattcacaaattgcaccttgtcgccgatgttaaactctaccctttttgctccatgcttcttatcaaactgttgtgccatgcgttgctgatacgggcctcggaagaatggactcggccgttccggtttcataagagaaagtttggtccggagtggtcggccgaggaacaattctgctggtgaccgattgtttaagactgcaattgggatggagcgataagacaaaagtgattgcttcaaccaatttttatccccactgcatttcttcaactgtcttttgaagaaatcaacaaacttttcggctgctccgtttgactgtgcgtggtatggtggcgaaaagaggtgacaaatgccgttactgtcacaaaaatctttaaaatgngatgaactgaattgaggaccattatccgaaactagtgttttcggaatgccaaatcggtcaaaaagccattgtaattgttcaataacatgtgtgatgacgtgtggctaagcataaacacttcgggccaccgcgaaaatgagtctacaattaccaaatacgtgtttccatcactacaaggtcttgccaagtcaatgtgaacacgttggaa

SEQ ID NO: 2275 - DNA, 2596 bp, Heterodera glycines
acttgaaaaaatcgatttttttgttttcggggcagtccccccgaaccgatgcgcccagatttatggggagaccgaatccttcgggaatagcttccctatagcctgtactttaattctgcgttggatttttactccccataattgtttgagtaccccaaacggacacttgaaaaaatcgatttttttgttttcggggcagtccccccgagccgatgcgcccagatttatggggagaccgaatccttccggaatagcttccctatagcctgtactttaattctgcgttggatttttgctccccataattgtttgagtaccccaaacggacacttgaaaaaatcgatttttttgttttcggggcagtccccccgaaccgatgcgcccagatttatgggtgttgtgtctttgtaaacactttattttcacacacaacaaataataatgaaaaggaaataagaagtgatgagagaagtcggaagaggaaagagtttgaataatgaatgggagaagagacgagggagaggagaagtgacgggtatttatgcacttggtctgtgggagggcattattgattggtacagagtacaatgtttggaagagaaaaatgaatgcataaaaatataaataaataataggtccatgattgcccacacaacacctccctctcttaaaagtctgatcactggcgaatattgtgccgttgtcccgtcatgcttggactcaggaaacggacacgttttggaactctttctgatcgccgaagcactggtgtttgctgttggttctgttcttcttcgttctgttcaaattgatcatggtttctttcggctggtggtgttggtgtgacatttcgctgaatttgtggtgctcgaacgggtgatttgttcttcttgggctcttcatcaaaatttggccatgtttgatcagtgcccaatgcttgtgtgagtcgcatggcgtttgcatggcgagtgacaattctgtttgcgatttgtggggaacgaatgccaaaaattaacccttttttggtgacaacttccccaaataaccataatgtttttccatcacggtaattcacaaattgcaccttgtcgccgatgttaaactctaccctttttgctccatgcttcttatcaaactgttgtgccatgcgttgctgatacgggcctcggaagaatggactcggccgttccggtttcataagagaaagtttggtccggagtggtcggccgaggaacaattctgctggtgaccgattgtttaagactgcaattgggatggagcgataagataaaagtgattgcttcaaccaatttttatccccagtgcatttcttcaactgtcttttgaagaaatcaacaaacttttcggctgctccgtttgactgtgcgtggtatggtggcgaaaaaaggtgacaaatgccgttactgtcacaaaaatctttaaaatgggatgaactgaattgaggaccattatccgaaactagcgttttcggaatgccaaatcggtcaaaaagccattgtaattgttcaataacatgttgtgatgacgtgtggcgaagcataaacacttcgggccaccgcgaaaatgagtctacaattaccaaatacgtgtttccatcactacaaggtcctgccaagtcaatgtgaacacgttggaaaacttgtgttgttgttggccatggttgtagcggttgtttttgcggttgttttgctgcttcttgacattggcggcattttcgcacgatttcttcgatgtcggaatcgatcgaaggccagtacacaagagttcgcgcgagatttttcatgcgaacgattcctggatgtgccaagtgaagtgccttcaaaacgcggtgcctgagtgatgggggtataaccgatcgaccattaaacaccaaacatcctgaaacaattgatagtttgtgccttcccgagaaaaatggtttgatttcgggattaatgccatggtttggccatttgttttgagtaaatttgatcacttcctttatcaattcgtcgtcctattgtgctgtttgaatttcgtctactgtcacctgagcaatgaccatgtcttcgcttgctgcggaattgcgctgttcactgatcaaacgactcagtgcatccgcctgtccagtgttgtcggtgcgaacgaattccaagctgaagtcataattcagtagaatcagtgcccatctctgtagacgagacgctgaaaaaatcgggattccgtttttggacccaaaaatccccaacaatggacggtgatcagtgcgtaaaatgaattttcgaccaaaaatgtattggtgaaatttttgaattgcgaaaatgagtcccagtccttcattctcaatttgcgaataattctgttccgtctttgacaatgttcgggcagcatgttgaaaaactttttcttttccgtcaggaaaacggtgagaaattgttgcgccgattccaatgttgctggcgtcagctgtgacaataattggcaaatgcgggtcataatgcgttaatgctaaatcggataaaaggattgcttttgcttgatcgaaagcttcacggtgcttttattattttattttaattatgcattactggataat

SEQ ID NO: 2276 - DNA, 4197 bp, Heterodera glycines
  unsure (1)..(4197): unsure at all n locations
cgcttgctgcagaattgcgctgttcgctgatcaaacgactcagtacatccgcctgtccagtgttgtcggtgcgacgaanttncaagctgaagtcgtaattcagtagaatcagtgcccatctctgtagacgagacgctgaaaaaatcgggattccgtttttggacccaaaaatccccagcagtggacggtgatcagtgcgtaaaatgaattttcgaccaaaaatgtattggtgaaatttttgaattgcgaaaatgagtccaagtccttctttctcaatttgcgaataattctgttccgtctttgacaatgttcgggcagcatgttgaaaaactttttcttttccgtccggaaaacggtgagaaattgttgcgccgattcctttgttgctggcgtcagctgtgacaataattggcaaatttgggtcgtaatgcgttaaggctaaatcggacaaaagaattgatttcgcttgttcaaaagcttcgcggtgcttttcattccattgccattccactccctgtttgagcaattcatccagtggtgctctgatttgatggatgtttttgatgtactttccatagtaattgattgccccgaggaatgatcggagtgttgtgatgtccgtcggtgctggcatttcctgcagtgctcgtgttctgttttgatcaggacggataccatcggacgaaacaatttgacccaaaaatttgatttccttaactaaaaatttgcatttgtccatttgaattcggaacccgaattcttgaattcgcttaaaaaatttaaaaattgttgaaaaatgctcgttcgctgtgcttgaagcaatgatgaagtcgtccatatagccaacaacaccaggaattccggctgccaattggtccattgtccattgaaaaatgcctggtgcgcttttgattccgaatgccaggcgttggcattgataaagtcccttgtgagtgttaacgcctaagagttgacgcgactgttcatcaacgctaatttgcaaataagcgtccttaaaatcaatttgggaaaatatttttgcgccgtttaatttggcaaaaagtttctcaggccgtgggagcgggtgatgatgtggttcgagtgccgcgttgagtccagtgctaaagtcgaaacatatgcgcactttcccatttgctttgcgcactgccacaattggtgcggcccatctgctgtagtcaacttttttgagaacacccaactcgatcaatctgtccaattcggtgtcaacatcattttgaacacccaagggtaccggacgtgccccacagaaaaccggagttgaacttcccttgagtttgagttgtgcctgaactttggtacacaaccccaaaccattggcgaacacactgggaaattgtgcttgcaatttgtctttgagctgttctgacgtgagctcacagttgttgatgtgttgaatgttgttcgttgtatggtcgaatggcagtgttgttgcaacggggcggttgtactctcgctcgaatgcacggatccaaccaactccgagcaaatccagggagcctttgtccgtcacataaaagtccaaaaatagttggcatccaccgcttaaagcaacataagcttggcctttgcctataaattggaaaatgtcgcccgtatatgatcgaccacacaaatttgttttgaataacttcggctttcccagcttatgccatgttacctttgtcaaaattgtcaactttgacccggtgtccgcaaccatttttacgctctttgtcccaaatttcacttcctgttcaatgtaaggctcgtgttcgactcgtggtgttgaccatgagcattgccgttcagttggcgtaatgtgcagacactcaactacattggtgtttttgccaaaattatttgatttgggtttccgagcccggcaaatggttgaaatgtgcccggtcttaccacaaatgtgacacttaaccgaaatcggataccggcagtccgaattccaatgttgaccaccacatcgtgtgcatggactgcttggaaatgtccttgattgacgcgttccaccatgcggggtgtttgagttgttgtttggttgactggaccacgagcgtgtgcgcgacggtgtgcgtgtgtgcgacggcttccttttctttggaaaatcctgaattttatgtggacgaatttggattgcattggaattgaaatcctgtttgctggaaagtgcggccgaactttggcgaagggcaatgacttccttgcactcggacaggagttggtcgaatgtcgcgttgttgtccaacaatttgatacaccgatgtcgcaactccatgttgtgatctcccaaacctgtgacaaaaatgagggatttgatttggtctttagtcaggtccagtttcgatctttcggccatggcattcactgttgagccaaatgcgagaacgtcttgattttgtccacacttaagctgaaaacattcgaagcgcttaataaaaattgatttgatttcgggaaaaatttgtcgcaactttgctaacgtctcattcaaaccgacttgatccggtgtttttggttgtatgacttccgtgtagcggcggtactcgtcagggcccaacttactcacaatgagtctcgctttactctggtccggcatgtgctttccctcctgttcgacaaaaggaccgaatcgctcgtaccattcctcgaacgtgtggttgtcgtctggactgtaaaggaattccgaaatttggccactcaatttacaaaacaagtccatatcagaggactgtgcttgattgtgctgtccttggccggtgtttaattgcatgttttgtagcaatttgacaaattgattttgttggtcagccaaaatggcttttaattgttccgaggtgattgacatgacagagagaatttgaaattaaatgagagtgatttggccgtcagagatttaaatttgatttgtggttaattggcaggcaagttcggtgataaggatgacggtgattgatatgtgaataggaaaaagacaagcccttgaattgggaagttgcgaatttgagctgcacacagcggtcgctttgacttgtgtgttcccaattccgactttacttccaagagtgatcacagaggctttttacggcttgcgatttcaagaaagccttctccttaactgtttacgtaagcggtctacttgtcgacttaacgatcagtaaggatgtgttacgggaaaaggaagggcgaaatgagtgttcgaataaaattagaattacagaatattcgacttgctgccaattgctttttgatgatattaaaaacctaggctgactgcgccattttgttgtgtctttgtaaacactttattttcacacacaacaaataataatgaaaaggaaataagaagtgatgagagaagtcggaagaggaaagagtttgaataatgaatgggagaagagacgagggagaggagaagtgacgggtatttatgcacttggtctgtgggagggcattattgattggtacagagtacaatgtttggaagagaaaaatgaatgcataaaaatataaataaataataggtccatgattgcccacacaacaatggggagaccgaatccttccggaatagcttccctatagcctgtactttaattctgcgttggatttttgctccccataattgtttgagtaccccaaacggacacttgaaaaaatcgatttttttgttttcggggcagtccccccgaaccgatgcgcccagatttatggggagaccgaatccttcgggaatagcttccctatagcctgtactttaattctgcgttggatttttgctccccataaatgtttgagtaccccaaacggacacttgaaaaaatcgatttttttgtttcataaatatttttttcagaaagtgctctaaagcgcaccaaattttatttacaacttaattttagcactctgatgctttagtatcaaaaaggaagatggagaaaaaatttttccttatattttggttatatcgttttgcttttggtggggtgcttggaacagtggaatcatgcgcacccgtccgatctggcaagttaagcaacgattgctgactagccaaaaggttcggtgccgtgatgaaacgaaccagcactgcttaccccgcggcacccggcacggtcccccgaaggaatggatttaattaaattctctccttcggggatttttttc

SEQ ID NO: 2277 - DNA, 6710 bp, Heterodera glycines
  unsure (1)..(6710): unsure at all n locations
taaaatcaaacgattgttntggattattttcccaaaaatattttccttaaactcttgaacatttcccgcccaatttactctctactcatttgcccgttatcatttcatttgggagtgatctctcgttgtccattcccacccaattcattcaacaaacaatcgcccttccctacggtgctgttggaattggagtcgcaatttgaacaaattgtcacccaactaaaaaaccacaaaagaccattaggaacaatcaaacactaattgccatgtccatgacgagaaatttgaaatggtccttaatcattccccggtcgaccaaagcgcagaaatggcccaacttcgctttgttggccgccctcagcacaacgtaatcctttgagaacattcggtgggaaaaggattaatgaatgggacgaaaaagtcacgacaaatggccaccatgttcagcgcgttcaatgccgccattccgcacacctccaatttggcgagcgaacatctctgtgttaatatgtgactaatgctttgtaattgccctaatttggtcattttcttcccttttccactaactattcccatttttgcccggcacaaaataccccaaaagatttctcactcacttccgtccctcgtccgcaacacctaaatttaacattggcaagtccgtgcccatttccattgttggcatttcaaagtttagtcttcctctcccatttttgtgttttaaatttgatgaaaatgaatgttttaaatacataaaaaagggagaacaatttgcccaatcatttttaacttcaaaacatcaaaatttgtgaacaacaaacaaataaagttgatataatgtcaataacaatgataaatggtcaatttcgtccctctcttcctctcgccgtcttcttttctaaaagtccatcgccccctctttttctcgccgtctccactacccgatcatgtctctcttgcgccccctgcgccgaacttcgtccaatttgagcagcaccggtttggcattcgttccgtcctcgtcccctccgcccccttctgttttgtatgcgtccaaaatggcatccatcattttgcccatgccaatgtgcgcactgcgattgttttctttgtccatttgctcaccaacattgtttgtaatactcacctccgaattgccctctccagcacatacaaatccaccgctttgtcctccggctttgacgagaattgggccaacccaaagtcaatcagtgccaattcgactggtccccgttgagtcaggacgagcacattggacgtggtcaggtccccgtggatgagattggcgtcgtgcattgtcctcagaattcttccaaattcatgtccaaattccgccaattgagccttagggagggagaaaatgaatggcaccaacacacagatttttatgtaattattataatcataggaacgtgggaataacccttcccaaaattaaaaagaaaaatcggactaaagtttgacagctgcgtaaatccaaataacaaaatgtttgttaacatagccccgtccttttgtcatggcattagtgcttcttctttcactactcactgcaaattgttcggcattgttcgacgccgattcgtcccgctgcaatttgtccagaaaatgttttgcggtcggtgctctgtcgctgctgccagacgagcaaattagttcgaaaattatccgatttttgagcgggtccacgaagaaaacggatggcacgcgaatgccaatctgagagaaaagcagcggcaaagttatgacaaagcgaacaaagtggaaaagttcaagcagtcccccccccccccgccaaggcacctcttggcatttgaggatggccttcagttcggcccgcgtcctctccttcgccagccgcgcgtccaattccgcgtgtctgtaccgcttcacaaaccgctctttcatcactgcccgacgacggaggaaagtgcacgcgaacagtcgcgcctcggccccctggcaaaagggcgtcgtttcccattcgtaaagctcacaatcagtttgggacacaatggcatccaccgtttctgtcttctgtagcgcaacggaagcaccttcggagtcggaagagacttcagcctcaatgcctaaaatgggttttgtgtgaatttcagggatatcgcccagccgaagaaaaatgcaataaaccccaaattatccaacccttaaaaccaaataaatattttaattttgccctatttacgattcggtcggtccgtactttctttccccactttttcattttccgtcccttctccgttttcctcatcttcggcttcttcgtcttcttctgatgacgaagtgggatatttgactgtcctttctttgctccgtttggcttccgcctcaattttttccatgaattggcgttgacatcgaatcacttcgtcgcccgatgagcactgaaattgtttttccgataaaacttaagaggtcccaaaacattaactttgcgtaagcggataacacttcggcattcagagccaaaaagtttgggccccatttgaagggtgccaacacgcatttggccgcttcttccaagccgacaatgaaaagggcagcggcgaatgcttccacacaactcaacttgaacggcatggcgtagttgaccgggttggcagccaacaaaaagggcagtaaacgatgttcagacccctgaaaacagaaacttggccaaaaccgtgtggactaacaaagcaccttcgccttgtgcattggcgttgtgtccaggcgattccacgaacagtcgaccacggcgaggcctttggccatgaccaatggtcggtcgacgggtgaaatggtgacggatgcggctggagtgagcaaaaggccgggaaaacgatggctgaaccgttgcacggagacgagcccaacgcggcacagcttgcggcccgaacagcgcttggggtcgcattggccaaagtcgaacatggccaaccgacgggggaaaagggcgggcagagactgagggtgaagaaagaccaagaaataaacaacgcaaagcaactgacgaaaaaacggaaaagtaggcgccttggccctggctaccccctttcagacatatggactcgagctgaaatttgccagtttcgggttggcttttcgaaaaatatcaggactgagaatcccggcaattgcgattacgtcagtctcgttcacccatccttaaactctccctccctttgcccaccttttggtgctcctccatctcttcgcaactttctccccccatttcttccgtcgtccgttcgcttcgcttttcttcgtcgctgtccccccgctgtgctttttccgtccctttgctgctcccctcgaactgctcgccgtcgtcgtcggtcgacaattgcctcatttcctcgaccattcgttgtcgtccatgtcgcttatttgccttccctttcattttggtctaataaaaataaatatatgcaagaaatgctttttttaatatcaaattgacaagtttcaaatattttttaattaaaatttcaccctttccaataaaataatttatgcatcaataaaaaactattatttatagaaacaaaaaacatttcgcttttttccctcagtctttttccggcgttctccgttcagttttcatcgttctgagcatttctttgtcccgtcgatttggcgagcgacggcgttgctccttctccaaagaatcctaaaatattgcgccggtctaagaatttgctgattggtcagaataaatcaaagtgaagttggactcgagttttgtcccagaaaaagccttttatagacatttattaggggtaatgaattgttttttattgaaaaaagtgtggaccccaatgccaccaaacaaaagtcccacgactgactgcttgactcttttcaccttttctcgttcgctgctccgtctctccgttttgacgtcctttcggctcggcgaccgatggtggcccgaggaggacgaatgctttttgtccttctttttcttcccctctttgtctctgtgactgctccgctcctttcgcttctcatccttttctttgtgccttaaataaccaactctttgggtttgtccctttaaatgagtccattggtcaccgcaccttcgacccggcgacggactgcgacttttggagcgcgagcggcgcttcttccgacgcggcgagtcattgtcactgaaaaccaaagagcattaagtggtagaaaacaacgaatagatttacgattcagggcttcggtccttgaaaaaggggcgtccgccacctctgaaccggtcggagtggtggaaacgaccggcaaaaccgccgccgcctccgggaccgccgaagggattgcggaaggaatggaaaagcggcgcaggacgaatgccacccatttgctgttgcgagggatgatggttaaacgaaatgccgggaggaccgaaggacgccgaggacggcggaggaccggcggaagacatcgaagagggaccaagagaaaattggctgaagttaaggcataataacagtgagtaaaagaaaggagttggacaacttggtggacgaaggctgaccaaagttcatccgagagggcggaagagcgtcggaaatgccgggaggaccctcaacaccgggcggtccttcggcatcctcaacacccggcggcaagtccatttcaagcgctgaatttaagcataaagggcctatgaattcttgggtatttctatgctatacggacctgctgatggcctagtagccaattgcggaggcatttgcaccgctggcactcccaccggtgccgccgcttgcgtcgattgcggtggtggaagggtttggctcggctgcggttgttgcatttgtcgtggcggttgttgctgttgctgcggttggggttggccaggcggtggcgcactgacaatcggcggcggaattgcggggtcaaaattgggcggaggcttcgagaaatccatcggaagctgagtgagcggtggtggaccggccgaagaaccaatgacactgatgttttggatgggcggcggcggggcggtggacgcgggcggaccggaggtgcccggaggcggcgtttccgaggcgggcggcgggggcagcgaatggccgatggaaataggcggctgaccaacgacacctatcatcgatgaagagcccaacgaagtgatcggctgagggagggcaccgtcggcagtcgtctgttggcccatagacgaggacaactgaacgaaatcaaattgaaaaagacgatgtcttctaattgtaactctgataaattaatcggtttacctcagaggatgattcctgccgagtgatgatgcccgatccgctgatcacggtccgactgatcaaagacactgactgggactgatcagaaagcgatggaggtggtttgctcaaatccaacacaattttctgcactttgttttgttgctgctgtttgctctcctgcccaccgaccaaactgacgagttgtcgcccgccggcaaaggtttgaagtccgacttggacagggccgctgatttggatgttcgaaagaatagctttgttgatcgccgcctgatcagtgccgaattcggcacgaaactttcgttgacgctcgcaatattgattccaagtatctgaacgaacaaaactcagtcgtagttgaacaaagaggagaacattgacgagttcgaagaatacagtttacctaatccccccccctactttatccaccttcgttgaagccataattgaaatagtcagtaatgtccgctcccggcttcctccatggcttgtcctccatggttgccaaatcgatgtcataaatttgcgaaccatctttcagtgtcgggttggcgtccaagtcaatggtggcacccccaacggtgcccgctctttgctgcttttggaacacattcgttttgatttcgccaattgtcacaacaaaatcgtcctcatcactctcatcatcgttcaaaaaggccggtcgatcatcttaattatttttcatttaaatgaaaatggcagacataaaaaactattcttaaacaattaagttatttaaaattcatttacagccgaacaccaggcccaaactaaaacaaagaaatgctaaaagtttgaagcttcgccaagcaaagctattaatactttgaaactttaccagttgaaccctttccgggcgccgaatcatttgcttgttctgctgcatttggttggtcgccattttcaacattcaaattaggcgattcggccaacacttcctcttgttgttgttgttgttgctcactcatttattatgagtatttctcaaaaaataaaattaatactattaatacccctataaaaatggaaactccaaaagaaacaaactaagaaatagataaatgatcagcagatttttaaaattcgtaatagtcccatattttacttcctctatgaggtaatgctttgcttatatggcaaatgcttttcaactcgagatcggctcttgcatttttacaagagaaaaccccccaaaaaaattttataattatgccaggttttggcgttctgattactgaataaaaataatctttataatttctctcactttgacgtatactatttcttatttttaaaattaaaaacatttaatttttatgtgtagcatttttcccctatgttaaatctgcaccaaattacataccctttgagaaaaaattctttttttaagttgtacatcccggttttgta

SEQ ID NO: 2278 - DNA, 4315 bp, Heterodera glycines
  unsure (1)..(4315): unsure at all n locations
cattggaatgccatcactgcgtttgccatcatcgggagtttcgatgtaagtatctgtacataaatggttcgttgggcggctcgtcaccaaactgacccccttcangcgacatttgctccgttctctccaatgcggctgtaaactgcttggggctgtgtcggatccgctggtccaatcgcgcgtgtgcctttttcgcgctttgtttaattgcgccgtaggcagccatcagtttttccgtgtacaaattgaaacgaagtgagtacattgcggcgatacaaccgctgccataagaaaatatgaggatccgtttcccgttcgatttatcggaaagttcagtgctaaaacggatagaaaaattagttcgctaatgacctttgcttgctgttcctcctcctccccccactcacttcagaaagacgttgatcagctgagcatataccgacggcgtgtacatgttcccaatgcgtcgactaaactccaaaaatggattcagtttggcatccgctgtccgcgaactcatccgcaaaattttgtcagtaaatcgatcgccgtccgagcgagtttttgtgcgttccaccgcaaaaatctcatggagtgatttcgatttgtatgcgctgagttgatcccaatcagacacatcatcatcatcagctgtgacaccatcgtccatcattccccgtttaaagtcgacgaaggacagccaagaaaaggctttttgggtgagacgagcgtacggcgagtggaaaatgacagcgacaaaatccgaaagagagcaaggggctgaaataactaattgaaatgtaataaatcattaagtgagatgattgagtgtccaatcgtttgtaaaacagttgcattagtcacgcaaatcgaaaataacagaaaaagtttatttcaaattaatttataaccaatatttcgcaatcccttttttagttgatagaacaaaatacgatgaatgacttacgccctgtgcagaatttcttgttccatttctcacaaaatcgcccgtaacacatgtcaacggcgttcaaataggtctccacactgtttggcccgtccactcgtgggaattgcgtgctaacgcctccaattggcttgtaaaagtcgtaaacattttgagaatggcatgccctaaggccacgttcaagtgcaatcggtgcatttggtcctgaaatagaaaatgaaagaataaatgcctaaattggcgcaacaaaatccaaccaatcagaaaggccactgcaccggcaccgcccgtacatcgggcgggcccagccgaataaactgccacatcagcacagacaacgatggcaaggcgttctgaaaattaaaaacatgccaaatgaaaaagcgaagtgagaatgactgaactgataacctaacgattgcgcaattaaatgtttccacaactctttgaaaagaaggttttaggaccaattgctcactttctgttgcgtaattagcgtacatccaatcgacggcatgaaacaacgcctgggtcccaccgaaacacgcgtttttctcgtcggcgccctccaagtccatgttgcccgaatcggcaaacaaatccattaacactgacttcacacttttgcttttgtcgaccaatgtttcggtgccaaccgcgagaaagccaatgtcctttggattgaccttaaattggaaatttaattgcccttaatgccaaaataaaataataattggctaaattatgccttgtaattgtccatcagtgcagctgcaacagtcagcgaaagtgaacaaacatcttcattctcatggcaaaagcacatttcttgttggccaagtcccagcacgtatttatttgatgtaacattgtcaaactgaaaggtaaaggtaattgccaagcaaagaacgtaaaaattcccaactcactttttcaaggtcttcttggttcacgtaggattttggaaagtaaagttcgatgccaataataccaacgtctttaatggactcagaaaagtcatcagcttaattgatgaatgagggaaagaaacaattaaattgagtgaattcaccgaaatgtgtcccattggtcaagccaaagccatttccatttacagttggatgatggttattcattggtaaaatttatttaagaaactgctaaaaaatggaaaattaaaatataaaaacagaaattatggaagaaaaggtgaatgaacatttatttataaacaaacaaatgcgtacaaagtccaaatcggcagaagcaaattgaaaaggaatgggaaaacaacggaaaatgtaacagcgacggatgaaagggaagcgacggcgggaaagaaaaatttaattgaatgtaagggacagccaaagtgactgctttttctcaatggccacctcttcccgtccctccccccccccccgcgttttaatgtattttctgccattatttctctttcgttccacgagttcggccaatcactacgacacatacatacaaagtatgtacacaaaaaattaaaatgaagattgtatctgcaaagaatgcatcagcaaaacagaaaaagaagaggaaattacctagtctgttcctatcaagctgaaattttaccaaccattagcttccccaaaatattatgaagcatacaaattcatagtgaggaaacatttttcgtgtatctctttctgtccatcacattcgtttcccacgaaaaaaattttccaaatctaggaattttttttcaaaatttcnncaattcnaagtcatttggtggcggtaggggtcagttacgcaactggccgttcgtnnntggtggtgcaattaactttgatcgttgtgccaatttttgtgaaaaaaaatcaaataaaaaaaattatttttttacacttttaggtttttgtggtcaatgggaagaggttgaaatgacaaaaattttgattccattttttcttgacccctttcatttttggttaaatcatccattacagtctttaattaacatgaaaatgcaataaataataatacctgttgttgtttgatttaagttttttatgatttgcttaatcacttaataatacatatatagacccccctaaatgctatgaatcgcaaaacgcaaaagcacttgaggaagacaaccgagcaattgtcctttagaagcgatgttccgggaggaagaaaaagtgggatttgtgttggaatgcttcaggacgcgtaaaatgtcggaattagaaacggccgaaacatcctccttgcttttttctttgccttcctcaaccctttaattaaccaccactaaatttttcgtcttaaaaaattgcatatgaaccaaataaagaagtggaactctccggcgtttaattatatccatctgctggcggttgattaatgtgcagttcaaagtagggcatcagacaaataggtaagtagtagcacgaacgatgattaatggaactcgttcatttaatagcgattaaaatgcatttgagccgattaaactattagctaaattttgaaaaatttaataattcaatgcctcggaatgtgtgaatactttattcgatttaacccgataagatgaacgtttaaattaaatagcaaaatgagcaagaaaagagaaaattgttcaacttggaaagaactattgataatgatgaatgtgaggcttaaaatacaacaacaaaaagccaaataaatttgggtaacaaagtgtaaaaacaaatggttcttgctaacgcatgaacagccgcccttttctctgatgatgctcagacgaccctcacaaaatgagcattctcagcagaaacatcacaatggcactcataacaccggcgattggcagggtaacctttaattaaaatgaattttgaaatttttaatttatgctctgtgcttcttcaatagtaattttctaacgcctcaccagccaagagagagagatattcctgaacacagtccaatggaccaccggatgtgcttggaccagtccgacggccaccacactcccaacctagacaaaacaaagcgatcatcttctctcatcaaatcgtcaccttgcactgagtggaacttatcggtagacccaatttgctggcgaaaagaactgtgagagcggcgccaaattcgatggaaaagccgctgggaggagttatcctggtcagattttcgccgaccgtgtagatcactcggtggccgagcagccaaagcccaacgcacattccggcagcaccgtaaagcagcaaatatacggaagtctcgcccttctgatggacactgccttcatcgtaaatggtgtacagtgacacgagcggagcaatggcattgcttaagggaggggggggggggggg

SEQ ID NO: 2279 - DNA, 1154 bp, Heterodera glycines
caattcagactttagttacctgacatcgtttccaccgtgtgcaaatccggaaaaacaggctgtgagcacctgcagaaaagtgaacagtttcgaggcgtacggatcctccggttttgaggaacggaagaaactgagcacagatgaagccgggcgaattgaagaggaacctgcgggaaacatggcaatgtccaatgaatttcgattttgtggtaccaaatttgttttgggccacctctgcccctcctccgcctccattttccgccattttcacttttgtcgatggttcgtctccattctgttccgtctttccttcttcgagtagcgccattttgccctccgtcaaactttttgcgcttttgttagtcaccactccgtttaagctttttcccagcccattttgttgctgtccttcgcatgtttccggccctattgtgtgctctatccaaatatgaaatgataatccacaaaaaaaaaacaaaaataccgtacccaaaatgtatcgtttcaatctgctgaccacgaaaaatcgggtcacaaccatcgtaaccaatccggacacaacactaagtgcgaccacagcccacaaaggccatttgtccaagccaatatctgacaattaatattagagcggaaatgagtaattgcaaagcaaaagttggctattttacagtgcgatccttggtaagtgatggcgaacatattcacagaaacacagacaaagtaaaggaaagggagcaacagaaggccacaatggaggggcctatcctaaaagaaacaatcgaaagaaataatttgggaggaaaaacagtcgaaaatcgaaagttatggggcaaaagacgggacaaacgaacccttcggaggacggaatggtcaatgaagagaaaaatgagaatggaaacacagccggacagaatgggggagacgaaccaagaagcaactgaaaaagagaaaattaatccatcattcgaatttggcaattcattccgaaaaattaaaaaattactcacaaattttagtcactttgacccatcggatgccttctgtaccatggagaagcattgaataactgaaaacaaattaatgtgtgagtcggtgtaattacgggcaaattcaataattaaaaataaaaacaaacccaatggtggccccaacaa

SEQ ID NO: 2280 - DNA, 2036 bp, Heterodera glycines
ctaaaagaaacaatacgaaagaatataatttgggaggaaaaacagtcgaaaatcgaaagttatggggcaaaagacgggacaaacgaacccttcggaggacggaatggtcaatgaagagaaaaatgagaatggaaacacagccggacagaatgggggagacgaaccaagaagcaactgaaaaagagaatgaaaaagagaaaattaatccatcattcgaatttggcaattcattccgaaaaattaaaaaattactcacaaattttagtcactttgacccatcgtatgccttctgtaccatggagaagcattgaataactgaaaacaaattaatgtgtgagtcggtgtaattacgggcaaattcaataattaaaaataaaaacaaacccaatggtggccccaacaatggagtctgacaattatttaatcaaaatcacacatgacaaaagtgccaaaattgaaacattcacttacgcgtggtggagacgggcattttaaagaaagtggcaatgagcagccaagcaccacaaccggtctaattgaagaagaggggatgaaaaaatgaagacattcgaaacggaatggcattaccaacacggcgatctgtcccaacatcagttccttctcgcgtccctcgtaaatgttaaggtcaatcactcccttgcgcattgtgtccgtcacttgataccctaaaaacaacgagtacaattgtttattcccatttgaattaaaagggataaaaaatcacccaaaagggcagcgcccatcgtttcgaaaatggaggcgagtaaatacgcttgttggagggtgagcacgcgggagccgacactcgtgccgaaggaatttgccgtgtcattggctgaataatggcaattcattagcgacttttgcgtttatttgctttttcgcttacctccaattgcaaaagccaaaacaaatgcgataagaaagcccaatatctgtgaaaaatatttttgttaatactgcaaaaatatgagcaaaataaacaaataaataaataatttaatttacaattgtccaaaaaaggtccaattggaagacggccaaatcagcaacgaccatttggggagtaaagtcgaagagagactcagtgagaggcgaacaaatggacgaaaggcgtctctttctgttgccggtcttttttatttgttaaaattactttcggcaaaggaatgggaaagcgattggagaagataagatcagcagatgaaggggaaggacaaagttggggctgtttgctctcttctctctctcagacgtcttttggctgaaagtttacctttgaactttagattttttcctttggggaagagcatggaaaaaaggaggggagaaaaagcacaaagcgaatgaaagaacagcgagacaaaactaatggatggataattagcaaaacaaacaaaaatgagagagagggaagagaagggagagaattttgaatttgagaagggaaatggccatgtgagttaaggcactttccttctttagtataaaaaagcaaaatgcgataagaagaatgattaactgatgattatcagctgaccatcggacctggaaagaacggcatttatgtacaataatttaatatcaaaattttgtatttaaaatttcttttaatattaattcataaattatgtctggtgtgagaagctgaacaaaaaggcaaaagagactttagaagatatgagttgtcgtctttcagttttaaaatggtataattaaattcaataatatgacgattcataaaatgattctatcggaaggggaaaagttatttattattggattgattttgattagttatggggggaggaggacagagttggaatggatgcaaccaaacggaggacagagcagccgaaggagcgggaaaagggtggacgaagacggacgacggacggagcggagaaaacggagcaaaagaaagcgcaattggctcatgtcacggcaaaacacacacttttcgaagacaattctggtgaaagttagtaaaatgaaggaaaactatgaaaatgtaa

SEQ ID NO: 2281 - DNA, 1449 bp, Heterodera glycines
aataaaaagttaaagagtttatttatgaaatttcttttactttaaattattcttttatttatggttttttattaaaatatttgttttagctaaataaaaaatttggggctgaataatccctcctgaagtgtgagtggttttttcaagaacttgaccaattccaggggccataagtttgtagcaaaaagcctaatcaattggtcgaatgttggggctaatataggagtatatttggataaaatcattccggggaaaatagaattatgtgtacttgggtttcacaaattgcccacgttatgttcttggaaagtgacttggtacgagccgagccctgggctaaagtcttacctctgtgaaccccttatcccactttcaatcacagatctgcttccttctagcattgcaataattttgtccttttcttatagccaaatgataattgaaacgaattttatgaaatcaaaaagccggaaattttgaggaaaagcttagaacctggattttacgaaaaactggctcaagagcccaaaatatgagcaatttttaaatcctttttttataattttaagtgtatttttaaagttggtttaagcaaatattgagaaaatttaccgcgctactgttatttatttaaaataaattatttattttaaattttaaatctgtgctcaacccccaccaccataaaacaactcaatgagctgataaaataatgaaacgatgaacaattaatttacttaaatttaaatacttctgagcaaaacatcaccagtttctctctcagttttttacatatttggatagcgttgatcaaaatgattaaaaagtgttaagagtagtgaaattttaaactgtacccattttgccactatttacttttattttgcttttatagtccatttcttcgacaaaaaatggtttttcttggctgctatacgtcaccacataggaaaataagtgccacaaaattgccaatatgccataatttttgaccagagactaaataaagaattttacaattttttggaaaaaaactaatatccaattaatgcccgtttttgcttgattcatcacttctcttctttgtttgccattgacccaatttaaatgcatttggcattccttcccactttctccatcattctccgccgtttgtccgccccctcggggggggggggggagcggaaggcgaacctcggcaattaggcgcgcgtgttgatctagtcgagaaaataggagaaaatataaaattattaacccctcccgcccttttatattcaaatttcaatctcgaaatggctaatgaagctaaattttaaaattttaaagctgaaaaatgtactatttaacagtgaatttcgcctttttttttcattttaaaatgattgcttacgccaaagcaatcgatatttttaacaagattcacattatcgcaccaacaaatacaaa

SEQ ID NO: 2282 - DNA, 600 bp, Heterodera glycines
gcattgggtgagcaaacgaagcagatcgtttcccccccataattttcaattttttccaaacagaaatttttcaagaaaaactcttagaaaatttataaaaaaaattcttgaaaataaaaaatgtaaaaaattttccagcgttttttggaaaaataaaataaatcgctgaataagaatttttttttgaaatttcggttcgtttttgttttggtgttgtcaaatttaatttgtcacatttaattcaggccattgtctccaccagcggcgggtcaaagcaacgtaaacggtggtcgtctgacaatgtgtgccgggcccagtggaagaaaattgaatgaatgaattatttgagaaatgatcgatcattttgaatagctagtaatttgatgctgtattttctgttttctgaactgctcctcatatattatttatttgttggttatgaaaacattttaatgttttggtttttttgcggagccccgggcttaatggcaacttattgtaactcgatgatagtggagaatctgggctccactaaaaaaaaaaaaattttttttttctgctatgaaaagatcaacccggggggtgtggacgcgtctgata

SEQ ID NO: 2283 - DNA, 1830 bp, Heterodera glycines
ctcccggcccctgtcccgttttttgctcagaccactgggaatcccgatctcgggatcccgccccggttcattttccaattcagggccccggtcccggcaatcgaaaaattccgatttctactatttactatttttccgccgccccctcaaaggggagcaccattggaacaggaatgaatactgtaattgagggtggggtaattcaatagatacggtaattgatatttagctgaaaaatttctaaatcatttaaaattgtaaaaattttcttcgattttttgaagatgatgcgctgtttttggggcatatgccctctgccctcgtcattctccgatttgtgggaccgtgccgccggcggcagttgcgccacccatttgcatgccaacatggcccaactgtttggctttttcgtttgggcccacgcacttttccattgtgagtgagcaaatggaaaacaaaaagctcaccgaaaattgaactttgaaaaattaccaaaaaaagaattttcctaataaacttaacaaatcaaaaaaaaggaatgaaattttaaaaaatgaatttagaattttttgtatttcttattttcttttttcatccatctctcccaccattagagcacgggaagggattttttaaagtataattcattttatagttgtccgaattggaccataattattatattattatttatgtgaattttttgaaaaaatttaaatgataatttatttttaaaacattaaagttttattgaaagttagctgatgaatatttggaaatgaatttgaggcatacttttgaaattttccgtcaaaagaaatagggctgttatggtgccttttacactttgtccctgctcttcccaccagacattttgaatgtgcacaaaaatggttcaaaattaaaccagggatttcatgccaggtttaagaccggctggtcgacgagtacaatgaaacagtgtgagaaagagtattttttgagtaaaattttaattccttagcggttttttcaattttattttactgtattttaccaattcctccaaatttatccttttcactcatttttagtggcaatcaaatggtgcgcgagagcaaaagccgcctgaagaggctgaactggtcaaatcgacgctcgctctgctgctgatgcgtcggtttggcaatgagctagctgtgtgtgccgcgttaaaaattgtcaattaaacccatccaaatattgttttttaattaatttgagtggccgaccgaattaattttttttttaatttggcatttttgttttcttagtccattaatatgtacagtattccttgtatttatgaaatcacaagaaggaatgcatttctgattaggagcttttcaggggggggaatgattaatcattgaaaaacatccccctgagcgaatttaagaaaataggcaaaaaaaaagaaagaaaaaagagtggagaagccaaaacatggggaaatgatgacgaatattgcgtaaaacgacacgaacgaatattcttcatttctccatttttgtcctctccatttaccgtttaaaacattttgaaaaatatttgtttttttttgatcgccaatttttttttgccgacaaataaatggctgtgggtaacctaggtcagtctcaaaataataaaataaacggttttattacggcatttgaggcaaagggtgctagggcgttttgtaaaatccgccatttttgcaattttttcgacaaaacatggtataactttgcttaaaagcaaccaaattttaatatcttggtatcattcaatagcccagctttttctctattagcctgcaaaatttcaaac

SEQ ID NO: 2284 - DNA, 2940 bp, Heterodera glycines
tttatagattctaaccatttttagttactttatatttcaattaattgaccatctcgagaaattatcatttaattcttttaaaaatgattatttcataatttttttaaaataacacaaattattaatttaggtttttagcaacttaaattaattttcacatgatttttaaataaatatggatattttaaaaatttactgacggattgtccacttactgacggattgtccatttactgacggattgtccacttactgacggattgtccatttactgacggattgtccacttactgacggattgtccatttactgacggattgtccacttactgacggattgtccatttactgacggattgtccacttactgacggaatgtccatttactgacggattgtccatttactgacggaatgtccatttactgacggattgtccacttactgacggaatgtccatttactgacggattgtccatttactgacggattgtccactgacggattgtccgggagcccccgctgaatacatgcctgatcctgttatgaaaaacagggcaaacaaaggaatttttagaatttttggtgcttgattcttcttttcaaaaaattttacccgttttttcttgaaaaattttaaatttttcatttcgctggccacaggcctgtgtgtatgagcactttaatctttcaaattttaaaatgtttgccacatttttcactgcattcaaatagcacaaattgttgtttgttttcttttttgatggcactgaaaattccgtccttttgtgtccgccgcactttcctttccttttccggttttgccgccgccgttccgctcctcgattcactgttctgctgactgatctgatttcgccagagcattcattcaccaaacagcaaacaaattcctaccctaaattttttgtacacattttattggcatatgggacgggggggagagattaagagaaaaacaggcatttcttggacaaaatccgtcagtggttggataagagcacacttttgctgggttcttttaagaaagggggctttcattttttgcagcagaatgagcccgaacgccgagaaaaaaaaatgccgactattttaatgagtaaataaaaggaaaaatgatttaaatctgaaaaatttttggcatttgtctcagcatactttaatcacccaccaccggtcacctaatttacataatactgatctgattatgctacgatgattcgtgatttatttgtaattttaattaattccttaccgtcggttcatttttgctgcaattagcacacttagcactttttctaattgatttgtgtgtcagagaaagcacaaatatctaaggtgggaaaaaacctgtcatttttgacaggttcctcatgcggcagagaagcgaaataaattgcaggtaattgcgctgacccacaaattgtccaagccacgaattgtccaagccacgaattgtccaagccacgaattgtccaagccacgaattgtccaagccatgaattgtccaagccacgaattgtccaaaagagtaaaaacccacgaattgtccaaagtctaaaaagctcataaaaagccggaaaatgggtctaaattaaggtgttcggggtcgctgactacgaatacgacatttatataacccatttcctaaccccagacacaatataaacataaaatagcaaaaaaaaaaatcgaagctcctaaaaagagtgctgatcaaaattcgaacaagttttagggctcctatgtgatccgaattccctctatagacccaccctcagcttcacacattgaaaaaaaataattttattaaacattcaataaaattcattacgggacatggacaattgaagtgtcaagccgatatatgttcgagagaagtaaaggaagaacattggcattccaggagaagacggccaagataattgagaaaaactcgatttgtgcatcttcagcgatttcctgagtggtgtgtgaatctaaatcctgaatagtttggaaataaattttttgcggcgcttcaaacatactacctttcaaccatagacaatctcacccaggtcatagttgaaagttcagcctcgttcaaagtctgttgttcaacattgtcggaagttatcacggcatgcagttcgtcaatctccactccaaaatttacggcctcctcagttgggtttgaaatgcttacaaacaaagcttcttccgaattttttgtagactttcagtttattacgaatcatttgttcaattaatgaatagcaaaatctgaagacaaaaaaagcacatatttttaatcaaatttggagatttttcttattcggtgggtctagggttaggcaaggggctatataaatgtcgtattggtattcagcgaccccgaaaaccctaaaatagacccattttccggctttttatgagctttttagactttggacaattcgtgggtttttactcttttggacaattcgtggcttggacaattcgtggcttggacactttgtggcttggacactttgtgggggcgccggtaattgcagaaacctgtcatcattacgccagaaatctcgttacctcaccaaatctctacattgttgtgcgatcattaatgaaataagttggcttagactgaatggtcttttagcttcgtcctgccatcgatgagacattctctcctgaaacaacggcagaaacaaattacggacatttttcaatgctagaaaagtactggtacgacgagaagctaaataggaggacatatatttcctacatcacacgacgattgagcagagggatatagccccccccccccgaacatgacgcggattattcgatttttaagacccgaatgccttcagaatccgataaaagaattgcgcacgaaatgagccatgattttgggaaaaaggccaacacctaatgcaatg

SEQ ID NO: 2285 - DNA, 2582 bp, Heterodera glycines
gttatggcagaaatagtacttattttcatacaactttttcttaagttgaccaatttttttttaatttggcaggctaatagagaaaaagctgggctttgaatgataccaagaatgtaaatttggttgattttaagcaaagttataccatgttttgtcggaaaaattgcaaaaatggcggattttacgaaacgtcccagcacggagaaaaggaaaagcaaagtccttttcaataccaattgaatcgaagaaaatttggaaattgatttaaattttaaatcgtttggccctaattttaacaattttattcagcgccgaaccaagcaacaaacaaaacggagaacggagttgcgcacggggatgaaaaaaagaatacgagtattttagaagaaaatgcttaatataatataatttaattattttaatttaaaataaaataaatataaatttgttaataaactttgaataaatataatcattttaaaaaaaaatcaattttaatacgaaaaaatttcgtactctccaattaaataaaatcaaactgataaaaaatgattatttttaggggccaggttatatgcacattcgctgtttttaaattttttaaaatattttttgaaaaatttcttgttttttaaatttgcattagatttttgttgtgatatgcaaaaaaatatcttcaattgacactttgaaaacttaaaattttttgtatgccctgataaatgaacggagctgctaaaatgtaatttttgcgcaaattaaattttttggtctttaaattccttattaaacaaatttgctgaaaactttattaaaataatattcaaaatttatgtatataaataaaaaccattattattagtatttaaatgaaatgaaataccatatattaaattgttaaataatattttctttttccagtttttgtccttacaatcatttttgggccactgttagccgttgcattagctctgctgtgtggcatcgggatcaaagtcttagtgaaaagaggtacagttagattttaaaccaaaccacattaatagcttataaggggtgggaccggtgagtcgggggtcgttctagcgtcaaaaatacgaaatcgcatacatcatggctaatactagagttgagcgggaccggaatttttggcaaaaccgggaaaacccgggaatttcccggtcccaatcaaaactggtcaaaaccgggacttggtactcagttgtccgtcttcaggtcccggtcccgcttaactctagctaatactatagatggtaggggcccttttaggaagaaaaaattttttttttaaatcgtgaaaacatgtttatgggggttttctgggccggataacccgaacccaacattcattttgactaatttcgaattccggacccgaatttgaacaaaaaatctagaattcaaaattttcaaaattctcacttttgttcctaaattgaccataacaagctaaatttagtctaaacccatcgaaacatcaaaaatggtcattctgtacaggtatgaacataaaagtgaattttgaaaatttgaatgtttatctttttagaaaaaaaataattttcttccgaaaagggggacattgcatctatagtattacgcacatgactgtatgccacaaatcttgtattttttgggatttctggcgtaatgatgacaagttctgcttttgaaagtcaggtttctgcggtcagacgctaactgcatgaacctgtcaaaaatgacaggttttttccggtcggggtcgttttcgcgtgagggccattttcgcgcaccccccccccctaataaatgaaaaattttctcaaaaattcgactccaaattcttttacatacttgatatgaaatattttagcctaattcacacaaaatttgaagcgaatttaattcttaatggaatcgcccgttgaaaaaaagaaaaaaatttcctccgccgacaattgcttaatttcttctgccacagttagtgaaaatcagcagcaatcgccgggttcatttacgatgacagcatttggagaacaaatgaagaaaatgaacaagcgaactttgaagaaaatgtgagccaaacaatggcattgacaatctttgttttttgggggaatttcgaccaatttccgcattaaatctaaacagggaagtgaattttcgactttttgttcgaattcggtacaggggttcgaaattggtcgaaattaatgccggattcgtgattaataatctccaaaaattatgtaaactcaacactctttcagctggatttgtagcgaggttttgatggacattcttccgttttttgaccgccctcaactcggcctcaaattggcattactttcgccccgtttcaatgcgctggtggacacgcatttcgatgacaaaacgacggaattaacaatttggaaattgataaaaattaatggaccaaagccgcaactatctgttctaattgatggcaaatttgtgggttttccattgcccgaccgtccgctgcccaacaaaattcgatttaatcaacttcggattgagtaagtttaaaattttgggtactagtaggttatctgtgt

SEQ ID NO: 2286 - DNA, 3640 bp, Heterodera glycines
cacctgtttggtacggcaattgcccggcgcgcatcggcaccccgggaaacggttgccacagtcgacgcagccacaatatttcggtgcacaaattgttcaccttgaggagggcggtgattagaatacattcaactgccaacacatgaaagcaggcgaaagctgtctgatttgttcatggctcataaaataatttatggccgaacagatctgaatgcctttgaaatactcaaaccttttgaacgctttaacatttattttatttttttctcttttttcccttttatagactgaattcgaaatataaaattggcaaaaaatttataccgtttgcagggcgggtaactaaattttggaaccaactcgataaaaggcttattgaaataaagtcattaaatcaatttaaaaataaaatgaaaactaattatattcctacatataaaatacagcggaaaaattaaagccaaaattttaattcattaaaactaaaagtgatttgatcattactttgactcattttaattaattttataccgatttttgggcataggcgcaaattacgggtaaaaaccgggaaaatataaaatggtttaaattcacagaaaattacgccttttccgacaaaccttcacacaatggcaggcggacgagcggcagtcacacttcgctttgcatggaatgaatcggccgtggttttccacggttccatttgtgtttgcccatttgatggcacgaaattgtcggtggttgtcctttttacggcatctggcataaaaagaatacaggaagaaaataccaaaattactcggggcaaattttatttaaacacacacagaaaataatttttaagagaaaatttggtaattttaaaatgattaacacaattccgataatttctttctggtataactatgacataagccctccctgaataacatttgacagacaccagccacacacacacaacgaacttggcatttttgacgggcgacgacgactccccatttgtcgactgtggccccgcccggcacgcgtattcgtacacttcttggcaggtccttttgcgcgccgtctcgcccaggctcaagttgagcattctcaaaaaaacaattgtgtaagaaaattaggttggatgaaaaactcttgaaaaaattttcctcacatggcaattcggcagaactcctcctccccggtgctgcgcaacacattgaaaatggcctcttcgtggggtgtccatttggcactgtccgccggtgccgtgccaccgatggcgatgctcggctgctgttgctgtggacgagaagctattgaattctgaaaaagtccatttatttaagataatttattcagcatttccggcaaattacccccccccccccctccgccctacgtttcctctcgccagaaattctaatttttgaaaacaaagaaaaattcctagtaatgttaaaccaaaaatattctagaaattagtaaatttatatacttttcgggttttcaagtttttttttcaaaaatttaaaatttctataattttttcatgggagcggagaaatgaaaggggaaatatttttctgtagtcaaactgccattaatcccgacggggataattagacaaaaccaactttttgctgcaatttgttgctgccctttttcccaccgcccgtggcatggccgccattgccggttgtgctgctccgctcgaattgctcagcaggtagcagttggccgagcatgaccgcctcagcttcgagcagttctctttgcccccgctgtgacggcttacgccgctgctgctttggcgttttgtgcgcaacttttttgagttgccataaccattcgatgttgcggctaaaacattttggagaatgttggaaacgaaaaaggacatattaagtactttgagatttttggtttgattttgaattatgtccggtgatcccaaagtgtgccacgggaaaaagaaaatggaaaaaattataattttttaaaaatttatgactattcttgaaaaaattggttttttatttaaggtagaagggtctgccccaaaccgatattgcgtcccttttttcccaccattgtgcataatgcaatcgtagctgaaacatttgtggcacaacagcagttcgtagctgttcagcagacggtcatttttgaatttttccaccaactcgccctgctcgttggtgaagcgctgcttgtcaattgtctcgggctgaaaacggcgctgcaaatcggggtaactgaaaaaggagaaaaatgaaaagttcaaaaaatttaaaaaatattacagggctcgcagttcgtggaaggaggctttgttaggaaactgctggtggaccaccctgaacatgttgtccatgtctgaaacaacagaggccgttaattgtatggtgattgtgtcgttctcggcattttcttgtccaatttaaaatttgaatttataccgatggaaggttggcaatcggacgacaatttttagaaattaatcaaaattcgcatttaaacaataaaatattcttgcccgtgtgtgggagttgttcactcagttgcctcagtgtgtagtataaaatgtagtcgttgatataccgaaaaatttcgcactttatttacagacaaattggtgggccaacgaactctccgcagcctttgaccgtgccgtggatgccgtcctgaaaggtcttcatcagttcggcacagaatgaggtgtcgtcctcggcatcgcccagaaaagggatgtgggaaagagtgaactcgtcttcggcctgaaaatgtacaaaaatgagacaaataattttttttgttggcaatggaccattcaaattaatttttaaaactttccgggacaaattttaaaggcaaaaaatgttaaatatgtcgtcccctattttatggacacaatttttgccgtacgaaaatcgtatgaattcccaaatttcaaaacagtgatcgggaatcgataatttatgggccactaaacgttggacaggcgcagaacggacagatcggtgaacgatggatgcacacaatgttagaaaaacaggccaatcgcctacacacgaaacacaatcatttgttataagcaatgataattttgataaattttcaagttccagttccgtcacacgcacgttgatgttcacttccgtgtgcgtccaaaattgcatgggcggcgtcgcctccaaatgttggagcggaatgatcggacatttgctgatcaccacgccgttgtccgcccgtttcagcgcagccatcggcctccctttgatcggtttcaattcgcgcagaatgagcggtgccacctcaaacggttggaaaggcgtcggctttttgcgcgcttcgtcccgcgccttcttgaacgctttctgaaaagttggaccatgccaaaacaagaaaaagcagtgttcaaggaaaatttttttgctcttatcagattctttggcttactcagaataaacgaagaatttctgggattttgtactgatatagaaaacaggaaaacggaacacacaatgcaacattttattttgatggaaatcagttagaactcttttatcttaagggaatagttagtttttaggttgtaaaacccccaaaaaaagtggtaaaaatgagaaaataagcgccaaacatttccgaa

SEQ ID NO: 2287 - DNA, 3266 bp, Heterodera glycines
  unsure (1)..(3266): unsure at all n locations
tgctgctgaattgcacaatcaaaggcgaagaagaaaaagccgtgggaattgccgatggaagtgaaatggacgaaggacggagtgccaattgacttttatggaagcaaaagtgagaacgaacgaatggggaggaggaagaaaggccgagcaatgccatcccaaacattgggtggacaattcattttttgtcagtcggtcccttcccgcgggcactttgccgcccccccccctcccccaatgacactaaaaaacagagtaaaacaatcaaatcacatcagtcgagtcactccaattgagtcgagaatattcccaagaatttccgctgataattccttttcctttagagtattcctccgaacgacacgtgtccaacaacggcgcttcggtgcttttcagtcttcgcatacgaacagcggcgccgggggacagcggaatttacgcgtgcgatggcctccgtttggtccgatccgcacaaacgattaatttggtgccaccattggcttcttcgacttttttacgcttatatttgtcccgcttggccatattttcgaatttattcattcttatccgcatttctacctcttaattccataaatcttttcattttttgtttgttttatttaaacattttttttttgctttctctgcaaatcattttttacctcttaaaattcaattataaaagttagggttcggaccccgtgggcgggagtggcttttcgcgggggcgggggtcagagtcgcgggggcggagacgggggcacgaaaattccgcccccgcgggggcgggcgcggggctttgatttgaattaattccaaaaaatttcacaaaaaattaatttttatgaatggtgtgttggctccacattcctttagtcaatgtttcgcctcgattcaattcctttggcataaagtacacagattttgtctaaagaattaccaaatttagggattttgggcgaattttttaagaaaaaataggtattcaccaaaaattaagatttttccgataaatttttgtttttttttcatgttttgctcaagcaaaattggaactcagattttaatattttttttcttgcggcacatttttgcaaaaaaaaacttggtgaatgtgcgagggtggaggtgcggcggtgccgttaggcgccgccgggaaaattttttttagaaaatttgaatgaaatttgttcccagattttcaccaaaaaatgaccaattttttagttttgagataattttctatgaaagaaataagtttttgggggccggtggtgccgataggcgccgccgggggaatgtttttttatgaattttgttagaaattagtcaaatttttcagaaatttccctcttttgggtgaaaatacgcacccaaatcagaacatatcttaaaaataagaatataaataaaccatgtattaatcagataaaaagaaattaaatagaaaacgtcaaccgtcatcgaactcataacaaagaatactgttagctgtgaagcactaaccaccaaaccaaaatatcttggaaattcaaagcaaaatttctttatttcataaaaatttgtcaaagatggtttttgggggttttcgtcagttcgtaaaatgcgaacatctaaaagagaaatcaatttaaaatgatgcttaaacaaaaatattgaaaaaatcttacctaacgcccccagcacaaatgcggccgcatgagagacaaaagtttccatacgggaaaaagggaagagctttttaaacagagattctgtggggacggggaaaggggggtcggggtcacttcggcgcggaccatttcggcgccgcaaattttgaaatgctataacttttttatttgtcagttagctttagccaatctggcatcatttgaaagctctatgtgtgcggttcccgggaaaggggggagggagaaattagtcggaaacgaaagtgacatgtaattaagcaaatgacgtgttaaaaaattggtacttgcctgttatgggtctacaagccaaaattttaaaaattcaacaaaaggggcgcatttcctttatccaactaacacccaatgaagattcagctgcaaaatttctgcaacaaaaagaaataattcatcaattaagtgtagcgcgtcctttgctgatctttaaaattttcgcttgtatgtagtcccataacaggaaagtaccaaagaatttcagcaaaatttagtcgttacgaatgtgaaaaggaagggaaaggcttctgcttttatacccaatgaatcgagaatgagatttaaagaagttatctcccaatttgatcgattgtatgggggagggggtataaacggcggaaccgctcagttgggcgcgcacggttgggcgccaatattccaacaattttttaattttttttattaaaaatgttttattgcgactataaattctaattttaaaatttaatagatataaatattattccgtacgtatgcaacagcactatgggtcaagcccagtgttagacaattactcataacgccaaatagcgtaattggcgtaattttttgagcgctaattcaaaaaatacactggccaatgctttttttgtttgatagccataactttcttcatctccaactaaactgaataaaattggtatctaaaaattgtttttgaaaagaaaatttttttttctaagcgaatgctaagcaatttatctcaaatgaaaaaagttatgagtctttcaatttttatcacgttataactcaagtcctaacagttgatttcaaccaaaatgcaaaaactaatctttttctattgattataaatatccaaagtggtttagtacttttcttcccgaacattttcagagtcaaaaatcacagtcaatttcaactatgggcacaatttgctgttgcgggactaatccgtggaatctcgtcccggaaaaaatgggtttaaattccgcatcgagatccgcaaatctcaaacttccgtttctaactcttataccaaaacgctcgtgcaccacgttaaatatggatagatggcattatgtataatcatcatcatttggggtcaaaaaccaaaatttggaaaattttatttcaaataaaaaatgtttttttttgcagctcgcgttttccaaaaaatttttgggaacaatggaccaaaatatggactanaactgataaaaattaaatttaaaacccctcaaattccaaaaatatttcatatttgcttaacaaactaaaaaatacactaactacaaaaaatggatttaagttttaaaatgc

SEQ ID NO: 2288 - DNA, 3822 bp, Heterodera glycines
taaatttgtcaaaatttcgaaaaaatctcttttttcggaggtgtgttttttaattttctaaaaagtcgaatttattggtgtattttcgcttttttgcatttttcttgtgaaatttccaaaaaatggccaaaatatggaccaaaaacgcaaaaatggcgaaatatggatttattcccgaaaacccccaaaatatggatatatatggactaaaaaccttcaccaaatcaaaaacttttaatgtataaatgctatttttgagcccttttcttgatagcatatgcgcagaaaaatatgttaatccatacaatttcgagccctagtaatatgttaacagattttcaccaaaaagatcaatttttgtgaatttaagccaatttattactaaaaaaataagttttggaggcccggcagtgccaataggcgccgccggggaaattttagaaaattttgacccaatttcttagcaaactttacctaaaaaatgatcaagttattatataaaacaatatgaaattctgaaatgtgaaattcacggtaaccgtgaccgtgaatcacggcaaactctagcaatttgatcagtataataagactaaggcccttttttgaaaaaaaagatttcgtaaattttgttgtcataaaaaaacaaaaattttcaggaccaataatcttacaattgccaatttcacttcgtttccagtatttaaacaaagttttaacaaaaaaaatgatccgaaaaacttgagtttttgacttttgttcgaattcgggatttttttattgacaaattgcgaccttttcaaggttttgcttctgtgttagaattctcgggttcttttaatgtctatccgttttttttgaattattttctttccatttaaaaaaattgcattatccaattaattttcggtgttcaacagttgctgttcttttctcacacaatttgcccctttcccgaactaattaataagtaaatgagattgaaaaagtatttgtgattgattgggtgaatgagaccaattttcatcatttattgctgataaaatggttcgattactgcacaaacatttttttaaattgatttatttaaatatttttttggtcatttttatacatataaattatcaatagggtttgtaattatatggatataaaaacgcgaaatatggccataaaatatggacaaaaatcgcgaaatatggacataaatggcaaaaatatggacataaatttttccaattgagggtataatttcacaaaatttatttaattcaccaaatgtaaagtgaaactttcataaatgattaaatatggcattaataaatcattttagaaaaaaacacacgataaagctaaaatttactcattttaacgaaaaccatcccgaataacgaatttttcgcttttttgcttaaatttttgacataaattaaccattttttgagaaatttaaattttcaatattttcgtgaaaatcttactaaaaaattattttttggaaaattttctggtctttagggcgtcaaaaggctaatttagctgctggggccgttctaatagaggttttttggaaaattgccaaaatatggacaaatatggaaatatggacataaatcgcgaaatatggaaaaaatggataagaaatccaccctagaagcttctaatcaagctaaaaacatgtttttcgtgcgtttcagacctcccaaagtccagaaaaaaaggatttccatacaattctattccctaatttacaaataaaattttgtcaaaaatatatatttttttatatgtcagcgaaaaataatgccatcaaaaaagtgcacaaaatgtgcgattgccatcaatgacttgaacataaaagagtcgcaggaaatttcgtcttctgtcgattcggtgccgaaattgctaccgtttttctacggcactctgctggcacttttcatgacccaattgggcgcaattttattcaaccattcccatttgggcggactgtcaatgttcgacaccatttttttgctaatcgcacgtgctgacattgcccaagtgcacaaatggatgtttgttgtgagctttttgttgcgctttcttcttcagtcatctggagtgcatttccaaggacaattaattggctaattgccattctccagggctaatcatcgttaattagttgtgccattgtcacagagccatcatcattgcatctccacggctgacctggtgccctttctacgcatcgtcagtttcattgcttaccaagtaatgcctgtgtcagaataccaatcaagtattttggataaaatgcaaatgcttcagacagcaaattgcacttaattggattatggattttcccatttgctaataaccgaaggccctgctgttcgtcacgttcactcatggcattgaagccataacgtgtgccgatgccgattcgttctcctatttttcgactccctttctgtgtacggtggtgctcaaccttgtggccaaatcacctctgctgttttggtccaacaaattgtctgtgtccgacatttccccggctcgtcggtgttttttgcactttggcgccccattaattaccgtagcattggcggctgccgaccaatggtcaaggtacagtagtaggtagttccatatccaaagcaaacaaataccgtataaattcgacagtcctccagacagtaacaacgcattgatcactcttcttgacccgtatttggctgtggggatgtgcatgtcattgtgtttcacagttctaccaatttgtaataatgtgattgattttgcagtttaatcatttgggataatataaaccccaaaaacctaaacactaaattttcaattttttttttcgttttttggtgaaaaagcctggaatttctcccctcacgcattacggagataattagggctgctaattttatgcaaatgcatatttttttcctggtttctccatttagtaggaaaaacactttcttttttgtgcttgcgaacaaaagttgggacttttatttacatatttttacatattttcggatttttctacatattacatatgtacatatttttatacatattttggactttttcgtacatatttcgcaatttttcgtacatatttttcattttttttacatattttgaggatttttgagaatttatagaaattttttgtaaaaaatttaaaaatgttttttttgaaaatatatccctaaaaaatcaaaaaatgatatatcaaaaattaatttgtaaaatattcaaatgtgattctaagcctattttgatcatttttatggcattttgtgcctaccgtatatgctctaattatagcccatgggggattatttttcaacctcttcagaatacaggggataattagagactgcgtgattaatagagactgtgggattatttttcgactgatttgtttagtgaaaaatttttgaatttttttttgaacatgtcgccaaaaatgtcagctcggcaaaaaataattatttttaatgcatttttgttacagaatttctgtattttacatgaaaaatttgaaaaattccatatatttagcaatggagtctttttgctgtgcttgtaaagcaatttatggaggaagccacagctgttccgtctgcaaaatagagaccggacgggatcgggatcccgcgggatttcttcgggatcccgcgggattaaattcgggatcccgacctcgggatccgtcccgagcaattttttaaattcatctggattgatcgggatcgggatttcatcgggatcccgaatcgggatccctcccgaccattttaccaatcccgcgggatcccg

SEQ ID NO: 2289 - DNA, 1330 bp, Heterodera glycines
gttttgcaaaatttttattgtgatagtcataaaaatttattctctggggtttttggggtccccgatcacgaatccttcaattattttgatcaattccgatttcctaatctaaatttgaacaaaaaatcataattttaaaaattcaaaatttcgatttttattcgagttcgggtagggattagaaattagtcaaaatacatgtcagattcgtgattagcgacctttaaaaccccggataaaaaattatcatggttttttatcttaaaaaaattttgcaaaacaaaaggggtccccccttttgtttcaaaaactgtcactttccatatagtgccgaaatcattatcaatgaatgacttttgattgataaacctaatgaatgcaaattcagcgcggacaacaggtggaggcgcattgcttcatctttcgccagaagaagcactttatttggtattgtcactgcttttccaattcaaacaaaaataggtatgttaatttttttgagagccacgacctcaaagtgctgacactttcttcgcaacagaatgacgtaatggaagattcgggggagcgacctttaatttattattcccacaaacttaagaaggcaacattagctgattactctcccgagcaattcttcgctgatttgtgcgctttccatcccaattttgcttctattctctaccgttatttagtttataggtgattcttgtgaccattttttattagctagataagtgattgcttttttttgactttacagatacttccgtcggctttgttgggtcgttagagatggcatttcgtttggcgtcgacttctgttagcttaatttatgagcataatgccctaaatttcctgtcctagtgctctacaaatgttctgtggatgagtaccattccagcgcgggcgtacgcatcgttcactccgcacatgaaccaattgcgacagaaacttcaattggggcgcttcagcgcgaattggccaactgtaagaaacgtttactgctcgcgaacgttgtcggacttccgggaaaactgcagaacttgcgcctaacgcagttgggagtggccaatggttcaggtggaaaaacaaaaatattggggctggtcctcacatgggaaataataattttacaggtgctttctatgtcgatttggaatgcgaacagaagtcgtatttctgatttggatgggcaggaattgcaggcggatgagtgatacttttgtcttttttttgtctcacaattagtctattcattttatccggtctttttcaaactaatttacatgaaaaatttaatcaattttatgtgcttatttatatttat

SEQ ID NO: 2290 - DNA, 6844 bp, Heterodera glycines
  unsure (1)..(6844): unsure at all n locations
aatttaatcaattttatgtgcttatttatatttatgacttttgttggttggtaaaaaattcaaattgatagggcaatgggaaaggtgtaataaattttgaacctgtaatttgttatagactgtagtaaaaactctataaagtttattctgttatgcgagcatataatgcttctgaatatattgtcaactgaagaaacggataaactaaagaagaaaacagcaacaaaaatagatgaggtttgacaccaaaagcataacaaaacaatgctaacaaatgacgaacaaaagagaggggacacctgaacaacattctgataatgcgtaagccctaagaaaaatggttgctttgatcagcagcattcaattgcaatttgtgctcttacgccgcctccctcctcagtttattggaaatccatccgttcagattgtccttcatccgccaatatcccacaaccattcggtcccacattgtgctggcatcgcgaattgccggtcgaacgtccaaatgggcaaacaatttcgtttcggggttcacatgtccgacgtcgtaataatcgatgatataaggaacctaaggaaaaagggaaatgtaagacaaataatggcataaaacatcggctctattgcaattttggcgtccaatcaatgaccattccaatttcttaggccacaactttttccttatttaatcaaagcaatatatttttagtattggatttttaactaaattctgtgttcaatttaacttctttaagctttcctttgataccaggaatgtagggatttattaagtaaataaaagttatggccaagaaaccgaggatgaccaatttctgacatcagattgtcatataaatcatctatctttgatttttcatcgtgatttttcgacaaaaatttttttttgatggattttcacttttttaccgttgttcaccgactaaaaaaactttcatctaatatactgttttgtttatacttttaatgtacttgaatatgcataaaattaattgacaacataaaatttgtcaaaaatgttttcatgtaaagttggatttttgacttatgtcttcgtctcgaacaactattccagctatagattgatggaatttattttagtgaatgagaataacagtaaaaaagtgaaaatccatcaaaaaaaatttttgacgttaaattacttgatgaaaaatcatagattaaatgatttgtatgacaatctgatgtcagattcgtgatcagcgccatcgataacccccgagtagttcttagaatcgaaaaaagcaaccttttttgcctttttttatgggaccaatgatgtgaacgattaccaaatatagctcaatatttcgcaaataagtataaaaggccggctaaaaagaattcttttcgggagtaatcaagcacatcccctgcacttcaaactatccgtaaatatttcaagtttctattcccacttcgcgtccgcatcggtcgaccagccaattgtgtctgtcgaacggcaattgataaccaagccatgaacggaagcgcgctcgaggcgacaaattttttgcgtctccatgaaagcttttcagcttcggcatatcgcactcactttaattgggaattgtcaaaattaatgcattcaaaattctttggccatacggatgcaaggaggtgttcccatttaagcacttcttgccaagccaattcgttgttagcattgtgtattctgatgatgttgtccatgtcgcgctggtccaactgatcgtcgcgccaacgccaccctaaaatttaaagcgatgtgtggaaaatatcttgaaaattttcaatggaataacccttcttaagcattgcattccaaaacatctgagccgaaggatattcccaagtttccaattggccatcgaccatcactttcgcttttggaatggttgacttttgacggtttgttgaaagaacgaagggctgatcaggggctggcttctgatttggtggtggcatctaaacacacttagcttttcttaaaccaaaccaaacagtcacaaacatacagcatttgatgggtcaatttggtcgccgccattcgacataggacacccattaacgctagcaccgcccgcaagaggacaaccgcccgacattttcctgctcgtgagacagaaatataaaacctataaatgtgtaaaagcatgtgttcgattataaatatgtattaaaagctgttgcaaattgtcgcgtgttaaagaaaatgggaagaaattattttattgacaaattgtggaataggtatttgatcattgaggcccaaaaatgttttgttttccatccatccagccaactgtgatgagacgaatgaaaaccggaccagcaaagcgacaaacaacagccaaatcggtggaaggggagaggcagaagtttatggagttgataactgataacctacaagttcaattaacacctggaaacccacaccgtattagtaagcaaacgtttgtaagcagaaaaagccaaagttccgaagcaaaagaagaaaccgacaatcccagccatcagagcagttcaacgacgacggttagtctggcgcaaaccggacgacggagcgagtgtggtttcgccgcgtatttttcgaaccaaggcgatgtcttttggcattatcgtgactcgcccggcatgcagggcgcacatattgacatcctcgaacatattaacgagatggcactcggtcatggtctgcagtgccaatagggccttgccctgccagcgcattccatcggcgaacttcatggtcacctcgcggacaacacgaaagaacgtgctgcgcggtataagcagattgacgctttcttggaatttgcggatctcctggagagcgagcgctccacgctttttaaagcgtttttgttgtaatggttcttcgggtggtggtagcaaatgcgatgcttggtaccgtgggcggcgattcggggcacttttcgttgccaattgtcgcttagcacgatggcccatgtcagatcccgcttttttgactgcttgggtgggcaaattttgcttagaaaccaaagcatcctgttcagtcgctttcttttcactcattctcttcttcgcaatttgcttggttcttgccatttgtttttatttttgggttcacttcaaacaagcggtaattatttaaagtaattagatatttatgtaatcaaatatgaattttatccttaaattcgttagagttttcaagaactgaactggaaaacaatgaaattcaacaactttcgagaattatttcaatcgtttaagagttggcacacggagatggacaactcttttcctaaattccaattccgaatcgaaaatttatagtttaaagttggcatacggaggtgtacaactttgaactttctcttttgtacgagtcgtttaatttgtttatatacaattttagctaaataattcgtttggtctttgaatagttatatgtatgttgcttttggtatttgtttagtattgtacgaatgtacgaaagaacaaatcaatatattggaatttgtagagaaaataaaaaagaaaagcaatgaaagtgaaaagaaaaggaaaagaattcaattcacgtgtgtatagaatttcaaaattccttctgggcaaaggagagagaaaaagaaaaaagaacgccatacactaactaaccaaaatcattgaatcattaggcccagataacaaataatgttacctaattaggcccagaagaaattaaatatttattactttacatttcattttccattggacgtgcatttccaattttatttctattttattgtcctaattgtttaggattgctctattatacagtcaggtgttgtaaaagtattgccaaaagtacgacagcatggaaaaagcgaccaaaatttcgttcagcgtcacccgacgcgaaacgacccgtgtcacgatgaaatgcaatacttttaaggaagggaaagaacaaaacagcggcgacgaggaggcggaagaagcggacgaacaccggacaaagaaaaggggcatcctcagcttggaagacggcatcatcgtcgagtcagtgaattgtttaaaccaacattagtttggctttttcctgcggttgtgcaaaatattcaaaaagttttagtgccgaaccgcttgccaagcgggagaagaagcagttggtcatccccgtcctccaagtgtccagcagagcacaaatttctcgcattcagaagctggtggacgagggaacagccacagaaacagacttagcacgactgtcgctgttaatcgacagtttggacgacgagcaaagggttggtggtggaatgtcaaaacaaattgcaatggaatgtgctttcaatttgcttttgaagaaaactaccacattgccattggacgcgcgccaccaaaccgtgccgaccgttgcggtggcggacgacgacgacccggactacgcgagtgtgccggtgggcgagttcggactggcttttttgcgaggctgtggctggaaggacgagaagtcgtgcatcggcaagtcaaatccgcaggtggtaccactgcgcgtcatcgaaccaaggccaaaggtgaaaaaacgggagattatttattgcatttcttaaattagttgtagaataaattctctaaaattggcggttgtattttgagaatataaacattgccaataaatggttactaagttttgcttcatttccttgcttaacctaaatggtattcttcaaaaaacgttttattttacggggcatttccaatgcattttaattatattccgtttgattaagtggttggtcgtttgcttatagaaagttcaatgcctttcgcattttgcaaaattcaagtggtaattgcgtaatggcaggatccagcagtgttggacgcatttcccttgtccaagtacatcctagagttctgccgaaaaagaccagtggatgtttgagaggagagcaccgcaaaattcgttagtgccaatctttaggtttccactcacaaaccaatgaatttttactttttccttagtttttatcttaaattcggttactaatctgttgaattttttagggactcggacttggcgctgtccttccgacaatggcaccgccgacggccaacgcgctaaaggcggcagaaaacggtgacgaagaagcgacaacacttggcaaacactcctacgtcagatgcttatgtatgtggaacattgaacaatttttaaatgcaattgtcattccttggaaagggggtttgggttaacttatgaaaaatagtcaaatttgcccacttagattttcatatttattacctaacaaatatttcagccggtctgaacaaaggctcttatggccaagtgatgtcaatggacgaggagaatgccagcattttcgtcgagttggcatggccccccgccaacgttggcaaaacggtgcgtgtcagccaatgggcggtggaagtggtgagacggaaagagtatcgcgagtgcgtaaagggcggcagcggaggaggaggaacagcggagaacggacggaggctcgaaagggtccgagtctgatggaattggcagcaccaacccgtccaaataccctccataatcggccacaactttcgccatcacacggtcgacacgtcgtacgatttctctgtctcctctcggcacaaattttaatcgttcgatttgttatgctcctggtcaaaaggatattcgatgctgaattttatgttgccattcttttctaaagaaatataaaatcgaatatccttaacgacccaaagtgatcgattcatttcttttttaactgaaaggaggaaattgcacatatttcagcactttgataaagagtacctcctaatttggtccaatttaataataatgctttatcggagtgtatgaaaatctttaataactataaaaataattaaataggaatgtgtaataaatagggtgctaaaattattacaatatctgatgaaagtaaaaattgatggcaattattagacgatttgcatttgtggcaaatattgtgccggattgatggtccgcaaataaggcagaaactccggtcggtagtcactgtaaagcacggcgcttgaactggtgccgaggaatttatcgaacattggtcgattaagcagttggagtctggaattaaaagagggttaagggtctccggttttgcaaaattgtgttcatttccgtttcacctgttcccagttactgagcaaaggaatttgtagtaattttgcctcaaagcgtgtggttccagcaccgcaaggccgagcaaataggaggagaggacggagaagagaagggcatcggcccacggcaaaacgggcaaagtgccggcatcggccaaccgaaaaaaagcaaactgaaataggacaatgaataaagaacaatactttttattggcaggcaaaacaaacctcaaccgttttccaaaacgcgtacagtgccaaagtgttgttgggccacagaaatgccattgcaacagttgcgctgattccgacgccaattggccgacaaatggtggcactttttgttgggaagaagtgggcacaaaagcactgggaaaactgtaaaacgggggaaggtgaatggattctttttgggttggagcaaaacagctcggcctcctgttttcggcaacttcgagtataacttttacctgacaaagcaacggcaaagcgccgatgaaagttggcactcggagaagttcaaacagttttctgatgcttttatttgaagagacagcctttggagttttggtgtttgatctgctgagagangtgaacactttgagncaagtgaaagcggcaacggaaagggaannagtctcagactgagctaaat

SEQ ID NO: 2291 - DNA, 3602 bp, Heterodera glycines
cactttgtcagtcgtttcgcgtcttccatatttggagatcaatttgccacccgaacgaatcgcatttttgatggacgtgaaattggaatgtgactcgcgcaaaacggacgatgagtgaatgagcgctgaggttgtctgttccgactgttcaacctgcgaatgagagaagttaatgacaattccaccgaaattatgcaaatctgtgtatgggtattattcattcggaatttgattttttcgaatacaatgaacggtgtcagttaactaccacaagctttttaattgaaatccctcccgaattggctctcatccacccacctgttgacccattcggttgaccaatgtgctgagcatttccgtggtgcgttccccctgcgcgcgcagtgtgtccgaacggcggtcaaacgcagtgcgacgcgccgtcgcgacagtgcgacgaaagagttggtcgcgcaaacgccgctcgcgttcggtggccgtcgctgaaccaccgccgacattttttcttttcatagcaaatttttgctcggaaaaaataaaaaaattttccaaagaaaatcagaggtaaaatgtcaaatgacaatttatgaaaaaaattttttaaaaaattattgaaatttttgaattaaaatacaaaatgctaacaataagaaatttaatttttggttagtaaattcaatttcttcgccaatcgctttgaagcgccggtcaacggacaccggcgcagttgttcaaacattgtgacgatttggcctcggaattcgtccgtcccgtcaaattgaagtgcaaaaacgcgcagagacacatcgacaagtcgagagacgacattgtgagttctgattaagaaaagggacataaataatacaatcacattttgtcgtcataattgtaagcaattttggtgtattaataatattaattaatagagctcgacattttggaaaatgcctgtacctgtatctgaatctattgcccgtcccacctcctagttcgggatttccacaaaaaaacacacccccaaaaatcgcttttttgaattaaaccgcccccgaatccaacggtatgagctaagccaccccaaaatgacctgcccattgttgagctgaattttgtgccgtcagcgtccttctcggcccgaatcactgcctctaataatgggcagagaacctgaggaaaattgcaaaaaaaatagtaccaaactcaaaattaatcgatggaaatggccaaaggattcgaaaattgatactatcatccattgaattaccttgcaacaattgagcagtccgtcccgcgtcataagcggcgaagtgccgtccgaagttgtgccatcgttggacggacaaaggacgggaaaatggaaataggctggcgaagggagcaaagagagaggacagggcgaacgaatctgtaagaaaacaactaacaataagttaaaataaatcaaaaaaatgcggcaaaataaacaattactctcttaaaatgttaaatgaccgctccatcgcttaccgttgcctctccgttttcaaatgaaatgtccaaagtgcgctcgggccacaatttgttgttgctgttcgcttcatcgccgaagacagtgacaaattgggacaaggaatcaagcaatttggtactaaaagaaattgaaaacaatttaattggattctaaatgtgccaaacaaaaaacgaaccgaccgattttctggcttccgttgaccttccatcagttgcaaaaacgcatcgaatatttcgcgatttttccgacacaactgtacatatttgcgcaataaaagtgataaaatgtcgaagcacagtgatcgaacagacgaacgaacatcggaaatccctgaaaattttggatttgctaaaacactttcaaattgtgccgttttccgttattcattttgtgtgtaaaaagaaaaaagcatggccatttaccggtgagaacgaagccacaaaaaaggacgaaatgggaactgatcacttcctcgggcacttcacagaccatttcgatcagcagcttcaactgattgcgagttgcggtcgattttagctgaaatttccaaatagtttttgagttattagcaatgttttttttcgtttcaaaattcgtttgtcatttaaattcgaactaccctacccgtcccctttttttccctctcacctcgcgaataattacagaaccgatggccgggattattctgcgcaaatgcctcctcaactgatcaggcgagtttttgaacagaaggcgaacaccttgacaagggatccaaaacggatgtaaatttccgaaagttgtgcattttgccaccttattccgcatgtttcccctccatgctcaccatggatcgcatctcggcaaatgttttcgttgtaatggcccagctgtgccaccaattcgtcgatgcccttttgcgggtgccgagtttcgacttccttcgccggagtgccctcgtcgccttctctcagctgctccaaaatgccaatctttttcacacttacgcgcgtgtcggtgccattctcatgtcgcaatgtgcggccaacctttagcttctttttctgaaatgtcttcgcatttcgcacggacggattgaagcgctttttggcagccataacaatcttaaaattataaccaaaaaaattattttcaaaagattttccaataaattgtttgaagagcaacaattgttaaatttaaaaaatattataatttatgcatttttggatgaaaaaaatataatgccgtagagagaatttggacaattaagttgtttaaaaataaaataaattataataagaacaaagtgagaattttggtaatacttaaagtaataatatgatatgaaagggttgcaaaaatcacatcggtaatcataatgaaacaaataaacgaaaaacggatcaatttaagttcgtgggaaaatgtaaaaaaaagctcattaagaacaaaaatcaaggcaagtgaatgatgttcgggttgggcggctcctcctcaccaatttgtgtcaatgtatgaacgggcggggccgggcgtgacaaatctaaaatcaaaatttcacattgtattttcgtgaaattctaaatttttgatagggaaaggagtgggttttatcagcactgtccaactcggcacgaaaattagattttattcaattgtctttggaaaatgacggcgtattgcaatgagccgggcaatttctatgtaaaaagtccgagcattccacccaccaaactcgggaccaattctgactcgtccgctgcttctgctgttctccgccgcttctccgctgtcccctgcctcttcctcctcccctccgcgtcctgctccaatttgttgctgttgttgtgcagagcgttggcccaaccgacgaatgtccatgaaaaataggacgaccaaaattgcacaaacacagccaccgggcacaaacgcaatcacatcacggtagaaattggcacaagccaatgtgtgctccgccccgctcgtcctgcacgagggattgttcagctccaacagccaaacaatcgccccgttgctcagcttgtccaaaaagctcatggcaccgtaaacgaacgcagcactctcctggcaaaatgtttattttaggaaa

SEQ ID NO: 2292 - DNA, 183 bp, Heterodera glycines
tataataacgctgcggacatctacatttttgaattgaaaaaaaattggtaattactctttctttttctccatattgaccatcatactcatactccccccacccttttcttcttccgccacccacctcccccgctacgcgccgctcggggatcgatccccgatctagtaacatagatgacaccg

SEQ ID NO: 2293 - DNA, 195 bp, Heterodera glycines
  unsure (1)..(195): unsure at all n locations
tcctctanantctataataacgctgcggacatctacatttttgaattgaaaaaaaattggtaattactctttctttttctccatattgaccatcatactcatactccccccacccttttcttcttccgccacccacctcccccgctacgcgccgctcggggatcgatccccgatctagtaacatagatgacaccg

SEQ ID NO: 2294 - DNA, 1590 bp, Heterodera glycines
  unsure (1)..(1590): unsure at all n locations
atccctcattcaaaatccacttttttccagcggcgcctcatttgcaccagtcggctccaaaaattccttagacttttataaaattaataaatccagaaaatgggtaattattggaagaatctattaataaatctggcaaaatttgatgtccctgtcccaattttggtctctcacaaatcatttccaaaaaaatcttttcgaattaattttgttccattcttttcctggataatttttgttcctttttgctttattttttttttcttccgcattttctttattccttttcttcccatttttctccagaaatttcatcaaatgccttttaaatttcatcaaatgccttttaaatttcatcaaatgcctttttttgtagttctttcatttctgatttaattcgactaattagagcatttaatattaaaattaaacagaataaaagtaataaattcatttttcaaagtattctcgaaatgtatttttttaataatatcgaaaacgattaaattttacttatccaaatctataataaattcttaattcttttttaattgtgaataaatggaaaatgaaattgaatttttttaacaaataaaacaaatttacttggttttctgctttaagaatctttaaattattctttttttaaaatttatttcgaaattgcagatggaaagccaaatttggagaccgaattttatttaaaaaacaattggattttctcatgaaaacattgcttgcaaatttccagaaaatttcatttagtgacaaattttacttgaattactttgttgtaattagcgtacaattttttgtttcttctaaatttttaatcaatttaaaaataggaattaaattttatgaaaattaggttaaaaaatgagctttatctcttaaaattcacattgtttatctttaaaaaaatgattagttttaacaaaagccacacgtcacgggacattgaatctgcatacgattcgagtacaatgtgcaataatttttttcatgtttttctgcgcagctcatcgaaccggagtatgaaatccaatctttgcaacctgtaaaagaaagaattaaattatttttataattacttttcgatattttataatttaatcgctataagcccaaacaataaacaaaaaatttcgttcgttctgttttaagaattaaaaaaaaattcttttcaaaaactaaaaattcttttcttgttttaaaattgatgaaaatgaaatttttgcaattttgcaggtcaataaagaaccaattaataatttttcgggccggggtagagttaataatgctgataaatgaacaccatctccttattgaatgctttcgaatgatatcgaaaatgagagatttccttggcaaaaaaatttttgccaaccaatttcacatttttcgtatcattcgaaagcactcaattatgagaagttttctaagcatatgttaaacaattgggcgcattggaaaaaagaaatcaagctggcctataatctgctgcaaagttacctcgtccaccgccaatatggttgngggaaggcccaactccgtttgtgtacgccggcctcctgctgccacctctgc

SEQ ID NO: 2295 - DNA, 3515 bp, Heterodera glycines
attcacagaaacattttaatgtaattaataaatggatttgaaatttatttttcaaaaaatgggaaagaattaaaaagttttcatggaaaactttttagtgattaaaaataatttaaaagactaaaatttcatcctcatccttaaaaaaagttttacaataaattttaattggccaaaattaatttatgaagttatcataaattgaatgtaaatttattgtttaattttatttttttaattttcttaaaattaatttaaatttataatttttttaatttgatttaatttttcaaatttcttaccccggcacccctgcggaaaagttgttggcggttccgttgcgaacgtcctgtaaattaatgccatgccaaattccgagtcctccttgcagcacaagtgcaccgaagcgtaataagtgagcggcggatccgtcggagggcaaagattctgtctcgactcatagacaaagtctaaaaaacatatataatatttttaaatatattaatggcttaatgttgttgcatttttggtggaaaattactggaaaagaaatccagcaatttttcattttttccacctttgaattttttgaagttttgacaaatttattgttttaaaacattggtaatttggactgaatttttttttcaccgtaaaatctggtcaatttgtccatattttgaatatttcaataattaaattaaaatttcttagacttacgagtacaataatacattgcttcaacagccacgtaaataactgcaaaaaaattgaccaaaaataattttaacgaaatttttcccatttttaattcgaattggaattaagctattttttcaattcttttaataagaaatgtttccattattccattttgactaacaattttgtgttgctttatttgaatagttgtagtgttaatttaataacatttttgcttttgtttaacgcaaatttcgaaataattatcaaaatggaacgacaaaggaatacaattaattaatcatttattcattaatcatttaattactcatcaaaagctgaaataacaaaagcacaaatacccaaaattaaattctgcagtgaacaaaaatttggtaataacaaaaagagaatttcaaattatatcatagttgggcactttataatatttgtgatacggtataaaacgattgattatggccaaatatggatttattccattcgacagaaatattataaattttaggtggggacttttcgacaataaataataattaagtttcaaatttaggggtgtaaaatcgtaaaatttatccaaaaagcaacaaaattaagttaattaattgttgaaaacataatttttaaaacaaaagattcttgtcaagaaaagaaataaataaataagcttgggcattagatgggggtataaaaccaaggagtttcaaaatgttaaaccgctttaaaaccggaaaaaccgttttggcacttttcaaattaaaccggtttaagaatttttttctcggcattaacaaagcttggccaaaaacttttggtgtcattttatagaggacatataggggtatttaaaaaacataaaagcagatttttctccaaccaaaaatttttcaatattcgtgtaaaaatgacaaaacggcaagtttttatgcaacgacctagtaggatatattttctgaaattttttttggacgattcttagggggttatttttcgtttttattacatttttattcataagttttgggcaaaacgcaaaaaaaaatcaaggggtataattttttaaattggtgtttttatatgaaaataatttcaaattaaggcaaacaattttattaattgattacaattgcaaataattaaatattcgaaattttgaatacatttttctaaaattaataaaatttgaaaacccagtatttggtcaagaaagaaaataaattacaaaaatttttgccgagataaaaaaaaacaaatttagtggaagaatttttgaaaatttttaaccaagtcgccaaaaaatgtgatcgcgtcaaaaaaattttttatttttcattgtatttttgttaaaaaatttgagaattttacaggaaaaatttttaaaaattgcgaaataagaacgaaaataagcataaaacgctaaataagtgcaaaaacttattttaagggcgaacctctaaaatatgcatttttaagcacgaaacgccaaaataagcctaaggtcgaataagtgcgttaaaacaagaatttccgagctaaaaatgtgtttttcgtgcatttctcatcgagttaaagccgcagaaaaaataagcaaaaacttattccctactaatgacttgaaaaataccttaacaaccacaaaaaaaacaacatgtttttcgtgcgtttccacaagtgccattttcccttttttcgaattggaggagtgaaactttgaaacttaaaaccaaaatgccgaaaaataaaggttcaatcggtgaaaagacaattgaaatccgtcagaaattttgcgtacttcttgagaagacctaggggaagagaattgaaacaataactcaaggcacgactaggctgtatgacatttcgcctgctaagcaaaaatcggcgtttagcctactaagtcaaaataataaagtgctgatcacgaaccaaagcttagctttgcaaaatcagtgttttttgtccatgattttttataaagtatcgtaaaaaattaatccgcagccaagcggattcgaatccctgaccatcgtcataagggccagtaattaaattttcaaaaaatcgtaaaaaaaaaatttgaaacttatcttcttcaaacattcaatagatcatgcaaaagctctttttaagctctataagaaatatgtatgtatgaattttttacgcccgtttaattttcataaaattttttgaaaaaaatcaagtactcgatgaaaaatcatagacaaaatcattgctattgcaaattctgagcacgggttcgtcgtaatcagcacattttttatcctagtagaaacaaaaaccaaaactttatttatttttcgtcgggaccgcaattctgcagtattaccgactttagtgctttactgctggaggtgttctgctcgtccgatttccagcttgcggtgactttttgacttttgcagaactcttatttttagttttgatagacgaatagaaattcaaaaagcttgcctcaataaaatgcaaagaatgataatttggtgaaaacttctcttttaaactccttttcaatcatttctttgtgaattaattgcaattcatttcatattttttattttccaatgattcattcattttagtctctaattcatgaaaatataacttaacgcctttttaaactagttggcacaacgcccggttggcgaaacgtccgaatttgggttggttgtcgaaatgtcatattttgggtgagttgacgaaacgtccgaatttggcttagttagcgaaatatctgttggcgagatgtccagctggcgaaatgtccgtacacc

SEQ ID NO: 2296 - DNA, 1383 bp, Heterodera glycines
catgtttttcgtgcgtttccacaagtgccattttcccttttttcgaattggaggagtgaaactttgacacttaaaaccaaaatgccgaaaaataaaggttcaatcggtgaaaagacaattgaaatccgtcagaaattttgcgtacttcttgagaagacctaggggaagagaattgaaacaataactcaaggcacgactaggctgtatgacatttcgcctgctaacaaaggaaggtccccaggtgtccgtgggatttccgaatgaaacttggtgggtgcatagagcacccatgggttcttaagaaaaatggtttcaatttctgccaaataggtacgagtgccgagttatgacgtgccaaactttttttaatcccaataaattgaataatcaaatgctctgttctgtgctgttcagtggcgcagaggttgtgctctcgcatttcctttttccccccacaagttcgaatccctcttaagtaaattaatttttttaattttgcccttgaatacccttttagaaatgtaattattttcatttattttttaatttcataattaaaactaaaatttatgcattttcgcaccatgtggtaatcatgaaaaacaatgagcaaaacataagaaaatctcacaataaccgcaacgaagtaaaatagtattttcacaatttattttttggcaagtatctttatcttttggcacttcaaaacaaaatttgaccggatgacaaaactctgattggtagtcgtgatcaaagtaaccggcttttctccacgaaaagcgtaaccaattggtaaacctttctgcttggaattgattatgtattaaagattgcaattttagaatattgtccctgtggtggagattgatgttaatgtcataaactagcacaaattgggtaatttttctcgtgaattctttccacattctataaattttgtacgattcttgaaaattattattattttaccgaaacacataaacatccaaaggttggcaaattccagttgcgtgtttcggaatttgtttaacgttaagttggacattctctggtggtttaaaatcattccaccctgtccaactgtcaaccatattcaagggcaaaattaaaaaaaattaatttacttaagagggattcgaacttgtggggggaaaaagtaaaggtgagagcacaacctctgcaccactaaacagcacaaaacagtgcaatagattattcaatttattgggataaaaaaagtttggcacgtcataactcggcactcgtacttatttggcagaaattgaaaccatttttcttaagaacccatgggtgctctatgcacccacaaagtttcattcggaaatcccacggacacctggggaccttcctttgtcagcattt

SEQ ID NO: 2297 - DNA, 4696 bp, Heterodera glycines
taactaattaaatatggggaaataaatgcaactaattaattgcgttaatagaacccccccccccccccccattatgcagctttcacaatatacacctccaaaaagcttgatttttccgcatcttattgctgcaatcaactcattcgttgtgtttaaattctgagcaaattgaaactaaaaatgcttctctacggctacgatgcttagttttggctccaattaaaaaaacaattatcgagcatcgttttcttggccaagactagtcagtgctgtgctctccggtccaattgtccccgatttggcactcctcaccttcctcgccgtctttgccgtcttcatctttgtcctccttatcatctccgtcttcgttctcttttgcttcatcttcggctccatcctcgtctgctttttcttcatcctcaccaccttcggcgtcttcttgggcaccctcggcatcatctccacccccctcttcaccttcacctgctccatcttcgtcttcgcgcttctttctcaacagcaacgcgtcgcctccgttcaaagtcgccttattttttattcacaatacagttatgtattttaatgaatttaaaatcggattaaaaattataccggaatggcattggccaacccattttcattgggcatgaaatgaagtaaaattatcatgtaaaccgtgacattgacaagcagcagaagcgagtgcattttttaaattacttctatactaaaattcatttattaatttatttaaagaaaatttagttaagtgacgaatcattatttttcaattttaatggtgtatttttattaaacatatttaataaatgaatgtgagactgatgcatttctcttattttggcattccttttatattgacttaaaatgtagtgaaaatgcgaattagttattattttatttacgtaataattttctattttctgtaaattcataatttaaatgttttcatagctgttcgtttaaatgaacaaaaaaaaagaaattagtaattgctcaaatatccacaaattttattgctttttttgtttatagagaaagtttttttccatttttggctttttatttgctcaaacataatgaaatttattatggtgactgattgagtacagtcaaatcaaaaattaaaaatgagcttaattgtttaattgatttaaaatttgcagaaaattgacaatttggggtttcggaatgccactttataaaatgccaaattggacgcactttacttgctcaaaaatcaccaatacagtatgtatggaattgtttaattttagtataaaaatttaattcaaaaacaaatgattatgctgtattcattaataatctttatataattaattgaagtaaattgtgttaattttaaactgacgaattgtgtaagtgtaagttttaagtcagcataaatgttatacttataaataatagtagaattataaatttggcatccttcgaaagctctacatgtttagaagcttttgacaagctatttctaagcgattgaacagcttataaaaaaattgaaacatgaatactaccaaaaagtcagaatttttgcatatttttacttatagcttttttatatgtcggtatatctttgtattttttggacagccaatagagcttgttaaaagtattcgaatgataccaagtttattggatttggtcaacaaataaaaaagtttttgcttaaaaccaaaaaaaaaaattatagaaattccctcgcaattgggagcagcttaataagaaattaataaagagaaaaaaacaaaaataaaatctcatagtatcctcgattaattagcatcatttagcacatggaacgcgaccccaaatggcatttagtttattacggagatgaaatttttacaatttgccgtttttagtcatgtttttaatttttaaattctctcttaaagaattttacgcatcttcccgcgtcccgtttgtttcttcgttgcaccaatttcgactggcacattgccaatgtatccttttttacgccaccccttaattgagcatttggcgtactggctcgtgtacactttgttgcaacagtttttgtaagtgcaactgtagcatttttttgagcatacggtactcgcaggagttgagccagaaacgtctctacagactccgtttggttggcattcgatgcccgcttcggtcaaatcctataaagtgggtgacaaatcatcgaaagaaattatagttctttttttattgtcacaaaattctttttttgggcagaaattgtcacatcacttttttgtgggtaaagaaaaaaaatgcatttttggcattttagccctgaatgttcttattagcctgcaaagtaaaaaattgcgtttgatttaatatagaaaattattgttttgtgatacttgacaaaaatcttttatttgcaggctaacagagaattttagggctatgtcaagaatgccatatttttctttctttaaataaaaatcattttttattcttatttttgtttaaatgtttgatttttcaaaattaaaaaaaatagattatcgaaggtgcaaaaattatgtttaaaacaaattaaactaaaattttcaccaaataaaattgcaggaaaattaagattgcagcaaggttcacgaagaacatgaataaatttaattttggtttgactattacaattttgtttgaaaaaatttaaaatttgttgacatttcttttgtatgtaattcttacgataatttaaaagcaataataatactaactaatatttttttaaataatttctattcatttaaaatattttatgatttatatttgtatatactaaaactctgctcgcttaaatagtggacaaattaagattaacataaacaaacaaatggccaaaactgtttacattaacaaatcggtgaaccgcatttcatttatttttttgttcgttcgttttgccttttttccattgtcattttccatatttattactaattttatatttcttcacttttcatatgattccatcactttgcttttacttttgattctttgagaattaaccatactaattcaatgtgtatgtcacgcagtttatgctgttttttgaaaaatttatcgacacgaaagctttcctttccactttttttttgttttgctgctttcgaccggtgttgaatgaatattaacgaatcaaaaaacacataaacaaaatgttgcaatcgatttacctatttgtcacctcaagtaattctttcgttttttcattttgattttattttcggctctttgttcaaccagctcttattttttgggttgtgacatgtttttcgttgtcatcaaattcaataaacttggtaccattcgaaagctctaagaaagctttattaaccttcaagaaccgaaaagccgcaacacttaaaaaagatagagaaaaatcttcaaaaatgttgtcttagataagaacatttggcatttttaaagtagggggggggcgatgcatacaatgagggggacattttttttatcaaacgaacaaagggagagtaaaaagaattcaggggttttcatgttcgctgattacgtaaaatgagatccatttcgactaattccgaaccccagatccgaatttgaaccaaaagtgaacaaaaatcaatttttcaaatttgtttttgacttctgttttagtcgattttgggtcagggattcgaaattagttgaagtagttgttatattcgaaagattatttttcgaagcgaaagtctttgaaaaaagaaagtaaaaaatgaggtatttatgtaaacaaaaaaacacaggagatagtgttgagaaaaagataaacaaaaagagaaaaagaaagagaactaaaggaagaaagaaagggagggaagttggggtgaaaggaaggaagcgagagaatttaatgaaaagagagagagaaagagggagaaaagagagaaacagggagagagtagagaaagagagaatggtagagcgaagagatgtttagtaaatgatgacatagagacaaaagaaagagacaggaagagaaaaggagacaaagaggagagaaacttaacttggatgaaaaacaaatttattaattaaacctctatcaaaatttgtttaaattatctaaaaaaccccgaacagttggcgccgcgaagcggcgcctatcgctcgtctagatatactaagtcggtgctgtacataaagctttttgaataagatttttattgacacgaaaacttacaaataaaaaaaaaaagaaaattgctgaaaagaatatttatagaatcgtttacttccgaatttagtttttgcactgtatattactaaataatttttattgttatttttatttaatctaaaattattatttttttctttaaaatattactttgatatgaccatgagagatcaaagataagtaagtgggagagagagaaagcaaaaaaaaagggaatgaaagtgagaaagatagagaaatggagagagacagagagagagagagagacaaaggcaaagaaaaagagataaatacaaaaaagaaacataagaaagaggaaaagaaagagagatagaagtagatagagacatagagagaagagagataagggaagcgggatgtgggagaagagaaaaaagaaaaagcgaggagaagataagagcaagactgtgagtgagaaagagatagagagaa

SEQ ID NO: 2298 - DNA, 2076 bp, Heterodera glycines
aaaaaaatttttttttttgagtttttggtcgacaatttttaaaagggtcaaagttttatagaattttgcatgctaatggattttcgctcccacccagcgccggaaaccggcttaattttgccctaattgtaaaatcctgcccaaactgaacatgtctaaaccggttttttccccaagaaatgtcagaccggttttcatccaatatttgctactaccctaatttttcaaaaaaaaaaaaaattctgacaccaagttgcatttttcttatacatataaccgaccagcggtgctcgactactggtgctgttcgcttcctttgtgtcagcatttttgttgttgatggtaaaattgccaaatttggagattttgctaacaattcgttggcccctcattcaaacggtgttttgtccaataatttgtagagtcaatttttataattttaatgggggaaaatctaatggaaaaattgaaaaattaatacaagtgcaacaaccaatcccaacaagccaagccaagctcggctctgacggtaaaaaaaaaagaaagaaaaaaagcgccaaaaaatcattgatttaataaacaaatgccaaattcaaatataaaacaaagtgtcttaacagtaatcaaaattcatatttaaagatcaaagccccccccccccccttaaaacatttcgcagcagttaaaacaaatattttcacatcgagtttaccgtattatctctaattatcaccccggggggattattgttcaacctcctcagaaaggggggattattagatacggggggataaatggagacgggggggattatttttcaactgattttttagtgaaaaatttttgaaatttttttaaatatgtcgccaaaaaatgtaatcgcgtcaaaaaacaatcattttttgttgcatttttgttaacaaatttctgaattttgcgggaaaaatttgaaaaattgcaaaaatatttacaaaacattgacaaaaccccccaaaatattcaaatacgaatatgaacctttcagaaaattctgaattgttaaatttttcattttttgagccagggaaatttatgctaatttttagaaattaataagaattttatttgtttatttgatttttcgagaaatagatgaaaaaaattaaaccagaaattatgaattttcaattttcagaaaaaattcagcactccattctgaaaaggagttttcataaattaaaaaagaaagaaaaatctgtaatttttgcaaatgaatttcgattttgaattaattaatttttataaattttaaaaataaattatttcaaaaagttccatttatcccccggggggataaatggagacttattgttcaacctcctcagaaagggggggataaatggagatggggggggggattaatggagacggggcgataattagagataatacggtatttgagttacaattgacctacatataatatttatatgaaatttttagcatattttaaacatgctttttcaaggtcagacatgaaaaaaagtaaacaaaatttattggcgatttgaaattggggaaaattttcttgagtttgacatttgaacaaagcctgagccttgataccataggttgacctgtaggcccacaaaaaatccaggccttgtttcaggtccaggttgaactctattgtattatttatttacagttttacacccaaataaaggggtgggattaaatgtttttgaaaaaaaacaatcgcataaaattttaaagacataaagcaattataaaaaatggcaaataaattgaaaactgtaaaaaaaacttaatattaacaaccatgacgtagggattggcatttacagccagcagcgacagatttactcacacttcatcaacaaaaagggaaattgaactatgtatataaatgcgagaaaattggcggggggggggggggagtgaattttcgggggtgggcgatggtctcacaagggtttgggaacgccgggggggggatgttttgggaatttgggcaacgggggggggggggtataggtagagtggggtaagtgatttgtgagtaatggtgatggg

SEQ ID NO: 2299 - DNA, 4831 bp, Heterodera glycines
cttcgccccccccctattcaaagatggctgcggttcggggatgggtgggatatgtgtgcaccgtccgtcgttgatgagtgtgtgtgtgtggatgtgagtaaaatgacaaaaaattcaaattcggtttttggcgccatccaacaatcgtgccattggatgaagggggagagaaagtggaaaaagaaagcagagaaagaagaaaagggcgcgcagacaaaaagcttcggcagaggatttgagattgagcgcatcaatttattggatgggaaaagaaaaaaattagactttgaaattgaaaaaaaaaatcccaaaaatttcaaaagcatttttccacacttttgttgaccagtacaacctcaaaaaacattaaaaatggcaaaaattttgttaaaaaaaatcccacgagggcatggaaaatcttttagatgaactccgattctcagtctcgggctcaggttcatttgtcgggcttggtttaaaatattctcgcactttcctatgccctgggaattttactcaattttaaaaatttaaaaaaataataataatttgtgaaccccagggaacaaaagtccattccccctccccaacctttgcccttggtgaccccatacgcaatggtacgttccattgaaaatttaatgtccatttgatttataataataaattttgaaaaaaatttttctttactttcccatcaaatgtcattaagtatcaattgctccatcagttccatcaaaacagtgtcataatttgttttattttcttcaaattttgaccttccatcatccatccatcaattccatcataaatttgggcgcccaattcattcattcgttacggtctttagcccccccccccccccatagataagaaagaggaaaaggaaaaggaagcaatgaaaatttgtttgttttcgcccaaattatttacaaacagttaattcaaatgattttctttttaattatgccttaattgagaatcaataaaacctaatcggattagctaaattaattatgcattgatttgtttttcaaaaaatatatatatttttgtttatctgtccacctcctgaaaaagtaccaactgaaaattttcaaaatcagtatttgctcgacaaaaaaccagcgtttggggttaaaaatcactattttagaaagttttattcaaaatgaaaaaaaccatgaaaaatattttttttttctgcggcgagctttttttggaacagtgggccggcgccgcctcgaaaaatttttattttgaaagatagggtaaggtgaccggaaaattctgaaattttgcccgattttttaaacaaatttttcaaaaatgtgattttggatcaattttgaaaatgttaaggaaattttgggccagaatgtgccgaaaggcgcagccgggggaattttgagatttttaatgaaatttcttaagaaaatagtataattttttggaaaattttcccattttaattaaaaaagctacagaattaatatacaaaaccatattaaaaattattgaaatgcgaaaaatatttatttacctatatatttgttgttaaatttgttgttaaaaaaattaaatgcaagccgcaggattcgaacctgcgccctccgaagaggactgcgacctgaacgcagcgccttagaccactcggccagacttgctgatgaaaattacgaattacccttcattaaaaggcaattatttaattcatcaagataattaaatcagcagagcataatgaatgaataatgataaataagaagcatataaagaaaacaacttaatttgccaattagtggaagaaaaattgtaccagaatttagtaaggcataatttcctgggaataatgttttaaattttttataaaattttaaaatctcagaaagtttaaaaaatactcggaccatcggacaaatcggacatcccttaagaaaaagaatctaaattttttattatttttgatgattttgcataaattagaaaattaaaattattttaaattgtaattttttatggtacacaacaagaatttttaaatatttctcaattaggtaagttgtttaattataaataatagaaaagtatttaaataaattttggcagaaaatgaaaaaaattgattttccaaagcaaatcccgataatcccgagtttttaaattgtcaaaacaacaaaaaataaaattcgttcacagaaaaaaaagtggctcaagtacagtttatgcgtccattcaattttttatgcgtccaatcaaaatttttatcaggtggctatgtttcgggtagctctatttccgttgacctgcactttaactcaacatgtgggatgccagggcttaatcattgacaaaatgggatatttaagatcgaagccttggcatttttgcggatgctctaacacaacaaaaactgcgataaagatggttgtattaacgaatttagctacatatgaaaaggaaaacaatttccgtgaatataactagtaattctgagaaaatattcaaaattttttaaaattctagcaaatcttggtgtgatacaattcgaagtattgattggacgcataaaagtcgattggacgcacaaactgtacttgagccaaaaaagtacttaatcatcgaaataattgaaggatatcgacaaaaataataaatttaaaattttgaaaattggaaatctatcgaaattttgaaaatttcttttaattttctttaatcggattaaatttgcgtattgtagtgacggctatcttcaaaattgcagcaattatgggatcagtgaactttgttggaatttgctctttcatttgataatattttgtcagaatttccatttttggacatttgtataaaatttttgccctgtaaataaacaaatcattttgaaatggtaaaatatacataataaaaagagcccggatttttaggttttaaccttttttcacgaaaaaacacattttctctgaataattaaaattttttaaattaatttacacccctaattttcaagttttttttgtgcatatttggtgcatagcaggggtgggacaactctcgcctctcgtctctcgcctctcgccaactctcgccatttttggtacgctcgcctctcgtctctcgcctctcgttttttgggacgagaggcgagagttgaaaatacacccctaaagattgaacttttgagcagccagaaaaattttcaaatttacgcgaaaaaaaatcttaaatctctttctttccttccttaatgttttctctatttttggatagctccaattcaaatatggtctgctggctaaaccttctgcctttcattatttttctcttgggttcaattccccaacggtacagaattttttaaataatttctttaaattattttcaattgaaattttaattaataaaaaatatttcaatttaaaaattattattttttctttttttaaacagcctaaaactgcaaatttaaccaaaactttgatcattttttgacaagttctgttaatatattacactcaaaattttagaatttttccggcggcgcctatcggcggtgccgattcggcaccgccggaccccgcacccaatgttccaaaaaatttttttttggaaaaacagcgccacaaaaaaagcgacttaaaaacaaaaaatttaaaaaacaagttttggtcattttttgaataaaatctgttaacaaatccgaagacaattttcaaaattttttcggcggcgcctaccggcaccgcccgaccccaactgtccccgaagttttaaaaaacgcaccgcaaaaaaaaggtggaaaaaatggacaaataataaagtttgtttctaaaataaatatatttcatgaaaatattttttaattttcatgaaaaaattttaaagatttttgtttggatttttcatgacttggactcggtttaaaaactaggactctgacccggctttctgtacccggcaataccctgacccggtatttgcccaaatacccaggcccgtacccctaatttaatatacgattttgaagttttttaaattaaaaataaggctacagaaaaaattgaaaaactctcgcctctcgtcctctcgcctctcgccaactctcgtgtttttggggactctcgcctctcgccaaactctcgctctcgtctttttggggactctcgcctctcgccaaactctcgctctcgtcttttctgagacaagtcacacccctggtatgaagtgagtacgcccccaacgccaatttggtgtgccacaaatgcaatgggagcggcacaaattgccgcaacaatggcacccgctttttcatgtgcgcgcaacacggtgccaacccgtgggtcctggggggggggggggtggaaaaaaaaattgaagaaaattaaatccattaatttggtaggctttttctcattttacggggccaaaaccattgacaaatggtaattgtttcccggtgatctgctgaaaaagaaaatttgaatcgacgacaaatttatcgaattaaaaaagtataaaaaatgagaaattcatacaatggtaaattttttgagttcgaaattaaaaaagcattaaaaaaaacaagaactcgtttgcacgagagcggactcgaactttagcttttaaacagtggactcaaacgcagtgactaccgaaccacgacaccagttataatagaccaacaaaattcataattaaaataatttttgctgatcaattaaaaagctaaatagacagacaaacgcattcacaaattagcactttcattttattagccctttatttattggttttgatttctgaaaaacaaatctcttacagcggccaa

SEQ ID NO: 2300 - DNA, 1768 bp, Heterodera glycines
ttttggcagccctttttgcattttttggtcattatttagttaattatttctggattttttatcactaaaaatcccatccctagtttataaatgatgaatgtattttttgtgattctttttcatatttttgcacatattttgaatgcacatacataactttttttagaagcaaccaaattaaacattcttggtatcattcggtagctcttagtaacctctgttatcctgcaaaatttcaagaaaattcgttatgtttcaaaaaatttatggccaaaaaattaaaaaaaaattgcttttctaaacaattttagccatagcttttttgaaacccaacaaaattttttaaaattttgcatgctaatagagaacgcgtagaactatcgaatggtactaagtgcttctttaaaaaattatggtttccactaaagttgcaaaaaaaaatttatggttgtgtcttttttttatggtcgtgtgaactgcaatagagccaaattcggctaaattcccaaattttcaaccaaaaaacccaattcaagtattgctgatctgatcacgaatacatgatatccattcaggttaattctaaatcacgaacgtgaaaacaaacaaaacttgaaaattcaacaaaaaaatttcaattgtatgcctagataagcgaaataaaattttttatttttttccgcatttttttttttgttgatttcgagttcaggattcggaagttgttctgggtgtgtgtcatattcgtcagtaccgaaatgacccagaaattcttgtttttcgaggcctctaccccttgaacttatgtatttagcagtcatttacataaaattaagattaaatacgtaactattatgaacgccaataccaacaacaacaaatccttgaaaaatggcggtcgttacggtgccacggcaaatgccaacaacaaaaaaggtagaaaaaaattgaatatccaccgaggggagaaggtgaaggagggcaagtgatccaacatctattttttgattttttggattattgatctccaaaaaaaaattttttttttaccgaatttgggctccataaccgattttgaaaaaaagttatggatttaagctctgtaatggtatgtatattttcaaaagtaaccaatttttcaacaccttttcagcgacaacaattctaaccaggcccgtaacgagaaaaattttcgtttttttcggcgccatggaaaaaaaatgaaattttagccatttttttccaaatggccattttgagaccaaattttggggaaaaatgaaaaaaaaaattgggttcatcagtgccgttaggtgtcgccggtgaaaatttcgtaaaatttagcatcaaatgcccatttttcttgaaaaatttttaaatttcatttcatgggggtaagcacgtcccccctcccccctcgccacggatatgtgcatggacttagcatttacttactaaaaaaaaaaaattctaatccccccaaatttagccacgccccatggtacgcctcccaaattcgtgtactcccctggtaggaagggcaatcgccgtttccgtataacatttgtgtgccaaattgattcggatgccggcctggagcagtacagaaaggacaacgcactgataaagaagccgttgaagaatggccgaatttatttgtcatgttcacggaagggatgcccgtacaaaatgactgccatcaaaaatggtcggtttttttcgaattttttttaaattttccacttttttttatttgtcagtttttaga

SEQ ID NO: 2301 - DNA, 1957 bp, Heterodera glycines
  unsure (1)..(1957): unsure at all n locations
cggagcaggacaaaactccgccggccgaaactctgccaaaaaatttttttttaatttttcaaacttagaaattttttcttagaaatttggaagaaaaaaatttctaaaaaatttccagcgattttttcaagacttaatgatgaaaaactaagttttttcaaaaaattttgaaaaaaaaatcgctggaaaattcttagaaaatatttttgtcttcgtattttctaagaaaaatttttctaagatttttttttcatgaaaaatttataagtttgaaaattttttgcctcggcgggttatgtctcggcggagtttcggcgccggagttttggggtgcaccaaaaaatttcatcatttaaatttaaaaaaaaagttggaaattcctatttttcagggcaaattgctggcccaaaaaggacgacaaaatgctgctgccgcagaaattgaaacaataccagcaaggagttgttgttgttcaacctctgctgctgctggtggcgccaaaattcaaaattccgctgaaccgaagctgcccccgccggcggctaaattgttcgaattggcacactttgagcaagaaataaggcaaattgcgacaaaatggaatttgaactttagcgaaaaacggtaattaatagagaaaaaaaaattaattaattaattgggaggtaatgttctaactgtctgtcctctgccttttccacactctttcgctgtctctctcactttctctcttcattttatggagaaaccaccattctctcattggtcctctaactgtctatttttttttatttttctaactcatttctctctctacacttgcggtcggccaaattatactctcgtcgattctctatgtcctcttattttccacattctttcgctgtctctcttatgctctcgtcaattacactaactgtctgtccttttctttttcacactctcttgtcgtctctccttttttactctcttcatttgtcaccctctcattaatatgacagtatcggtattcctaccatatttagtggttcctatttgtttcttccaccgaaggacaccaaggcgttcaaggacggcgttctgttgtcgctcactgaccgtggcgatcacattcgtgtgagttttcttatttttccaaattttaagaaattttcaaaaattcgcccattttttaaattgagagggaatgcttggttttgccagaaatttcatttttttgattgaaatttccataatttttcatacagatggatgagttccactctgcacgttcacaggtggataaaattcagcgttggccaaaagagcgtggccatgcgactgtcatgcgtctggccagtgatcagtgtgccaagatgtttgccaactcttcctgatcgtgtgccatggattattattgttgatgaaatgattaagcgacgaaattttgatcaaaatccaaataacattttagtgttacttttttccttgtttttgattttttttttcctttacgtatcacttttttttttaataattgaacctttttttgtcgttgataaacatttggcaataatactgttctttttctcccccacccccatttttcgaaaaaaaaacaaataaaaatttttataaggtcgtaaaacgcatttcctagggtttccgtggggcggggacacctgatcacgaatctaagatccatttgtactaaatcgaattagaattcaaatcgaaaattcaaatttttcaattctcacatttttgctcaaaattggttccaattatcttttatagaagcattgttgctaccttcctgttctgtgtaatttataattattaaaatagaaaattttttcgattgaaattcaatggaaaatcaaataatactttaaaaaatttcaaaaaacaaaaaattcaagagttcttaaaactttaaaaataagttttccaaanttaattgacaattttaatttct

SEQ ID NO: 2302 - DNA, 985 bp, Heterodera glycines
  unsure (1)..(985): unsure at all n locations
tatatattaattataggctgtgttttaattaggattattattagtagggctgcgacttttagttttctgattttccggaacacccatcaaatcacggacaattatatataaaaaagctgataaattaatgacaatcagcaataattgaccatataaaatatgctgtaaaaaagctgtaaaaataatttaaactaatgcacctgaattttctgacgaacaaacaaaattttttctgaccggaaatccgcgccaaaaagctaattaagcctattagattttaattatttttcaacagaacagcagtcaaataacaggtgcttttaaaagcatcaattaaggcttgtacgaaataattttctaaaataaagtatactgaaattaattaagcgtcagattacaatttatttaattcattttttttttgtaacgtttctttttcccatgtattgtaaattgaggaaattggttaattaaattggaacaatgtgaaatcattttctgtgaaaacctattgaaattaattttaaaaaattcagaaaattcatttaataacctttttaaataaatttttgacgcattagcaaagtatttgagcagttgtcatttagccaagtttgaaaaaattgtttcattctattaatttttttccataagccaacattattattaatttaattagggttttaatgaaattattttaatttcaattaggtttttaatgaaataattttgtttcatgaatttcgatccaattattatttttttgacatgaaagtttggccaatttttttgggcattgccaattttagtgatgccatcaattttattgtttgcccattcatttatgtcatcatttaatattctacattttttgccttttatggtaaatttattttggtaactttacaaatttgcccttttattttcctcttttatgaaatttatcctttatccatttttcattnaattttgggacaaatttatg

SEQ ID NO: 2303 - DNA, 1662 bp, Heterodera glycines
aggattattattagtatggctgcgacttttagttttctgattttccggaacacccatcaaatcacggacaattatatataaaaaagctgataaattaatgacaatcagcaataattgaccatataaaaatttactttaggctgaattttaattaagcttttgattagttaaaggttaatttttttttgtagtttatggtccttagattttaaaggattcccatcatgccgagaatattatgctgtaaaaaagctaaaaaaataatttcaactaatgcacctgaattttctgacgaacaaacaaattttattttcctcttttatgaaatttatcctttatccatttttcaattaattttgggacaaatttatgaccaatttcattgcttttaatttaacaattttgaaaatgcttttgtttaaagattgccattttttcctaattcttagatatttcttttagtgtttttcaaatttatttttgatttttatttataaatttttttaaattttacatagcaccttttaatataattgaaaaattcccggcatttttcaacactatgttaactttttaaacattcactcaccaattaccaattgagctgttgtttgacaatttccgttgttctccttacctcgtcgccctatgagaagcatcggacggcagaggagtgccgtgcttaaagatgccgtcatttaaaatgcttttgttttgccgcccgagacgacttttgaacctttgtgccatccggcaaaaagcccggaaaagccccccttaaagggcagggcgaggcggggggggggagtaaaagaattagcctcttaaaaaaaatgccggaattttaaattgtgccatgccacccagctacccacccatccctccccggagggcatttttccattgtcaattttgccaaaatttttggtttggtgttgagataagagaagagacggacagagaccaaccggtgatgaaagcaatgcctttttgttgttgtgccgtcctccttcccatgtcgtcgcctccggcgccctttttgaattgaattttgtctcccccgcatatttccttccgcattttatgccattttttgttttgttatttatttctatgtaaagtgagacataacacatataaggaaaattatagaataaattggggctaatttttgatgttcttgcgataaaacccaatgaaacattagaggatttagtctatgaatttatttttctattttaacaaaaatttatattttttaaataaaaataaaatgattcgttaaaaaattaaattttatgccaaattatgaggtcaaaggctatcatttcgtcatctttattcaggaaaatccatatatattaaaattaacttttaaacatatttttcttatttttttttgtttattatatttaattcgcaattttatttggaaattttaagctattcaaatgactactaatacaactgacagcaactggaattcttcatttgttctaatgaagatggacgacaacgaccaatccgagcgcgattgcgttgagattaaagtaagtttttatattttggaatatgaatttataaattttatattttatttcgattataaaatgtgaatgtcctttaattagaagcttgtgagttgaatatgaattaattatg

SEQ ID NO: 2304 - DNA, 1575 bp, Heterodera glycines
  unsure (1)..(1575): unsure at all n locations
aaaatcattttgaaaaaaaaacaaataaaaatnaggggtttnttggaaaaaatattaatattcataaatttctttttttgagaaaaaaattcatcccacaaataaaatttatttatatgtccaattttttttcttaatttaaaaattaattccaaataaactcttaagaatttaaatattttaaaagttaagccaaataaattcaacggcatgaattttaatgaatttaaattattttaaatttaatccaaattttagggtgtaagcctttgcttctccacgttgactctaagcgcaatctcaattgaccgttttcggcttattgtgacgccacttcgacaatcaattcagaagcgttgtgcatgccgtattgtggcacttaacactgccatttcactgatcatatcgtatgataattaaaaaaaaagtacggtatttttaatttatttattttttcttagacttccgatgctgttcacacaaaaattggacacctatcatcgtttttgtggccaattttgcagcgaatattggggcagcgaactcggcgcaatggcccgaagtgcatacggtaatatattcggcggatttttgtacttaccgtaactcagcagacaaaacattaaaatctttactattaatttcaaatgtcgctaaaataaatgaaaaattaagcatttggatttatgataattatggaacccttaaatactgtaagaaaataccgtataacttttaaaccttttatcgtatttttgacataaatttcccaaatagcgaaatctaaaaaaaattatattcaaaattattgaaattaattcttaaggaacgtttgtgttttttgctcaatttgtgatcccgtttctgatcatttccacttgctacgtgatgatttcaattaaaataaacacggtaattttttttaataaattaattattttcataattttaaatttataaataaattatttccataattaagggtgttctgacaaagcgcacatcaaccgacataacaaaattcaatgacatgagcacaagcggcagcaaaatgacaaatttgagtgaaatgaggtggtaaagaaaattattgcatcaaaaatattataaaaaaataaaaaaaatttttgttttaattaggcatttgaaatttatttttaaaaaaaaatcaattttaattaaaaaacaattaagaaccggtgcacggctttcatcagttggcaatgaggaatgcacaatgctgttgactattaatggcacaaatagtgccaatgacgcactacaaatagccatggagcagaagaaagccatactgaacagacggcttaggaccaaccgaatgctaataggtagctgattttaattaattaaatgaaatcagattcaaaagctaattaaaaatattaaaataagtttagagttttttaaacatttttaaaaggtttacaccaataaattgtactaaaaaatattctacataaaagaccaaagctataatttttccacaaatctctattaacggcctccgtcagaaaaatggcctttttgaccccntaagataggaaattctcgggg

SEQ ID NO: 2305 - DNA, 1824 bp, Heterodera glycines
  unsure (1)..(1824): unsure at all n locations
atcacttaattatcaaattatcagtgaccagagtcattttacattaaatatagacataatatcgttattcctcgtgatttaaattgtttaggcaattaccaaggctattttgtcaccatgaaacatcccatttggcaaattggcctatacaaactgatggccaatgacaaaacgctggtggaatgtttggactgcaaggagcgaaggcttaaatcagtgcttaaattgtccaatcgaagcatcaaaggcctaaaagtgcatttgttcggcaaacacaaagggtcaatttatgccgacaaatatgccaacattggcagaggcaagttgcaaaaattaaataattatatctaagaaaattctgtaagtttcattcatttgctcaatttaaacgtaattaaattgttttattaattttaacagaaaaaatttaagccttttagctttttagtcgtttttattttaatttaaaaagtttattagaaattaaataaagatgttcttttaatttaatttttttaaaattaatatttattttacattcaatgcactttttttatatcaaaaatgccaaaacggaataaaaaaaaattcctcaaaataagcatgaagccattttcttttttaactcaaagtacgggctttttaaattaaatttttaaattttattattattgaataaaaaaaatatttgatttttacttaaaatgaatgttctacttttattttgtcccacatttttaattttgtatttaattttcgaattctctactattaacatatttttattcatattttaaattaatacctaattttattttcacatatttttccaaccattttaacaatatttattttatttcattttgtatttgccaaatttaaaaaaaaaaccattttcatttaaaacgagtagttggcaccgcttcgcggtgcccaactactcttcttttttttcttactgtacctttgtatgtactccttttttcaatctttttttttattatacaataataaataataaattgtgaaaaaattcatagaattaattaatagattccatcatggaatagctttaaaataatttctttaaattattttccaattgttgggtattcaaggttattcaaatgactgttaattgtcttttcttcgtgcacttcaatggtattttcatcataaacaatgagtgtgactacaccaacttaaaaattaaaaatctatgtatttatgaaattaggtagctattttcacccaaaaatttcactatttaaaatttaccttcgtttacttcaacgtttgtcattttcaaagcaatttcctgtccaattttgagtttgacactgttcggaaaaatgagttgagctttattttcttggtcaatgaccattgttccgtcttgtttttttgacaaattgattggagcctgttttcttgaaacactgagtcgcaaattgcctataaaaacatttttaatactaaatttctattttatctagttacattcacataatctgcgagtgaaatcactcaatttcaatgccagtttttccggtttctttttttcaacaaaaccaatccgtgactcatttgtaaagacaaaagaaacgtcttgattttgagatgtttgctttgtgagcaaaccacgaagttttaacgtagttcccttgataaagaaaaagtttaaaatattttgtcatttttacagttagggggaacgatgcttacagttgaaggnggacgattttttgccagattatcanagaatgngaaagcaaaagcgagtttttggagctttcggggtcgctgatcatgaatatggcatac

SEQ ID NO: 2306 - DNA, 1197 bp, Heterodera glycines
taacatgtaaattttaaaagaaatagagtacaaaatcccaccccgggcacagttaatcccccaacttttttaacgtcagttcctctatggggtttaaaggtcactgatctgcccatataaaccacgaaagcgaagaaataccgaaaattcaaaatttgtagtaattgcccaaatcaatccaatacacaaaatggtcattcactggtgtcgtttttcaattaaatttaaaaagcttccagctttgccaatttcgctgaatcttaccgtcttttgaaattttcaatatttgattcgaattcggctactataaagttcacgtcaataattttttagctaagcactacgaaacccctaaacttgtttaaaacatctttttaaaacacgaaaattttcagaaaaattgataacgtaaaattaaagtttccgagaccggaatggataccgaattcctgatcagcagccccaaaaacctataaattgacatttttgtggtgaatctgtataactctcaaaaataaagcattgtgaagtatggtggtctcgattttttttgagcaaatttatctttttatactgaaaattggtattcgggggttttcaaaggtgccgatcacgaatctgaactcaaatttcttatactcatttaattaaaatttcatcaaagttttggtcctactttaaatcatgtataaatttttaaagattgataaaaatatattttttgaggttttcggggtcgctgattacgaatatgccatcatttaacttctgccaaaatctaagctcttattttctataaaatataagaaattaaatttgcaggctttggtaatttaaagggctttttcgaaatgacatgaatggctcgcttaaaaacccacctttgcagatcatctcttacctattcctaattttagcgctgatttcgaatcaagcattaaatttttgatgtgacatctttatcacgtgagattttacgtgaaaacaacgcggatcaaaaaaataacaccggatacgcaatcagcgctaaaataggcctataaaaaaattttgtaaaaaaaattcaggtaggaggggggtgacaaaaagtaaataccgagaaatagttaaaattatatgaaaaaaaaagcatacacttgatgaaaagtcatattaaagggagtcagatgtcaaatctgacgtcatttttgtgatcag

SEQ ID NO: 2307 - DNA, 4688 bp, Heterodera glycines
cctgatttatatataggattattatttatcttttataaatttaaaaaatatagctaaattttttaaatgatttttttttgtcttttcgcccgcttaatttcttatgtttattaaatcagttcctattcaatcagcatcaacgcttactataattaaattctgtttttttttcacttgtctgtagaaaacaaccaccctttttgccaaatgcaatttgtaatttttccgtttttctggcattttttaatggcacatcggctgggccgaaaaaattctttttccttcattaataatgtgtgtctctctctctctcttctggtgagagtggtcgtatattattaacatggataatgtggactcaagcaaaataagaaaagtgcatcaacatttccatgtccattaacgagttttccgagcaaatattttcattttttttcttcaaattcaataaaatttttctattttatttttaaaatgcattaaatttttgaggaatttccaaaattttgaactttttgctattattttcaggaatttaaattaaaaaaaaatgaccttttaatgatgaatttcacctattgaagcattgagtttaaaaagtttcaattcatccattttgagaatttaaaatttaaaagattggtctgttatttcttttttcagctaattttctttttatgatttttttttgcccaaataaattaaaactaattaatgaacttcacgaactaagaaaataattgtatatttttaaattttactaatttttaaattttgtctcaattttatattttctattttgtgtttaaagatggcgaaataattgtgtgttttttcattccatctccctcataaaatcaaaataaattggtctctctctctctttggcggcagcaataaaaacaagaaatgatcaaaataaagtgattcaatttccccattaatgggacgatataaaagagtccccattttggaccgtaatgttgttcttcattttattttttcatgcaaaaaactatattaatcaaaacaaaatctttttcttttattaataaaaataaaattattttaatttataaatcattttaataatattttaattaaattttttagtcctaattttttcaaataaacattaaattaccatatttcctataatatagcctcctcccctgaaataaagcccccgttttgaggaggggggttgaaaaatagaccccgacccccaaggggctctatttcaacccttggggctctatttcaagaaactcagtacatttatctttattgtctgaaaatattatacattttttggaaatttaattcttttaaatttcattaattttcaagttcaaaatattttattaaaaaaataattgttcagccaaaagccctaaaatgagtacacgtgaagaaattcaagcagtttgtgtgcagtccttaaaacagttgaaaatcggtgtgggtgaagaggagttgcagaatgggaaggacttttacaaattgtaaaaattaaattttcaaaaaaattttttgaaactttgaaattttagttttttcaccaactatccaaccccttcgcgtgtattttaagggagcagaaaaatacgaagcggaggatgtgcaaaagtcggaacgttttgaaagtaaaaaataagttaaataaagaaataatattcatttgttaaaattgcataattaatttactattaatttttcaaatttaataattaaaattaaaaaattgaaattattttaaaaattgcggaatctaaaaatattaacaaatcttaatatataaattaattatatttaaatatttcaaaattacataatctaaacaatattaaataaaaaatattttataaaaatatttgcagaatctaaaaatattaactaataatatttatcttaataatagtaaatttaattatatttaattatttcaaaattacataatctaaacaatattaataaaatatttacatttataatgtttaacaaaaatattgtacttctattttgcagaacaaggacaacgtattcttgttgccatgcatttgattgccaatgtctacagcaatgaggcaattaatttattcttgacataataataaatttttccatttttataaattaattatttcatttttttggttcggctctattagtgtgagcgccctcaaattttacgtttcacaattttacagatgcttttcaatgcgtatgtgcgcgagaccgtgaatcgtcatcgccagttcaaaatggagccatcattatggaaggcaagttggcccaaaaatttgtaattattaatttattaaatgacataattatggtttcattcctatcactttaatatgacaattagtgaaaaaactgggggcaatttgtgaaaaaagccattaactttaattatttttgtctcacagatatgagtcccttaatatgctcttattgtctttgtttaaagaatatcaaagtcaattaatttgtttttctagtcacaccctaattttaaattaaattttgccaaaaattttttaggcattttggacagtttggaccggctttctggaaacaaaagttgatctgacggaacaggccaagtcggcctggatgtcattgggtgaggattttgccaaggaagcgcttgcacatttgaaacgccttggcatcccgcattgattcaacaaattaatgaactccgaataatgtcccaccaattattaaacaatttaaaaaattgacatggctttttgactgtaatggattattatttggtgaataaaacaccacaaaaattaatactatcagaaaatcaaaaaacaaaaaaaaaattattgttaaaataagtaatacttatttattcataaaaatcatctattacagatgttgttattcaaaatattaagagataaaatttatgataaattgcttatactcactttttccgtaatcagtaaaaattttttattataatttaattagcatttatgcttaatgttcagttaaaggcacgagaagcaattaaatgcagggttaattaatattaatgtaattttcatctgcccctaattagtttagcactgttatgaattttttaaatgaacatcaaatctcgattttgtttttttcggattttagaggtaaccatcacgaatagggaatccatttctgccaattccgaaccccgcacccgaattcgaacaaaaagccaaaagtccaaattttcgaaatttataatttttgtttcaaaaaaggcgtaaatgatctcttattaaagtattgtggatttcagttagtttccgtgtatttaattaaaccgattttgaaccaaaaatgctaatttcgaaatgaactttcgactttttgttctggtgcacggttaggaattcagaacatttgttcttatagaattttacttttagattacagtatcaatgctacagtactttatttaaaatatttgtatcactgacgcattctcaaatgacgcattttccgttcaccgttcatggttatttgaaattaaaaaatattcttcatgaaaatcttcaactaattaattttgtctcattaaacttatgacgcttttccattttttgtagcaaaaaaaaaaattttaaattaatttcttgagaaaagtctagtgcaaaaatgtgaatgtacctaatgttatactggtcttacaaaaatcttacgcacacgaaaaaaaaatcccaccattatacagactaatttttaattgcccaaataaagtgcctaattaaaaaataaattaattcgtggaataaaacatgcagcacttgtgttcacatttcacgctgtgtgtgtgtgtaaaaattactaataattatcattaatttcgatgtacatcatgccaaattctcactcaaaaatttttgccaatttcccacaaaaaatcagtacaggaacaaaacatttttggcattatgtagcgatggaaacgtaagtgccaaccaatatatatattagaatagaaccagaatttttaaaatttggcccaacaaaccaattattcaatttttacttgccaaaaaattaatttgcggccacaccaaaaatggcaacaaatttgaccgttactggcaccgttattgtcgatttgatcagcaccgggctgatcaatgccggcttcaagcagtttaccttcgtttgcaagctgatcaccgcccttctgatcacgcgtctgttgctgctcgcccgcttccgtcccgccgttctacgcgtgccggaactgtcccgcgcattgcgcacctttttgtgctttcacttggccggtgccattgtcacaatgccgtacaatgcttatgtgccaattgcgtattatacgtcattagagaatgaagatgtttgaatttttttcagaaaaattcttgattttcattaaattaaaatcaccggctccaaaaactgtaaaattgcttttgggacaaaattttcctgctaaatttggccaaaatttttataacttttccacgtagctccaacatcattgatttaactcgaaagcgctaaaggtcctctattagtctgcaaaatttcgaaaaatttctttaatgttcaaaaaagttacggccaaaaatgactaaaaacttgctcctggtttccgatgtactgctggccataactttgttccgacttaacgaattttttcaaaattt

SEQ ID NO: 2308 - DNA, 597 bp, Heterodera glycines
ttttatccccccccccccataattaacgggtgacgaaataatatttttggcacatacagaaaaatgttgtgccaaattgcgtttaaactcatttgatttgtcaaattaaataaaattcaattaaggaatttaatttaattgccggcacttttgaattttatcccccacccgcttaaagatttgttttttttcattttgtttccaggaaatggaaaatatggcactaaaatttcacatagaagcctaattttaaaaaaaaatgaaaactgtcattggcaatttataaaataaaaaacaatgctactataaaaaaacaagcaaataaaatagaaaaattaggggtgagtgtccccacaaaacggaaaaactttaaaattttatgagaaaaatactagcaattttgaaattttaagcaattttcttaatcaccgccgaattttggaaaatagcaccaccgggtttttgggccgaaatgcaaaaaagaaaaaagtcgttagattgtgcctcatggcttgcccatcccctcccctcctctaaatttttctcattatgggcctggatggtggtcccattattccccccccccctcccaccgcc

SEQ ID NO: 2309 - DNA, 4730 bp, Heterodera glycines
  unsure (1)..(4730): unsure at all n locations
cgtcagatttgccggcatttttttcttagaaaataaacttttttaaatttaccctcataattttattttattttttcaatttttaatcccccggagggtttaacagcatcaacgaggacgacgatacaattttgtgttgtgtttgatgataaatatgtggtaatgtgttttaaataccacaaaagtgtcgagactcccgacaaaatattctctttctcttcttcagcccattttcatggtatctcctttttcgcattattataatgtattatgcaaattcgaagagagaaataaaaaatcaaaaataattttaattaattaattttttttgtttattaaattcaaaaattttatcaaaattataaattgataaataaatattctgttttttttatctatgaatttttttttggaatatttttatttattttttctaagaaaataattttttttttaatataaaataatttttattaattctaaatttaaatttataaaaataaagcggaaaagcaaaattcaagacaatttttcttttgtgattgcccattttggctcttttttatttaacaaatttatttatttaaacaaatatgatataacagtggcagccaggtgtttttatttatttatttattttaccactattttaatcctccccattaagtgccaattatttcatttttcttcctgcatgtcaagcagttgtttttttaatattttgtctgacagaaatttttgttccaacaaaatcttattttattttattatccgaattccgattttttttttttggttaatttttttccanccggtgaaatgatgccaaaaatgttgcatcgcccgcaaatttcncaaatttatgggcctatgaacatgtcacgctaatcaaattaacccattccaaaaaatggcatttaaattttgtgaaagtttaatttgatgataaatgaatgaatgaatgacttttgcgcctgcagcagaactcaaaaattttgcagcgcaattaagtaaatttgacaaaatgcgtgaaagtgagaccaagggttgctgttgcacaacatttcgcgtgtgggcgagagagtgtgagtttgatcattctggtcagtgtcgaggacggtcctccgatcacatgcaaatgtgatcagaacgtgatgaccttatacacaccaaaatgggagagagagagagaaagagagagagagagagagtacggtataagcgtgagaatggagcgagatttatttctgatcaaaatcctcctctctctgctgatctgagttccgacaaagtagtcctggtcacactcaacaccctctaatggagagcgagagagagagaaagagagagaaagagagaaagagagagagagaaagagagagagagagagagaaagaaaaatactgcaagcaaaaaatgatactttctgatgaacattaattaatctgaaaattttaaaaaaatgattcattcaatttaattccaaaaggccaattttttcaatactaattgctaatttgccaatttgtgaatcacatttcaacaaaaaaagttgacaaaacattctcactttttcaaaaacaattttgatgacgacaacatttcaattattttatttttttgctgcgaaacatttcgccaaattttttggcgatggcaccaaaaataatttttgtcgttccattttccacctccattctgctgaacgccgctcggcggcgccgtttctgtgcccttttaccgccgtccgcccccgcggcgtccccccccaggggttttagtgattggattgggccgaccattgctggttgctggcccctgtgctgattatgtcatgattacagcctccctcaccaggcccatttcattattggggtgatttattgcccagtccggcgacggcggtcggtaaaaaaattgataaaatttatcaacaccaaaaaaatggctggccctccccgcccccgagagggggggggggacgaaaagaggcaacaaaatgttgcccggggggattataaaaatgattcgttgaaaaatgggtttgttgatcagagagaattggggctggggagacacatacaaatagatagggagggccaccaaaatttgggggatggaaatgggtcccaaaaattcataggtattttattgcaagccccctccccccgaggggtgagcaaaatttaacgggggaacggggcgaaaatggaggaatttttgatcaaaaaagcggttgaaaggaatcttatcaccaccaccaccaccaattggtggactgactaatttgataaagcgctaaaagtgcaaccactaaatgccctggggtgacaaaaaaatgtctgtttctgtgtgcgccccttccaaaaaacgcttctgtgacggacagcagcacagatcggatgggccgggcgacaacaacagttgggcggtggtggactttctccacccgacttaatttggccctaattagtaccccacatatctaataattaattattgttgatatacactgtggtgttcatgtgttgctaatggcctggaatttattgtccgtgctgaaattgatacactcttcccgctccttcccccctcattaattaatttattgtcactaattaactaattagctacgctttttcaatgcattttttggaaatgggtattttttttttaatttttgccaactttaacaaatgttgctaaatttccccacttattggcgcccgttttttgggatcacgcataaaattacagtatgccggttttagctttcctctttttttgtttactgtaactgtttttaattgaaaccgctatcgcccaccagccctttttaattcattaaaatttacacaaatttttttatttaggcggagtggaattttgcaaaaaaaactaaattagggagtaaaattatatggaaatccatattttttttcctggactctgggaggcctgaaacgtacgaaaaacatgtttttagcttggtttgaagcttctaggatggatttctatatccatattttccaaatttttccatatttagcgatttatgtccatatttccatatttgtccatattttggcatttttacccatattttatgtccatattttggcatttttccaaaaaacctctattagaacttcccccaacagataaattggctttttgacccagaaaaaccggaaaatttttcaaaaaatcagtttttagcaaaatttttttgaaaaattgttaaatttatatcaaaaataagcaaaaaatgtaaactttcggttttttggttgatgttctctttaaaattgctttttttcttctaaaacgagttcttataccatattcagccattttagatgtattttacttgaatttaatgaatttgaagaatttaaaaatttccacactcaaattggaaaaatttatgtccatattggccatatttcgtgattttatgtccatataattttattccctactaatcatatttgaataattttttaatcaaaaaatatttaaagaaataacatttttttgggtgttaatatcctgatttttcgctacaatttccgtatttcggattaatatttcgggtttcatattttttttttttgattggtgtccaccctccaccacctctcacctgctcgatctgtgcaggcgctcgtgacctatcaaatacagtaaccctgatcaatcgccgaggtgaccttctcccacttctccattttttccttcgccacaaaatttgaaaattgtcgctataaatggaaaaaaaatcagcctaaacaaatgtcaaatttaattaattttactccccaaaatcacaacaaaaaagaaacatttgaaaataggggaaatggggaaaaatagaaaaattggacaaaatttcaaaaattaaaaatttcctccgaatatattttgtagcgaaccaataaaattatgaaaaccattcgctataaaataggaaaatacgtcattcaaaaattaaaaaaatgggaccaaaatttcaattttcaaaaatttactccccaaaatttacacagcaaaaaatcaaattaagaaatttaaatttttgcttattgcctgcttttgttctacattttgctgcttcatccctctcaatccatccgccaatggactttgttaatgatgattttaatgatgatgatgagttgactctttactgccccaacttttcttcctcttccgattcctcttcctcctcctcctcgtcatgtgaagatccaaattttgccaacaattatcaccagcttttcacgggcttttcctcagcatcatcaccatcattatcagcacaatcatttcctctaccactactaccagcagcagaagcagcagcagtacaaccagaagccgccgccatgatgatgatgatgatagtgccacgggtccaatttttgtctcttctttttttagattcaatgccactttttctgtatgggttttgacattttttaaatttgtagttatactatattgggtaagagtgatatctcgctactgagacttgagattgagtttttggttcgtcacatttaaaaaattagggtcatatggaaatatgttttgcctgatttgagcaaagcattatgaacggattatgcgtgcttataaatgctttttactaattagggtcattagcatctctctctctctctctgttttctactccccaaaattattgggttattccgaccacttaa

SEQ ID NO: 2310 - DNA, 2410 bp, Heterodera glycines
acagcaaaaaatcaaattaagaaatttaaatttttgcttattgcctgcttttgttctacattttgctgcttcatccctctcaatccatccgccaatggactttgttaatgatgattttaatgaggatgatgagttgactctttactgccccaacttttcttcctcttccgattcctcttcctcctcctcctcgtcatgtgaagatccaaattttgccaacaattatcaccagcttttcacgggcttttcctcagcatcatcaccatcattatcagcacaatcatttcctctaccactactaccagcagcagaagcagcagcagtacaaccagaagccgccgccatgatgatgatgatgatgatagtgccacgggtccaatttttgtctcttctttttttagattcaatgccactttttctgtatgggttttggcatttttttaaatttgtggttaactatattgggataaggctatgtatttaatgatcaagagtgatatctcgctaccgagacttgagattgagtttttggttcgtcacatttaaaaaattagggtcataaaaattgggtggatatgttttgcctgatttgaacaaagcattatgaacggattatgcgtgcttataaatgctttttactaattagggtcattagcatctctctctgttttcgactcaccaaaattattgggttattccgaccacttaagtaagttgagaaatttctcggctttctctaatctgacggatgggtctctggcgcgggggatagtgtatttttgtagggaagtgttcaaatattaagtaggatttggcatatatttttgctgactcttcctaacccaacggaggaatttaatgggtgcacttcattttcacgtcgaaaatcttttttaaaaaataataaatttttttcaaataccgaattttaatattttttggaaaaattctaagaaattcaagttaaaaaaaattaaaagattcgtagaaattaaaaatcattttaaatttttatacttttcttggtctttttttctttatgttttttgaaaaattaaaaaaaatttcggcaaatgagcgaggagagagtggcaatttgctcccaattacgttttttcactaattgatttcttaatatattaaaaatcgtaaaaaataaaattaattaactaaattggcccccatcattttcaggaaggtgttattgagcaacaccaacagcaacaactgcagttccagtcgtcctctctgttgtcctgctccacaacaacaccaattagcaacaacaacacgagcaacgagagcattagcagcagcggcagtggcggtgccggcggcggttgtgccgaaacatgcgtaatgccatcctccgcccgcgacgcacaatgccaacaatttgtgatgcaacagcagcaacagcatcaaatgcagcagcaaagctcgcctccggcactgttgcatgagcagcgcaggcaagctgtggtgatggtggtggtggttcaatcggggcagctttttctggcattccgttcccaatctctcgctctctctcttccccggtccctcttttttcccctccctctctctcctctctcttccccgtctctctttcttcccctccctctctctccctttctatccctattttcttttttctctctttccccgtctctcttctttctttccctccctctccctctcaatctctttatcctctctctcttctccgctttacacttttcaatcccggttctcgaccgaattatgcgtccagttttgtggtctgaattctcgacattgatcctgactcccggcttaaccattcttttcactttctggctctcttttcctcctcagtttcggcacttttttctctctctctctctctctctctatctctctccatttgacactgatcactcccatttttgacttttagacaagccgcatcaatgctcgtggaagacctgaacacgctgatggagtgtgatgatgagggcggccccggtgatcagcgccagaagaagtgccgcgtgtgcggcgactcggccaccggctacaatttcaacgtgatcaggtaggacagaaagacggacaattttgtttgtggtgggagaaaatttagtgatcagctgatcagaggaaggaggaaggagctacgctaacaggaacgatcccaatgattttggcttggagagattttttttctttggtttttacgccacttttttgcggtttttttcaaaaagctttcgggagggtgcttggaggtggtatcaataaggaaaatcggttgatcctaacaatattcttttttccttaaatcatgaatttctgtaattacagtatacttcctcaaagaaatgccacccccatattctgccaaaatttgagcccctccccatcaaaa

SEQ ID NO: 2311 - DNA, 4108 bp, Heterodera glycines
  unsure (1)..(4108): unsure at all n locations
ttttccttaaatcatgaatttctgtaattacagtatacttcctcaaaagaaatgccaccccccatattctgccaaaaatttgagcccctccccatcaaaaaagtcacccttttgggagccaaaaatcccattagaccttttttttaaattaattttttttaatttccaatatttttttatagctgcgagtcgtgcaaggcattcttccgccggaacgcgttgcgcccaaaggagttcaaatgcccgtactcaaatgagtgcgagatcaccgcgctcagccggcggtgtgtttttttgttttttctatatttaaaaaattaatttaaaaaaataaatttttaaagtttttgtcaaaaatgtcgtctccgcaaatgctttgaagtcggcatgaaaaaggagtggattctgagtgatgagcagctgaaacggcgcaaaaatgcccgcattaagtgccaacaacagcagcagcacccaaacggtggcggaattgccagggagcaccagcacaaccgccacaacaaccaacatcagcatcatcaacaggtagagagagagagtacagtaagaaatggtacatataacgatggggggaaatggcaaaaatttggcaccactggcgagtaaaaatgtgccatttaaaatggcaatggcattattttgtcccagcggtgagtaaaaatggcactatcttccccaccgtgtaaaaatggcacatttttcccaccgtgtaaaaatgcggcacattttgcccactggaacattcttcaaagacgcgaagccatcccttattagcgcatggcatcaattaataataaaacaattaaaatctttctgtgccgaaacgttggcaccaaatttgggcggttccgattttgtctttttttggcacattttttttggcaaattccacctatattatcactccaattacaaccaatagaatcatcacttggccattgatcagcaacagttgacgcccaccacaacaccggtcagcagtgtggcatcatccggtgccacgggcggtgccgtgcacacgcccggctcagtgggcagtgccattggcggcgttggtggtggtagtacaccgaactgcttcgacttggcgacttccatttctcagccgccgttgcccacggcgacgaccacggctggtgccaacaatagcagcaacaacaactcgttctcgccaccacaaaatgtgaggaattagaataaagtaaagcttggcattttgaaaaaagcctggacctggacttggatttctggacaaaaatccaggtccaggattgcaaaaattggccaggacttggacatctggatccagcaaaagtccaggcctagatccaggcccagaccaagtcctaaaatacaaacgcagagagtataaagtattgttttgttagagtctagtctagcgtattttgggcccattaataggcttctaatatcacacactggctgattagcacgatgatttaggaagctgaacatttaaaaaccgggttgtgcattacagtaatttaccgtcaattacagtataggtttttgatacggtataactcattgcccgacggacgagtcacacctttccccaaaattccagttgttctatcacaacaaccataacaacaatgttgtggggatgccgggcagcggaatggcacaaccgcagcagcacagtccgtcgttggcatcaatgcttaaccacaacagcaacagcagcgccggcgcgtcgccgttggcactcgccgcgctcagcgctctgatggccggcgcgtcgccggccggcggtggccagctgagcacggccgacaacagcccgctgggcagcgctctcgccgccattggcaacagtccngcggggcggtggcaccgccagcgcaatgggatgctttgacgcgaataaagtgggttggatgggtagtattagcataaaccaaaaccaaagtcgaggactgaatggaacagagagagagtgagagagatacaagaaaattgaaaaaaaattttaaattattggaaatgaaaaacgaaaatttttacttaggggggaatgcgctgaaaaaagggcacgaaacgaaatttttgcgcatcattggattgagaaatgatggggataataataaatgggcaaaactttcggcattgggtagaggaattgaacccgctcgtctacccaatccgtgggcaactcttccattgagctaccgagtcacgcccgaactttttttttaataaaatcttatcaaccccccacttcccgtgttttaagcgccagccaaggtccttccttacaggatcatgtttgggtatatctctcaaaaaatcgaatttttattactagagcataagtcttatatgttgtgtgcctttcgtttcggatataaccgttttaactcgaaaatcaaaatccgaccgaaattgatcaaagccgagaatttgattctcctcggaaaccgagatttagctttttcattttgagagtcggaaatattctctcgtcaatcaaatcaaaagtctttcctgatcatgatcacttattgttcggcaggtttcgccatgttccattgtggtccaatcgccgccgccaatattgccgatcattgacccaaatcagcaacgaggggttagttgttctatcattaattatgcaatagatcaatttataaaataaatcactttcaacgatcatgattttatcgattttccttcaaaaaaatcaataaatctgctaatttaaacggaagaaaacttttgctgtatcgctcttctaatttgatttatcgattaaaactcacatcagcatcctgatcagtacatcaatttttgatgcaattttaagtgatcagtagcaattcaggccaccatttttcagtttttgactcaacaacagcaacagttactgctccaaacggtgttcagcggagcggccgctgccgcggctgcggcccaggcgacaacgggcggcggcaccaacgcgtcaacgctggccaatgcggcgattgcattggcacggggcgggcacacgcagcaggctgttgctgcgctgcaacagctccaacagcaacaacaaggtggcatagtgtaaaaaacctatttttaaattcttaatttcaattttttattttattttttgaatttttaaaacttaattttatttaattagatgggaaaaacctacaaaaaacagctttttcagattagtttaaaacgagatttaatttggatcagtgtaggtctagaattgggacagggtttaaggtcttctgaatagtcagtcatccattcagtctattatatgtctgatcatcactgggtctaatattggataaataataatgatcattactgaaacactggaccaattagttgtctgtcagtctgccactaaaaatgattacattactctcagtcaattagtgactgatcaatcatgttaagcatcttatactgatcaaaataattatgaatatgtatgtgtctgtccgtctgccactatcattgatcattaatgatcagcagtgatcaaaacaataactgactgactctgtgtctaacaataaccaataattgtctgtctgtctaacatggcattgaccaacctctgataagcagtgattaaatcgataaatgactgtatcccttccattcagttgccgcacaacagcagaacaacaacagtaacaccagcagttctggcctgtccccactgatcattgaccagtgccatcggctaatgatgcttggccaacaacaacaccatcaaccatataatgccgctgcaacgatcagcaagggatcgcccccgacggcatcgttgatcaaagctggtccaacagtggtgactacagtacccggcagtggtggtggcggcggcacatttaaccatcaccagcaggttaaatgcttgatttttccgtctcaaaaaaaaatttggcactaattttaaaaaaataaataaattttttcaaatgttttttaattttttcgcctcgaggttggggtcccaaggtttttcacattcctgagcatttggtataaattttttatcccaccaccatttcacagcagcagcgccaacagatcagtccaacctccgctgcta

SEQ ID NO: 2312 - DNA, 1001 bp, Heterodera glycines
actctgatcatctattctattatcggcacgactattgtttaatcaattgaatttattgggataaaaatgcactctggtcattagaagagccaagttggctaattaccgcaaaatttgctaaattatcgtcatccctctactaaatttgctagcgccgccgtctctaacgcttaattagctaattatcattgcatcttctatttttatttaaataacactttcgggagcagctcttcccccctggattagtttaccaatgtcgtttccaccgatttttttttaatttcaaagttagaatttcaaaaaaattttcgaaattttttttttaaatttcaagaacaaaatgatttggttcaggtcctccaatttgaaattactgattgatttggttcgggtcttccagtttgatcaattattgattgatgatcattgtcttacgcatcattaatccgctttttcctaggatgagttgaacatgtcccggtcaccgcccgccgactcgtcgccgtcttcgcgcagtacgcccaccagcggtggtggcacaatgccattgccatcgttcaccccggctgctgtcatcaatgaccatcactatccagccacggctaacagtaccactgcatttggcaatcacacagccggcacgggcggctccgttgtgcaaacctcgtccattgcttcatccccagagcaacccggtgccacaaccgccgccacaaccccaaccaccgtaaatgccgtgccgtccatagtgttcaaggacttgcgcgctttccaactcaattcgttggagctccgtgacgtggaaacagtgaaagcggctttttcattgtaaacgatttgaatttttcaaatttcaacgagccattttaaacgctttgctttgtctcagaatggaggaagaattgcgcaagagtgctgccaacaacatggcgggaccttgcaagaacatcgcggaactgatgctgctccttggtgagtttattggatgtcatgacaac

SEQ ID NO: 2313 - DNA, 8668 bp, Heterodera glycines
ccaaaaccatttccatttttgttgataagaacccggagaattgaaacaatccgcccaacttatcagattgtttcaggaaaattttgctttaacccacccattctctttactttttccttcccctagtaatcagttagtcaattcagaggctttccacatctccttccaaattcattccgggagaaaggctaaattttcaggactttttgtatttttcgtgacttttctgtgcattacttaataggcacaaaaataggcatttcggcattagatacaaacattcaaaccttttgcacaaaaatactataagaaatggtacaaaaaattagaaaagcaaaaccccttggtaccgtatgggcaaatttcatattattatttaaaaaattttacaaaaatttatgggacaattttaaattaaaagatgtattatttttattttacaattatcttttgattaagctgcttgctattcattattttttgcaagagttttaaatcgagcatagaatttgtcccaaattcacaaatccaagcaaatatttttaaggcccaacttcagttaagcctgccaaaaactgtgaaagcgtctccaaaacaaggctttcacattaaggttaacacaaaaataaattcaatacttccttaattatgtgaaaaaattattgactacaatttcaatttttcatagtttcccactaaaatttcgtcatcgaaacacaaataaagataatttatggtaagaaatgtgcccaactgtggaataataacaaataggataaatgatgcaaattgaagcgatcattgatcattccggatccatctgaagaccgccccatttgtcgtggtgccaatgctaccgccaaatttgaatgcttctggcgcgttaggcaacggagaaacaaattgaaaggttccctcaccggatgcttcttctgatggcattttgacaaaatgtgcaattaactcatcactgaaattaattttactagagaccgaaccagtgaattcgtatgggtcaggacaaaacattttttaatttgtgttattttgttattctacgtttggtcacccgctctctgggagagaaaagtcgttgaggaaattcccagataaaatatcggggatggctggaaaaatttaaaaatgcaggggagcaaatctggataaaaaatagaacagaaattcttttaaaacaaaatgtcttagaaacagtggtgttacgatgttactcaaaaaccagcaaaacaaaaaaatttgcctataatttttcataaaagcaaccaaatttttaattcttgacatcatttgataatcctaagttttttatatttgcctattcacaaaaaatttctttaaggttcgaaaaagttatcatcaataatgttcgaagcccttgttttgagttcttctgtcattacttttttgaactttacgaaattctttgaattttgtaggcctataaaaacacttgggctatgatttgtttgtttctctatttaaaacgtattaaaaaattttttttaactccttagcaaatttaaatattaataaaaatgaattcacatcgtaaaattgcaagaaatgataaggaaataatgcagcagctgagatgcttctaaaataaagcgataaaatattcaaaaaatttctgacacctttttgaacgaaaaacattttgccaatattaagacaatagttttccatgaatttttgtcgattttcggtaagtgaaattgcgtcaaaagtgccctgaaaattaaaaaatattatatactgtatatcttaatttaattaattaaattaataattattttataaatttacatcagaagcattttttgagagggcagaagggacctccccccctcccttcccatccaacagcaatcccatgatcggcattggcatcagcggcactcgtcggcacaatggcgtcgctagtcagccgatttgtacaaggaaattggatcatcagacactcaggcattggcaaattttcatgtgatttggcccagcagtatgcgcaattatgctctgacggaagcaaacgaaaatatttgggaagaaaccaaataaataaaaaatgtacagcgaaatagcagtaaaatgaggagggagatagagaggagaaagaaatagtgtgtgtgagagagaagcgagagacagcgagttaaaaagagagagagagtgagaaaaaaagagaaaaagagggtaagcataaaaatcattcataattgtttttttctataaaataaaagtgcaacaaaattaaaagtgcaaaaattggtcaacaacgaaaacccagcggaaatcggtggaaatttaataaattttgggagggaagttgcgaaaatgaaaatgttcacatgaattccccaagctcagctgatttttgctgagccaagacaatataaaaggaggaaattctgaaggaaaatcacttcaaaaattaatttactaaaacaaaataaaatcgaaaatggcaccactttttattttgctgttcgttttgctggcagttgaagaaagcgtcggcccattgtcaccaaattgcagtaatttgattgcttttaaactatttaaatataattaattgcttttcatcagtgcatttgccgcccatttattccgttggaagtgccaatgtttcgcaacaaaatgtttctgttccacaaagcccgaagctaaaaatatcagcagggcaccaattattagcaaatggccaatttggtaaaatccattaattattatttttatttcaccgattttgctttttttagcattgccaaaaaaatcggaaagccaacggaaagtttctgttatttctgcgcagcaaattgtttctgacgagcaaaacgtttcatcttctgaggtcgacaaagtgccgggggattttctcgaattttctctgcccattgaaaagcaccaaaattcgcttggccaatatttggcggaactttcaaattattatcattctgcgcaactccatgttccgccgagtacaattgcgagggttttgttacggatgcaaaatgaaatgaattttcatcgtctcaaaacttcggccacccaactaccgtaccccctaaccctggaaaactttcgttccgaaaaagaagcggattccaacggaatgggcggagacattcgcatcactttcattgatcagtgccaaatttgcagccaaaacgaattgacaatgagcaaattgatcacaatgagcccacagcaaatttcggtgccaaagatttcaattttatttttaaaaattatttcaaaggaaatgagactaaactccgaccaatcggacatcgcttggtttttgggaagtgtcattcatttgttggctttccaaacgtatccgcttgaggaatggcacattcgggacaaaatattggccaaccaatgccaattgggtggcactttcaaaatgccgcaggttttattttatgttttattttattattttgaatattcatttcagacttctgaatcgttttgcatgtttctgctccaaaacagcgtcaacaaaatgctattttctgctgaaaagctccaaattcgcactgattttcctcgtggtttcgagaaacagtacgccattcttggccaaataatgagggtattaatttattaattaattaattaattcaaaaactaaaattcttccggttttcatttatttttagaatgctctccacgtcgattccgaaaagagaacttttgacggaaatggacaattgctgaaattggctgccaacttaatctcccattaattaacaataaatattgcttttatagtaacttagtcatcataatttgtttagacaatttaattctgaagaaatgttcgtgtttaatgcaaatatttatccatccttcaaaaaaaacgaaataaattcaatgtattcaaataaaattgtaaaaatatgcattttagttttgtttccaatcacttctttttcctttcatttcacttcttttgtgcaacaattaacctgagcagctgacacctgcaattcaattctgtcttaattaccctaattagcgaaaaaacttgccgttgctttgcttcttgtagtaagcttggatcagtgttcctgaagtttccagtaggaggacgaaccgacctaaacaaaatttacaaatatttggggtgtttccattttgaggaatgcaatttgtcaacacagtctcggccattggtggcgtaagtaaaggttcggtcggtgaaaaggcaaatgaaatctgccaaaaacattccattattgttgataagagcccgagaattgaaacaatcgcccaacttatcagattgtttcaggaaaatattgctttaacccacccattctcttaactttttccttcccctagtaatcagttagtcaattcagaggcttttccacatctccttccaaattcattccgggataaaggctaaattttcaggactttttgtatttttcgtgacttttctgtgcattacttaataggcacaaaaataggcatttcggcattagatacaaacattcaaaccttttgcacaaaaatactataagaaatggtacaaaaaattagaaaagcaaaaccccttggtaccgtatgggcaaatttcatattattatttaaaaaattttacaaaaatttatgggacaattataaattaaaagatgtattatttttattttctaattatcttttgattaagctgctattcattattttttgcaagagttttaaatcgaacatagaatttgtcccaaattcacaaatccaagcaaatatttttaaggcccaacttcagttaagcctgccaaaaactgtgaaagcgtctccaaaacaaggctttcacattaaggttaacacaaaaaaaagtcaatacttccttaattatgtgaaaaaattattgactatttaatatgggatagaagcaagacaaaagatcacaatttcaaagttgcgcattttttacttttgaatgttaccttttggcccttaattatacagtaagaacggaggaaatcatttaggccacaaattgctaaaaaacattgcaacaatttcaatttttcatagtttcccactaaaatttcgtcaccgaaacacaaataaagataatttatggtaagaaatgtgcccaactgtggaataataacaaataggataaatgatgcaaattgaagcgatcattgatcattccggatccatctgaagaccgccccatttgtcgtggtgccaatgctaccgccaaatttgaatgcttctggcgcgttaggcaacggagaaacaaattgaaaggttccctcaccggatgcttcttctgatggcattttgacaaaatgtgcaattaactcatcactgaaattaattttactacagaccgaaccagtgaattcgtatgggtcaggacaaaacattttttaatttgtgttattttgttattctacgtttggtcacccgctctctgggagagaaaagtcgttgaggaaattcccagataaaatatcggggatggctggaaaaatttaaaaatgcaggggagcaaatctggataaaaaatagaacagaaattcttttaaaacaaaatgtcttagaaacagtggtgttacgatgttactcaaaaaccagcaaaacaaaaaaatttgcctataatttttcataaaagcaaccaaatttttaattcttgacatcatttgataatcctaagttttttatatttgcctattcacaaaaaatttctttaaggttcgaaaaagttatcatcaataatgttcgaagcccttgttttgagttcttctgtcattacttttttgaactttacgaaattctttgaattttgtaggcctataaaaacacttgggctatgatttgtttgtttctctatttaaaacgtattaaaatttttttttaactccttagcaaatttaaatattaataaaaaatgaattcacatcgtaaaattgcaagaaatgataaggaaataatgcagcagctgagatgcttctaaaataaagcgataaaatattcaaaaaatttctgacacctttttgaacgaaaaacattttgccaatattaagacaatagttttccatgaatttttgtcgattttcggtaagtgaaattgcgtcaaaagtgccctgaaaattaaaaaatattatatactgtaaattatgcaaataaaaatgagactttatcgatgagaatgtcgaatttatggcaaaatttattgtccaactgatcagaagccaaatcaacaacctttggaggaaaaataaaatcaaaaaataatattcaaatatttttaacaactttattttcttttatttggaaagtttcgaattttaaagtttaaatttcatttttttcttttttcggtctatgctacttcccaaggtgctatgtcgtttcctaaaaaaactaaaaccaaacttttgatctttttgtatgattttttattaattatatatcaaccctaacaaatataagttaaattaatatattagaatggaaatcattaggaatccttcattttttaccagtagggctgtgaatttaagtcaaattacttcttttttttgctgatacgaaatgacttggcttttaaataatgtgccttttttcaagtatacgcaaaattagttgtttttataatttttcgtaactttcttgtattcttttttaatttttatttgcccttaagctaaattatcgctttatcagttgtcattttattaatcgttaattttggaatttttcttttttgatttgctaaatatgaattaaaaataatcctacctcaaatttaatatttaattagaaaatttttctcagtgatgtaaattttaattaatttagcagttaattgtttataaatcacataaaaaatcaaatgattgatttttgcacttttttaagaatgcccatttttgcactttttaggaatcgaccaaccaagctccctatataaaatgccaaaaatagaaagacttgattttgaattttgttgagaccaaccccaaattcgatgggcattgactgatggtcattgcatgaggaagcctgcttcttggccaattcaattgcatttgttgaatagtcgagaccgacaagagaaatgaagccacgagagcgctaaaatttccaaggtaagtcaagaaattgaaatttccgggtttaaatattcgggatttacctgagcggatcccaggtcgactcccggacaatctgtcagtggacaatccgtcagaaaaatttattttcataacacaaaattttgtaaataatgtgaaaatgaatttaaattttaaaaaagcaaactaataatttgtgaaattttataaaagtgatgaataaatcagtttaatgacgattgaatgcggacggattgtccactgacgacccccaggtccaggcaatttacagcggcataaaatttcctgggccataattttattatgtccagaaatttcttaccatgataaaggaaatatctctggaattttgaaaattaaaaatttcatttaaaaaactccgtcatgagggacgggacaacggaggcctcccggatccaacccagacacaggttcaggacgggattttcttcataatgtcgattaaaaaatttccatgccaattttcgtagcagtgacccgttgcccgtgcctaagtcacaaattttggcagaaatgggcaaattttgctgttcgatgaatttcaaaatgcgcaactccgcggaacggccgaaccaaatctgaaaatataaaaactaattacaaaaattaatgatttttttaaacttcgccttcgtcgccattttcagcaaaatttgtcaattccaagtcgtacaaactgtcccaactaaatgaattcattttgtcattttggcaaattgtcaataaatccgggaaaatttttaaacttcataatatttgttctagagaattaggctggaattcttaactgattacgtactttaccaaaaaatggtcattttccctctcggaacccattttttgaaataaatttatggattttgatggaaaaaaatcaggaattccagtcaaaaaagctaaaatttcgaaaattttttttgaaaatgaacattttaattttaactcattaaatcgaattgatgaaaacggaaaataaattttttaaaaataaacaatttgaaaattcaggcacagatagagcttttcataaatatgttccaaagtttataggttccaaattaaagcccaagcaactttttattaattattgtcaaaaaattgttgcttaaaaatgcttaatgtctgtctcactattctttggtgccaagtttggagctctcaaagtcggaatcttccgcttcagccattgcaacctttgtaaaagaaataaagaaacaaaaaaaacaattaaatattaaaatttaatggaaaaataacgaaaaatgctttggtcacaaagagaattaataatatcacatttattcattggctccttaaaacaaaatgaaagagcaatttcaaacaaaaagagtgaaataataataatatgcttgaaagagaattgatgagaaggattcgaatttgaaaaataataatcatatcaattaaataaaacgataaatttgtaataaaaaattcggagaaatttggcgaagtttttttgaaaatttggtagt

SEQ ID NO: 2314 - DNA, 2617 bp, Heterodera glycines
  unsure (1)..(2617): unsure at all n locations
ataaaaaagttatagccaaaaacctaaacttttttgaatctttgtacacagataatacataagtaccaaatctggaatttagtcagtttttttattcttattctttttgttagattgacgtcccaaatgagcgaaagttggagcgcgcgcgacgctttgcggatgacgaacaacgaacacaacgaagtcgaccaatgccgtccagcagacgacaaccgttcagcaagtggacataaatagaacacaataaaatatatttttttttaaatctcataattttccgcaaatcttggtcattcctttaaaatagggttgtgtagctagtgttcatcttttaaccgaacagaaaacttgttttttggtgccaaaaaacaatgtgtaccagcagcctctatcaataactgaccgtgcacaaagccttcttaaaattttaaaccaatgagtggcatttgattcattaaatttagaaaaaaaactattttaatttaaaaatccttcgttaaataatttatttaaaagattttccgctgatgctatgcagtcaatgtttctcggtggcgacggtgaattggtcgttaatccaaactttgcttcattgaacattgttggcacttgtactgacattggttggttttattgaattttttaaaataaaattaaataataatttatttgttttgttttttttcagagaaatctttcttccgtctcacagctgcgcctgatccgagtcagattaggccacaagatgtgctgaaggtggcgctggagaatgtcaaggagaagtacaaacaaaacaacggttatcgttatgtgagtgatttcatagtttgatgatcccgcatatgtttacaaaaaaaattcaagaaaacgaggcacaaaatgaaaaaacactgcattcctgtttttctgcccggcgcagaaaatttgcaaataacactgccccccccccaccccttcccgaaatttttcttgctacagcggcctgtagttagctgaaaattttttcttttattttcaggcttctgatcagctgaaaagcattcgtcaagatctgatgatacagaacatacgcaacaatttcactgtttcggtgtacgagacgaatgcacgggttgcgctcgaaaaccgagaccgcgagtgagtaaatttaattgcatctattttttagggaaaaaaaacggatgcggggctggaatcccgattttaaaaacttggggcctcgaaacgtcatccattccaacaaatcctcttttttcagagagttcaatcaatgccagaatcagctgaaacagttgtacaaacaggtgtcttccgggtgcccaaatcggtgggagttcaccagctaccgactactctattacatttacatgcgagaaacacttggttgatattttatatttattttgtttttaaattgaaattttgtctgttttaagatgttgcatatttgctggacgaacttgtgcccgaggcaattgccgacgaatgtatgggttttgcactgatggtaattaatatctggatttaacattgaaaaataaattatttttacatgattataggtatgggacgcttggagcatggacaactacatcaagctgttcagactgtattcaaaggcacccaaaatgacgggtactccaccaacccacccctaatattatcaaatttttattctaattttttcttgccttaaggctatgtaatggacatgttcattgaccgggagcgtaccgaatttctcatcaccgtgctcaaagcgtaaatttgaaaataaaattaataattattattatcccatatacaattaattgattacaaatatttcttacagatttcgtcctgacgtttctgttgctgtgctgctgaattggctccagtttgacactgaaaaggcgctcaacgactttctggtccaacggggcatcgaagtggaggagggcggcacattggactgtcgaaaatatgccaatcacaaattttaaaacatttgctattttttgtcgcggagaaaagccaaccatattcagtgacgaattatcaatcagccaaattgaaggaagggcattgtagcacattttcatttcctccaggtcattattatgttgcaacaaattactgattttatttgccaattgaaattccatgttgtgattttcttcatattgattttgctctgttttgtttttgctttttttctctaatattattaatggaaaatgtttccctttttttctttgaaattgttgttgttctcattctaatacaatttttcaccaattttattttacacgcaattcatcagcaaacattgattgatatgtgttatgtaacaagcatttacttattcttcgttttattgtgaaaaaattgttcaattttaaaatctgttgaataacaaaacaataatttgcgatataaattccttaaatttaccagaaactggaacacaggttccggcttcgacaagcttggttgtttttcctggatctggattttttccaagaaaacccatgattaaattatggaaattaaaacattaattttcttcatttttgctgcccgatgagcattatttcgttgtncaatattccaacatcaatttgctttccaa

SEQ ID NO: 2315 - DNA, 916 bp, Heterodera glycines
cggtaacaaaaattgttgttgttcgtccgagttgttttcgccaccgacacttaaaaattggcatttcaaacaattttgcctcagtctgctgttcttcctctgacttaaagaaaaatttaacatttgtttgaattgttagtttgaattgttagtttctctgctgacactccaacaatcgatcacaaccaaaaatcagaaaaccacctccccaaagaaaaacggaatattaattaaaattttaattggccctcgacactccgcaatcgatcacaaccaaatcagaaaagccccctcccccccttaccctcctctacagtaatcgtttacaaaaattgtacataatggaatcggagaattcgggaaattttgtctccccgaacctcacaattgccaaaatcatttcattaattgccttcttttttgtgaccaccaccaattgttgttgttgttgccgctgctgctgttggcctcgtcgttgcagtttgactttgctttttggcataaaaacaagcacatacccccggcgggcgcctttagcgcgaaataatttgacactttccctctgaattttacacagttttattaaaaaatttttccattttttacgcatttttctttgtccacggctttcgctcgtttgatcaatgactgatggtaatcatgcattttgacttttcttggccgaaaatcggagctttcaaacaacataatatttttggcattgcctttatcgtcgagtgttgttgttgttgttcctcctcaaataattggcaaaaaataaaggaaaacgaaaattttgtgtgaaaaatagagtgcagcggggccgggacctgaacacggacaactgagtacaactgagtaccaaggtcccggttttgatcagttttgaccgggaccgggaaattcccggcttttt

SEQ ID NO: 2316 - DNA, 6027 bp, Heterodera glycines
cgagcactggcagcaacacaggaaattcgcaggacttttaaaatttattttattaaattttattttttattattaaaaaaacaatttttgtgacggtttggcaggcgatgatcatccataaaaatttgtaaaataagcagaaaaagccaacaatggtgaacagagtctgtgaaaagagaagaacaaataataaactctaattttttggattaattaaaatattttaattttcgaatataataaatttaaaattattttttaattcaaaattacgcacatataaaacagcgatgaaagcaacaaaaattgcgatttttgtccacaacccaaaaattgcaacggaatgaatggacacaaaaataattatggccaaatttttaagtcgccaattttggtgttctttaaagagaaaacgaaaattgagaatggcagaaaagcaaaaaaagagccaacagagaatctaaaattggaaaaaatggaaattaaatttaaaaaaaaaaattgacaattttaaagggacaatgccaagcgatggacggataacgccaccagtgccgtgacttttgaagattcagcgaacgacgaaaaaaggcaaaaaactgcaaaataaattgaataaattttcaatttcttaaagttctattaaaaaaaaattaaataaaaatcaaaaactttttttagattatttgaaaaactcttaagaatgtagtaaattgataaaaaacattttcttttaacttttccgcgtaggggcggggaatgaaaagaaggcacccttaaggaatttttcaaaattggcaccattttgcatttcttccgccttccactctccatccatcgcatgtaccgctccaactccctttcgtcctcgtccttttcctcctcctcccccgagggtttgctgtttttctgtgcgttcgttttgctgctgctgcttttgttgttgttccacaccaattcagcagcttggagagtcttttttatggaatttttttttaaatgggtgcacaattttttggcccccttttttcgtcactttttcccgcattttttgtctccgttccatttgttcaatgaatgacgactgttggtagaaggattttgttgacatttttttaatttaattttgtttgtaattaatttgcataaattggccgaagaatggaaatattaaaacacgacacccaaattttatgagaatttggttcccatggcaattcatcgtcacatatgtacataatagagatcgacattttgaaaaaagcctggacctggaccttgatttcctggacaaaaatccaggtccatgaaaaatccaggctcctcgagacctggatccaggaaaaatccaggcctggatccaggtccaggtcgatctttagaaatttattttaaaaatcaaaaaaatgtttgaaaaaattatttatttgagtagaagcatctaaaaatatctaataaataataataataataatgtgtttttaaatttatttaatctgtttttgaaaacttgaaaaaacatcggtcacttgaaaaaataaattctaaattttgtccaggaaaatccaggttttttcctaaaaattttcaaaaaatgcactccacccttaaatccagaaaatttcgaaatgtacttcatttctaactacaatccgtgaataaaattatttgccttaattttaactaatttacatagagaaaatatcaattttaataaatttcacccgtacatttgaaactttttcgcccctattttgcgaattttttgttcttatttaggtctctaaattagaattttttccccctaaaaatcccatccctaattatcagtcattagaaatcccgaccccgatcggggttcggggttgtcggggtatgaagcgtcggggttcggggtcggggttttccccgaaaatggccaaaaatgtcggggttcggggtcggggcggggtcggggttgcaaccctatttttttttgttagaaataagcattttttgggattctgaacatgaaaaacgaagttgatttttttgcggcgcttttcccaaaacttttgggccgcaaggggggccggcggtgccgataggcgccgccgggaaaaattttgtaattttctttaaattgccaaacattatgccaatttatcaaaatttaaaagattctgaggattttccccaaaagcctcaaaaatcctcaaaatttctcaaaaagccacaatttttgctcaatttttggctgaaaattatgtcactatttcggactttttgtcactattttggcatttttcgtcactaaaagttgcttccctaagtcaccaaaatttttcctaaaattttctacacattgaaaaaacgaattttgcctattttttttttgcttacaatgtttattcacacacacatagcatatacatacatacattcacacacgcaaatattgaaatgacaacagtttttgggggagttcatcatgtgaaatgggggtttacaatacaatacaatacaatacaacaatggggggtcagatgatccgatttctccacacgcatcgctctccgggcagttccaccattcttctgtgtgcagttagtgtgtgtgcgcgttctgtccgtccgtctcgtcgtcctcaggcaggcgggaagcgcgtgattgtgtggctcaggtccggcgcgatcagcagcgtggcgcccgtgttgttcttgccggtgtagcggggggccgagaacagggtgatcaggtggcgattcgcgaagtattccacgccgtccatgacgagctgaaaaagaagggaaggggaaaattattaaagcaaaagtgaaatgaaaagccaaaaaaaactcacttgatgcgctcgaacgatgtagtcgatgccgagcaggttgcgcacgctctcgaccacgtccgcgccgaacatgacgccggctcctctgttgttcggggcgacgcctgtgatgctcgtcgacgggtcggcccagaggaggtcaatttccagcgaacgaagcagtggctcggtctgcgggcgaagcaagttgctgagctggtccaggctgcggatctgattggagatgccaccgtgcatgcctgaaaatcagttggaaacagttattgaaccccaaaaattgccctcccccaaaacttacagaggatcttctcgccgaccagtccgacgaatggcatccaggcgaagacttgattgaagaggtcgaagagtcgacgagcgcccggtcgcgggtaacggcggtcgatctcatcgtagaagccatacctgaaaatggggggggggaatgattaatcacaaaaaaacacacaaaaaactttttcacttacactctgttgatgttggcgcactcgtggttcccgcgcagcagcatgaagttggacgggtacttcacctgaaaaatgggggaaatgaatttcattttttgggggttccctccccccatcccccaaaaaccacaccttgtagcagaagaggaggatgatcgtctccatcgattggggccctctgtcgacgtagtcgcccaggaagacgtactgctgctccggcggcaggccatgcgttgagaaaatcttcttcaggtccgcgaattgtccatggatgtcgcccacgatgacggccggcgggtggattctgacgagcgtcggctgcattcggaagacgtccgtggccgctttgcagagctggcggatttcatcgtcactgatctgttggggaaaaaaggggggaaaattaatttttgaaaaactcaaaaatttttctacctcatccgtgaagcgctgaggaggcgagcggttgaccttcgtgatgatcgcgtccaggaagccggttgacaggccgtctccttgcacaaggtccgatgccgctcccgattgacgccgagactgctccgccgctgctgctgccgttgcgtcgaaacagtaatcctccattgaagttgttgcgccgggcacgtccgcttcgtgtgtgatgaagtgttgtagacgatggacgatgataataataataatataatataatatgagggcgatgaagtgaattgtgaggaaaagtgaggaaatgtcgcccttttatacaactttttttcccttaatttcgaaatttttttgcttgtctatataaaggcgagcattgcaaaattttctctcattcatcgcgtccgttcacatttttaaattcttctattatgcggacgatcgtctacttcaaactgttgcaaattgtgctcagtttggccttcgtgtggcaacttctttcacttcaccaattctgcggcacatttgtctgtccgaaggtgtgctgctgctttttgttgtttttgccaattttcattttcaatttttttgtttaacgctgtttccatgcttttcaggccttcctccatgacatctctgttggccactgcaaacgctttacgctgatcggaaaggactcaaagacgggcgaattcggcgctgtgttggacgagcggaaatggcacaaccaactgttcatgagcagcaccaacggtctcccaatcaaagaacagcagcagcaattcatggacgaattggccgccaaattgccgtgccctggacgccactgtattccgattacgacggtgagcaaaatgccatcagaaatatcgaaataaaatgccattttgttttttcagccttcgttttttttctggactgagaagaacagaaatctcctcgacactgttgtggactccttttccggccaactgttgctcgcattgtgctcgcttctcaccattggcattggcttcgcccggatgttacgccctgcggcagaatatgaagtgagttcaatgcgtgaacacagacagcacatcagcccgacaaaaacgcgaacaaattgcttttcagttgaaatccggtggaattttgaccaaattgtgatcagttttgcttttgtcgggttacgagttgcaaaaatttgcttgttttccattgagtcggttactaattttgtttttcatttttaagtgcttcgactattgcatggccctctattctgtcttttgctggtgttgctctgcttgggcctcatcgtgtttgctgctctattggacaccttattggtcttgcatgaacttccgtgcggatgacacaaatgtgccgttggtcacttttgtgagttttgccgcccatttgattctgcattttccaattctggatttttcaggtgttcgacatcgtcatggtgtgttcgttcgtcttcgagatgttcttcaacaattcgctggtgaaaaaacggcccgagaatgcttcagtcgctgccgctaatcgcaaattgcgcaacgatgtcgccacggaatgtgccaatgtcgccattcatcgccagcagcagcagaagaacggaagtgccatcatcatgcaaacttaagcagaggacggacgagtgggatgaagaatgatgctggtaccaacaaacaatgcgatgaaacgatataaagcataatatgtatttctcagctgtattccattgtattgtatattccattatatcgcctatatgcgtatgcatggtctcaaataaactcacctagaattcggatttaagaaaatgcaatagacaaaaaaattatgctcggaaaagttgaatttcgtttttttcattgtaatttcttttgggacgcataatatgacatgggacgcataaaaccgactagaaccattatatttttgaacatcatttttgcaaataatttaataaattttggggaaggacccggagtctggttgggagccaacccggagtgactcaaacacggaaacttccaaacatttttgcacaatttatcatttcatattcgtctttgaattaaccgacggagaaatgtcttttaatgtttttgtcgaagattatgtatggaatagttcatagatggagcccctagaccagcgggaccgagacttctacgagattttacgggattcccgctcctgcttgaaatttcaaatttcctactttgttcgaatcgggtccggagctcgaaataagttgaaatggatgtcaaattt

SEQ ID NO: 2317 - DNA, 1908 bp, Heterodera glycines
tgatttatacccttttcgtgctgtaggtgatcagtgatcagtgatcactcatcaatccatccgaaatctcttcagctcaaataataaagctgcgtttctgaattgtgactccctttctttagaggaaaaattcagctttttaggattttcgcacatcaaaaaaataaaagcaaatcgtggaaacttctgattattttcggtttttatgcttaatttgctattttagtgcttaattcatgcttaaatttaggtttttttggatgcttacaaattagttaagtgctttaccattttttaaaattagaatatattcatttttaatgtttttccatttatgcttttaaaatattttatcggtttaaaaaaatgaaaaaatattattaaaattaaaaaaaacgcatttctgcattaaaaattttcgattttgatgtcattatcggtcactagaaatcactattttggagttttcactattttggcgttttgtcactattttttcactatgtcaaaaatgcaaatacacccctaagaatcgagctaaaatttttcaaaatatactcctatgaaatgaaaaaattttctaaaaaatttactttcttggcaaaaatttttaattttaaaaattttttaggtaactattttgggttttttggtcttaaaaatccctgtcctactcatttgcaactgcaatcagtgaataaaattatttttgctcaatttttggctgaaaattatgtcactatttcggactttttgtcactatttcttcactattttggcatttttactcactatttatgttaactattttttgaaaaaacgaattttgcctatttttttttttttgcttacaatgtttattcacacacacatagcatatacatacatacattcacacacgcaaatattgaaatgacaacagtgttttggggggttgatcatgtgaaatgggggtttacaataaatggggggggggggggtcagatgatccgatttctccacacgcatcgttcttcgggcagttccaccatccttctgtgtgcagttagtgtgtgtgcgcgttctgtccgtccgtctcgtcgtcctcaggcaggcgggaagcgcgtgattgtgtggctcaggtccggcgcgatcagcagcgtggcgcccgtgttgttcttgccggtgtagcggggggccgagaacagggtgatcaggtggcgattcgcgaagtattccacgccgtccatgacgagctgaaaaagaagggaaggggaaaattattaaagcaaaagtgaaatgaaaagccaaaaaaaaaataaactcacttgatgcgctcgaacgatgtagtcgatgccgagcaggttgcgcacgctctcgaccacgtccgcgccgaacatgacgccggctcctctgttgttcggggcgacgcctgtgatgctcgtcgacgggtcggcccagaggaggtcaatttccagcgaacgaagcagtggctcggtctgcgggcgaagcaagttgctgagctggtccaggctgcggatctgattggagatgccaccgtgcatgcctgaaaatcagttggaaaacagttattgaaccccaaaaattgccctcccccaaaacttacagaggatcttctcaccgaccagtccgacgaatggcatccaggcgaagacttgattgaagaggtcgaagagtcgacgagcgcccggtcgcgggtaacggcggtcgatctcatcgtagaagccatacctgaaaatggggggggggggggaatgattaatcacaaaaaaacacacaaaaaactttttcacttacactctgttgatgttggcgcactcgtggttcccgcgcagcagcatgaagttggacgggtacttcacctgaaaaatggggggaaatgaattttgggggttccctcccccatcc

SEQ ID NO: 2318 - DNA, 9122 bp, Heterodera glycines
caattgtacgcttggtgtagcatgattgagcagtggccttggtatatttaatatatccagattaatcccccccaaatgtcttttcaggcgcatgtgttgggtcattgacattgcactgagtctccaggttggcccaactttttggctttattttcaattattgtttgcctttgtcaaaggacgagtcaatgcccatccacgaattgtacacgcaaatcagaaatcgcataaccgtggcttcgggaatggaggatttggaccggaatggacaggagtttgagccactttttcgtaaaatgtgtgcctcccgcactgaccaggcccgtttcccccatggtcaaatcacgaaaaccataatattcgttagttgttcagctcctggtcgcgcatgtgaaggcgtttgcgccttgcacctccaatttggacccgtacttgcgcaaaacgattcgcgagcagcgcggcggtgaaccgatcattgacctttccgtgtcgcaggaggacgacgacgtagcacagcagcaggatccatttggaccactgaaagagaccatcggcccagaggcggaatttgtgtttcaggacccgatggtgtgggcatcggtgcggaaagctttggccaaaatgtccgtcgctgaaattgtggcactcatacgacacttgggcattgttaaggtcggcacattagcaacgtttcgcttaattattcattcgaaaattccttttaatgcaaattgtttaacaaattaaggagagggaggcgcagctcgtcaatgctttttatgagaacaatttgaatgggctcgtccttcacatttgcgatctcaacgaactgaagcaaatattgaaagtgattgatttctaaatatgccaatttgttttgttcattcgttgtccattttgaggtgccattgggcgattggactctcgtcaaattgttgattgaatctctccgcaaatggaaacccttctccacacagtccctttgctctccgcccgacaccaacagcaactcggtcgccgaccccgtcgttgttgtccaacctcaacaacaaaaacaccttgtacaacaccatgacaatggtgaatttggtcaacagaatgaacaacgcatggcactgttgcggcgcattgaagaggagggaaatgggcagacgatgatgaacaatggcgagacggaggaggagaagcggagaaagtcgacaaaaagtggcgaaaaggaagagaaagagcgaagagaaacggaggaggagatgaacagcgtggcatctgtggcgggctcttctgagcagcgatcgcttctgaggtcgtccacatccccaccgaaggactaatcacagacgaatggaaaacgaaacgaaatgatcatcaatcacaccactttttcattctttctagtcatacaacatatcagggattgtcgcaatctatgcttcatttaaattaaatctcaagcgcatttttgcatttcattaaaaaattggtaaatttgtgtaaaaaataaacaatggaaagtttcgctttcatttagaggcctttattaaaattaaaatttaattaaaatacgtagttgttatatacataccagggatggcacggaattccgacctccgaaaattttcggtgcctcggaattccatccctgaaacatatggtaaaaacccaaacttgttttcaaccccctcgaaaaaggggggggggtctaattcaataaatacggtatatatttttaaaacgcgaaaaacagattaaaaacattttatttacctttaaacacaccgtttcaaaaaacgagacatgaaccaataaatagagagtgcagagaaaaaaacatctctctttttggcgtactatttctttatctctgttaatagagaaaaactgaatttacttcgccacatataactttttttctactcatacaatttacaccaaattttgcatgtcgatagagaaaaaaattacgaacaaaatgtaagggtttttaaaagcaaaaaaagggttaactaaaaagttattcgagaaacaaaatttcgaaccctcatatctttttcctaatcaatccaattgcttagcatttgcttagaaaaagcttctccccatcaagggctttcgaatgatgtcaagattgtacaatttggttggtaaaaacctccaaaaataattcccaaaaatggtcattttttaattttttgcacaaaaataaataaaaatattcatgttgcacaccggactcgaaccaacaccctttgtccctttactatcttacaaaaaccactgagccacacatgcaaatctttttggaactgggaggccaaaattgaaacggtgtgtaaatgtagtgatggatctataatttatttattttttttctgatatgcataattattttttccactgctgttgtttggttttgtggtgcgccaaaatgagttatttttcactgactttcttcccaactgattcatcacattttttgagtcggtgtgtaaattgtcagccccattaatcgtatcactttttctgttcacttgcttcattttattcatttttcttgctttaggttttctgttgaacataggatttgttttgtttttttatatgtacctatatttttttattttaacagattttctaaaataatggcgatccaagccttggtaatgcttttttgaaatgttaaaataaatttaaaaaaatatagaaatgttttatatttgaggggatactgtagggtaggtggtggtgtctgtgtggtactgtaaggcccttaaacagaaatgctcggatactgtaaacaagacaattaagttcactctcttaagacggcccctacattctggacaccgtgtccgacttcgcctccaccgataaccagcagtgcaagtgccactttcgggagcgatgacacagcaattggatttgctgtagttttgggggcagcagcgctttgttctgccgcactttgtaagaaatccgccagtttggtggctgaattatacaaaaacgaaattcagatgccatcaaaaaatggctattgtgaagggcagtgacacagaatccgacaaaacagccgacacacagagaaggacgaagaggagatgagagtggaccaaccgcgttccgatcacacttttgatcccccccccccctctcgtcccatttccattttttgttcgcccccgcccccattcgtgatccagccaatctaatgtattttttaggccttttctgttatttttaattttgaaaataataacaattgaaaattggtttttgtttctgttaatatatgatagcgtttttcattcttctcgtcatcagcaaataagcaagtgattgtgtattttgtgaacacctgaaaccatgcaaaataagacgaatttggttgactttttgttctgaaaacgaacatttccatcaacaaaatttggtggttggcaatcatttgctgaagtccagtgacaaattgccggctttgatcaactgattgcttcagtttggatgcatttgcaataagaatttctcggaccaataattggtaaaaatggacatgcttttggtggcctttgtcagcaaaaaacaaaagccaaacaatcagacgttcgatgtaaatcagctcaatcccccgaacgacagcagaaactaaagaaagaaaaacatgggaaaagtacggattatttattgttattttacgttgtaaaatgggaacggattcgaccactctcctcgtcagtttggcatcgttgagccgaagtgccaacgaaatggctttcgcgtgttcgccggaaagagaaaattggacgatggagttggggaccacgtcaatttccaattggaaggggtcgaatcttcgcatttggaacagagagtaaagtgcaacgccttccgttgaaacgacggcgaaagaaccacctaaaatggaaagcaaacggctcaaccagttcaatatttatgtttatttacgcagcgtctgaaaaatgagagatgtacaaaaaatagaaagtgcagagaaaaaacatctctcaattaaatcgcttatcatttgcttagaaaaagttttttttaatcaaaagctttcgaatgacaccaaatttggttggcaaaggctttaaaaataattttcaaaaatggactttttcaatttttggacaaaacttaaataaaactattcatgccgcgcgacggactcgaaccccttacaaaaccacttcgccacacatgaattcttttttggtacaggagttaattttccggacgctgtgtttagagcacattaagtaccagttggacaaaagcccatcttggtaacagtgacgggttggtggatggaccgttcggccatgtctgtgtgccgtgtgcccgggagtttgatggcttttcttggattgtgccgttcgtcttccgagtcactgatgtcaaacaagtcaatgttgccaaattctgtttgtcttcgtgaattgatgtcatccttagacaaattaaacattggaaatatttaccaaattaattggtctcaaataccttaaccccttccaaactcgcgttgaaactcaatttgaatgtacgcaatcgaatacgacccgcgacgctatacagacaaaaagtgttggactgaccaccggccaaaagcaaagaaccgtcgggggagaaagcgatgcaagtgaaagtccttaaaaaggggggggggaattatggacaaacgattaaaggacactgaaaaaacgtacttattccgctctgaagacgctttcttcactttgtccgccttttgtcgggccgcgtcaatgtcgagtttggtgtcaattgtacccaattgttgggtgttcacagtgtcgaacaaagcaattgacgagtcgtaacaaagcacggccaaaagcatggcggaaggactgaaatggcaaagtcattttgagatttgtgagctttgggggcgtggaataagaaaatgttggtcgcggacaattgaaaaaatggaggcatagcagtcactctgttacctgtgcttcacatccaatccctcactggtcaattggacactttccaggcaattcccttcgataatattccacagtttcagcgtgccgtcagaagaagcagagaaaagcgtgttttcggacagtgccaaacccgtcacaagattagtgtgtccgttgagcacctccaacaaatggccggtggccaatgccttgaaaaagcaacagattgtaatatcctcgtccctctctttgagccggtcattcgttcgttacgttacccacccaaacgtaaatgtcgaagttgtctttgctcgacgctatcaccaaatcgcccgctttgtccgcgcacaatgcgttgagctgtgtctgtttcggggcgaccatcgtctgaaaattgcgatacctaaaaaacaaatacacacaaaaatgggttatgcagagaattgaggagggtgtcacctcttcaagtcatgggctcggacggcgccctcgagcgaagcggaaaggacggctttgccggattgggtgaagcaaacgtcggaaacgccggtgccgtggtcagagaatgtgacggtgcaaaacgaggaggagcagtcccatattttgacctttcatcaaatattttttggtataattagggttcgcagttggcaatttgcctttccgtcctccgcgcccgtcgcgagcagtgcaccgtcgggcgaataggcggcgacagtgacgttctgacggtgcgactgctgcctgagcaagtacgactcgctctgccactcccagacgagcagttgcgactcgctgccttggccacagccaatggccaaccaaccgccggccgaattgatgtcgacgctgttgatgcgcacctcactgatgctgaagcgaagggataaccgatgaagcaattggttagcatttccacagacaaaaaatcaccgaaagttttgcagcaaaaccaattcaggaagctcaaaaatgcaaaagacgccgttgttgaaggcggttaccaaaaactttttggctttgtgcagggaaattgcggtgagttcaatggaatgggacgacgtcggattggcatttttgctcaaattgactctgaaaagggaaaaatattaatgaaaaaaattcagaaaggaaacaatgccttttctttcgggcaaaggaaagtctttccgactccaattcggcaattgccattcgctttcgttccttcgtccgcgttattatctgttccggcctatgcgaactctcccaaatgctgcaacttccgattttgtcaacgcaaaataactgagacggaaaagtaaaataattaaataaaattatgtgagttgcactgacattgtattcgtcaaagaaacgtgccccgacaagtgaggccctttcattgagcacataaactccaacattagcaaaggtcgacttaaacgcggcaaaaactttgaccacgcgattctcaccggcagcaataataagtctgaaaagattttaaagttgtcgggttcgaattggctagagaaatttttgaaattaatggatacttccgtttactacaatatgatatttttgattggtaaaaattaaatttgctatttcatgtttttttggaaatgataacaatgacgaggattaacatttgttttcttcgctttgaataaaagagttaaaataaaagaatgatgaatatcaaatgacctgccatcgtcggaccaatccaacgaattgatgcgatccgcagaatgtttgaacttattcactcggatgaacggattgaactgaactcggtggaatggaactatcgaatagacgtggacaaagccagcgacaccaatggcaatgaatctgtgcgaggcaacaaatttaaaagtgaaagaccgaaaaggacatttgggggcatttcctaaaaggacaaaaaagcaaattgcgaaccgtccatcgggggaaaattttagtgcacgaacacgctcagaaaagagttgctgatgaagaacggtgtcgctgaacaagttcaaataaaagccatggccagctaaaaaaaatcaaaagatatttgcttacatttctaaaattacgactaactttctgtcataacaaaggcatgtgtcccggcaaaattaatgtcaaaatgtgtgatgtttgaccgtaattgcgtggcaagtgaacatgaagagtttcttaaaatattgtatactcaaaaacccattatttattggtgcgtaaaataaaacagtcaaaaatcattatgtattaccgcttcaaatccaacgtttttatccgattcccgaccggactaagcaaaacatttccatcgggcataaatttgacttggccatttttgtaaacagtgccaataatgtcagaaaactaaaaatgggaaacaaaagttagatggaataaataaaagttataacaaacttggtaatttatgttcatttctgagcatcagttttagaagaacaaaatttataattcattaatttgaatctttaaaacttaaattaaattgaatgcaaaaattgaatttacgcaaattaaccaaggaaaatgctttataacattagacaagaaaaattgttgatttctctaatgtttactatggcaaatgcggtcatttctcaattttagtgagagaaatttatttaatgggcaacaaagaaagtcagtttggcacaagatacgcagttgatggccgagacagccaaactctcgacccgagtctgatcagatcattcacagagattcgggacagtgacactgactttgcattggacaaattccaagtatttttttcttatgtgtatgtatatattaaagtatattcaagcaaaattcagattgtcaggatactttccaatcttcgccaatatcgccttctgtcgggtctctacgaaaaagcaattcgtctaaatggaaatgacaagttcgcttggcttcagttttcgctttcactttccgccgatcgacacttccttcgcgtctcaaagattttgcaacaatttatttctatggaagaggaagaagaaacgaatcaaaaaggaggtgctgacgaagacgcaatcgttgcttacatgcatttggcacgcattcaactcgaacattttggcgactgtaatttgggtacgtttgttgagttaagcattaagcagcattggagaaaatgtgtttatggcggttcaccaaaaaaataaattgttttcgctatatggaaagtggccgattttggattttatcaaaaagtaaaaacaaaagggggggtactagttgggtttgtatcctagttttggatcaaattttttcaaaatttttttttttatcgcaattgctttaaataacaaataaaaggagatttatgtgcttattgggtacaattccgcgatttaaaaaatttgacccaaaagggggatacaaactttaactagtacctgtaattttatgtgtgttaaaaatgtttaaaaataaatttaatattaaaaaagatttaagcgttcatttagaatttatggactgttgcatttttattagtagatttaaataaattttacgcaaaaatgggaattgtgaaaaaaaaaattcgatttgttcgaatccctgtccggggttcggaattagtcgaaatggatgtcatattcgtgatcagcgaccccgaatacctctggaaacacaggccattttcggctccgaattcaaaagttgttaaaattaggttagggagttaaaatttatcagaaaagagccctttaaattatgtatgtaaatatatattgctcatcgtctgcaactttaatcccacgaagcgacgtgcccggcgcaacaatggcaagagaggactactgcttcgatgcaacggcggcggagcagtctcgagcacgaatatgacatttacaaccaattcattttgaacaaaaataaaagttaattttggtttgcatatttttgaaaatgtttaacacagactagtgggtctggaccaatccacctaaaaacaaggttttaaccaattgggcaaaacagttccatatcattgtagagcatttgcgatccaacttaaatgaattgcgggcaaatttgctcttctctccttgctttcacgtgtttttctcaaaaatattttgtcttgctacaaaaaaggaaccaattttttttgcctgt

SEQ ID NO: 2319 - DNA, 9951 bp, Heterodera glycines
acaagacgcaaatgtccagcatgggagcgaaaccatggaaaacaggaaaaggaatatgaagactttttttgcttttcgaccaccaaaaaatgtttgatttttttcaaaattatagacatggaggctaatttttttcaaatttcgaacctaaaataataacgattttgttcattttggtcaaattttgaaaaatttagtgaaattgtcgtcaagaaattttttgtaaacattaaatacttaaaaactgataaaatttcaaaaaagcaccctcttttccttaaatttttttttatactaaaaagggaggccttcagggagcaggacaaaacgtcgccagccgaaacgtcatcgggacataatgtcgccacaaaattgtttatttaattttagaaaaaatttatcaaaaatttttgttacctagcctgcctggtttgaaaaaaaatatagaaaattcataaaaattttttattaagaaaattcaagaaaaaatttttcatattttttccttcttttttctgagaaatcagcaaatttagttttaattaaaatttctaattttcaaaaaagctaaaacaattttaaatttttttttgcggcgacgtttcggagtgtacacgagtagttaacatcccgtacttgtcgtcagtgcgcgaaatgtttttcgcgcacaaacgccagggtgtcgggcggttttgtgtttgaagttgccgcttttggcatgtgttcgggattggtgggggcgggattctctttgaaggggccgacatcccgagggtattggcgggtttcgggaagtgattgattgattgatttatggtcgggagagggggagggggtgctaattgcgcgaaattttgattgatttatggactcgaaaaagggagggtggtggtagggggaatggggaatgcagcgcgagttatcgcaatgcgcgaaaacaatggaaatgaatgagggggagtgcgctgggtggcggcggtgacatctggcaacttgtcgtcgctcaacggaattttgacaggatgcggggggggggggggagagatgtcagagaaaggatggaagggtataatatgcagtggatttggctgaggggggggggaattcaatggaaaatttggagaaggaaatattattaatgtgaagctggcggcaccgtcttttgtatatggcggccattgttcggacacttctgttgatcgttgacagaattgtaagtatctttgggagaaatgggtcgcttggacatcactttctttccccaataaacatttttgtactttttttcgcttttccaataaattcccctagagaaatgaattaccctactgatttttcttggcttcccgtcaacaattgtgtttgtcctgtgaaggacaatttatgttatcactttcccggctacaaaaagccggttatttgtgcccataaactggtgcaaaacattaccgcattcctttcaactccccctcacattcctaatggtattttttctgtttgtttatgatttaatttttcaaacaattttccagaatcggcacctgcgtctctttcctcgggctccgtgttgatgctgcttactgtgctccaaattttcatcattttgcttacggtgagtaaaaattgtttatcattaaatttaaaaatattttaatttctttaaggtggctttatgctgctgtttgatcgtttttgccgcgcgaggccgaacttatgcggtgaatggtcgccgccgttccattcgacgccgcgctgccgctgcgactttgagcgccttccaggcgcgcacttcgggtgggaattttaaaattgttataataaaaatattcattatattcggggaagggatgaatttcaaattaaaaaaaaattcttccattttcagcgcttggtcttggcaccgctggtccattggcgattccaaaccgccccgcagggtgcacttctcatcgtgtgccgggtagtgtggcatttcacatttattttttttgttttaattttcattcattatttaggctgaatggtgtcagctggtcaacgaaagaatgatgtgtgaagaaaaggcggataaaatttaaaaaaaaggaagatcgaataatatttttcttttttttattctcttcattttttccaaataacaatttaaataaaattttgggatattaactgaatgtactaagtctatcagcttaggttctgcaaaataatataattatctacccgttaaagtttatacacaacaatatgttttcattaacccgctcttcctcaaacacttccttgacaagcaaactgaattttattaattgaaaaattagcattacaaattaatagtattatgtaattttgggtctttttttactgttttttcggatttattcgatgcgcttctttgctttcggcggcgccaaaatgtcggttgcgcgaacattggccagagcgcattcttcgcacagttcaaaattgacagcgaaacggccatcatccttgcgcaacaccctctgcttgttgttgtacaatttgttccaatcatctgagatttataaatatttaacaacaaaaaataaatagttattcaccaacgcagaggtagaagcccagcatgtattttcctttggcgagtttccacaggtctcggtcctcgacttttcgctttttcattgacggctgctgctcctcaccaccattcattcccacattttttgacggctgcttacgggtgggcgctttcaaggaaggaacaacaaattcagcttttccaacattgttctcctttttgacgggggagctttttgtcggagagaatttgcttggggaggacatttcaatagaattttttgaaaattttgcaaatgaatcctgattttgggtgggtgaaggttgggaagcgaaaaatgggcggagcttcgaactgtcgaaaagtgggcggagcctaatcgaatgaaaacatataaaatcggcacgcttttgaacttccgccaaattttgcaaatcattcatagttctatctacaaaaatggccatcaacatgagcgacaagcggagcttgctccgacaaattctcggcgaagcggaaattaccgtgacaacatcgggcctgacgattagcggcccccgtctgtccactccacggttcctgccgtttgacgagagtggccgctgccgctcatgtaaggcaactgaagtggaggtcgacacaatggttacgaaggagggggtcacgatttggtgcacacgcatcgacaaagtccaattcgtgccattcgatgtggtctacgaattgccaggtcactgcttcttccgactgaagaacaagtcgcgtgtgttcaatcttccatacggcgaccttccatctgaatccagtgaaattccgctaacccaacacgtagacgaagaacgggacctcaagagaaaggcaaaagctgcgctcgaattggtggaggccggactgattgcggacagcactgtgcaggacggggcccgtttgaaaaaagccaaaactgcgatgaaagtgatcagtgacattctgctctcggaaccgatgggggaaaaccaaaagaagacatctcaaacaccagccgttgaaaagcagcaacaaccaccaccacaacaacaacaacaagaccaacaatcatcccctgtacaagagaagcccgtcacggcacccgctgtggaacagaacactgttgaagtgaagacggaagaagaaaagaaagatgatcttggtgacattgacaaaacactcgacgatttttttgcgagccttaaagccgcaaccaccagtatgtaaacgaaaacatatttaaatccttggaatttatttgagcaccatttcacttgatcacaataaaaaatgttaaattcacaagcgttttcaaataaagatatttgttttaaattgccctttgggttaattatttcggggccctcatcctctggtaaaacccaatttctactaaaatttattgccgagtcctccgagttaatctcacccagcccggtctccattctttattgctttggtgaaatgaactcagcggtgcccgtacttcaaaaagcgggggttgacgtttatgcgggagtcccgtcagaagaattgatcaaacgtttgcccaagcctcttttgttgatactgaatgacctcatgctctccatggacgagcgatacctgtcagatttgttcaccaaaaaatcccaccaccatcaatttgcggtagtttttgtcactcaaaatttgtttgagaaaaagctcaaagtggcgcgcctatcctcccagtacctggtactgatgcgagcacccaactctctgttgtccatcagaaatattggagtccaacttttcccgcgccagctcgacttctttctggatgcgtatcgccaagcgaccgaccgtccctacggctatttgctgatcgacatgcatgcatcgtcggacccatcgttgcgtctgcgcacaaacatatttaaggaagagcaggaggaagacgaaggcattgttgtgttcattcccaaaaatggaggaccttagtcaacaacagcaacagataaaaataggacagctaataaaagacaactcggactggctgtgtgctttggcgaggaccaaatcctctaaaaagtgtaggaagattttacgtcacgcgaacagcgatcagctattagcgctagtggaaatttgtctgaatctcgtcgcttcacgtttccgattgactacacgacagaaaaaaagattgatgccctatgttgagactgtgcgaaggatgagcagagcgagaagtgaacgcggcgcgagacgtgtgcttgttcagaaaggatcgggatttggggggttgtttgctgccctcctaacacccgtgttaattgaagtagcgaaatcgtttgtgaccaaaaacgcataaataccccacaatttgttgttcacgctcacatttttgcaaaatggctaataaatttttgcttgttccacaagaaatttaccgagggctaacctcagcgtcggatacgggagtcattaatttggatgcggtaaggcatgacctggagcgtgccaggcgtgaacggactaatccgacaacaaaaaatgtccggtacaatcaacagcttaggcgttatctgcaaatgagaagggagcttgccgatagacctaccaaagttgagttaaccaagggcttgagtgttttgctcaagcgagatgggggtgttgatgatgacgacggcgaagtcgtcaacactcagccacggcctcccgctccaccaccaccaccaccaccaccaccatctcctccacctcatcaataccaccgtcaccatcccagccctcccgatcagcaatcttcctcgtctgacgatagtcatccgcctcgcccccctcgtccaccacgtcctcagagaacaaagaaaaaccatcaatcttctataaaacatggtcggttgaaccaatggaagcaaaggcgtcgtgacttgcaacaacaaccggtagtacgtgatctactcgctgaggcagcagctgctcctttacctgaaagtgacgatgacgatgaacaaatgctggaaggtgggtatctgctgccaacaccatcacaaaattatggagacatgccaatattgcctgactatgcagatgaaattgaggaaatggacaccgcccaacaaagacttgcaagcagaagaaagattaaaggagaggagggaatagataaaaacaaaaaatacaaaatttactattctcctccaccatctcccacactaccacccgtgtacaaacgaccagaccatccccctcctccgcctcgttctatacccaaagttgaactgaaaagggatccacaaccaacaaagttgaaaaaatccgcctcgccaccgcctccaccattgcctccacatcgcgcaaagagagaaccaaaaatagagctcgcccctcctccacctcctcgcaatgtctccaaaagggaaccgaaaattgaactagctcctcctcctcctcctcctcgtcacttcgccaaaaaggaaccaaaatttgaagttgacccacgaccatccacatcgaagcaagccgggtacttcccgcccccgaaaatcaaaaccgagccaaaacatgagttacaacctacaaagaggccagtgccataccgtatcccgaagaaagagccaaaaattgaagaaaagccattacagcagcagcaacaacaacctcctcctcctccagctgttgtcgtcgaagaaatgccctatattcctccgcctaggagggggaccaaacgcacctacccccagaatgatgatgatgaggtgcacataagaaaacgagtgaggcaaccgagaagggtaagagtacagtactcgcccgagccagggccatcaacatctgcacaaagtgaagaagaacgacaacaacaacgtcaactgtttgctattccgtcaaatcaactgaccatgacacagagaatagaacgattatatctcaaatgtaaccattatgccgatcgtatgggtgttcgggtgaatacaattaacaccgccaacggcaagccgttggcgcatagcaatttacgaatggccatcaagtatataatagaccgaagagcgggccgtcccaccattaaaccaccgggagcagacctattggagcagcggcttaggcgggatccaattttgtattcatggacggctccaccaaagagaccatcacagagcaaaaccacccggacggcacgggcaatcaagaaggagtttcgcccgaaaaaatggagctgatcaacaccactcttgacaaaatgtacaatgacccatcctccccagcggcgtttgcaggtgttacagcactgtggaaagaagcgcggaaaaagattaagcatttacgaaaagaagaagtgcagagatatttggagggacatcgcacctatacattgatgcgcccccgcagggtgcggtttccaagagcaaaaactatagctgctggattcatgaccgatgtccaggtggatttggctgattttcaagccctttctcgtcataatggaggccaccggtatctgctcgtggcggttgatgtcctgtcaaaacgtttgtttgtcgtcccactgaaaaataagagagccgaggagatgctggaggcattcaaggagcttattgagcaaatgcccatggccccccatcgaatattctccgacaaaggcactgaattcaaaaacaaactggtcaaagaattctttgaggagcacgagattgcgaagcacgagcccgtgcattcatcagtgaaagcctcagttgctgagcgagccatcagaaatgttaagcagcgactatacagatattttgcagaaaagcagactctcaactgggtggatactgtacagcaaattgttgatggaattaacagtgcaccgtctcgtgttcacgggatgcgaccaattgatgtcaattttcggaatgctcaaaaggtgtggaaacgaatgtatggacaacaattacttaaaatttcacaaaggcgagcaccacgtttccgtaaaaatgaatttgtgcgcatgagcagagagaaggggcagttcgagaaggggtacctgcccaattacggcgatgaaattcttgaggttgaccaagtgttgaaggcagtgcgtccaattcggtacaaacttcgtgatgatcgcggcgaaaagttcaggggcactttttatgagcaggagttggcacgcgtacgtaaggatgatgagacaagctaccgaatagagaaggtcttcaggaagagaagaaaacccgatggttcagttgagatacttgtaaaattcataggctatcccgagagggaatggatcgatgaatctcagcttgtataaaagcattcagtttgttcattattttttacatttggataaatctttttctaatgacatcaaatagcttctttgtgtttttgccaagtaatgtatcggattaccccgacaatcaaccgaacaaatatagggtacgtcttccaaaacctctacattttagtgggtcgtgggtttgtgggttgcatagcatcagctatccctactcatggcactctacaattggtaccttggatgaccaatggattgacattcatttcaccaatctccattccgttgatgaggaccgacagcgtgtcatcagagtacctgtcccacaggcgtcgcacaaaaaagttgagcaactcagggattttttacaagcaacattgaagagtcaagaaaaagtcagacttaagccgcttgcgcatgaagaagggtacttcgataaaccggtagtgctcggctcgcctccacacgccaagcgcctcaagagatcaacaattgatgatctctcttcactgccctctccccccgagatatgatgagacagatgagcaacaatcacagcagcagcagcctcagtctccccccagattcgatgagacagagaaagaggataaaaaagtcaaagaaacaacccctccttctgccgctaagcaaccgataccgccggctccaacacttgctcctccttcacatcctccaactgaagcgccaaaggcaccaaaacaggcagctccaaaatctgctacagtacctccccaaaagccaagtgtgacacctgctacaaccaaaacttccccggctcccgctcccattccacccattaagcaagctccatcggccccgaagccttctccgtccaaaacagcggctgtgccgaagccaactccaacacccactccagcatctaaatcaactattccgactcctgcttcatcgaccaaggcgcagaatatccctaaaataccaccacctctggcagctaaaccaaaggagccaaatgtcgcaaagaagtccactgtaccaactaccgtatctacaacatctatttctaaattaacttctcagatcgaatcatcaccaacaacaccgaaaccaccgccgcctcctattaagcctattcctacttcaattccggcaccatcaccgcccccaaagagtatagcaaaggacataaaacgctcagtcgaagctccaaacgaaagcaaaaaggaatcaaagagattggatgtggatgataggttttttggcggtttagctgccggagacgagtttcccgacgacgatgacaaagagtccgaatggccatatgatcctttcaaaaacattgtcgatgatgtagaaatacaatatcttgatgactttgagcgattcaaggtggtgttcaaaaatccagtgatcagccacttgtcattctcacctcagctaggctatgtgcttggatttgaaaacccccaacacgttgggcctcaagaaatctcaaaatacggctgtgacttacggggtggcttctcaagtttcgcagtctactcaaaaggactgaccgagaacatgattgttggtaattcgctgagttcgctgcttcgcgtggtgtcggtgagcggtgccacacccggtgactacaatgagaagatttatgattcgccaatatacgctcgagtgctgccacgggagatcagcgaaattgaaattgagctgcgcacgatggacaagggacgactggtgccattcgcctatggcacgaccatggtagtattaatatttaagaaagtgataaatttttaaaacccactcatttttgtattcattcactcattttacgcaaataaaatggttcatattgtgttcgacccaagcattatcggatatgatgagtacatgcaatacggaagtggcatagaaagcgaggattacttccgagggtccagccccttccaacgagggtatggacaacgaggcgcaggggtgggggatgtgtttcgcggactttggcgctttttccttcccattcttcgtcgtgttggcactacagtaggatcggaggcactgagcacggggcagcgagtgctggagagagtgggaaacgaaggagtgccatttaaggaggcatttgtcagcgagggaaagaaaggaatgatac

SEQ ID NO: 2320 - DNA, 2161 bp, Heterodera glycines
gaaaggattagtggggttcatttaggcgctcgcgtttgtccgctggggtcgtatgggcacaataaattttcttttttcatgacatttccaaaaatttttgatattcatagtgattttggagtgtctgatcagtgatcaccgtaaaaaatttttaatggacgtcaaaatttctcgtttcccaaacatgagtgcctaaatgtaattccccaaatgctattttcaaggactggacagcataaatccacttgaaatggtcattcctcaacatttggaggcaaatgtgataacaaatgaaaatgtcaacattggtggccaaatgcgtaaaatcatagttttttcaacacaaagtgcaattgaaatgcttgatcgttaccgtaacgagatagcaattgatgggacttttaaggttaaaaggatcgtatgaattaaaattaaagcttaattggttatttcagactgcaccgaggggttttgggcagctttttaccattcatgtcgtggttgatgcatgcgctgttccatgtgtgtttgcttgtttacctaccaaacatatgcaggggtatattcgtgtgttcgagtcgattcgcaacagaattcaaaattggtctccgggaagagtaatgtgtgattttgaagcctccgaactctctgctatccggcaaatatttccccaggcaataattacaggttccggtaataaaaatcatttaatagaccaattttacaagggtgctcctttcacctcggaaatgcaattcataaacacatccaaactctccctgggttgtacaaccgttacagaaataacagggatgaccgacatttatttcgatcacttcaatcgctggcttttgtaccaatcaatgaagtgtacacctttttgtgcattttgatggacaatttgattggccctcccgaaattgaaattttgggtatgaaagggtttttattatttttttttcacctgattttagaattactcaaatattttgtgttaacctacattggtccttcctatgttgttgctcatccccaaataattgctggtgaacaggaagcgaattatggacagggatgtgatggatggttgcgtgcctggatagctcatgagaatttggcacatcgaaatgccttgtttccaatagcggtaaaaaattcttgactatctacttttacatatttctgtaatttagctatggaatctgactcatcgcctcgaaattggtctttcaagaagcaacaattcgttagaagcgtggcataacatttggggggcccttcttgaaccaaacccactgttcagcaaatttgttaagcgaatgcttaaagaatttgaacgttggcagcacattgttgccgattttcacaatgcaccggcaaatgggataaggggaaagggccttaagagaaagtccatttatctacaacaagacaacaatttgcggcattctgaattccaacaacgagcgggtcaagacccattgcaatatttaagagcgatttcatatcacttggctcaaatttaatgcttttttattcaaaaaataaaaaaaatattttgcgtattgtttaattttttaaaattttatttcagtgacgaaaggttcagtgacgaaaagttcagtgacgaaaggttcagtgacgaaacatcagggagccaaaaagtggaaaagccaatagacgctctgtttttttatttgaatttggcgctttgttttattaaataatttttgtcatttttttatcctccacttccatcagctgaaagaatttttttttaaacacattttctgctgctgcttgaaaaatatgttaggtcagaggtgcgatatctgaggatttttcctcattttgtggtcttttagagggtcaaagaggattttttgaaaaatgaggatttgcggattttgtggtcttttgagaaaatttgaggatttttgtggtcttttgagaaaaaagtgacaaaaacgcatattttttgaaaaattaggcatatttggcaaaatgttcgaactttttcttcaaatctcaaacatttttttcgaaaaatcttcagtcaaaatcattttttgacaaaatctgttaacaaatagcactcaaaatctcaaaaatttccggcagcgcctatcggcactgccggacccctcccaattcccaaaaa

SEQ ID NO: 2321 - DNA, 3077 bp, Heterodera glycines
tgagcaatttaaggtgtgattggaagaaatggtttttgattggctattgcgatcactaaattcagttctccgctcgccaaaatgcgcgccttttggcgtttagcattggtgcagaaacggctgtccgattatttcaatgcgatttgcgaattcaacgggaaaaagtaagttttggatgggaatgatgcgtttcaaaggccgtgaggaatgtcaaagcaaaatgaacgaacaaagatcactttctttgattttagccacaataaaccatccgccaaagacaaacatttgtaaaaccttaatttattctcaaatgacatttattgcttgaataattagggaccattaaattttgggcatttcggtccggtatggagaattggagaagttgtctgatcaattctgctttactctgaacaaattccgcatttttagccctttttacgaacattgggccttcatgcgctgcgacagttgttgtgcttttttggccggctctcttttggctttgaatgctttcgatttcgatttgtccattgaaaatgaccatttggaagtataatctttctttttccgtctcaattactgctaatgacactttttttcatttgaggagcaaataaattcgttcgaattggccccttatctccgtctgcccacccttcccggccatgtgccaaattcggccaaggaattaatcgccaacggaagtgccgtagctggagatgtttctgtcagtggtgatgcgttggcattggtattaagccaaaagcaatatttggaagagcggaacagacaattatggtggggggagggagagaagaggagggcaaatggcacaacgaattcagtgccaacaatggacagctgaagatgaagttggagcaattggaagcgcaaaatggggacagaaatatggtaaaaaggggggggggaccgaaaaagtgccaaagcgattcagtcgaatgggccgctggaaggcgagggccagcctttgaccttcactgatcggctgagggatttggagcgagaaagggacattttgagggcaagacttgccgaaaaagaggactccgtccggacaaggtgacgacaattgggggaattggccaattaacccaaattgggatgttaattagtcatgagcaattggtggacatgaaaaagttcacggaggatctctacgagaaattgaaaacagctgagagtcgggtgagacggcttaaaagcgacatttgtcagctcaacgaattacacgaaaaggtggtcaaacttgttctggctcataataaagattatcatttggcacaattcctatcattttttatttattttgtttaaactttttgggtacaaatcctttggacaatttaatggactgaagagggcatttttacccacttttagtgctaatacaaacatcaaaaatgggaattggaaaattattgatcataaccaccagagccaaaaacaacaaaaccaattttatagattttcttaggtgctctaaaccgataaaataaaaataaaagtgcgcaaagcgtttaattaatttttgctccgttttcgcgtgctcctttttgagtacagtctgttaataaattatagcgccaagatttttttttgctactccacctacttcccatggaccaatcggtctgaaatttttaccacacataccctcccataaatattaagaacacacaaaaaatctaaaagtgtaaaaaaaaatttatgaattttttccgaaatttgccccaaaatttgctgttaataaattatagcgccaaaacttcgaagacatataaattttttattagggtaagaaaaaatctgaaaaaattcatttccatataactttttgtgctgatcaaaaaattcaattgtaccaacgtgatcagatcactccttcatggtgatctgaaaacactaaaatagcttgaaaccttgaaattttcagaaaaaaattcctagggggttggagaaattttttcgtgaaaggcgaatacgacggatagaaagagcacaaattttcctaaaaaaaggcttcatatgatattagatcgattcgacctctgcttttagaattagctcaaagagctttagaacgttaccaaatttatgaggataaaaacattaaaaaaaataaaagtgtaaaactttttcattttcgagttttgaatcggttcaaaaaggtgtttggacgctttgctgcagaccttgttttcaatcattttcagcatctcagaaaacctacaaaagttgttttgggtgattttggctctgctgtgacaatatttattgggaatttgcctacaaaaggcacaattacagtacccaacctcttactgtctaattaaataaacttaattaattaatttttgctttgttaggaagtgaaggcgctgaatgcttctctttgtgcgcttcaacaaaacgaaggggaagccatggaagagaaagcgcatgagaaacgactgaaagaggagttggtggagaagacgaagcagtacatggaagtaggggagaagagaaaatggaaaggactattggccataggtgatgagtgcagtgaaaaggaagcagcaggaagtgagcgaagaacgcgaacagaacgccacactgaggagacgcgtcgcggagcaagaggcacgcgcagagacaatggccaagacggagaaagtcaggcagagaaagagggaaaggcaccgaccgatcgatcaattgctaattgttaaggagctgatcagcctgaaggaggagcaccggaggagcaagcagcagctgctcgactgtcagatggccctccaggagtttagcgaagcattgtccgagtgagccgttgagagaagggcggctgaccgatcagaagggtttattcaggtccaagctgcgaatggtcgagttgaaggaggagattatgccgttgagtgaagccgcctgggtggaggacagccgtgtgatccaatgccgaatgtgcgacgtccatttcggagtttggcaccgcaaacaccactgcaggtggtcttctcccctcccccgcctcctacccctttagcattactcagaaactgggccaa

SEQ ID NO: 2322 - DNA, 3038 bp, Heterodera glycines
ccctcttttttcttaatcgaatcgaattgtgaagtgtttggaccatcgcgagcagtcattgcgattcgtcgccgaccaaacattggacgcactttttagagtaaaaattaccaaacgcaaaatgctaaaaacttagataattgcagaaatttttcttgaaattccaagcggaaaaagttgtggcatttctgctcagcgaattgaacaaaagaacgaattcggcacgggcaatttgcgcggcactgcaaaaactgagttggacaatcggaagtgcgaaggcacagcggacaaagtgaaattttaaagagaaattccactgaatacaaaaaaaaattccaatttgggaatttcctctctctttccccttatttttgcctccctttcctctctctttccccttatttttgcctccctttcctctctctttccctccctccctctctttccccttatttgtgcctccctttcctctctctttctctccctccctccccttctcctcttgctttcacctatccgccttgatcaaaattttcaaaaattcttaaaggaattagtccgaaatgccatccaattccattcagcacttttctgacccatttgttgaatggcatcggaatttgtcttcaacgacccgaagagtctgtgcatattgcagtcgaagaacacttccccacaatttttgcccaaattgggccatcatttgtcgcaacaaatcatgccgaaaaggcggaccaactcttagcaattgcattggaaaacatcgaattgaaaggcgcgaaaaatcggtaaaacgattaaaaaagttatcggtcggccttttaaatgtctgctgatttgatggttcgtttagtgctgccgcagtggcaattgttcaattggcaaagtttgtgccctcaattttccacgagtctttctgtgcgctttccaaaattgttttcgaatcggaccaaagagagcacaaaatgcgtttggttggcgcattgaatatttttcgaatgctttggccccattttatggaacatttgacggaaaattcccagccaattcttcaaaaagtaaaattcattttattttaaatttgtctggtgaagtgtccgtccgattgtttcagtttctgtccaaagtgttgcgttgcatttgctgcgatataaacgaacttttggtgtcggcgttggaattgttgcgcgactgcgcccaattggccgtccaaaaatgtccccccaattcgccctcacttttcgacgtcctttttcgacttccattttttgtttacccttccccacttcagttcaatcctctcactgttctttccgatcataaaatcacttccgatttgttgcttaattttccattcgatttaccaaacgatggacggagtgggaaaaacgcggcggaaacgatcgaaaggcaaacgattggagacggtaggggctgatcggaaaatgcggctgatcactaggccaagacttgatcggaacagcagcatatccgatgacgttcctcatcaattgcttttttgacagatgccgaaagtgttttctccgttggcacttccaaaatgagcgcgtggagttcgctggccgacttgggcgcagttgaactgggcacttcgtcacagatgcaattcggcatagaagatttgaacacggcactgaccagaataggaatcaacattgaaagaggggatgaaattggcaaaattggggacaaaatagcggagagggaaagtgccgacgaagaggaagacaaattctccgtaatttctgccgaacttttcgttgatcctttgatgaattgtttccaccaacaaaaaatgcaatcagcggaagaagaaaaacgagataaaacgataattggccaaaggcaaaagaagaaaacggaagaaggggccgaccaatgcgaaaagaaagacaaaattcaacaacggaatgaggggacaaacgatgccaatgccggccaaagatgggaaggaatactgcgcgaactgtcggaaaacggtgagcgacggcatttcgccataagcgagtcacttttgtgcctgcttagtgcctttcgattcgaatgggctcaccttttggctccattcttcgctgtccgttgctcgacgctttttgttgtccggccacggcaatttgtacggcgaagtgcgcatttcgcacaaaattttggccatggaattcttggccaatgcggcaatggtcgagccaaaattggcatcacctaattgtgtggttgtccacggtaaacacagccttaagctaaatggagtagcaaagtgccaccaaatcatcacttttttgaaattcctacaaaaagtcgtttagaagacggtcaccaccaaccaatcagcgacctcttcaatttagccggccatgaggatgataatttggccatcgctgcactgaaatttgcttttaatattgggaaatggaaattgtggaagttggcgagtgaacagaaattggacagtcaacaacggcacggaacagaggagaggggtcggactttgttggcactttgtcttccatttgctcttttgttgtcaggtcgtttggcatggcttttgaaaaaaacgcttcacgcaaatcgcggcccgaacagagtgaagagtgtgctccgcctttgttctcaatcgctcgcactgttcagctgtccctttgacgacggacagcttttagaggccgcctgcgaatgcgcaatttcatcgggcgaatgcgattactttttggttaaggtaaaacccaaaagcgaagttggcatggccaaccaattgcattttaatttgagtcccttcggggttaatcggccaattaagaattgccgaatcgaatttctcgccaacattcgctggtcgcgcactttgcccaaatgtcgtcgtcggcttcaaaatgtttgtatgcaactctttcttcggcatctctttgacaacgacccgcgggttcaaatagacttttttatttatttttaatatatcctaagattgtttaccgatacagaagcgaactacggcacgaaacgctatgccaaagctcatt

SEQ ID NO: 2323 - DNA, 1554 bp, Heterodera glycines
  unsure (1)..(1554): unsure at all n locations
tgctctacncaacggatggctggtacaaatcaatcgttctcttcaaattcatagacaaaataccattggcactttgactgttcatttcctttttgatcagattgacttttcgcccgccaattcggcgcgtcttatccaccagctgctcaaatgcgtgttcaacacaaatgcccaaaatttgaacggaaaagccatgcgacagaacgaaatttgggagcagcacctaatccaatcggacggtaaaatcaattcgaaatgattaatttttgaacaaaaactaatgggctgtgcccattgtttcggccggtatttgaccatttggccattaaactatggcaaattctgcggttggtttttgccttttccatttaaaaccctcaaggtccgctggagaggcatctgttcggccccctcaacaacttcaccgtgttcactgcctttgttctgcgcactgaatttgccgatgcattcgttgcgcgactttccggatggattttgccgaacagactttgccaatttccgtccgaagtgctgaaaacctttactaatttctaattccgtttttaaaagaatgcgcaagtgctcggtgagctgcttcaccagttcgagccgttcatcagccacttgctcaagctgtacccactgaccaattcgacggacaccaaaaaggcggtgaatttcatttcatttctaactccatgaaaaatctggccaacctccttttgtgagcagattctcgactgtgtctgttccctctgcttgtgcaacgtcagttacgagcttttggaccgcaacggcaaattccacgcgcgcattttggcccaattgaagcaactttcgcccgtcgacgacgtccctttgctgcccaacattttggcgtttctttgcgttttggagcgaattaattttacgaaattttctgaggttaattccgacgacagctcaaaaaggggtagctcctccgccagaccccgaaaatttaagccattttttggggatataccccgatcccgacgctccttttctcgactaactccgaccccaacttttctcagccgaagggtcggggccctaacctagttcaaaatttaataatttagagagaaaagttcagattgaatctgtgatgacggaattattcgaccgatttgacgacgcaaacggcgctttcattttggaagcgatgcgaattgttcttctgagcgtttgctttaatttggaaaggtaaaaaaaaaacaaattcataaaatttaaatgtttaaacatttaatccgatggaaagaaagggcaaacgccccgaggaaaatttgcaatgtttgacgcgcctcaaaaccctactgaccagccaattttcacgcacattttgtgcctttccgattgtgtcggctcaatgttggatcattctgatgaacgaccttcggcagcaccgccaatcggacgaatggtacggtagaacgtactgactgtagaaggggtactgtaacagacacctgctgttgtgttgaacttcccaagatgatagtggtgatagtgaaattgagaaggtggggactg

SEQ ID NO: 2324 - DNA, 1266 bp, Heterodera glycines
cagttaattttcagagaattccaaagttctcggtatgccagaaaaatggctatctctttttgggacaaatttttagcgaacaaatgctcgcgagcaagagccgcggagcggtaagcaactgccagttaattttcagagaatttccaaagttctcggttatgccagaaaaatggctatctcttttttggaacaaatttctagcgaacaaatgctcgcgagcaagagccgcggagcggtaagcaactgccagttaatttttcagagaatttccaaagttctcggttatgccagaaaaatggctatctcttttttggaacaaatttctagcgaacaaatgctcgcgagcaagagccgcggagcggtaagcaactgccagttaatttttcagagaatttccaaagttctcggttatgccagaaaaatggctatctcttttttggaacaaatttctagcgaacaaatgctcgcgagcaagagccgcggagcggtaagcaactgccagttaatttttcagagaatttccaaagttctcggttatgccagaaaaatggctatctcttttttggaacaaatttctagcgaacaaatgctcgcgagcaagagccgcggagcggtaagcaactgccagttaatttttcagagaatttccaaagttctcggttatgccagaaaaatggctatctcttttttggaacaaatttctagcgaacaaatgctcgcgagcaagagccgcggagcggtaagcaactgccagttaatttttcagagaatttccaaagttctcggttatgccagaaaaatggctatctcttttttggaacaaatttctagcgaacaaatgctcgcgagcaagagccgcggagcggtaagcaactgccagttaatttttcagagaatttccaaagttctcggttatgccagaaaaatggctatctcttttttggaacaaatttctagcgaacaaatgctcgcgagcaagagccgcggagcggtaagcaactgccagttaatttttcagagaatttccaaagttctcggttatgccagaaaaatggctatctcttttttggaacaaatttctagcgaacaaatgctcgcgagcaagagccgcggagcggtaagcaactgccagttaatttttcagagaatttccaaagttctcggttatgccagaaaaatggctatctcttttttggaacaaatttctagcgaacaaatgctcgcgagcaagagccgcggagcggtaagcaactgccagttaatttt

SEQ ID NO: 2325 - DNA, 6092 bp, Heterodera glycines
  unsure (1)..(6092): unsure at all n locations
gtgaagtttaaacatttattttttatttttaaaaaatcaaatccatcttactcaaactttgaagctgttttttaaattttattatgcttgaattttaccatgtggcataagtgaggaagaagcgttccaacaaaaacggtactgttgcatcgggatagagaagcataatttttgctgcaagaatggccaatgatgtgccgttaaagaaacccaacgcattgttgtaaatataatgagctaaaaacggtaatttaggaccgtatttacctcttaataccgtatggcaaatcaaaattttcatgtaaaatacttacattttgcccacagtttaagcgtcaaaagcaatttttgaaaattttctttgtctgtgaccatgtcaaacaatcgaagattggagtgaaacccttaatcatagcaattagcataattaggataattgtgaagtgtcagtaatttattacccgcgagtgagcggagcgatcgaagcatttgttccttcgtgtttattagaacggattgatcatttttgtcatcatctttttgcattttggtttcttggtctaccgctccaatttggttgcccaatttttcaatcatttcctcaatttttgacaaaatattttgctgccattggtcaccgtcattatcataattatcatcatcattaaaatgaatttgtttttcgccaggaattgatgcgaatacaatgtcaatttcgtgatggaagttgataacttttaatcttatcagtggaacccaatttgattggattcgttgcagcgaatgaatttccggatactgaaaatttatttttgattttttcgaatttcgaatccttatcaatctttccattgaaaatatttttaaatatcatttgaatgatcgaaacaggtcacaccacccaatgttaaaggtgaaaaaacttaaatataattttttggcttaacccaggtgagcttggtcaaatttaaaggccaaaaaagtcagttttatcattttttcattactttgttttataaatccaattaaatttttagtactttttaaattaaattccaataatatttaatatttgaaaatttaaattagggtaaatttcttagataatgacaatattgccagtttgcttttttttgtacgcattaaatttacgaaccaataatgtgactgaaaaaacccgtgaaccgtgaatcgtgactgtgaccgtgaattgaccaatgaaccgtgaccgtgaataggtcccgtgaatcgtgaccgtgaccgtgatccaaaaaacccgtgaaattcacgggtttcgtgaccgtgaatttttattntaagaaaaaattttttggcggcgaatttttttttaaactttttttgtggtatcattttccaaaaatttttttttgggaaaaggggggtccataggcgccgatagacgccatcgcaaaaattttttgaaaatttgagtcttatttgtgcaccgattttgtccaaaaaatgaccaaattttgcgaatttgagccagttttttacgaaataataaattttggggggccggaggtgccgataggcgccgccgggggtaaaattgaaaatttgagtgcaatttgttaacattgttaacagatttatccctaaaattagcaaattttacaattttaattagtctaaaagtcaaaaaacgatgaaaaatgcaaattataggtgcgcttgcatatttaaagtttaaaaaatcgggtaagaagtgtccattggcaagcacgcccataatttgcatttttcgcataattgtggacgttctaaattgaatccgaccttttataaatggttttgtgagacatatttacccaatttttaagaaaaatatgggttttagtggaaacttttagaaaatgtgatttattaactgattttacccaaaataactttatttcgagcgaatttttttaataaacttaatgaattttttaatttaaatgggctcatatgtacttgaaactttgctttttatttgttttcgcacaatattgtttttgactttgctcaaaaagtttccggaatagagattgggccggcggtgccgataggcgccgccggggaaatttttgaaaattttactctgtttcttaccaaaaatttcccaaaaaaaagaccaaatttctctatagaaaaaaattatttcataaatattcaattttatccagtgtaaatttttcacggaataaccgtgaattggtaccgtgaatcgtgaccgtgagtgaaaaaacccgtgaaattcacggtaaccgtgaccgtgaccgtgaatcacggcacatctctactggatttctaccgtatttcaagggaaaatggtagaaaatcagtcatttttatggtagtcaattttgacaccctctcttgctctgcgggtattcatcgtagactcaccatccaaaagacaattttgtagagaattttgtgctctttttcataggcctactcaaattttccagaaaaattttcctaacctcctaggaatttttttcgaaaatttccccgatttcaagccatttttggcttttcagatcaccatgaaggagtgatctgatcaagttggtgtaaaagccttttctgatcagtgtcaaaagttagcttagcaggaattttttcagaattttatctcaataaaaaattgagttataagttttttgccaccattcatttttgagaaaatcggatttaaaaaaaaaattgtttttcgctccaatacttttgaccgtgactgtaattaaaattgatattttaaaaattaaaatcgaaattactcacaaaaaaaaaacaaacaaagaaaaagtgcgattttttattattgcatcattttcaatcgtttcatcaacaaaaattattttttggcattttgttttttcgcgttaatttgaatggcccttttttgtgacggaaactcaaatagtatatttaagattaaaaagagcatgaaagcattgcttctcttttctgtttcaattttcttactcaaattgctctgtttgttgcccaatttcgacttcattctttcttcccaaactcatttccatcttccccctttttttccagattattacgatttattttctgcctccaacatgtcaagcagttttggcgtcttcaaactgacggacgatgacgcaatgaaatttttggtgatcgaatcgcacatcggcaccaaaaagatggactaccaaatggagcattatgtgtggaagcgtcgatcagacggtttatttttcattttttgcacatcaaactcaaaaacgatactgcaaaaaagaaacacgggccataagtatattcaaaatttggaaatttttccattttctgcccatcatttttgaaacttttgacttttgtcatgcctaccataacatgccgagtataaaatcttacggatttgtaagaaacaacccccccccccccgcgttaaggcattcacatcatcaacattcgcaaaacgtgggagaaactgttgttcgccgcccgtgccatcgcggccattgaaaaggttctaaaatttgaattttcgactttttgttcgaatttaggttccgggattcggaattgggcgaaatagaagtcgttttcgtgatcagcgacccagaaaacccctggaaacatgttttcatgatttttgaaatttaaaaaaaactcgaaaaatgttcgaattcgggttcaggatttgaaattggtcgaaatggaggcccggattcgtgctaagcgcctcaaaaacccttaaaacgtgttataagaatttccagaaaaaaatataaagaaaaaatgttcgggaccaataatcttggcgattgccaaatttttttcgctccaatacttttgaccgtgactgtaattaaaattgatattttaaaaattaaaatcgaaattactcacaaaaaaacaaacaaagaaaaagtgcgattttttattattgcatcattttcaatcgtttcatcaacaaaaattattttttggcattttgttttttcgcgttaatttgaatggcccttttttgtgacggaaactcaaatagtatatttaagattaaaaagagcatgaaagcattgcttctcttttctgtttcaattttcttactcaaattgctctgtttgttgcccaatttcgacttcattctttcttcccaaactcatttccatcttccccctttttttccagattattacgatttattttctgcctccaacatgtcaagcagttttggcgtcttcaaactgacggacgatgacgcaatgaaatttttggtgatcgaatcgcacatcggcaccaaaaagatggactaccaaatggagcattatgtgtggaagcgtcgatcagacggtttatttttttagtctaaatttctaaatttttttggttcctccaattcaaagtttcatttcagcaacgcttcgtcgcctttttcgagaagaaggagcgcggcgtggacatgcacgcgagcatcaaacggcgcaaggactacatcaacccggcactttacgaggcgttgcgcaacgcgtacggcatcgacgagaagggcacttacttcgccgtgccgtgtacgacccgaacacatttcgctgccgacgacttttacaacgcattggatgaggtaaatacggacggagtataatcgctcccggaagcacccccccccccagtttttgaaaaccaactgtagctgctaaaaacctggatagcgttttttattttcgattaattatcgattagttaaaattaattattttggatttgaacccgtaacatcaaaaaagatgtatttaaccaactgagccaccaattctgctcctttttcggctctaacgcactttatgaattatttagagctatatcaattatatcatttgaataatatagacaatacagacataaaacgtatacacgaaatgaggaatcagagatggcagattctcggggggacgaactgtccaagtgaatcaattgtaaaaaacaattaaaaatcttaaagggttcactttgaacaaggaaagtgcaaaatgatgtcacttaaaatataatttacggatgcaaaagacacaatttgctcttgtgggtgaagagtatcacaatggctttttgggaaagggacggacaatgggaaaaggagaaaagacaaaagaaaggaggggggggggggaaggggtcgaaagactgttttaatctgtgctgatattctttaaagggtcgttttcggctgggggtgggagaagctctctctctgctaattgtcaatcattagagcggctgcagcaccaccttccgttccgcggaataggagggcggtacgaaagggttgttgccgctgtccgtgccgttgtccgttccgccgccctgccgcacccccgcgccggtcgcctgttgttgttgctggtggttgtgctgcgcgtgcatctgctgctccgtcgccattccgccgccaagcgccgcgacggcggcggcgccctcctcaaagaattcgtattttgggtagccgaggaatttgtgtgggtaattgttgttgttattattgctgttgtagaaggccatctgttgaattatacaaaggctttgaattaaatggatttgtttttgaaatgattttaaacatttcgccaaaattatttattttaatgccaaatttaattcaataaatctcagttattaatcattccctttccttacattgttaaaattgtgctgattttgctggacggacggaaagccggcggcagcggcggccgcaagcgacgccatttgctggtcgaaggagggggcgccgtaggggacgccgagtgggacgagcatcggttgcgtttggtgggcgacgacggcactttgctgcgtcgacggtggccaaaagggacgcgcagcgcccaaaagcatttggtgctgggaaggcggcgtgtcggacaaagcgccgccattttcactgaccggtgaattagtcctgcgggaaaaagaaattaaactgagacataatgccaaaaaaggggcgaaaagaagcgatggaatgaaagaagcgccacagctgtcgcggggggggagcaaaagcccaactcacgcgctgttccccccggacgtga

SEQ ID NO: 2326 - DNA, 2953 bp, Heterodera glycines
ttttaatcattgttttaaatttatgtttttcatacttccggtgaagcaaacttttgttttgagttttcgaagagccttcagcctgcccgtttcgctccctgtgaaccccctttgatccaaatgtagaaactaaccaatttcactaacaattaatttaatcattatgtaatttcatttttgccttaattttgatcttattttttgttttttgcttgtttaataaaaaagtgattgaaaaacttgttcacattttgaatttgaaataaagttgcttaaatggaggagcgcgcaattgccaggtaaaaaagcccgtggagcccccgacaaagcatggatgataggtggtttgatgggtggactttttttgacaaattgggttacattaacaatgaaatggttgcacttcattttgtccttcccaaaaatttacaaagagcggattttgtggccataagttattttgaaagtaatcaatctgtctaaaaaatagcagttcaccgtttctaataataagaaaggcacatcagaaaaagagaaacccttttgcttttttgtctgattttttttaagtcagagccctaattgtctggcatttaatacccgtgtaagcccatcgctagggaaaatcaggaaagttttatgaattttgtgtatttgtacttttttgaaacagtgtaaatatgttatggcccaaaatcaaccgtgttcgtatacgatttgatttcatttttacgctcctagtttttaattttaaccaccatttttctgaaagtttccattagccatttattggctgacaatattaaaaaattcacaggacggagtgcaaccaaattcatggatattttttgctcatttttagacttgaactttccccctctgaaatccttatgctaaaatgggcccataaaccttggcgttccaattatttggtcgttccgcgagttttgagcgtgtacaacgcgtcgttctgcagcaccatcgtctttgttgttcggcttttttccatcttgcttattcccgtcgtcgacaaaattttgtttcattttaatgccccacccacctctttccctgtcagaaatggaggttcgaaggctttttctagcgattaattattgaaaaaaaccggtagtatggatagtaatcaaacgaaaaacttttttgaaagtgaaattaagcataataatggcaaatttggcacaagcagaattaattcatatgggaggaccagcgctctctttttgagcatgatgcgcgttatttttacattttaaacactagcgtcatatacgcaaaggaactaacactggaggttatttcattatatgaaaatcttagaaaaacatctaaaaaggaatattggggtcaatatgtattttggtttcctatcaattcatcgtaatttaaagtctgaaaatttgaaaatgaatttttatgggtcgggtcatagtgctttttactagatggtgctgcacctgcaccgcgagataatgtggacgactaacccactcatcgcgggagacctccgaacaacggacgtcggtgtgcgcgagcatgtcgccgtgccttgggaagaagtgacggcgaagatgtcggaattcgtcgagtggtttaatttacaacaacatactactaccatccattcactaaccgcggaagtccattaccgcctagtaatgcagtttacttatagaattagcagtaattttaaaagcaaaatatgtaattaaaagacaaaattcttgttctgaaaagctaatttagtgaaattcatacacaaacaaaattatctgttcaaacaatgcataatacataggaaatattgtttttattgatcctttactcacccaatcaatatttagacatacattcacccctttttcgacggcaacgggcgctgtgctcgacttttatcgaattttgtattggcccgaaagggatttaaccctgtaatttttgatgcaaatatgcggtctgaatataatgacgcccttaccaatttcactaacaattaatttaatcattgtgtaatttcatttttgccttaattttgatcttattttttgtgttttttgcttgtttaataaaaaagtgattgaaaaacttgttcacattttgaatttgaaataaagttgcttaaatggaggaggaacgcgcaattgccaggtaaaaaagcccgtgacagcccccataaatggttggggatttgaaaaaattgggtcgtattcacgagaatcggttgcacttcatttcgccctcttctaaaaaccgtttttgtgcccataacttattactaaattatttctgctgttttttgtacagtaggcccacgtaaccagcggggaaattcccccccccccccccgcccccgaaatgaaaaaaatttcagaaaatgggtatttctttcaaggttactgtattttactcaacgatttgagcataaatttttccaggtgccggaggcaccgccgggtcccaatcaaaatggctaaaatttggcggaatggctaaaattacacattttcccaaggcgccaaaattttggtaattacactgttttttgggccggaagacaaaaaaaaatttggcggaatggctaaaattacacattttcccaaggcgccaaaattttggtaattacacttttttgggccggaagacaaaaaaaaatttcggtcattgcttaatagatttgaaaaggtgtaaatggagtgcagccgaaccgaggacatttttctcgtatttttggtgtaaactccgaaatccttgtgttgtgatggacccataaaccttggatttccaattttggcggctgttttcgttttgtgagtggcaaaacagctcgtttagcagctccattgacttgtttttgctcgtcgtttccgctggcttctttgtcgtcgtcgttgccatttaacattcaatccccccctttcctctcgaaatttggttg

SEQ ID NO: 2327 - DNA, 3803 bp, Heterodera glycines
tatgggcttttcaaggtcgctgaccatgacaagatttttgtatcgccgaagccaaattcgaacaataagtcttaaattcgaaaatctgttttttacccattaaatgatcgttataaaaagttaaaaggaattacttgtttcgggtttcaatttttgtctaagatttatctacatgatcgcttattatagtattggcgattttcaatttatttctatgcattttagacagttttagacccaaaagttgaaatttggaaaatttcaactttaaactatgttcgaattcaagtctatcccatatcgaaattgtgatcgcgaccctgaaaatccaagattaacaaagtgttttcaacacaagaatttatgataaatggatatatatgaaaagtacagtacccatcaaacttaataattaccttaacgcattcattatgaacaaatgaaccaaaatttacaatattttatattttttcattttttgtattaataaaacctctagaaaaaaagaatcgagtaaatgtaattcagcttaaaacaaagatttcataatttttaatgaaattaattatttttttatcttttctactgacagatttacgaaagtgtcttttttatcacctttttcagggccatcattgtaaaggtaaaatcccaaccatttctcattgtttccgactttcgttttgatttgtgcccatattttccatgaaaatccccaaatgtccacggcatcgctaagtcgactttcaaccggctccagcccaaattcggacactttttcaatttccattgaaattgtttctccctttttgtaccgttgttgagtgggaaatttcaatgggaaaagcgcctggacatcacttaactttggattggaatagtactgataaatgctgatcacttctttaattgttaacacatcagttgaaactgaagtttgatttaaatggataattaattagccaattaatacattatgaaacgaatcattagttttgttctgttccagaccaagtctggacccaggcttgaaatcacggattcgcactacttggattttctgggatttgtccaaaaattcaggtccaggcccaacattgaaatcagaataggtccaagatttttttcgaaataccaaattctctagtcatcatatataatttattaccaacgccttttgtgaaatcctcttttgggattagtggaaaacgaattttgaacaatgccgggccgagcatttcgcgtcgattttctgcggaacattcgatgccattttgaaggcactgttcgtccgcccaaactttattttggctacttaaatgatactaacttcacatattcaaaacaactaactctacaggttcgatctttttacgtttaaaaaagcattttatttgtaaaaatggtctatttaatccaaaatagcacgatttagtgcattatttttggtattttacgaaaattacagccagggaatttgccaaattgaggtcatctggaatttctaagtcattgggaaaatatttttaataaaaaattgaagaaacaatcttagagtcgccgtaaaagcattgaaagttttacaaggggcttgtttccaatttttatggagtgggcaaggtcatgatgatgcattgtttagatgctggtcgacttacacaaacatattatgtggacaactaacccccttgttgccggtgaactccgaagaattgacgtcgaagtgtgcgggcacttggcatgtccttacgaggaagtcccggaaaaactaatggaatttctcgattggttcaactgccacgagaacactactgacattattacactaacagcggagacgcattatcgactagtaatgcagtttaattattagattagcagacattttaaaaacaaaatatgtaattaaaagccaaaattctgttctgcaaagcaaatttagttaaatgcataacacaaatggcaaaataagctatacacacataaaaatataattcaaataatgaatgataaatagaaaaatgtttagttttattgtctcttttgttcacccattcaatatttagaccttcattcatccctttgccgacggcaacggacgctgctcgcggctattagcaaattttgtactggcccggaagggatttaacactgtacttcttgatgaggataggcgtaatgaatataatgcctccctccaacacgctaacaacaccggggggcccggcgcccacacgctggaacttacccgtttcactaatttatacgcccacctcatacagaatgcagagttttactaatggataaatatttttggtctgggaaatttaaaataacattttgccaaattctggtgcaatatttaaaaaaaactctgtattctgtatgagttctcaacatactgttctcataataattctaatgtaattccatatttctcataataattctaatgtaattccttatttctcatattaattctaatgtaattccatatgtatcccccccccccttcattaattaatttaatgtataaatatataatttatcccccccattcttattaatgttctaattaatttcatatccccgcctataattattttattttcatgtccctcccctctttgtatatatccctaattaatgtattatcatacctttctccttataattaatgtattttcgtatccccccccccattttcttatccattctaatgtattttttctcgtcgttattatgttttattttttttttcatataatatattgttatttattatacatcttatgtgatttttgtgtgagtaaaacacatttaaaataattttataagggttttcggggtcactgatctcgaatccggcatctatttagataaattccgattttcagacccgaattcgaacaaaaattagaaaattccaatttttcgaaatggcaatggatgatcagtttgttttttttaccttatagcaccacataattcttttcatttttaaaaaaaatttagttttaatatcctcaaaaataggcattttccttccatttaacaggcaagacaaaatcgatattcattagacaagttttgtttcagctttttgcgctaattaaaatgcaaaattccgtcagttcattttgaaaaatcactggataattaacaaaattcaattagcaattaaagtcaattccttgtttagcagaaactcatcaattagtggacaatgaaaaattttgggtctttgattgatggaagataaatgtgctaatctaattattctctaattatcattttcattaatatttgagcgaaatggtccattgcgccgagaaaattcactaaatctgtaatttatcgtcattcgatatcataaaaaattttaggtttattataatataaatcaaaaaattttttattcggaattcttgctgatttatcttcgaaccccttttcaattcttcttaaaatctttccgctaatcacatgtaaaatcaatggccaagctgagtttgtcctcgtctttgttgtacaaccctttgctcggctccatcaattccttaattttggtgatttttttattggagctaaaaatagaaggcgatcaaatagggaacacaaaaattagtaattttattgtgagaaataaattaatttgaatcaccactcaccgcaaaactaatgaaattgtgaaatccacggcttatatttttattaaaaatgcgatcaccacttcttccaattaaattctcagtgcctttcttttgagaaataattcgaaatattcccgaacttttacaaga

SEQ ID NO: 2328 - DNA, 1704 bp, Heterodera glycines
aaccgggaaaaacaagcactggtaagaatgggggtctgagtgaaaaaatagagatgaaaattgaagctaaaggaaaaaataataattaatatagtctttaaaatattcattgatttcctatcggcaaaatatgattcctcaaatttttttaattgacatattttttatcatgttttaaagaaaacccatacaaattgagcctagtaatcccaaaaaccagcctttttgttgaaaaactgttaacaaattacactcaaattttcaaaattttccccggcggcgcctatcggcaccgccggaccctcttcatccccaaaagttttttgaaaaaagcgcgccgcaaaaaaagtgatatgaaaagtaattctgtatttctaataatattcgatcagagtcaaaaaataattaattgtttcaaatactggagtaaatttgatttgaaatttttaatttaattttgcattattttcacttgaaataaattaaaattgagttgtttaaaatttttacggtataaattaaattatttaatattggagaaaatgtataaaaacaaaatttttcatttttgaatttgttttttatacataaatttcctatttattttttaattactatttcgacaaaatacctaaaatgaaaatttttgaaaaattttcggtccttggaaattcaagggccgctttaatagaagggccgttttaatagataacaactgtggaatatatcttgcgcaacgtttatctttaaaaaaattttcgaaaaaatcctaatggattgcaattttcaggaaagccacattaactaattggaaaattgacaaattcattaattttacggtgagttgcgaattaattcttttgctcattaaaacccctacttttgtgttccttatttatgataaagttggtgcaaaagactttgtaggaattttttcagatttttctgcaaatttagaactaagttttatcgggtcagtttttggatatttgttaatgcactaatatacagtcatggtcataagtgttgtcccatcatgctttgaaaaaaataattgcgtataaaattgtcattttccaatttcaacagataagtagcataccattggatagcattttttatgggctttccaatgataccatatttgcatttgtgacataaacatttatttgatttattttaccatattcacaatttgatcaaaatataggtggtcaaaagtgttgtcccatttcatttttaaaatattgcttctctggatcagcattaaaaaaatctaaaaaaattcaggtaagcataactttggatgctgatcagaaaagttttacaccaagttgatcagatcactccttcatgccgatctgatcaacccattttggctgttaactatggagtacttttcaaaagaaatttctaggcagttgtagagaattttgctggacattgtcaatctcgcgcattttatagagcaccaatactcaacaataaatggaaaagcatatagcatctgagcaattatgccaactgaggaatggaccgtcggacgtctgctgagccctgtgggcacacttaacaagcggaggacgaggaaaagtcttgggacataaggacgagtaggggaggggggaaagtccaccccacaaacaacacctgacagactctgactgactgatgggcttttgctgatcccataagatggggggg

SEQ ID NO: 2329 - DNA, 4092 bp, Heterodera glycines
ttcatttacattcattcattcatttccctttttccgtttaagtgccaattccgtcgatgttcaattcgcctccgtttgtcgcaactgcacacttttgatggagaaagatgcgcctgaattgggcgaacacatcatagaaaagggatgcgcagaagtggacatttccgcggaggtaaaaaattaaaaattgccaaaattttccaaaagtgaattttaaaggcggaaaagccgtgccttggcaaagggaaaagtgtcggcggacggtgccaatgcgaacagggcttttccggggaacagtgccaatatcgaggtgggatcagacgaaataaacccattgggcgacaggagggggagtgctaactaacgttcccaccagatgactgtacggaggacggcgactgtggccacggagggcgttgcgtcgcgggagccattcaccacgggcaacggagctgcttctgcccgtttggcttcattgggacgaattgtgaacgaagtcactgacccggggggggggataattgtggctgaaaaacggcgaacattctcagaatcgagcataacgccaaaggacacgcactgtttcgcccacggggggccacggaacggaagtgccaatggcaatggcagcgaagtgttcatctacggaatattcaacccgaactgttactcgtcgagggagctcaacgaggacggagaccgaatctattggcgattggtcggcggggaaagacggcacagccaaagacaatgccaacaattccaataggtgggcaatcagttggaactgctgctcgacttccgcaccaactcgtggctgtccctgggctggcgtcccctcaacatccctccttcgtgtcgactctttccccaaatgcacggcacggcagccgaaggtcggcacggggaggacggagtgcagacgagcggatttggttggtggtgacatggccaacaaatggccattcattggctgccaattcagcaaagtccgcgctgagtttgcctttgcatccaatggactgcaccgacgtaataatggcctcggtgctggagggcaccgaccttttgcacattgccgacatgtactctcgagatcggtcgagcccgttgcgggacgcgtggttagacggcgaagactctctgtcggcagcctacggattggcaaccgacgacggacggacggtggtgatgttccgtcggatggtgcccggtcagaaatcgaatttggcattccattggcattggccttaacccataattcaaatcagaaatcgaacccaccgaccatccgttgggtcccggcgaattgtttctcatttgggcaaaaggtcagccgaagaagccaaaggacaaaggcttttattcggacggccaatggaaataccacggaggtgaaaattggaggggggggggaaattcggaggataaaaatgccatcaaacgaaagacagcggcagcggacgagggcacatgcaaatggaattcgtttcattggagcaaatgggaaaaattcgggggcccctgattcatttggacccgccgcaggggccgaccaacacaagcgaacaacgaacagcagagaaagggtgggaggaagaaggaaaagcaatgccaacagcagaaagggtaaaaaggggaaaagcaaaggaaaaaggaaaagcatgaaaaaggaaaagcaaaggaaaagggaaagcataaaaaaggaaaaataaggaattaaaaaattaaatgttcatcaggtgactaaaacaacaattgccacgacttcgtcagtgccaacaaccgaaagtgatcaaacgacaaaagtttcatcgcccgaggcaacaacgaactcaaaaagcactttgacaacgcaaagtcaaacgacggacaaagaacaaaatttaacgaaaacagaagcaaaaaatgaacaaattcagacagaggaaaaggaggaaattatgcaaaatgaaaaggaaacgacggcacaaaacaaaggacaaggaaaagtgccggaggggacggaagaagccgaagaggaaacggagggggagggggaagagaaggacgagacgagcagagagggcgagcggaagacggaggaggacaacggcacgccgcagcggacgagcggcacgggcggagggacgggcggaagcggcagggcatccgacgcccatcggttgcttttgtgcggtgcttttgcagtcgccgcactgctccctctgctcgtctgatcagtgccattcatccctttcacattttgccaccatttttgctcatttgtgccaatgtattgaagcgattataaatattatttctttttaaattataaatttcaaaaaattaaacgataattcgttaaacaatggtggaacacggcactttcgattcattgaatgttccctatataagaagtttctacccatgatccaagcttaaaaattttggttcgggtccggaaagtgctctaaaaagggaggacaagcacttttggtcgggatttttccaaaaaagaaggaaaagggaattaaacggggaagaggcaagcgacccggtggtcaagtggttagtgtgcttgcctttgagtatgtgctctcatgggttcgagtcccattaatttatggtattttcccgtcaaatattatatttaaattattcggtttaaaatttgtttttaatgtttttcttataagaaattttatgagcgagttaaaagagaaagaaaggcataataaaaaatatggagcaaagtacttttggataaaaattgattactttccttttttttatatgtaaggcacactcgccagtggtctttaacctcgccttttcaataagcaaaaaatgtctcctccttttctttccccagttcattatcaattgtttccatttacatcagttttttactgctcctacttttattcaataaatatttccaactaaattattgctgttttaatagcataattttttagagacttcatttatttgcactttttgagatgttccatttttgaacgttttttgcataccttaaaaatggtcaaatcaaaaaacaaagatgtttgtgcacatctacaaactcttggctttcgaatgataccagggttgtttgggtccgggtccgggaagtgccctaaaaaaggagctcaagcacttttttcatacatattttagcatttagataagaggaagggaggcgaagaggaatgaagaggaattgaaggcaaagaggaagcgaaagggaatgaggaacaggagaagaggaagaaaaaggggaagagaaagggggagagcaacagaagggaaaggcgaagaggaagagaaggggaagaggaacagaaggagaagacaaagaggaacagaagaggaagagaaagggggagaggaacaggaggagaaaagaggaagggaggcgaaaaggaagagaaagggaagaaaggagggaaaggaaaagaggaacagaagatgaagaggagcaaaagacgaacagaaagagaaacaggaggggaatagagggaaaaagaggaagagaaggggaagaggaacagaaggagaagacagaagacgaagaggaacagaagaggaagagaaaggggaagagaaagggggagaggaacaggaggagaaagaggctattcccggccattaaaaaatctaattcccctcttataaaagctttttggcgcgtagcacttctctagagacagtgtttaatagcaaagctatttcaattttttaaaaataaattaaaatcgtctctttcagtgcccgtagggcactggttaaatgtaattataaatattccccaatcattcaattgaaattgggccgtattttctcaaaaattatgcaccattaaaatttatcagataaatttgaataaataataaaaatttgtaaagtgaaaatgttgcgacgaggtgaaaatgggcgattaaatgagcaaagaaaaacaaacaaagaagaaaaaggcgtaatattcacactaacaacgcttaattaattaaataaaatttcccagttttcctaaattttaccttcatccaatttagtgctaaactccctattcttaaacactgcaaattttttcccggcgggaccggt

SEQ ID NO: 2330 - DNA, 5532 bp, Heterodera glycines
ttcaaaatttagaaaaataaataaaataataggagactcagaaggttgaaagatttcgcataaaatctgatcgcaagtcaatgtgatgaatcaacggtcttatcttccccataaaacttgttttcacgactttttagaacagaaaaaaaaattttccaaaaaggggtgaccatcggcagtattatcgattttgctgttatttacgcatccctaaatttattattttagatgtaaattccacaaaatttgaccaaatttgggattcgtttgaccattcaattctggatcgcgtcccttatgttgctattcgacttgctaaggacactgaaggcgcaaatcaattcgctcaattctttcccactccggtttttcctgtctgttactttctcgggctcaatgctcaaccgctcgaagttctgactgccgttgaacagatgaccattgaacgtttgaacagttcgctcgctaaggctatttcggtaattcaccaactatttttaattcgttaattataatttttagctatacaatgaccaaatgaaggaacaaggctttgccacagatgcagtttcatttcaatcgaaaagcagtgagaatgacagtggcaaaaatacttccgaaaatgttcccgagcctctcaatgccacttcgaatgacgagaaactcgaatagttcgctctaaagaactctgcaatcacatccaaatttttaaaattttacagttatcgcaaacggctcgaagaaaagcacaaagaagacgccatgaaaaaggagcaggaggagcgggagaaggagataatgcgcagaaatgaaggttggaaaagacatgacatttggaagttacttttgattaaggcaaagcactcgctgaagttcgtgagaaacagcgcgagagggaattgaaagagatggcggagcagcgacggaagcaaaaggaggaggacgcacaggcactgaagcgcattcgggaacaacttcaacaggacaagtggggcaattgacaaataaatttgcacctaaatgcttctccatttcatagactaggaacactttggcctttcacacttacaattaacgcgtcattagtattcttgacattattcattttcggaactgtgatttttcctgtccattcagagaagaaagagcgaaacgaaccaccggagggacagtccaagcggagcctgagagcaaaacgcccgaaatggtggagccaattagggccccggtgaataggttcgtcgttttctgattgaagttcgagtcgtcatttttcttcgatggttatctgttttatccctctttcagtgaacagtgtcgtatccaatgcaaatttcctgatggcagcactttgaccgatgttttcccgtccgattctccccttcaggtggtccatgacgctgtttctcgtgtgagttcggactttcttacctcttccaatttttacatttcatttttaggattcgcgtgctccccccaacttctttttggttcagccttaccctcgcaagaaactcaacgaatttgagaaaactttgcttgtgagtcgctcctcttttttaattgcaacactcattcattcccaattaggaactcgatttgacgccgtcttccgctatcctcgtccttgcagtaagttccacaaccaaatttcatattttcaccatacattaaaaaaagggggcgggggtcaaccaaattttttgcgaaatggtccagccatgtaaattgacaaccttttttatgcttttcaaaacctctttttttgcgacactctttttccaaaaaaagaaaagttcattttttataactgacagttttcattttaaggccttttccatcgccatccgttccgatcatagatgggatcgaatacgaaaagacaattttctgtctccaactttccctgtaagttttgaaaatgcgtatatttgtacattttaaattttagtttccatttgtcgtagataggatcgaatacggttctttggtgcattacgttcatgtgtgcaaactgtgcgccctactcggccgtcaggttaccccctattcattatatctaaacgaacaaaaattcaatttttaaaaacgaaaaagtaaattctgcagattcttgggttttggtaaaaaaaaaaactcgggtgaaactatgaggggaataaatgcacccatttgttcattcattcgttttcctctcaaatcattaaattggtactcataatgtatttgtatttgactgttttgttcggagtctaaacaattaatcctttttaaggctgccaaacagttgcggctcatcaaagacccattggaagtgcggacgcgcactggcgaattgctgatgggcgtcagcaaagagaaggttctatttcattttaagttctttaatttcctattgttcagatcgatattgtaggcccacacgggcgcaccttcacgaggtgtgtggctgtgagtaaccgcccggttcagccgggcggtgaaaggctgtcgcctccacccaatttgaggtttcccgaatcttttttattatcattactgaacaaatttagagcacttacgcccgcaatgcctttccctgttgatggtggtccgatctttggctcatggagggttttgctgcattcatggaatttttgttcaccgacaaatactaccctgaatttaacatttggtccgattttgtcgacgcggaaatggtcaaaacgctggcttttgactctaagcgcagtacgcatccaatcgaggcaatttctataaattgatattatattgtaaatacagaatttttaggttcctattgataacccaaatgaacttgaagaaatttacgattcgatctcttacgcaaaatcaaattcaatcattcggatgctcttcaatcatttgggcgaagcgatttccaaaaggccattcgcgattacttgaaaaagcaccaatacgcaaatgcagagaccaacgacctgtggaagagtttgtccgacgcttctgggattgtgagtttaaacaataaattcaatgtcgaagcaaagaatttccgcacattaaatatatttgcaactttatttcaaagaaacaaaaacactaggaaaggaaaatggttttacattttggtttaggatgtcaaagcactgatgtcaaggcgcttcgcacacgacggaggaggaagggaaactttcctccgccaacttcggctcctgctcgccgccttccaactccgtgatggaatgctcaacaacgacggagcaacggccgggcaccagcgaacacattgacaacgacgaccactgctcatcgccgcccgttaaaccggtgggtgggtctgtttgacattaattcgctttatttaatcagcctaactaaatttgaacgtttagtaaatgaataatcatgactaatttcctttcagttgacttatgcgcaagcagcggccaatagaccgagaagaaatactgcgagcaatttggatacaaaatccttccctttttccaacgtcaaatgattgaatttccctataatttctgattttttccatcactgattgctgattgtgagataaacaaatcgaaactaaattttcgccgttcgatttccaatgtttcggccgaattcgcttccctcttttcttctttatattagcttctcctcgcctttatgcagagaaagggcgggaggaagaaggaaaagcaatgctaacagcagaaagggtaaaaaggggaaaagcaaagaaaaaaggaaaagccaaaaaaagaaaaatagggaatttaaaattaagtaattttcattaggtgacaaaacaaaaattgccacgacgacttcggatttggttggtggtgacatggcgaacaaatggccattcattggctgccaattcagcaaagtccgcgctgagtttgcctttgcatccaatggactgcaccgacgtaataatggcctcggtgctggagggcaccgaccttttgcacattgccgacatgtactctcgagatcggtcgagcccgttgcgggacgcgtggttagacggcgaagactctctgtcggcagcctacggattggcaaccgacgacggacggacggtggtgatgttccgtcggatggtgcccggtcagaaatcgaatttggcattccattggcattggccttaacccataattcaaatcagaaatcgaacccaccgaccatccgttgggtcccggcgaattgtttctcatttgggcaaaaggtcagccgaagaagccaaaggacaaaggcttttattcggacggccaatggaaataccacggaggtgaaaattggaggggggggggaaattcggaggataaaaatgccatcaaacgaaagacagcggcagcggacgagggcacatgcaaatggaattcgtttcattggagcaaatgggaaaaattcgggggcccctgattcatttggacccgccgcaggggccgaccaacacaagcgaacaacgaacagcagagaaagggtgggaggaagaaggaaaagcaatgccaacagcagaaagggtaaaaaggggaaaagcaaaggaaaaaggaaaagcatgaaaaaggaaaagcaaaggaaaagggaaagcataaaaaaggaaaaataaggaattaaaaaattaaatgttcatcaggtgactaaaacaacaattgccacgacttcgtcagtgccaacaaccgaaagtgatcaaacgacaaaagtttcatcgcccgaggcaacaacgaactcaaaaagcactttgacaacgcaaagtcaaacgacggacaaagaacaaaatttaacaaaaacagaagcaaaaaagaaacaaattcagacagaggaaaaggaggaaattatgcataccaagaatttttatccaaaaataaccatttaaaaaattttatttacatattttagtacatggaggtttttgtacatatttcatatatattttagcattttttatatatattttatttacatatttcgcgatttttcttacataaaattcccagccctagtaattataaaatattccccaatcattcaattgaaattgggccgtattttctcaaaaattatgcaccattaaaatttatcagataaatttgaataaataataaaaatttgtaaagtgaaaatgttgcgacgaggtgaaaatgggcgattaaatgagcaaagaaaaacaaacaaagaagaaaaagaaggcgtaatattcacactaacaacgcttaattaattatgctaattaccggcattgtatgtcaatttgtcattatttcgtaaatatttatttgcgcatttttctgtccatgcagtggtcagtccgtcccatcgtccgttccgtcacaccacagttggcattttcaaattcgtcgccattccgccgccatttgccgcaaatgacggcactgtgccaccgttggcactgttcaactttttgcgacggggcaatgactttttgaagtgattgtcagggggagagacgacatacgaagaagcggaagggggaggaaaagcggaagaggaaaaaggaggaggagggagcagctg

SEQ ID NO: 2331 - DNA, 881 bp, Heterodera glycines
ggggggggggggaatttgggatggaaaaagcgaaaacgaattggcacttacggcagaagaagcggcggaggaggaggcaccgaacgaagtggggcaggggatcagcgaactcgggcacggcatttcgcgagttgttcagaaacagcggcgtttggccgtgtcccttctccgtcgtgccctcctcgtcgccgcccctttccatcttcagttgcgcggtcgccgctctgcgcttcatcgaattcaaagagaaatgcccgttcggctgctgcaacagactctttgtcgtccgcgttttttgtccgttttccgtcgatggcatttgttgttgcggttgttgcgcggcaattgcagcggtgcgttgcttcgggggactgttgccgacgaaaggcattgcccgtggcaatttgctgccgttgttgccgatgccgctggtcgacgcaacgccaatcggaatgcgactgtgcacgaggggagacagaatctgttgctgttgttgtgttggtggtgctgctggtggtggtgatggtggcatcaccaccggtttggcactgtttggcgctgccggtggtgccggcgacaaaacggcaaattttcggctgtcccttaagcgaaattctgttgaatggcaaatttcaatttttcgcttatgcttacatttctgtggagttctttagttggatgttcatcagaagatcctcgtcctccctttcgccttcgtccgctgaattactgcttggagtcgtcgaagtgtcgtcgtctgacaaattttcagccgtctgcggaaatgggttgagactgaatgggccacgacgagctgagcatggcgacggcttggcaatggtattggctgttgccgactccgtccccgcgtccgtcttctc

SEQ ID NO: 2332 - DNA, 1979 bp, Heterodera glycines
tcggatccattcgacagatttattttgatttttcttcaaagtataattccaccaccaagcatctttttattcagttaattttttatttaaaaaataaatataatgacttgtctatttgtgaattattgaaattattggggtgttccgttctgagaagacaaacatttgagggcaaatcaaaactcacccccatttggaacgactgtcctcttttgtcgatagctttgcactgctccaggaaaccgcatcagttgcattttccacccgagcgaaacgttcgactgcagaagcgaagggcgagcgaccgtcggaagagtcttctggcctattgcgactttcaattgctgaaagtatcaatcaatgtttgggtttgagagagggataacaaacagaaacagtcgccgaaattgggccgaagtcgatggtcaacgtttaagcgcacattagccgacgatttggagaaaacatttgattcttcggcattttcctcctcttcgtcgcccaaaaatgagtacatggacaatgcggatggcaattgtggtttgtattcgcctcgttgagtcgagtcaattattctttttgcgtttccgcttttgttatcgccgctgtcggagtcggagtcaaaggaactgaaattaaaaatcagaaaatggaaagtttctgaactttaactcgaggaatccaccagcacttgtcttgtgccttctgtaacgctgtggtctttcgtgcgatttctcttccgttgcggcagcgcccaatgccaaaatgtcgtcggttttcaatgcgggcaaatacgaagcgccaaaatccgaaacggcacgttggcgtttttgtggggacgaaatggaatttgttgtgccgccgcttgccgaactgagtctaacagtaaaagtgaacaattaacaaaacactctttcccctactcacttgctttcattagtcaccgtcgactcttttttccgcaatttgtcctctcttctctcttttaccgatgcattggcaaagtgtcgtctcactgacccaaccgacgaccgtcgttcattatgttcattgtctttgttcatcggattgtccattttggcaatggctgcaaaatcggacaaaaaatttcatataaatcaccgatgataatcaaaactgaagaattggacgtactcggaggagaaggggaggcccgagcgagcacctcagagacggaagggaagcgcaaaagttgaagacgcacttccctggcggaatgggagacgagttggacagcgtcgtgtcggcttttgttgaagagagaaacgcctgaaaagcacaaagccatcagcggaccaaaggacacacaatattagcatcaattaatcattcactcgttgatattttaccatttacactcagaagacagtctccgaccagcaaacccttccgttttccgtcgccctcggggctaagcgacttcacaaacactgtctgaaatagcaaagttcggaggatggtggtgcaaaaagcgcaccttaaccccattcatgtccccgtcgatcagagtcaatcccaagccgtgcaatgggtctttttccagaagaacgttgatgcgttgtgcctcagacccataaaagtactgtaaacaaatcaatgaagaataaaaagggtatgggaattgcctcgatgtattccttctccgtttcgaacatcaaccgacttccgtctgccaaacggtcaaagttcggtgtccgttcgaactctttccatttgggaaatgacaaaatgattaatttagagagaaagggcacactttgtccaattcccatctgcggatgagaagcgtttctggcgtgaaaatgacgcgattcttcggcagattcaatttgctgttcatttgaaacttctaaaaaaccgttttcattgtttctttcttaaaacgaggtcattttaaattccaaaatccgcccaattcccccccccccccccttacaaatggctttttccgctttgtc

SEQ ID NO: 2333 - DNA, 1992 bp, Heterodera glycines
  unsure (1)..(1992): unsure at all n locations
cccccccccattagaaatggctttttccgctttgtcttccaatttccccgcttcgctcgtcgaccttcgcttcgcctcctttgttccacgccgacgtccttctgccactccaccaaatgcattctgttcagcgtcccctgccattggcgcattttcagcatgaatctgtgctgagaggcggcaaaacgaaccaaataagaggcccttatgaaaattgcagttggacaaaacaaaaaagaaggcatcacttcgaatggtgatccgtgtagaaaacgtggtccacggcgatgttctcttcgatggtgcccaacagaaagcgttttcggtcgaattggagtgtccgaatcgtatgcctaccaatttgaaaatggacggtaaatgtcataatatgtctttaaaaaacaccagtcgaacgaaccattcgtgtgttgaatttagcaggcgttgtgcgccgtttcgctcctcacgacaaatgccaatgccggaaggaagcacagcaacaatccgagtgtcagacaaaaaaggacgggaaggcgtggcatagccacgcttaggctttatcttgtgcacacggtaaaaatgggcaccataaaggggctaaagggagaaaaaagggagtgaatgaaagcagcggaattggcggaacttcggcttggcatcgcgcgatgaactgttcttccgcctccaaatagccaaaagaggcggcgaaacggcggtgcctttcggcaattctttgctgtgtttgaaggacttcgtttgcttcgattgcgtaaaatttctacaagaaaaatcacaaaataatctttttgagcaaatggttaacaaatagctcatcaggatttcgtaagttcgagtttgttttaccgttggcatgtaatcctccattctgaagtactcctcgtccccttttggaattgaattcgcttcggcacacaatgccaacgccgccatttccatcgcgcgctctttgggcgaaaagcgcagcgttccgctgagaatgtcctggcgcagttggaggtacaattggtgcgctgtgttcgccgttctgcaaatttgtgaatggagtcgtggcacggcacaacaaatatttgattaacttgacaaattcgcgttttttgggatagtaacggaatcgcaacaaaagtgcgaactgttcgacgccaccactcgcggaggggtcgaagtgacgggaaagagtgcctggacaaatggaaacgaaacgacgcggtaaatttaaatttgcattggcaccgccggctccgaagcttcgcctcagcccggccccgcccttccaccccggcggcgcccatttctcaagtcgctgatgctcctccagaaaaatgttctccccaaattgcctttggagggccaacccgaagaacaaatgttcagttatgttcaaatgctgaaattttggattaataacggatttattcgcaccgaacttcggcaacggtgtgaaagaccgagccaatcaaagtgtcggtccggcaattcacttcgacactgtgcccattcaaaagacggacgaaaaccacggccgagtcagaacggtgcaatgagaccattttcttctaaaaaaagttagaatggaggtgaagaaagaatgcgatgaaaaaccacggaactcttttcatactctgcgctctgagccgaatgataggccgaacatttggactcagaaattcgggaacagtcggaagaagcgaaagggactaaaaaggggaaactcagaaggaggtgttgaatcgcagcacatttggggcccggaagtgtccttctcccgccgctttccctccttttgctgcaacgcgaaggttcgagtgaatttttgcgttgaaattgcgcgttttgctctttcgtcgtcgtttcgtccctttgactgtccctttcatgcgccactttttcgtttcgtccctggcgaaaagccactgacaattccatcggncgagtccaaaaaagagtcgtcgagtcgccctttcgactcatcag

SEQ ID NO: 2334 - DNA, 2294 bp, Heterodera glycines
tcttcttcggcatcatccctttgttctcttttcggaattggcgttgattccctcggcgttgatccgtcttcgtccgttgaactttcgtaggttttcggctgccgtgtcggtccttgcaaatgttgctcaaattcggtgtccaaatgagcgtccgtttgaagttttattggaatttccacggagtttaattcgtatctctaaacgttaacaaatgtgctaattaaccaaacgttcccactcatcgaaagttctaaaaaatttaatttttaattttcttgctttttttagtccattaaacttggtcttgatgacctccattttctatttatataagagcacccaaactcgaattcgaacaaagccgagaattactgtcggatttcaggatacaaaggcaatactggagaagttgggtccacccgaaaaaaagcacttttttattattaaaatgtccatccgtgggttttcggggtgttgatcacgaatatgatatcatgttccaaatgattggtaataaatgctgaaagtttgtttatttttatgcgattggtcttgtccatccatgatggtcatcattcgaatttcgaaaaggtgcatcgaaaagatggatttttaaatcattgggatggtccactcaaaaaactctgcaaaacccatatttgatatttttgtgaaaattttcgattttcctagttggtagtcctccctcctccctcactcaatttcacaaaaaattactaaattttttccaaaaaatccacagaaatggcttaaaatcacaatttgtcatttttaggcaaaagttgcactcaaattttcaaacatttgaacccatggatggatattttcataaccaaaaatgattttttcatgatgagcccagattcatcaaaattacccgaaaatttacagccattaagaaacaaaaatgctgattgtgagttgtgtagaatataagaagaagttctaacaactcatgtttccgcttggtttgaagtaataaaaaattaataatttggtaacggatgaatggcttaaagcatcggattcccaatgtcaaatggttttatacttttgtttcgttcattcaaaccaccaacttacggcacaatcagcaatggaattttcagttgattcgctagccaacaaattcccgtgcaaccgatcagcgatttgtgaagcattttgaaggttggcactcgtgccacctgcaaagctaatcacagtacacaaaatgggcagacgaagcgcaactcttttgctgctccggcgcaccggggccgggaataatgctaattttggaggaacgactggaggagaagcgaatgtcatcgtcgaaagggtcggccaactgaaaagaaagcgtcgaatgtcatcaaaagtttgtcgcaccagctcatccaagtcgcccatcacttccttgaacaaattggaaataacttcttggactttggccagctgaacaatgccaatttggttgcggaccatttgccagactttggcaagagtcggtcttgactggacttggccaaccgtcatcagattaagcaacgaggagagggaaacatcgcgatggccagcgggttggaggaccttcaacaaaacagacaatgcacgggtttcgaatcaccaatctcaccctaagacagctcatgcctaaacaccaaaccaaattgagttcttccgaattttgatgttcttccgacggatccggtggaataaattgatttgttgacaaagtggaagtcaacagaatcttaattaatgatgagaagaattaattaaccactgactaacctcaacccggccgtcgctcgtcagaaagatttggttcaaagaaaaaaaactttttgggctttcattttgttttatgcgagtgaggaaatcacatgaactcgaaagcaccgaaagaagttcaaacggtgcaagaccaccgatacgcacctctaacaattctgccaaattgattttctgttgagtgttctcaccaaccattgaggaagaattagctaaatgcaaatgcaaatttattttcagttttatttttatttttttaatacaatgcttcaaagaaatttgttaaagttaaaaaatttaattttaattcgtgagtctgttaagtaaacgccataataaatatttaacccatcagctaaaacagaaaacatctgcgaatacaattttcataacattttgtaaggtcactgatggattttgaaaatgttggcacttccgtcgctgctccatttttggcaccattgagcggaatcgttgtcacatttaccggattgagc

SEQ ID NO: 2335 - DNA, 3830 bp, Heterodera glycines
  unsure (1)..(3830): unsure at all n locations
ggtttatttaggctgtttagcaagagttaacttgtttgctgcacgaaatgggagcgcaaagtatggcggcgatgaattgcaaagtcactcatttgatcgctgagagatgcgaccccgaatccgagaaatacaaggcaacttttccagaaacaaacggcgccgttttgagttgccttgcaaccacagctatttagtttgctttaaggaagctcggcgcaggaaattgccggtgttgttgccttcatgggtttttgctgccaattccatggaccgccgtttaaaggacactttaaatgtcatcacttcagagaaacaccttgacactcataaaactccactttttgctggatgtgtatgtttaataatcttccttaataaattcggtgcagccttcgtaaattgggtttcacgtcttttacttatttctattgacttgtactctctctcacttcagggtcattcaataggtatattatctttttatttgcataaaactgtttaagagcagaatttatttacttttcctttctcagaatttttgtaataagatttaaaaaaggacaacagttggtttttcggttgattcattgttcgtcttgccattttccaggaaatcacagtgtccggcttccccggcgccgaccgcgttgacattggccgtctcgtcgagttgcacggcggggtgttcaccggacagatgaaccgttcttcgtgtacgcatttaatcgcagccacaaattcgggcgaaaaattccgtaaggcgcgcgaatggggcactgtttgggtggtgacgagccgatggcttcgcaaatgcattgaaacggcacgaccgattatttaattttaatttcttcattttattttccagggatatcgtttatcggagagtcgttttgcgcattcacacgacgaagacaaacagcaaagggtttccccaagtttttctctgataacgaaaaaatgaaagatatttgaattcgtatttgccgttcgaattaagtcgaaagagaaattaggatcggattccccgacactggaaccccagaaaaactatatcaaaaatcttttttcggaaagagagcccattacattattcccgaccatttttattgagttttatagccattggattgttgtgctaaatatcaaaaattgctaattatatcattgtttttatttttttaaaattattttgtgcttaataaatgctcctccgttcttcaattaaaatggctgtggtggtaaattttcaggtctatttggtcgaaaagttagctgatgtagaattccgcttatttcttgtaaattcaagtcaaaaatgatgacgagtttttggcataaaagtgattggccatttttggtgaaaatctgttaacaaagcacacccaaaacttcaaaaattttccccggcggtacctaacggcaccgccggtggtcccttctataagttatcattagagaccgactaaaaatgcacccaaaaatcgcaaaaaaggcagcaaaaataaaaaaaggcacgaaaatcccgaaaaaggcatgaaaataggtatttaattttttctttaattttataatttttttcgaataagaaaattttcaaaaaaagtggaaaatgttttttttttttgctcaatatatcggaactaatgcgcagaaaaaaggcatatgcctcaaaagtcggtctctagttatcatgtcacacatttggtttagaattcgaatgttagccgtcaattttggagataaattgaaattcagagtgtgagataacacggtaaaaacccaatttcgttttttgcggattcgtttttgtaacgattcgtttttattatcccgattcgtttttttggttaaaaacttcattttcaatgaaaatttttatgtattacacgctactgcttaataaaacaagactcagcgctaatgaattgcagtctaaatgattctgacccaattttcatgtattttaataacaatgtaaaatttaagcatcttcaaatataaaagttaaataaaaattcatatgaattaattcatgatatccacttctccatcctctgaattaacatcaggcgagttttcatcttgcacttcattcaaacccatttcttcaaagtattgatcaacaagcagcccattttcatccaaactttgttcaagcaaaagccttgcatcttcttcaattatcatttcttcagcttcattacggtttgacggcggattgaagccaaccaaatgtccaattcttccataataattagacatggcttcaacaaattcatcattgcagtaatccgtgttcaaaaaagccaaaatatccgccttcgctgaggcaattcctctgtccaattcaagagttaattcaagcgggcgagctggcaattgtcttccttcatcaacggccactgcggtttcttcttcagcatgccttagttcctatcatttacgatacaaaagttagagacaaacaagtacctgaaaacttgctatccatcggccgagcaagaaaccaggctggtaaaagcgttgctgtcgtccgtggtaagactcagcatggttgattcttttgagctgtacaattgcataaatcccattgattgaattcggcgatttatcgcttgcttcacatgaaacgcgcacatttttggtctgacagttggaaaaacatcgcaaaatgcattcactgacgcagattcgtagtcaaaattcgcttgggaaatctgagcaaatcatgccaatggaacacaatgcgtttgtgcaataaatccaaatactcggtaaatctggatgagcatattgaattaatcaaatatattcacattaaacttgataaatgcctcgcggtgccattttgaaagtgccatcacaaacaatcgtttccgttcgtttaaaaagcgccaaccgacggggcgaagaaaagagtgccatcacgtccgtacactctagcaaaaaaagttcttggaagtgatcgctttcctcgtgtgcaattcttccacgataagtcagccatagaggcttacttgtttttcgaatcggttcgcaaaagtgagggtactttgcaccatcgctggcccatgatccattttcaagcacttttctggttggtaattttctgtcgcttggaacatctttccggtccttgattttccggcaaccagcacatacaaagcgttgaccgtcatcttttttgactcctgcagatgtccatttgtagcaataattcggattttcggagcaatcagttgtcataactgttttagaaccaatacgcttgctatataatttcattatggcactaaatataattgtttacgtttttttttataatcaagaaattatgaattagaaaattgcaggcaaaaaacgaatcgggataataaaaacgaatcgggataataaaaacgaattgggtcaaaaacgaatcgttacaaaaacgaatccgcaaaaaacgaattgggggtcgttcagataacactggtagaaaagggacgagaggagaacttgctaaattcacaaataaggaacagaacgcgttacaaaaaatcacaaattaagaagccataaaatcaaatcctttcttttatcacttgacaatgttctaacacttgtctacgcgcttgtgatttgatggtgtggccttgaaacaataaatttttcataaatgaacttgncgcatttcgtgttttctcattataaattttctgagtcacccccaactcatccatacccaactcatccatacccaactcatccatacccaactcatccatagaccnnactcatccatacccaactcatccatacnccactcatccatannccactcatcc

SEQ ID NO: 2336 - DNA, 3624 bp, Heterodera glycines
tgagttgggttaccccaaattttctcttacttttcttgtatttataattctagaaacaataaactgtagtagagccgaaaaaacacaatacatataagtcaaaatacacaatcaattaaaaaacagttaggctatttttgcgaaaattattttaaaaaatcaggactctattttaggaaaaacggtataaaacaaaaaatgtttttcttttaaaaaatgtgtaggtagtatgtattccaaagcgaaattaatgaaaaagaagagagaaacgacgccagagtgtaggcttttctctgcacctatatctctctgcccgtgatgcattcgaccttgcaaaattacattcctaacttgcctatttaatcaattgattgtgagactaatcttccttcagcttattcaggtcttcaaaaccggcataagctgcaagggagcgagaatgtacaggaggagcggagccagacaaagggtctgcggcccgtggttaatattttgcctattcgttagcacgcgttcccatccctttctgattaatgctaaaatacccaacattaatacatattttggtccttcttttaagattgagtacaatcattcaacagatttcattcttatcgtgtgtgattttagattttaacgttctattttcatctttggatttaccgctgatcgaatcgcaaaagggaattgtttggtgcttcgttttgtttcggttcgatcggcactgggtttataaataaaagttctttttcagttgtcttcagtttattgagatggatgccggcttttacagagggacctcttcagagcaggacatccgtttcactgacaaggaacgcaaattgttaaggcaaatgaagttcgaaaatgtgcttgaaacaaaggttgttgtcttcatttttgttgtttgactgcagttgactaaggtcgacttggcaaagataaatcttgatgttatcaagccgtggataacgcttaaactgaacgaaattctcgggatggaagacgacgtggtggtggaatatgtgttcacgcagcttgaggagaaggagctgaacccgaagaaaatgcaaatcaacctcaccgggtttctgaatgcgcgcagagctcgcgaatttatggtattttttcatctcttggatcaccttttgtcattttaggcagaaatgtggcaaatgtttgtcgaagcccaagacagccccgaagggattccaacgagtttagtggagaagaaagtgcaggaacttaaggtaggctgaataattgatttgagaaaacggcccataaaatttgcaaattcttttgcttaaacgtttttaaacactgccaaagtttaaattcgagaaaacagcataaataatcatattgcgttaaggcatcaaattcgaacaaacagccaatgcagacgtaccacaaagcgacggaagtggactggaaccagcggtaccaaacactgacgggcggacgctatgggaaaatggacccaaaagcccaagtgagcaaatcgcatatgtctgatacttttatgaaaggtggaggaagacgacccccagcgaaggcggcgcgatccggaagatgacagagatgaaagagcggagagacggatgaagtacgaagaggggcgattcaaagagaggaaggcaagtgggcacaaatacatcggttagtacccaccttaccaataagttaaatttaaggatttgttacgtgagaaacaacggcacgaagaaaaacaccgagaacgcacttcttcgcccgagtcaccaccgtcgatccgccgtttcgagcgagagcggaaaaagtggagaagaaaaaaaggcaacggtaggaggcggaccgaccagtaaatctcaattaaagtaaggtggggaaaaagcacttgaggaagagattaacgaattaaggggcagacaaaacggcgacgatgaaaaagaaaagtaccgcttaaatttgtttattaataaaacaaaatttgtaggaggaagaaaaacaaaaaggaaaagagtcacaagagacatcgcagcgactcggacagtggggacgaacgtaagaagaagaagcacaagaaggaaaagaaaagcaaaaagcataaggagagggactgagactgccggaaagcaatcgctgttttgcacaagcactattcgcaacagccgttttcattgtttcatttatcaagcgataaagatatgcagtgacgttatctcaatcattttagcagtttgaaccgggtacaattttggggaccgtatgtgctcaggtacaattaatgtacaggctaatcattgttcgcatttgtcagaactgaaaaattaagatcgattcgatcgacaaaggccagaaaaatgcaatgtgtaaaagtttcgtccgcttaaatgtttagcgattgcaagtcattcccccacagcatttgccttcgctcaactccatgtccaacattacctcctcctcctctcttttcttctgccgctccgcctctctttgtgccaattctaattccgctccaattcgatgctgagaatgccaaagatcggcgtatttaccacctacaaaaatgactccgcgtcagtacgttcattggtcgaattaagtcgtacctggcaaccccaccagttgggagtgcgtgccagactcgacgaccatcccccgatccaacacgtaaatgatgtccgcgtcgacaatggtggccaaccggtgggcaatgaacaacgacgttcgaccagagaatgctttcttcagcgaacgcattatattttcctcagtaatagcgtccaatgacgaagtggcctcatcgtaaacaatctgagaaaaagacggacgtcccttttctttaaaataccccaattccaattctctcatttctttgactcccttacaattggcgcgtctttgagaattgcccgtgcgatggctactctctgtttctctccgccggaaagtttcagtcctctctccccgacaattgtgtcgtatcccgcgggcatccctaagatggcattgtgaaggtccgcagtctttgccacttcgaatacctaattcgttttgatattttaaaatttttaaaaaattataatacagaaaacctttggttcaatttcaagcaatttttattttatttttctaaaaaccttcttcactggtgctgcactgtccccataatggatattgtacagaatggtatcatgaaacagcacactgtcctgggggacaattgcaattgcccgacgaaggctgtccaatttgacggcggcgatgtcctgtccattaatgcgaatttgaccgctttgtgggtcgcagagacggtagagcagtcggacaatcgtcgatttgccggaacccgaaccaccgacgagggcaactttcttgcccgaaggcacgtcaaaggacaaagaacggagaataggtttgccggggatgtaactaaatataaatgaaattaactttggctgacataccaagcaaagacggacgcgaaagtgatgtcgcgaaaagaaatttgcgaattggggggagatacattcaaaatgggggcatcgatgcgatcgacgacgcgactctccagcttaatcaacgagaacatcgtctacatgtcgagaaagcatgaaatagagaaggaaggggcaa

SEQ ID NO: 2337 - DNA, 4304 bp, Heterodera glycines
  unsure (1)..(4304): unsure at all n locations
tagtttcaaatggcaaaattntggcaaaatgtaaaatttctcgtttttttcccggaaccaaaaatttaggaaaattacacttgacaaactatttttgggatggaagagcaaaaataaaaagctctttgggtgcgcacctcccgaaaattttctggttacgggcctgtacagtattccctaattgattaccatacaaataaattaaaattttcttcaatttttgttgatgtaatattctacaaagagaagttcaactttagaatttacaacctaataattattaccagcctgttataatttttttgaatcatataatggcacttttaaaatttaaaaaaaaaaaaactaaaaaaaccatttttttcacatttcatagtgaaaaagatgatgattaaaaaaacgaaaatttatctatttaatttaaaaatattgtccattttttattcaaatttttgccttttttaatcaaaactttagtacgaagaaatttcttctttgacttcgggcagcagatgcttttcccaatccgatatgctttgtccatccaatgcacttgttggtggtggtccatcattatttggcgagaatggcaccgatgaatatagcctaaatgttcacggatatatgacacaaaatcatgtgatttaatccctttttttcaaataattttatttcaattaaagtcatttattatgtcggcggcatattcccatccgattggctattatcaattaattgacagcaataatgccccaacaaatcaagaacagatccgagatgaatttcaaacatcagcaattcatcgcgcagcgcaacaagatgccaatggtaaaggtaaatgatgccaaattgaattaattattttgtaaaaaataaatttagctaattaaataaaaacaaaataatttatgtatttcatttttttatcaattattttctaattaaggaaagtcagcagctaatgaccaactaagaaatgaggcacaacaaaataatgcgatgcatgccgaagttgttgcgacacaaatgccacaaccagcgacatcagtcaattatgttcataatcactctaatcatctgatgcacaaccgatcaccgtttgaaccgttttgcacagttccaggcactttttaaacattttatttaaattaattaattattatttttaggtcgtatgagtttgttgagcagcacaacaaagtacaaagtgagcattggtgatattcaacgtcatatcaacccgcctgaatgtttgaatgcatcattaattggcggtattttgagaaagtcagtaattttgggggattttgtgaatataataccaccttctaaatttagtgtaagacaaatttagtaaataattgtatttttagagaaaatttaattaattttgtaaaaatttattaaaaatttttatattatcaagaaatgaaaatatttttatgctaaataataaaatcccgcatcataaaaaagaaaattatagaatgtgagtaaatattttggaatttcgttttactcaaataaaagccccccccacccctcaattagaagctcccccctatatgccaaccttcgaggggggttgaaaaatagaaaatactctgaggcttagtttcagtaaattttgttgttcattttttttttttggtttaatgagataaaacctttaaaaaaactaaataattgatcattattttattcattttaattaattgccattaaattttttccctaaaattagggctaaatccaaggacggcggcaaagcattgagggaatcgttgaagcgaattggcctttcattgccggccggacgccgaaagtcggcttgtgtgaccgcattcactgcattagttgaggaagaagccctccatatggtcgggcattaattaaaatttgtgccattaaaaaacaagcatttttaattttcaaatttatttgtccaaatcaattttaaaaaatgccaaattttatatgatttattaaaatgacaataaaaattttaatttaagcttttttaattttatagacattaaaaggagaatatttttttacgccatttaaattaatttctttaacagtttattaatttcaattattttttaaataattttattattttatttaaaatttgaatttactaatttttgattacatagtatttttgacactttaaatttttaacatttaaggccaatgattttaatgctgttctccaacacgatttcccggccaaggacatcggttttttcctcaatgcgcaattcctcagatatgttggccaatcgccgatggattccgaattggtggccagacgtcgtacaattttaaattgttcaaggtttttattgcaaaatccgaaccttatgattagtggatttagctgtccttggctttcataaatacatacatctcccgtatttaaaaaggctaatttgtaaggaatattttccgtttaaatgtcgtttttttaaaaataaattgacattgaaatttatttatttaacaatcgttgttatttaaaattttcattaatttttcaaatttattttcgggcaaaaattttagtgaatataataactcaaaaatcagaggttttgaaattgagtttctattatttgtactaatttcttcatctcttattaatgcgttacccatattttcgtaaaaaaaataaataaagaaattacaaaaattgcattttttaggatttttatcaaggagatcaccagccttttggctgcggaccgaagcccaatttgcgatcgtcgacctgaattgatgttggacccgagcatacaaaagcaactcacgcatttttcaatggcaatttttatgggttttttgtaaaatttttgaatcaaaatcttattaaatgctttaaattttttaaattcccatcgataagctctgcgttttctgccgctaccgtctcacaaaaaattgaaaaatacataaattttttaaacaaaataattgttctaacttttattaaaatgcgattatttattttagattactcatggctttggaggaattgcaatggtatttttcattatatgttttttttttgaatataattaataaatcttataaatatttatttataaaaataaaaatttttgcagatttcattgttggaagcattggccacctgcttggatgaatcattaataaatttggaaaaattggtcgagacaagaattggtactattccacaacaaacttccagcagcaatcattaaggagaaattataaaattatgataattaattcattaatatatttctaaaataatcattttttcaatttttttatgcataaacaaatatgatcaacaatttgaaatagaaattatatcactttccgttatagcataggaatatagtaaagaggtataaataggatatactgtagccctaaaaataaaatacctgcgaaaccctataagcacaagggatgcgccaattaggggcccaccacagactattggcgcagaagggggggggggggggaggggtgcgccaggactaaatttctaatctaaggcccacaatttttttttcgtccggcggcgatcctttttttgctattaataccgcctcttttgcggcttgctatttctaaaaaaacttttgttgtggaacaggggagggcggggggggcggcggtgccggcagaggccgccgataaaaactttaaaattttatgaaatttgtagagaaaaagtcaatattttcaggcatttccctcttttcctcttcaccaacgacccttccccgtcccaccttttatacagccgccccccttacggcgcaacccctgaataaaatcccataaaatcgtagtgcgacatttgcggaccgacatttgcggaccgacttttgctgaccgacatttgcggaccgacttttgctgaccgacatttgcggaccgacttttgcggaccgacatttgcggaccgacttttgtggaccactatttctgggttgaactgtcaaaaaaaaaacaaaaaaaaaaaataattttttaaaaattgagtgactaagtagttttatttgtgatttttaccaagttgaacatcgcccttcaagagtaattgatcaactttctgcaatcaacatcgaaagaacccattttttaaagaagtttagtttccatagataaatatagtatgtagttgctcatttttaattttggacccatagttttaataacagcgaattacggacaatttttgagaaaaagataaactatttaagtgtttgtttgttaatttaattggtttggcatgccggaaa

SEQ ID NO: 2338 - DNA, 4902 bp, Heterodera glycines
cggtccgcaaaagtcggtccgcaaatgtcggtccggcaaaagtcggtccgcaaatgtcggtccgcaaatgtcggtccgcaaatgtcggtccgcaaatgtcggtccgcaaatgtcggtccgcaaatgtcggtccgcaaatgtcggtccgcaaaagtcggtccgcaaatgtcggtccgcaaaagtcggtccgcaaatgtcggtccgcaaaagtcggtccgcaaatgtcggtccgcaaatgtcggtccgcaaaagtcggtccgcaaatgtcggtccgcaaaagtcggtccgcaaatgtcggtccgcaaaagtcggtccgcaaatgtcggtccgcaaatgtcggtccgcaaaagtcggtccgcaaatgtcggtccgcaaaagtcggtccgcaaatgtcggtccgcaaaagtcggtccgcaaatgtcggtccgcaaaagtcggtccgcaaatgtcggtccgcaaaagtcggtccgcaaatgtcggtccgcaaatgtcggtccgcaaatgtcggtccgcaaatgtcggtccgcaaatgtcggtccgcaaatgtcggtccgcaaatgtcggtccgcaaatgtcggtccgcaaatgtcggtccgcaaaagtcggtccgcaaatgtcggtccgcaaatgtcggtccgcaaaagtcggtccgcaaatgtcggtccgcaaatgtcggtccgcaaatgtcggtccgcaaatgtcggtccgcaaatgtcggtccgcaaatgtcggtccgcaaaagtcggtccgcaaatgtcggtccgcaaatgtcggctaacccataaaatatatgtttacaaaaaatcaaaaataaaatcatttttcttttttttcattcattttcatcctcaaattcgttgagcatgcctatcgtactttgaatcatgaattgcatttctaagtcgtcatactgttgttgtacgtcagcattttgactctgtatatctttcgtacaatttttctggcgcaatggatttggactgatgccaaaaactaaaatattaaaaattctaattaaaaaataaaattattattttcataatatccctccttaaaaattggaataaaatatttaatgatacaacattttttagataatttatgtatttttttttaccattttttaattcgaattcgtttggtagtggcggtggcgatggcacttcaagctttaattggacacttttttcgtttttcgctttcatttttaataattttgcgtctcttccaccatcttttttacgattttgcagattttttgctttatttgccgattcaattaaatatttttgtgcatttttcaaattttggtatgagttttttcccaatttttcgtcactttttaggcgataagtccaaacatttacctatcaaattaaaataattataacaaatcaaaaaataaaattaaaattacataatgaaaatccgtttgttcgtccttttttatcttctggtcaatttcgtagataaatgcccatattgaaacctgtaaaaaaacatcaaagcctaatcttttcattttttaaatccttgcaaaaaatctcaaagcctaaccatttttgtttataaaactcaaaaaatttcaaaaagcctcaaaggcctaattattaaaacatgaaaacacaagaagaggccaaaacatgcaatatataaacgaattttggattatcaaaccttgattgaatcttctttgttttcaaaattcatttctgaagaatttcttcttgcttaattatttttttgtaacaatttcggaaaattttttcacagtttcccatgaaaatatttttgtatgcttcaacaatgttagccattgccttggcaattggcaaaatgccatttctgtttggcaatgtaaactttggcttcagtgaaattgacattagcaatgcttcgccattaactgatttaaaaaaaaattcatttttttcctattttattattttaaatttaaatataccatttttagaattgatatatgttttgagattttcacaatagttgaaccaacgttcaatagatgaatagcgaatttgccactcaattaaagtctcaaatttgtccataatttgctcattgtggataattgttttgatatgttgccaatctttagtgtttctgtataaatttgcttcatcattttcagtcaactctttgcacataaattcgtgtaatgtaataatttccttaatttgtttaaatattttaataatttaaaaattaattaaagtaattaatcaatctaagtttaccttttcattcgcaccacatactaaaatgataaattgttgaatcaaaatagtggcaagaagataattcatgtcggcttctttaaatgcttaaaagtctctgcaaaatcatattaaataaatacatataaataaaaaattccgtagcaaatatgcaatatataatttgtaaaatacaacaacaaagaaataatcaattgtatatggaatcaaaattattccctatataagaataatatacccatgatccaagcttaaaaactaatttaagactttctagcgagttttacaggtcgagcgtggggtcaatcgacgcagtttttcaagggctataagggaaaaatagtgcggtttcgatcggtttagaactgttcgaactgtgttcgaaaaatgactcaaaaaatcaaacttttttgaatgtcccatttttgaacgctttttgcatgccttaaaattggtcaaaccaaaaaatgaaacaatttcttccaatctacaaagcctgggctttcgaatgataccagggttgtttgggtccgggtccgggaagtgccctaaaaagggattacaagcacttttggtcggaatttttcccaaaaaagaaggaaaatgaaaagggaattaaaagggatggtcgcaagcgacccggtggtcaagtggttagtgtgcttgcctttggtcatggggtgttgtgggtgcgagtcccaataatttatgagattttcccgtcaaatattatatttaaattattcgttttaaaatttttttttaatgttttttataagaattttatgagtgagttaaaagagaaagaaaggcataataaaaaatatggagcaaagtacttttggataaaaattgattactttcttttctttcctttttttatatgtaatgcacactcgccagtggtctttaacctcgccttttcaatcagcaaaaaatgtctcctccttttctttccccagttcattatcaattgtttccatttacatcagttttttactgctcctacttttattcaataaatatttccaactaaattattgctgttttaatagcataaatttttagtttttgccattggtggtggtggtcgacggttcgggtcccacctattctgggtgttttcatccattattttattaaattttttgaatgattttattttttttaattaattaagtttattaaaaataatttattttaaatattaaaaataataattctttctttctaatttagcccaaaaatctattgtttgaccttttttgtgcaaaatcatttaaaaatggagacaaattaataagttacctaaacataaaattataaatattttatgccaaaaaagaaggaaagtgaaaaggaaattaaaaggaggcaagcgatccggtggtcaagtagttagtgtgccttcctttggtgctggcttcccatgagttaaagtcccatttcttctgattattttaaagcaaatattatattgaaattattctaatttttgtttttttaaatttatttttttaattaattaactttatggtattttaaattaatgataatgattttttgaattaataaaataataaatatttttaattaatagaataataaagtctaaattaaatattaaaattaatcgaataaaaattaaaaataaacaaatattaataaatatttaaataatttataaatctcaaaatgagttaattttagggttagacgaatccgggtatttgggcaaaaccgggtccggatatttccgggtccagaaaagccgggtccgggtccaagtttttaaaccgggtacgggaggaagagaaagtggaagaggaacagaaagtggaagagaaagtggaagaggaacagaaagtggaagagaaagtggaagaggaacagtaagtggaagaggaacagaaagtggaagagaaagtggaagaggaccagaaagtggaagaggaaggaaagaggaagagaacgagaaataggaagagaacgagaaagaggaagaaaaagaagaagaggaaggaacgtggaagaggaacagaaagtgaaaagtggaagaggaacagaaagagaaagaggaagagaaagtggaagagaaagtggaagaggaacagaaattgtaagaggaacagaaagtggaagaggaacagaaagtggaagaggagccagaaaatggaagaggaaaagaaagcggaagagaaagtggaatagaaacagaaagtggaagagaaagtggaagaggaacagaaagtggaagagaaagaggaagaggaacagaaagtggaatagaaagtggaaaggaacagaaagtggaaggggaacagaaagtggaagaggaacagaaagtggaagagaaagtggaagaggaacagaaagtggaaaggaacagaaagtggaagaggaacagaaagtggaagaggaacagaaagtggaagaggaacagaaagtggaagaggaacagaaagtggaagaggaacagaaagcggaagagaaagtggaagagaaagtggaagataaagtggaagaggaacagaaagtggaagagaaagtggaagaagaaggaaagaggaagaggaagagaacgagaaataggaagagaacgagaaagaggaagaaaaagaagaagaggaaggaaagaggaagagga

SEQ ID NO: 2339 - DNA, 4905 bp, Heterodera glycines
catttattatttgctcgattgtcaaccgatatatgggtggtcatttacatatcataaaatattttgtatttgtgcctcgtttttgctaattttataatcctgtatgtttatttataggtggtcgccagcccttcattctgcataatctctgaatttctcttttaaatttcttaccaggggtggagcgcgacgcagcaatttggatccgggctgcgcgaccgcgtgagctttctgtcctcgctccatccctgtttcttaaataattttgtatttctgcattttgagtatgttgatgctattacctaatcattttttgtctccaagtcgaatcataggcgtctggcgatcacgtatggaagcgacctttaccttttcgaatgtgttacgagtagctgattttcgcgtagcccagatgacggaaagtgggcacgtgaaaagcacaaataaaaatggattcggcattgcaacaatttgagaaatcttatagaggactttgcaaatcgtgactcgtttaaatatttacgggcctgttcttatggctcgaatttttgaatttttttaatcaatcaatcaatcatttatacgcaaaagcgtgacgccgaaaaataaagaaataatgaaataataatatcaaaacaatcaattggtcacttttggagttggggtggcaaagaaatcaacaaattaagatcagatctttcaagaatggcaaactcattaggatttagtaatctcgtctctttaggtaaaagtctatagagacgagaggttcgaataaagaacgagttgtatctaacattggttgagcaataagctgttcttacagtgaattcgttttttacagggtttttggaaaaagaaaaggattcgttattttgtaaatttattttacctaaaattatttcatgaaaaagttttaagtctatttttaacctacgactctcaagcgacttttgatcataaatgtttaacaattcagcataattaggtaatcaacagtataattgttacgtctaaatattactctcaaaaaagttttttgaacattctccaatttttctatatccttttttaaataaggattgaaaattggagatccgaattctaaaattggtctgcaataaatattaaacaaatttacaagtattttcgtatcacgagttttgattgactttagtatagcgaaagcagatcgtaatgcttttttcgagataatgttaatatgttgtgcccatttcaaatcattagtaaaataaatgccaaggtctctgactggttcgtttccgggatttttaggaattggaaagtcatcaataaaataatttattttttggtttttgtgtcctaaatgtaaagttaaacatttatttgaagcgattttaaggccgttaaatttacagtattgattaaatttgttaataaaattttggagtggagaaaaggaaatatttgaaagaacatgataggccttaagatcatcggcaaatagtttaattttaacattttcagtttcgcagaattttggtaaatcgtaaatgtatgcggcacaccactgagacagggatattcatcagagaaatcagacccgcttttgacgaaaaactttcgattttctaagtaattttgaatccattttaataaggaattatttataccaatgctttttagcttagatattagccggttatgtggaaccgtgtcgaatgctttagccaaatcaaaataaattacatcaattgattttttattttctaaagcaaaactaaaatcatccaccacttcaagaagttgaatggtaacagaatgtgctttacgaaaaccatgttggcaatttggtaacaaattatttttttcaacaaaattttttatttttcctgctatattttcttccaaaattttggaaacagaacatagcagagaaatcggacgaaagtcgattgggtttaccggattttgaatttttgggtcagggcaaataattgactttttccatatttctggaatttgggcagtcatcaatgagaaactaaaaatatggaaaagtggtcggactaaattttctttacaatttttcaaaaaaatgttgggaattccatcaatactagtgttgttagaatttgaaagtttggaaagagagaaataaatttcatatggggttatgttaaaatattcgatgtttttttcagtattttctaggcattgaaattgttctaaattttgatctgtaaaaacggaaaaaaattgttgcgctaatgcattcgacttttccttatcagagaagaggatcagaccatttttatcagtaaatgcaggtatcttagtatttttaattttaaggaaagaatttataaattgaaaacgttttttagagtctaaggtccgcaaaaacttattttcacgatttttataaaatttatttatttctacatcgattttttttgaaacttccaaaaattttatttttatatggtctttgtgaatgtccttccaaagctgtttacgatagatgattagtttcaaaatatgttctggtagtttttcaacttttttcgttgtttgtatgggaacataattccttatcaaattatttaggaaaaacataaatttttggtaaataagctctatgtccgggcaatcagaaaaaaataaattccaatcaaccattgagagtatggcatttatttccaaataatttgcttttttgaaattataaaatttttttgaagcattactattaacctgtaaatttatgctgaattgaattgcattatggtcactattaccaaatgggggttcaactataacattattcaatagattttcgttgtttgtaaataataaatctaataaattgtttccccgtgtaggggagttgaccattagtcttaatttatatccctctaaaaatgaaatgaaaagtgattcaaggtgattgtttcttttttcaaaatgttggatgctaaagtcttttgcttttaaaagaggaaaataattaaaatcacccaacaaaatgcatttttcagaagccgagactaaaacagagagttgttcgaccaatttttcgaaatcttcttgtttttcatgggaggtgggtctatagaccaaaataaaacgtatttttgtgtggttaaggggtgaaaataggtcaacacaaagaatatcggaatttttgttttttgtagttttgataatttcaaaaggaattaaattcgatattatgaaagcaaccccgccaccttttttgttaagtctatctgatcttattatagaataggggagattttccaaaatttgggggttttctattttgttactcaaccaactctcagatacagcaatgattttaaacctattttctaataacaaaaaccttaacttgtccaatttgttcgccaaacttcgtgcattgaaatataaacaatttaaaaaaggaggtgacctcaaaagtttttttcattgcctccgcgtcgcgtcgtgatgttttcccccgttttcttctttccaaattccatccacttcttttggcgctgttcccgctcaatttccaactcctccttcgtcagggatggcctgaccagaagacgctcccatccaggtctcttcttcagctccgtccgacgacgcccccactgcatcagcgcaaaacgttggaaagttgaagccggcaggaccaccttcaccaagcgcggtcctttcctcttctcgtcaatcctcctgcccatcctgtagaccatttgcgggcacacttccacgtccagccggtccaacacttcctccaccgttttcgcgtcatccttcgcacgcagtgatgacacttcctcctccgattccggaagaccgatgagcacaaggctcctttttcgttctttctcctccgcgctgccaatgccattgttgttaattttgcgctcaatttcacccaggcgttccgcaatggcgctgaactgcgcagtcatttcggttgatattttatcattttttaaatgaaaatccgtacaaattgagcctagtaatcccaaaatccagccttttttgttgaaaatctgttaacaaatttgtattattttcacttgaaataaattaaaatttgaattttttaaaatttttttgaatttttttaaaaattccctgttggtcccggttcccggtcccggacgaaaatcgaggtccccgtcccggtcccggcttctcaggtcccggcaagtcctggtcccgattttgccaaaaattcccagtcccgtggcactctacaaaaaataaataatttatagtttaactctaaaaaaatttaaggaaaataaaaatggtttaatttaaaaggaacaataaaagaaattaggaaaagccagaaaacccattgaatttcgcgaaaacaatgaatttttttagaggaaccgaaagcaccacatgtggattcttattgaaaaatcaaaaattctttttgaaaatcatctgcttcgtcattctttttccatgtcgcttttacctcatttaatctttgtcggattatcgcactggtaatttattatttaaaatcagcattattatttctatgttttaatataaaaattacattaagaaaaaagtagatttggataatcctaggatggtcaatcactattttaaataattgcatcataatttaataataatattcaaattaaatgaggtaaaaaatagatttggataatcctactgatgatcaatcaacattttaaataattgcatcataatttaataataatattcaaattaaatgaggtaaaaaatagatttggataatcctactgatgatcaatcaacattttaaataattgcatcataatttaataataatatttcaatttaaatgaagtaaaaaatagatttggataatcctactgatgatcaatcaacattttaaat

SEQ ID NO: 2340 - DNA, 3657 bp, Heterodera glycines
cgaaaatgaaaaaaaaatattcaattttatttaagcctttttattaaatactcacggatgctttttcgagcttatctcagaactatagtcagttcaagaagcaaatttatagaatattgtttttattattaaatatttaatagttcttatttcattcagttattatgcatttacagaatatttttgcgaaaaattttattaataataacattaatttttatcctattaagtcccggattataccttcaagatgttttttctttgtattccattggcaattaaaatttcattattctcttttttcaatcttatttagttcttttataaaaatgaatgatttttaatgattttcaaatccgattttagtccctctataaagaagagtgatttgccattttttcatttaataattatttacttttcttaattcgacaatacctttttaattagaaaacaaaaatcaaatattttttacaattttttgatttaactgctatttgtctttgtttaatctattttaattaggtcgatgataatatgctaattgcatttatgtaagggcagcaaagaaatcaaatctgtgaatattcaatggaaaaatatgaagcacatcttggaattatgtattttatgctaaacaattgacaatatgacaaaatatcagggaaatttgaagaacgtgaacgtacagaatgccaaaaatcgaaaagatttggatattttgtacgaatatttgtacagagaatatgccggaattccaacagtgaagccaaaatttgtatttaaaaatgaaattgaaattgaaggaccaataatttatgcggtgaattatttggccagaatttcgcaatttttttcaaattgaattattattataaatacaaatttaacaatttgttcaattcttattttgatccaaaattgttgaatgaggagaggttgaaatacgaaataaaattggaaaatcaaccaaaattaccaattaatgaaatgattttgcaattagcaattgacacagcgaatgaatgtcaaacaaataaaagtttagacggaataattcgacaaaaatttaacaaaaaattggaggaaatgttcaaaaaggcagaagaaaaggcaaaaaaagatgcaccatcatggaaagccaataaaattaatgatgataagcatgaaataattttggatacaaaattcgatgaccaaaaaacattggtgagacttaacttaacattcaataataataataataataataataatccaaatttagattgaagatgctctattttcggaatttgtcaaaggattagcaacaaattggaataaattttttgaaatggctaaagaatattcaaattatttaagtcgaaggaaaaagcaaagaaatttttatgggtattatgatgagcaacgaatgatctcttatggattagacgaaattgacaaaatgaaagagcatttgacgcaaaaatatgaagcacatcttggcattatgtatttgatgagagagacttggcaatgtgaaaaaattgtggatcaattaactaaatataaacggaaagaatatttggacattttatttgaatatttattccggttgtacgttgaaggtttgtttgaattttacataaatttgaattttttgatttaaaaaaatttgttaagctaaaaacccgaaggtgtcgaaacaattgccaccactggtgaagccaatatttattatgggagtaacttctcaaggatattcttacagactaattgaaattatcgaaacactgaacaccaattcaaaattgttttgggaaaaagatgaatatgccactttaaaatttgaattggtaaatgaggaggaattaaattttgaaaataaagaggaaaaaaatttgttccataaaaatatacaaaagggaaaacaaattttaaaaggaccaacggacattgaagaaagaattcgggaagaatttgaacaaaaaatgaaaaaaatgtatgaaaatgctaaagaaaatgccaaagaagaaaaggccaaaatggaaaaagcaattgaaaaggcggcaaatattgacgaaaagggagctctgaaagatgaatacaatgaaaaattcggcactttcatttcttcgccatttttataaaaatgcctttttcacaaaacgattgactcttctggtttttggaattttatatgccttttcctttcgaatgattcttctgtcttttttcaattttcagcttattttttgttttgttattttccttttcttttttaaatatatatttgattttatttaaacttttttcgaatgttttcatagtttaccataaaaaaaggcggcgcgcaacaattttaaagctgtataataagcaatttatatgtaaatttaaagttctgaaaaaaagtacaatcaatttttatttcatatttccaatgaaatggctaattattagggctgctaattttatgtaaatacatattttttcctggcttctccatgctctaattagtaggaaaaactctttcttttttgtgtttgcgaacaaaaccgggaccgggccgggaattcccggtcatccgaggtcccggtcccgggttttgaaaagctcaggtcccggtcccggtagggcaaccgggaaccaggaaaaacaagcactggtaagaacgggggtctgagtgaaaaattagtgatgaaaattggagttaaaatggaataaattttaaaaaaaaataattaatcgtaagcaatttacttaaaaatcatacaataaattcattttaaattctaattgtaagttcaaaaaaaagtgatgcgatttggcgctcgagccgactccaaccgaatgcaaccgctggagctcatatgttatgtgcggctgctagaaccaacgacatgttctatgccattgccaggccattgtctattccaggcacgtttttcctgtcccaccgctgggtcccgcgaccgttcggatgccaattgaaagaataatttttttttagattgctgctagcgtgggatgttgcgcggtttaacttcccaaaaattgctaattatgaaaaaaataaaccacaaaaagtggaaaatgttttatttaacgtgcttttcaaaacaatttagaattaccatatttattaataggatttatcaaatttggagaatccaggacccgaattggagcaaaaacagaatcgaaaaaaaatttggcgatttcgctcaagccgactccaaccgaatgcaagcgccggaggagcgcccatggggtgtcgcgtgtgggtgtggcgactgcgatgcgcgcgaggccctttgccagagcctatgcgtatgcgcccgtctttgccgttaagctcgagacggcgagtggagcgcgaaacggcgtcggcgagcaatcgcacgtcgtcactagcgagttgtttattttatatacagtgagaaatgggcatttcttttttgttatgggatataaaagaggcgaggaatgggtgccaaaagtgggctgggtcgatgcactatttctccgctgcactcgtttctttaccgactaattaagcaaatgattatgtactatttcttgcatttttgaatatttgttcccttttgttaaattttaaaaagacattatgatcgcggggaaaaaactttattggccttttaatttgctgaaatt

SEQ ID NO: 2341 - DNA, 1185 bp, Heterodera glycines
tgcagggtgtcgcgattgccccttcgcgaaaatcaaataatttgatttgcaattatgcacaaattgtgcaaaattgaattggccccaaaaaccaaaaaccaaattaaaacaattttcaaatttggggccaatgttcgattgagtgacattccttccccaatccttatcaccggctgtcactccccccagcaattctccgttcctcccgccttatcagcttcaactcgcccattctctccccactttttggccaatataaataagtgttcaacaccagcgcttcatcaacacaccaatcatcagcagcacaccaaagtgctgcttcaactctctctctctctctctctcctcctctcgtcccccacaattgttccacaagcgccccgctccccaatcaatcaccatcacggcgccccccaagccatttccatgcattgattgcgccccctcacacatttccgttgttgtactgctccaactccttgctctcccaatttcccccattttgaccaatttcaatgcaattttttgtgatgggctaatagggccaaattgttcacatttttcactttgtggcccatttggccgatttttgcccccctcaattgtcctcccccattgttcacccatttcgggtttaattacccaagtttgagataatttggtggtaatttttctgtgcttcctttctgtgcggcccaatccgaccgtagtcccgtctcgatcgcccccggcccctttgtgctctccctccaacttgtcaaagtcctgcacccaagtgcaggcaattgtcggactccaccgcgcccacacccgcacacaaacaaggagttacgacaacttgattaaaaaaaatttcatgactatacttgcgaacaagcaggattaatacaactcgaatatgaattcaaataattgctgatcgaagaattgataagaataaagaatttatttcattgaaagaaatcaaagcaagaaaaaattttgttgattttttttttgcaaggatttgacagtcttaaataatttctgaatttaatttaacgtcattctcctcatatttctaaattaagcacaaagggcatattcaaaagacacaaaacctttgaattttctggcaattttaccaagctgtattaaatctaaaattatactatgctcatatctgttagttaatgcactaat

SEQ ID NO: 2342 - DNA, 821 bp, Heterodera glycines
ctctaattacgccaaagaatctgattgtcgttgccttccacaattcgttttattagcactttattgctttatttttattccaccattccttcattaacaccaagcattttgtttatggattgaaaaacgaattatgtgaaccaaaatttattagtgaacataaaattaagtttcgaaacggattagtatttcatttctcatttgtttactccttttaaaaattatttgctgaattgaccttaacgttcttgggtattatttggtagccccaagaatcctctaaatagtctcaaaggctgaaaaatgcacccaatattatggcaaagattcagaaaatcaattttttgaagttttctggtcaaaactttttgaaacataacgaaatggtcatgtctctctcttttttatggtcgtgtaaactggaatagaacacaaacatttgcattgttattaaaaatccataaaaagaagatataaacagatagtaccacacaaaatttattaccttttatcactttataaaacggcagtctttttaatttgtcaatggtttaccgcttattttgacaaatgtaccaacaattggtcaatttaagccctccctcgcaacaacctccacaatcgtcctccgcgacccatcaaggaggtcatcatcgccacacatcttcaggccatcaccgttcgtctggaatgactgcttcttcttcgcgtgctccgaataggacacgtaccggagatgacctgcacattggcaagtacaaactgctgaaaacaattggaaaaggcaacttcgcaaaggtatgttattgcggttataagtt

SEQ ID NO: 2343 - DNA, 9461 bp, Heterodera glycines
  unsure (1)..(9461): unsure at all n locations
agggaataacgaatgcacagaacacaataccaccgaatgcccagcgcgggtctttcctttccaaactcacgaaactaacgaaaaggtacacaattcgcttattgtcagttctgtttactggcaattgccaaggtttcttcatcccattttcagaactggcatggacccggcgagtccggccgcacaatcactgagcggttccaacagtcagcagccccctctaaagacacacggagtaatgcgagcaggtaccatcggttcagctgcaggaacggcttttacacaaccgcagcaacaacaacaacagcatgttcaacaactttttcaacaacaacaaccaccaagcgctttctcagcgccgaacaccccaaaccaacaacagcagaacatttcccagcaacagctgacgccggcagctgcgcagttgggcacagcgaacagtccatgcccattgggcatcgaagaggtgaagccgcgttctctgcgctttacttggtcaatgaagacgacttcgtcacttgcaccggacgaaataatgaagtccgaagaacaaaggagtaaatgttacagagaatgcatttttagagaaatacgaaaagtactcgacagcaatggatgcgaatatgagcaaagggagaggtcgtcttttctgtgttttgaatgcattttttcctttaggtatttgttactttgtgcacacggcgacccaagcaaagactcattgatacaatgggagatggaggtattgtttcaggctgaatattttcggagtatttttttaatttaaaggtttgcaaattgccaagactttccctcaatggagtgaggtttaaacgtaagtttctcatttctttactgtcaaattttatcgcatacgttcttcttttaaagccctccaatcataacgttatttttatgcaaagttatataatgcgtatttattttattaagggatttctggctcttcgatcgggttcaagaacattgcttctaaaatcgctcaggagcttaacctctgacggttttgtgaaatcggatgctgcctccaaaccatttattgaactttgtcttcgatgttgtggattctgtttctcaaataactaattattgctaacattttcttctgcatgcttttgctctgttcgtgcttctctctctattcgtttgttttatcttttgccactatcgcttttttggtcggtcggtaaccaattttcttcagtttctcagcgacaatattcttattgttcgtgagtatttaaagataatttaactttcatttaaatgaaataattctacataaattgctataaatgtttggttaagttttatattagcattaataatattttgtgagagcacaaaaaattttgtttatcagggcgacggtgtaaaaaggtcgggggggaggagccggcggaggagtaaagggcaaaccttgaataaattttcttaacattcagaaaaaattcaccagagaaggggaaaaagaaaaatgatttctccatgttttggttttacgaggctaaattccctgtttttgcttgcccatgtccgccttaattcccaccagcaattatttgtaaagttgcgcactttgccaccagcgcacagtccgcccgattctcccgtccaacttctaccttattgattctaagactaattgggtttatactattttaacaaaaaatcatttgcatttgaaaattatatgcttttcaaatgaaaaaaccacaaatgtcattgaactaaaacccaaatttttctcaaaaaatcttaaattctttgacttatcattaacgttggaaggagacaatcttttattataagcaatttttacaagatattagtattcaataagtagagagtgttacggaaggacttcacttggcatttttttcatctgttgggacattccctgcagttggggagaaaagggtggactttccaaattgccacaagcgagaaagggtgggtgagagggtgttggacgctgattgtgagttgggctgtctagaggtggcgggtgccgaggaggaggacgcattcgcaggggacgacgattgatcgcagctggggttgcgccgttggaacagccgccaaccgacggtgtaagacgaaggccttgcggtggaatcagtcgaaacttaaaatgggaacacactcacaaaacaaaacaatacaaaaaattaattaattaattaacgggttttttggcaatcaacattttaaaaatgcctaaaggccgagaatttatttagattctaaggataaaatacttttgaatttaaccaaatttacagtcctttcgaacaaaacaaagttttaattttcaaaatttgatcaaaatcgcaattaaaatcgataaaaaatgcggtcctaaccattcaaaaaccttttgtcgaattcgggttagaagtttttcagagagaataaaaatctagggaaatatgtcttcacgaatagcaatccttgaagtttcatttggccaactcaccgtccgctttcgtttcctccgggacactcagtgccgccgtgctgatgccattttgtaagggaatactgcgcgaccgcgaatccaacgactgttgaagggcgattggagtaagccattccttgaaagaataacaaatttaaatgtagaaatcggaggtggcacctgagggatccatcgctcgacaaatggcaaagaaccggaaatgttggccaaacggttaatccacgggggcaactcctggcccgttagaacctgaatggaccaagaccagagtaattgcttaagaatcgctcaagtttaagaagccctttagagttcaatcattaccagctaacgagtaatccacgcaaaaattcttaagtggaccgtcttttagagaatcgtgaatttagttttgatgcccttggtgggatttccgaaccatacacaagagacaaaaacctggaccactccgctcataaattgctacgaattttaattctcaccttgctaaggatggcagagaaatggttacagtttttagtgatcaaatggtagctgtccccccggtactcttggcccaaattctgaatcattttgttcacatcttcagcagaaaaatcagtttcgcccaaaggaatgctttcccttgaataaaagagcatcagataaaaactctcaaacacaacaacctgaagttgaaattctcccccaattcttcagcatcgcgtggcgtattttcgaaaattccggaaaaggggaagggatgtccaccgtaggcatattctgaaagtgttttgcaaaatataagacaataaaccgccttcacatttaaagtgggaatacgttaaaatgcaagaaaatagaaatagtcagaccggtatcgtacacttcgatcccgctgtgaaacactccaatgcccaaactcgaaaagacgatgtcgttgagcttatacatgtcataaacattgaggaaaacaggcgcacgagccatcgtttgaaagctgtggctaaaatgaatcaatttttttaattaacaaggcggatcaatgtgaacattaaagtcaaaagcagaattgccgataaatattggacagggcaaacacaattaagagtacttctgacgataaatggaaagtggtcaagtttaaaaacgaatggtgggggtcaactgggcaatgtcaaatgggcgacgccaactgggtaacagcaaacgtaccgggcaagtactgcaagaacttgaaagataactgaggacttgaaaaaaaaattctgtcggcatttcagttatctgattggcctccagttagtatcgcacggtgtctctttccgaaaacgattatcaaggagttggtttttattttaaatgaattccctgaatacaaagaaaaggacaaaaggggaaggactccgggttcctccctttgttttgattgatttttattcgaactttacctttcaatactaattagcgcagcatttatgggaaggacccaattttttttttggcttaaatcattttttatacacttttttggtttgaacctgttggaaattgagatgaattcaatgaagttttaatgttattttaagtttgccagattaaaattatttgtttctatcgactttcatttccacaccgtcctttaataatatattttgcattttatttgtggcgttgtcgctttcttttgaattatgaaaatggtgtgcaacaacatttgttacggaattttgatgaggagaaacggccagaaaatccgccttttgctttgctttggtttttgccgcatttcttcgcttaacacacagccgcccattctgagatggggcgtgttgtttagccatcaaataattctccctctccccaccattttattcccagtgatccgctttgcacttaaatatctgatcgatctttttcaccactgattttgctatttctcagttttgtttcatttttactcacttttatttttactaatttttcagcaaatggcccacctcatccaggacggttttgtcgtcaatgacgcaacatggaaactaggcattttcatcaccgatatgaacatatcgcgagagttattcgttcgcggtgacatgaccatcggtagtctgatgatgcagttggtggggcaaattggtatcagaggcaaaagcagctccgctaatcagttcactgttcttaggcgagactcaggactggagtgaccattacatgtggtggcctgaccgccgtaagtggctgaaacacacgcgaagcacgttggaccaaattggaatcactgcagcgacttacttggaatttacaccgatgcataaacatgccaagtaaagggattaattattgcgtaattgtcttgttgattatttcatattttctgtaacatctttcagggtccaactccccgatttgcaggtgttcacatttaatttactttgttcaggcttttgattatttctctatatcttcttgacttttgtagattatcgatgcccgactcgatttttccgtgcccattttgaaggtcacccaaaaaatctgccaagaacttgccatccgtcacccggaagaactgtcgctgaagcgtgatattccgccagatattttgcgaaaaggcgcatctgtcgaatcggaggctcagattcagccatacatgaagccgggcgaggagtccattggacccggcactctccgaacggccaaacccatccgcgcttcaactgtcaacctcactagcgggcgaggctcacctgcactttcgcaggcatctgcaatgggccccggtcacttgtttaacgcttctgaaattggcacactgccgaagatgggaacgattccgcgcggaatgagccccggtccagccgcagtattcctttcagtttccaacatttttaaaatttaaatttgctccattagtatcgcgaagtgcttggacgaacaccggagcccggttactctgaaggaggcggtctcgaatgtgaccagttcgacgaaaatttgataaactcaccgaaaataactccgggtcgtgaaacattcagaccccaaaattatttggagaaagccgcgttgaaccggggatggttggactcatcgaggtgggccttcgctttaatcaaattatgtgccaattattaaacaggtcgctgatggaacaaggcatttgcgaaggcgatgttgtgcttcttcgttttaaattcatgcagtttttcgacatgaatctgagatatgaccccgtccgtatcaatcaattgtatgaacaggccaaatggtccgtccttttggaggaggtcgaacacacggaggaggagtcatcattatttgcagcgctgcaggcaggcacttgactaatacatttgaattatattattgcttcagttgcaagccgcgcttcagcgaaactctccggaccgcgaatctccggaacgtgacgaggtcgatgtactgcttgatgagttggtagggaccagaattttttctcaatgattaaatttttcttgaatttgaatcaaataatagtttttataaaattttcctgattataggaacagactttggacaccactgcctcactaagtcgccgtgatttaacatacgtgcctgagttgacagaatatctcaaatatttgaagtttttttccaataatgtttttgtatatttgtttttactttagacctaaaaaattgggttttaacaacttcaagagagcttactttacatttcgagacctttacttgagttattacaacacagctcaagatgcaaatggttataaatgtatttttaaaaaattaaattcattgtttaagggcctccacttggtcactattatctcaaaggtttatcattcggtgtccgcatatttcttgacttcaaacaattctaaaggttgcgaggtcagccaggatttgagcgtctcgcaaggaaagttcaacataaaattgcaagtgccgagcagtgaagggatgtcggaactgatattgaagtgtgacacggagcaacagtttgccaaatggatggttagttaccaaaatgagtattgacaaatttcccgctttctaaggccgcttgtcgtttggcatctcgtggaaagacaatggccgattcttcgtacaattcggaggttgaatccattaagaaagtgctgcagatgcaagcaggaagtgagcatttggttgcgaaaattttttggtggtaaaaatttgtggcgtctaaaaccattaggcggatttacaatttctattttacagtgctcaaaaatgtaatcttcttatttttgcctgattacctgataaactaattaaataagccctaacaaataagacacgcttaaaggggcagcggcagcgcaaaacggtgcacaaaacaagaagaaatcgcaaccggtgcagctgcccacggatttcaattcggaagagttcgtttgtcagcgatattggaagagatcggggaacaaaagcgtaagtcaaacagaggaccggggtaggggaggaaagaaagtgttaaaaagttttattcaaaagatgcaacagcgcatttcggatgcccattcaaacgtgaaaacattgagttgcaccgaagcgaagcttcagtacattcgcaattgggaggctctgcccgagcacggccttcactatttcatcgtcaaattcaggcattttcttttccattatacaatttgcgttttttttcaaatttaagtggtactatttatacttcaaaaatgccaattaaatgtactcatattacaaaacttattacccaaaactttatttacaaatggtttttgcaaaagtatgtaaaaaatatcccctaaactctaaaagtatcctgcttatgcctttttgattttacagaaatgggaagaaagctgaactcattgcggtggctcacaataggatgatgaaagtgaacagcgacaacggagaatcatcaaagacatggagattctctgggatgaaaaaatggcacgtgaactgggagataaggcacttaaagatacaattcgacaacgaggatgtcgaattcaaacctttgtcagcggactgcaaggttataccgaattgtaaaaaagaaagctaataaagatcaaacaggttgttcatgagttcataggcggctacatttttctctcaatgcggagtaaagaccaaaaccaaacactggacgaggaagggttccatcgcctgactggaggatggggatagaaaattttatttgtaaaccacaactgccatttcaatttgtcatagtttctcacatttaaacaaaataaaagcgacaatatgcaaagtacgagaaggtattcataaatgttacaatacataagttgcacaatatcgtaccagccccatctgaaatcataaaacgctttcgaaatcgcggtctaggagatatccataagattaatccagcgtcggaaactcggcataaaattagacaatacattacttcaaaatgtagtagatgtatttagaaaaacctttttcatcatcacatctatcattctgccaaaagtggtcgaattactaagaaaaaataaaataagaaaataactgtattttagaacacaccctaagtattgctgcatgaatttcttcgcgtgttcatgtttttcgaagatcagatgaacatttgattcactctcctgccagattttcttaattaagtcactttaatagaaatcctattatggtgccacgaacttttatgggtccgattttgctggcaatgacttccactcttctacaggggtcgtccaaacctgacacatttgtcacaacaactgctaggtacggtctcaatcggtttgctgtcatcttttgccgctgtgttccctccgtttcttctgctttctttcccttcccttcgttcgtttcgtccttttgtccaccttctcttgcataaatttcttttcggtgttggttttttttgcgcgcaatttcttctctcagtttcttttgttcttcgattttccttaggtagtcactgtcaagtccaattgccttcgcacattccatcgtttgctttgataaatgcgcctaattcacaaattaaaaggaattgttgccttaagtgtgatacaacctctttcgtctgtctttgcgttcttttgccttgtgaaatattgtgcttcaaacgccttttgcgtgtcggtggcgatgtctttcgggaatttcgactgttcgatcgcgtcgaagggtgagaaacgggaaaggaagaatcggaggatggggaacgattcttcgggtaattgcgtggaggaactaaaacagagttcgaatgagacaacaaaagatgtgataaaataatacccgaaatagtttttttaacgaaatcatcgaccatcaaatgccaattttggctgctttttgaggaaaggtgttgtaactgattgctgtgaacaaaggactggtcgtgagaagtattgaaaacagatgggtttatgtaaatgttgcttgcaattgttggattaaaagaagggtgataatgtgcgacgtttgaaaattgagacgttgagcaaggaaattgcggagcttttaaaggcaatgcattggatgagttaatttatccgagaatacctaatagatttctcgaagcattctgcgaaaattgcatcaatgggaaatcgttcagtccggctcgctggcttatattttgtgaagtttgataattaaaaagctaaatcaataatcagtcgaacagttttcgtggtaaataaacatacattggtgggaagtacgactgaaaaagcattgagacttggagctaaattttcctataaattattttgtaaatggattacatcattattaataagccaaagatcaaaaagtagcaacaatgaaattaaatttttagtaattacgaattaacatttaacaaatttgaagttaagaggaactcaatgttttatttaatatnccatttttgattaagtgatgttttgcaaatttagggtttaggtaacattggacg

SEQ ID NO: 2344 - DNA, 848 bp, Heterodera glycines
  unsure (1)..(848): unsure at all n locations
aaaaaatgatttcgactgaggatttttcgaaaaaatgtttaaagatttgaagaaaaagttctaactttttgccaaatatgcctaatttttcaaaaaattatgcgtttttgtcacttttttatcaaaaaaaccacaaaaatcctcaaattttctcaaaagaccacaaaaatccgcaaatcctcatttttcaaaaaaatcctctttgaccctctaaaagaccacaaaatgaggaaaaatcctcagatatcacagctctgtttattgtgaagcatttgtttttcatgaaaatgtatgtgctaataaaatttgaccatttctttcctttttttattcattaccaaattgaaacgctcaaaaaccgtttattaatgtcttcaatttttaattaattccgatggctttgtttcactttataattaattgcctttcaacattgtacagcaacaacaaccgatttcagtgtcactttggcgtccgattgaacgccaattaaaaaacagcgcaattttgacggccgaacgcccaaaacatcactggacgaccgacaaacaacggaatcagcagcagcagccattgattttcaacaaattggtgagggagttaattcattggaataatttggctttctaattactaattagtgtgtgcaaattatctctcggcttttcattatccatttctgccgatcacctaaaaatggacatgtattatgaaatgttatgactcattgagcagttgttgtcttttgtgattggttgtcatcgctctgtctgatcagttgatcacgtcatcagaaaaaccccattncaaatgaataggtcgctcgagcgggaacaggacaaaatcac

SEQ ID NO: 2345 - DNA, 4320 bp, Heterodera glycines
gtcctgattggctgtcccccggggggtggggaagggactctcgagcgtttttgccctcactaatcacccattaattcttaatcttccttttaggttcacacaccgcaggaggaggacagcagcagcatcagatagaggaggaagagcacagcagagtgaggacggaggaggcgaacgcgtgactgacgaaggaagagcagcgggaggagggcggggccaacagccgacgaccgaagcagcgagaaggaggaggaggcggagtcacaaacagcgaccgaccggcgaacgaccgccaaccgtcgataacaacaaaaaaacagcacagcgaacgggtcggctgctggtgtcccaaccctcaatcgatcatcatcggccggcgaccgggcggaatagcggcgccggggacagcgacgacagaaaagaggcggcggaggcgagcggcggcgggcggggagcaccccaattgatgcgctgttggtggtggttgtgctgctggggctgttggttggccattccttcgaccatcgtcatcatcatcaccaccacctttactagcaccacaaccgcagcggacggcgactactctttggttgaccacgagcaggagcagaaacaacagcaacaccaccaccaggaggaggaggggtcgaacgcgttcaaatcgttgtttttgttggcggtggacaaagatcatcagcaagacaaggagtttttattgaacgacgacgacgacaacaaccagcaccaccgagtggaggaacagttgccgttgttgttcattgttggcagcaccgttggcaccgcgttgcaccgactgttgttgagcattgcccgcacgacgcccatgggttggcccgactggctgcagccgcacattggtcagtctcagtgttccgtgtcgatccaaatgtggcgatgtttctgctgctccccgttcatatccaacgaagcggaccccccccccccccccaccgccacttgagggcttttattgctaattgactataattagaggcaattactacgtgaattcatttccatttttcgctaattggttgggattgttttccccaagtgtgtctgactgctggtcaattaccaaatgtttgtttgttttatgaggtaatccgtaattagcgaatgctttatccctgtagataatgtcacggatatgaatgtcttttttccaaaaatccgctgcattaaattttcaattcttatccctcgctggttgtgagctttagtagtttttgttaatctctttcttctgtgtgccctgttttacaaagtatgcttttcaagactctgatttttcaatcaattctccaataaaacactatgtggctttctctcaatgaaagtgcatttgaaacaaaaatcaaatgagcctcatttttctttttttgcgaaagaaattaaaagccatttgacgaagtgatgagtcacatgcattttaaaaatagaaaatgagacaaaatgcaatcccctattttttgttgcacattccacaaaaattacaatgattcaacaatagcaaatgtttttgctgcaaattcggggtaactttcgcttcatttcggccggcattttcatctattttcaaaatgccgaaatttccaacaaaaacaaatcccccattttcagatgccttcgtgctctgggtgaatgggttgctcgagtattggcatctcggctacttggaagtgcgttgtttttgagaggggttgcaaccccgccccgaccccgaaccccgacatttttggccattttcgggaaaaaccccgaaccccgacgcttcataccccgacaaccccgacccttaaccccgatcggggtcggggttaaatatacacccctaagaatggcattttcgtgggagaaaatgcaaaaaagttagacgaaatttgaattttttttaaccatttgccaaatttttattaaataaagaagatttgctcaattttggacatttggaatgtggtgtagaggttagtgccatgacattactttctgtcgtgatttcgataccgttcgacgttttcttctttaattattttccagggcccaaaaagtcataaaccttattaaaaaattggctcaaaatcgcaaaagtttagcatattttggacaaaatctgttaacagatctaaccaaattttcaaaattttcccgcggcgcctatcggcaccgccggacgccgtaccctttctccttaagtctttagaaaagagcgacgtgaaaaaagatgttatggaaaacaaaaaagtaataaaaattttaaaatttcaagaaaaaaattaattctatacaaaatttctgataaaaagaaataaaaaaatataaaaacaatacaaatattattatggaaattaataaatattatttccgaaaaaatattaaaaaaattttgactatttggcataaggcaaaaattgaaaaaccccgaaccccgacacttccaaccccgaaccccgaattttccaacctcgacgtcggggttgcaacttgcaaccctatttttgagtgttccgcccgtgccattaatcccccgtccgtttcagtacctcgtctggcttctcctcccaattttcattgtgttcgttttgcccattgtttttctgttcttcagctacggttgtgtgattttcttgcgcatttacaagcatcggaatcgtatccgagaagcggtgaggggtttttttgccgttttttcagactaataaaaacggattgacgagtttttgcaccgatcagaggccgagaggagtcggcctttttggccattagtcatatgaaaagatggcttggcactgacctacgttatcaatcagatatatgtccaaaaatgcaaattattattttttatcgaattaatgacatttttaaatttattttttggtaaaaatttaatttcaattttcgcttttctttttttgtttgcgatgcttaaaaagcactctgttgaaaatgcattaaacaagtcaacatcttaaatttccaacattaatcggattaaattctgatgaatttcaagcattgaaacactgtttttttttgtggtgatgatctctgaatcttgaaattattaccgtcttttttacagtatgcctccagcgtttgggacggtgcccgggcgagcattgccagcttttgggaaggcgtcggttacctttggcatggtgaggaagtcgcgtgagtgaataaatgaatgaatgggtttttctcgatggcttattttttactgatcccgctgagattagtctctgatcactcacatatcataatctcatcactgatccagatcgggtttctcttagacgctgctttggtgatataaccggggaaaccagaaaattttttctagcgatttttcaaaattatgcgatgaactattaattaactttttttttacaaaaaccgctgaaatttttaaatatgacctgatcaattaatcaccgataaccatatacgcggcctgctgatctgatcttttttctactctttttccgatcagtacttttcaggttgtttggcttgcgtttttaatttaagcctttgaccagaaccagaaattttcactttttttcactttcctttaaacccccaaaattcccatcaaagttaaccaacaacaacaaactcataatcactgcctgataaataaatcacttttcaggctacgaaattgatgggttggagaacattccggacgaagggcccggcatgatcattgcctaccacggacccacgcccatcgatctctattatgtggtcagcagttttgatagtggtcacccaaattcatgccaaaccgaacaactttgaacagattgccaaaggcattctctacaaaaagcgcaccattcactgcgtggcggacaaatttgtgttcaaaattcccggtgaatattatcttaaaagggagggattttcagcatttttggtaaaacttatttttgtcgagactctcaacttacaattattgccttcccccatgtccccaggctggaacatgatctgcaaggtgttctgcatgacgcccggcaccgtggaggactgtgtggccacgctgcgccagggccatctgctgatcatcgccccgggcggcgtgcgcgaggcgctcttctccaacccggtcacctacgagctgatgtggggcaggcggctcggcttcgccaaggtggtgatcggcgccggcggcgtggtcagttttattgccattcttgttactgtttttggcacaaatttcccatggcatttccatggaacactgtgattagtgccggccatgtccacccagttgggcatattttgtaaatc

SEQ ID NO: 2346 - DNA, 1986 bp, Heterodera glycines
  unsure (1)..(1986): unsure at all n locations
caatctgtatactcctcgaactccccccccccnncccccgcccccctctaatctaacgcttctcttgtcttcaatgaaactgcgttctgagcaaatgtcatggccagccttcttcagcccgtcattccgatgttcaccgaaaattgccgagaggcgttccgcacgccgcgctggggccgtcgcctgacgcggcccatctacgaacacacgcggctgcccgtctgtcccatctacggcggattccccgtcaaaatggtcacccaccttggcaagccgttgaacttcgagatcggcgacgccgccatgacagatggtcgaccgccagtgtccgcggaacagatcaagcgggcggtgcgtgacgcggtatgtcgtgccgcgttccacgccgatccctcccggaatcccttaaaatttgccagaaattccaaattctatttttgacgggtgaccatgtaaatctacggttttttaatggatttcataccgttttttggcacgctttttcaaaaaaagtaagtttttggggaaccaggggtccggcgatgccgatttcatgtcattttttatgatttcaaaaaacatgtatgaatctaatcccccctggtaccacgattccaaggtggatatccaaggactttaggattcgtagtcggtcactgtccggaggctctattcattacatatcgccacccccccccccccatttttaggtggacgtgctcatccaacggcaccagcgtttgccgggcagcatttggcgtgcaatgttccaacggataggcgccaagcggacaacgcccagcgggctggacgacggcgcgctgctgccagccgacgcggaggcggcacgcaaagagtggcggcgacggcaccgccggcggaccgaccgtgaggacaacgagctgcagcaaaatgccgaagatgacgacgacaaggatggcaccatcgatcaatcgcggcggggacatttcggcacggcggtgatggtccgggacgaatcgtcaattgttgtggacgcactgagcccaagcgacaaagagctggcggaagtgccgttgttgctgccttcgtcctcctcgtcgtcctcggcacggcatgccgaccggcggttcggcgacggtgaggatttggaccgggaataattgattgacgcacgcgggatgaggcacaatttgatcactaatgttcagtcccgccggcggcaacgggctctgatcaaaatacatatttgcgttattaatgtgttctctctccattttcgattttctctgttttttgcgcgccttccattgtaaattattttgctttcacatttcgtgctttgaaaatgattttgtgtttttgtttgttaattgaaccagttaaaaaatgtgcagttttcgtttgcaacaatttggtttggttggtggcataaattggtgtcatgacaactcgtctttacttcagttggaccctgaacgtttggccccagacatgtttttggctataacttttttctttgtcaaccaaactcaacaatgttggtatcattcgatagccctaagggtaatagtttagatgctgtctctctttctttagagaactatctctacattatatatatgctaaaaatacatttctactgcgctctatacaacttttttttcgccttacagattttctttagattttgtatgaattttatacacaaataaggctcactcaaaagttatttggagaaaattatgtgaatttcttttttctctttttggcgtactattttcatgtctctaacacatgaaaaaacataaattcgaaaattctaatgattttggttataaggggacaaaatcactagtgacatttagaatcaatagaaaaacgaataaatttagcattttgggtagaaagagctgcctaggactttgattataacatgataaaagtttgaaattcccacaactttttttctgagaagacaaattacttaccattcgcttagaaaaa

SEQ ID NO: 2347 - DNA, 2678 bp, Heterodera glycines
catattaaaaatttttcgtgggagaggtaaataaagtgcacccaataaattcaccttatgtaaatttttcatgaaaaagaaaattctaaaatgaattaatgatttttttttgtaattttggggcaaaaaaaaatgtttttcagtaattcctttattccctgcttttcctcgcacctgtgaccctgagcacgggtgcgtccaggtagtcgaacgcgtccgactcggccacctgcgcggacagttcggcaccgatgccgcagaagggccagcccgtctccaccgtgaccatgtggtgcgtcttcagcaccgaacggcgcaccgtttcgaagtccaacggcctcagtgtgcgcagattgatcacctttggagttgaaatgaaagtaaactcaatcgaatcgaatgcaaaaatttaaaaaaaagcaacaaaaaagtgccatgattttaccaagagattttaatcgaaattttttttgccaaattttcttagatttttcttgtaatttttttcattttttcgatcatgctccaatgccattgtttcccaaaattgaatgccaaaagattccgtgtgccggcccacctcggcctccacgccctccgctttgagctgatcagcggcctccaaacagttttggaccgccttggagtaggagaccagcgtcacgtgagcgccgacccgttcaattttggactggccaatgggcagcacaaaatcggcattgagtacctcgtccgagacggggaacggcacgccgtacaacagttcattctcgaggaaaatcactaaacggagtgaaaatttgggggaaaaagtcgcaaatttttgttaccaggattttcgtcacgaacggcagcctttagcaaacctaaacagagacaaataaattattacatatttgatgcatccaaaatcctcgtccggttattttctggcaaaaatatggcgataaaatattttggcattttaccgagaccaaaatgtcatcccttttttgtcgttacaattcctttcggtagggcaaacaaatatcgggccattttggaattttcatagcaacaaaatttggatgaaacaaccctctggtgccccctttttggttcatcccatggccaatgccctcctctccatggttacttacccttggcatcctcggcgctgtacggcgcgaccactttcagtcccggcacatgggcgtaccatgccgcatagtcctgactgtctgaacgagaaaatggacgcgttatcccaaacaaaaaagccaacgttgtgcagcgacgccggcagcgaaaccattggggccacggaaaacaattgggacggtcacctgcaaaaattttttgttaaacttttaagcgtcaaaaaccaataattggaaaaattcctaaaaccacagggggaagaaaccctattaattggtgatttttcgaatttttttcccccaaaaatcaggtctaaataatgtccatgaatagagaaccatgataatgtaaaattcgtagctttcactgacccttcccgccgacatgtaataggttttgcccgcgctgttcaccagctgatcaattgcctgcatggcgaagttgaacgtcatgaactcgcagatgggccgcaggccggcaaacgcagcgccaacagcaaggccggcaaagcctaaacccatcaaaattcaatgcaaaacaaacattgcaatttcactcagataaaaacgtataattcatttttgcttatgtcttgggcaagtcggaaataatgcaaatattttgccaaaaacattggaccgttcacagttgaataagtcccgataaattggtagtgaatgctcggacaatttttgcccggaaggaacagctccgacccgacaggcacccgcccaaatttagggcccgatcggtaattttcgttgttttttcaattttttgtggccagttatcccaggtcgatggggtatttttgaaaaatacccaatcggtacggtcccagtacgagtcgaaaaatttgttttaaaaaatcaaatttggacgcacccatttcagtgattggtgtgtccacaatgcgctcatcgccgtacttcttccacaagcctttgctgatctaaaaaaacaacataaatttagaaaaacaaccatttcatgccattgttttcaaaattgaaaatgaaaaatttggcaaaaattagtgcaaattgtctgtgccgactttgtatgcgccgtcgtacattgccacctcttcaccaagcagaaacacgcgctcgtcccgctccaattcctcgtccattgcctgcaaaagaggggtaaaattgaatgacaaaaatttccggttttaatttgtattacaaaaacttatattttcattttcggaatcttttcagggttactggacgacgaatatgaaaaaacccaaactttcttgaaacgatttgaattttaaaaaccccaatttaaaacccaatccgatttacggtcgaatttcagatcagaaaatgatgtaatcgatatgccgaatacatgaccaaaaaccctaaaaacttgcctggtttaatgcgtcgcgaattgtcagcgtcgaggcggcgcgcgtcgcaccgacgcggccaaacgaagcggcgacagaaagcgaaagaggccaacgacgggcgaacaaagtgacaaatttcatggcaaaaatcagagaaaatgtaagc

SEQ ID NO: 2348 - DNA, 4610 bp, Heterodera glycines
  unsure (1)..(4610): unsure at all n locations
aacgtaacgccaaaacattaattaagcactaatttaaaaaatacaacgatcaaggatccttaattttcctttttgttttgtttttattttgatcagcttaactcgctacaataatataaatcggagtcatttctttccactgcaatggcgcatcgatttttaatattattgcaatttacctaatttatttacaattttgattcgatgaattcacctattaataaaataggggacaaaacaccgagagctgcgagttcgaccccgtccgtcatctgtgccgggcgattcgtgccctccccctccacatattactttcaaagcacccaaatttacaattaaattttcgcaattattagattagcaaataaaatataaaatttcgtcgtcacaactttcggcttcattcactttttcttccgcccttttcctccgccgttccttccgcttcgtcttcccttccctcttcctgctgttgttgtgcttcttcttctccctcctcctccgcttcatctcctttgacccaattctccattatgtaattgggccaacacttcgttttgatcacatagcctttgcgttggtcaaaacgacaccgcacaatgcgcagacggtgcaccgtggcaagccgcgcgttttcctcgtacggcgcgtcccacacttccaccaagtcgccctgctctatctgtgcgatacacagaaatgagtatttatttgttgatagtctcggagtcaattcccgagagtctcggtccggaagggaactaattgtaaatactttcgtagaaagtttgaagaaaccaaagattactaaaaacaaaattttttgaaaaagtattcaatggtaaattaattggtcattgacccatttatttgttcacccctcactattttttggatataaaaattgaaattcaactccattttgctcaattccgttcaattgttggcccaataaaatgtccgtgaatgattaatgcgtccaaatcgttcaattagcgaataaatacttttcaaaattgaaaaaaatcgtacctcgtgcgcctttttgatgaccacctaaaccaattggccaatttattttattatttttttacgttttcctaccgtttcattgacccgaacgcggccctgcaaaatccaattgccaagtgcgctgaaatgaatgggaaacacaaaagaaagaattgtttttgttttaccgcactttctcaccttatgctcgttttgagtgccactccgaccacagtgtccaatctgaacaaaaaagctggaaaatatgcacacaaattgcggaaaacagaaaagtcgtgactctcgggaatttgttttttggttttgtttagagcctagccagacccttggcttcgggtggaggggggactgaattcaaagtttgaaaaaatttttgaaaaaaaattttttttttaatctcgggggggggggggctttagtcccctcacaatcagaagaagaaaatgccaaaagaggggcttttgtctatacccgctacagttgcttgttgtataatgtttcctggggatctatcggaaactgtcaatgttggaaattgcgcgcatttggtcccattttgggttcgaagccgaaaaattatccgtttttttttggcaatttcatccaatagagatagttttttattttgatgccccccccaattttcggcacctccgcgaaagcattgtgaattctttggtccggcaatcggttggcattccttcgtcctcctcatcttcttcttcctcctcctcctcctctgcttcgtcgtcctcctcatcctccgattgttgtgccgttctgttccattgccgtttctttttgactgtcgcaaatcgccgacgatcgatgggagcgatcagtggagacggattgagacactgctgctgttgacgatgagaaattatttaatacgacaaatgcatgatggtatgtcacaagcacttaaaaatctgcaaaaatggcaccgagggaaaaacaaaattttcggcacgctttaattttgtgttaccgaaactcatttcatggaatctgttcggggttgctggacgatgaaaatggcaaaattcggacttgcgtgaaacggtttgaataaaaaattatcaatttaaaacccaacccgatttacggtcgaatttcgggtccggtaacccatgaaattgattgaaacgatgccgaatacatgaccaaaaaccctaaaaacttgcctggtttaatgcgtcgcgaattgtcagcgtcgaggcggcgcgcgtcgcaccgacgcggccaaacgaagcggcgacagaaagcgaaaggggccaacgacgggcgaacgaagtgacaaatttcatggcaaaaatcagagaaaatgtaagccaaagtccagttaggtgcctaactttgaattatgtataaaataccgtttttgacgggaaaattccgttaaaaataaacaaaatacactctttttttgttgaattttatacggaaaatgtcttttttccaggggaaaaacggacaaaagagaacagatggaaaacaacttacaattagctatgtatgtgaattaaataggaatataggtgaagccgaattactgaaaaatgcaacaaattaacatggaaattggaagggcttttttatgccaaaagcattgagaaaagcatcacaaaaaaaggggggatttgaatggaattaatgtgaatgaaccaacaaaaagcggagagagaaaagtcaatggaaaacggaacaaaaaacagtaacaaaaacaataaaaaacagaaaaaaacaaattagctgcagcagaagcgaatttttggtggggatttaacagaattagaagaagaccaatggaaaaaaaaattaaaaaaacaaaagtaataataataatcatttgttcgtcgtcctcattaacaacatggctaatttgcgcaatacaaattggaatggccgttgaacaaaaagtgacggcccccatttctgccaccatcaccggcaaaggtccgtgccgtcgtcgtcaccaccttgtgccgttgattttgctgtcgatggcggtgacagttgtttttgctgctgctgttgaatgccaatgccatcctccgccgcgcgcagtgacacaacgggcacagcactgagacatttgctgaccgacggctccaactgttcgcccagtgtttgctcaatgctaaacacaaaaaggatggaaaatgagacacgggtccatgactttttacatttttaaaacccaaaaatctatcgtcgaacaaaagaagaacgggagttggacgcagaaaatttggaaattttttgggaaaatttaaaaaaaagtaccaacattttgatgctcctctccagcatgtcccgctggttgtgtttgatgcttttccgtgcctcgtccatgcccatccatcgtcgttgtcgcccattctcacaattttcgccccattccgtgaacacttcgcgcaccgtcaagaagaacagtgttgtgtggtgaaagcgctggtcgtcctgaacaaaccaaaaaataaaacggagcaaaaaatatttggtacaaaaatgggtaaaatgatgaaatcggagtgtcgtgggcatgtatgacgagtagagttcgacctgaacctagtgtagagccaggcctgcatttttcctggaatccaggacaaggccattggatttttgtccgggaaatccaggtccggaactctactgacgagccatgggacaataattttaagcgcgcccctccaaatacggtgcggtcaaatcattttaaattgctgtgtcctcaatcatgggaatcggacttaaaaaatttaaaaattattttatttatttcttacaacgaattcgccgatgcaaaacagcactttgccacggatgccggcctcctcgcgcaactcgcggagcacagcctcttcagtgctttcctaaaaatagaaagagcgtcaattgcgacacgcaaataattttgtgcacatcatggggttgtaaccatgaacaatatgctaatttttgatgaaaatatgantaacaaaaacttctnaattnnctttcacaataanccntacatttttcnnaattttattttaaattttcaatnnatttnaaccccctcccctnnnattntcccancaanttttcanatttactcaatttctcaaaaaatttctnttcctnatacanncctanccnnctntnacaaatnttcaaactnttnctcaccatnttctccactcctccnccnnncancacccaatanccttcctcccccnccnctntccntccnctnaccattaccacttccaacncncccaaatttnnnnaccatcnncnnnccacnacnncntcattactaccnccaccnntnncaccattctcanccaatnaaannncaatccntncacaaaaancnnccttcaattttaaantaatcacancttnaccattttttatttaaaaaaaactaaacanttcantcccaaaanntatttnnccacttcantcccnnnactataattccatttnctttccataaaagaagggtcactcttttcaaaaatttttttttctgtgactagttaaggaaaataaaatggtggcgaaaagcattaaagttttta

SEQ ID NO: 2349 - DNA, 926 bp, Heterodera glycines
ctctagagtccattttaacgatgaatataccacagaattggggactcacttgccattttctaaaacaacaagaatgggaaaaacaattgcgaagagaattgatattttactatcatggtcaatgatgggttagggttttttatttctaattaatatcaccgtatttataaaaatactttgggacagctatagctgggccaacataaatgcattatctttcattctgaaatgaatttgaacagtctttgtgtactgtaattacttgagctcgggcgggaccggggccccgccgggacttttccgggactcccggcccactcccggttttattggacaacccgccgggaccgggagccccggaaaacgggagtcccagtcccgagatccgcttgggtcgattttccaagtcccagctccgctcccggtcccagccatttgggccgggacaaacagaataaatttcgcccagtgaaactgcctcaaacttgaaaaaattaatattttgtcgacatatgtatttaagttttttttagacaaaatcttctaacaaatcgtattaaaattacctggcgccttcgctttgcttcagtcccagaattgcttaggttcataaattttccagttttactacgtgtagataccatttttatgctaaaaaggttgtgatatattgaatttgttgtccttgaaaaaaaaattttcctattgaccaattttcttgaaattttgtataggcctatattttgaccccttctagcgattccaagtttattttatggaacttaagtttttaactcgagatcggctcttccgtttttacaagggaaaatctcgataaaatttttaaattcgcgtggttttttggcgttttgtccttaggcaatatttgtcaaattgatgatatatgcggcggtgaaagcaatgtt

SEQ ID NO: 2350 - DNA, 4471 bp, Heterodera glycines
ccagtaagtgtaggcacaaaaagctcaaataggtataaagttgaaataagcaactttgcaatttcaagacatttttcagcaacaaaagacgaaataacttctattttcctaattttatttgaaatgaagagaaaatttttgaaaaataaaatttggttgggacgaaatttgaaattttaaaggcagaggcgggttttcataattttgtaattaataaattttacaaaatttaggtatttaattattataatacactcattgaatttaaatgactaattaaggccaagatttcgaaatacgattgaagttatccgtggtctgaacagcttttcatttgattatttcgttgggttagaagaattggaaagaatcaagggaaggtcaaaaatactaaacttgacaaacgaaaaagaattgaattatggtaaaatttcaggtaaacggaagggtggcgggcactctctctccactagagaccggacaactggggtcggagggatcccgagtcgggatcccgactgaatcccgatcccgatcaatcccgaacattttggaaaaacgatcgggacggatcccgggtcgggatcccgaccgaatcccgatcaatcccgaagattttttttcgggatcccgcgggattatcgggatttgctcaaacccaattttttttacattttgtgccaagttttgttcaaatgtttatctaatatttataattgatcaattcgattgaagaaaaaaagggatgtgaattatatcagatttttatagaaatttttcaaaattgaatatcatgcccaaaaaatcagattttcaaaaatgagaacatttaacaacatgccttaaataattttattacaatttaatcaattaatatcaatttttgtattttcgcctcagataatcatttttaataattttgagaaacggaatcaaaaaatcagatttttaagattttttttgctgcaaattttttcaaaaactttagaggaaccgggggggggaggtcggcggtgccgataggcgccgccgggaaaattttgaaaatttgaaatgtaattgttaacagaatttataaaaaaaactgtccatatttagtgattttgaactaatttataagaaaataatgggttcttgggtctggtgatgtccgattgcaccgaaggaaaaatgcgtagacaacaatttttatctgattattggacagaattcttagaaatcgttgtgccataaaactacctaataagatttagaataatgttttagaaattaaaaaaaaataattctttttatgaagaaataaaagtcacgaaatggccaacgtttgcgtcaaattttgaaaattttagtggaattttggagacctgtaaaattttttgggatttttaagggattttttaagaaaaattagcaaatgacaatactttttaatttaaaattcaagatcttaatttaaaaaatgtagattttttgaaaaattatcgtgacttcagtcccgcgggatcccacgggaggtcgggagggattccgattcgggatcccgatgaaatcccgatcccgatcaatcccgatgaatttaaaaaatcgctcgggacggatcccgaggtcgggatcccgaatttaatcccgcgggatcccgaagaaatcccgcgggatcccgatcccgtctggtctctactctccaccgatgcctctgaaaaatttaaaatttttaaaaatatcaatttaaatgactaataaaaattaagaatttctcatttttcagcgatgcgctagaatgttattatttatgacaattttagaatttcgattaggaaatccgaaaaaaatttaaaaatagggaatttacaaacagtcaaaattataaacaaaaagtgctgggagactttgcatatgttttatttttttgcgaaattctcaagagagaaaaaatgaaattaaattgcatggaaaattacttccataaattatttattttgcattgaaattctaataaaaatatatccctaaaatataagtaaaaatccattgttttttttcaaataatttctcattaactctttgaagattaatttattcattttcataacaattaaagtagttttcattattttttcactcataattcttgcaattaaatttttgtttaatgcctaggaataattttaaatattttaagtagttcgctgtcaaattgtctacttctgtcggattatccattcacgaaaaagtttacggggaatgaaaattaaggcaaacttttttcatctgcttttggttgccatgattcaattcaaatatgtcaaaatatttttttattttaaataaaaaaccccattcattacgattcggggatggattagggatgaacttaatatatttttatggtaacttataagtaaaattggagaatttaaatttgctttatttgtacaacgaattaaattaaatggcacttttaatggtctttttcctccattctaattgctcttctgttcaattagcccaatactctcgagagaggcggcggcatctcacttttgtcgaaccaaatagcaaattcgcgcactgcatcctccgcagagtccgaaccgtggcagaccgtgtcatggtacttgccgacatcgctgttgttccggaattcggcacggagagtgccgggcgggggaactttgtccggcgtggcacccaaaattttgcgaattccttttacaacgccgacaccttaaaaaatttcgcatttccattttaatttgaagaagtttcgtttaaaaataaaattaagtttgaaatcatttgcaatttattgaaaatacaaaaaaaaaagttcctaaaacataaaagagaagctcaattaattgtcttttttggcgagtgatcagaacggcacaaaattttttgtttttaaggctcaaaataaaaacgaaacaaaaaaaatcttttgtatttgttaaatctctgaaatttatgttaaaaatgcttatatttctcaatttttaatcctttgattgtcagtataatcaaaattgaacaaatttgtctaccttcccaaatcatggcaaccacaggtcccgatgtcatgtaactgatcacttttgggaagaagggctggtcggagcatccaatgtaatggtccgcagcttgtttgcgtgttgaaacaatctgaaagcatcgcaaatgaagagagtccaaccaattaaacaaaattagcaaaccattttaatggcaattagccgaaatccgtgggcctcaaatcgctcaatgattttgccgacaaggcatcgtcgaacagattcgggcttaatgcagacgaaagtgcgttccattttggcaatttgtgtttgttatacgatgggttgggggtcggtttggtaattatgttaatggcgaatttgtttccatagaatgatcccaaccgttccgatcgctttgcttaaataccccctaaagtggtcacaaatttttgcttgcttagcaattatctgatgtcatttgactccctctcatctcaacacattcaatcatggcgataagccgccattttgctaataagccctttcaattagcaattaattaattaattaaattcctatgacttttctccaatttgagtgttgctgataaggaggaatggtggggcagctgagcgctggctgatcagcctatcggtgacattgtgaaatgggacgaagaaagacggctaatttgctaatttggcaataattcattaggtgtcccatgattttgttacatataaaacgaatttgaatgaagagtttgctgataagggagtgattacttggtgattgttcacgaaacctatcggtgacattgggaaatgggacgacgacatgggaccaatgcaaatgatcaaccacagctaatcagtcagcagatgtcatggacaaattttggggaggggggggggtcgtaaatgtgagggtggcgagggtgggccaaaccgaacacagcccaacacggccaattgggtgggcagggccaaacaatatttgctcacaaatgaaacaaagtatagcaaaaaattagaaaccaagaatcaagtttttcttatattctgattttcggaagaaaatttctaatatgatcaaatagagctgggatttttaggggtgagatcccaaaatatgggcctaaataagtgaatagcaaagacagggggcacaaaggcaacaacttaacgcaaaatctcatcaaattcatctacataaaccatcgaaactaggaaccactaagtgattttatgtgtcaaacacagacgatacaatgaaaactcctaatgtaaaatttacaaaagttttgaggtgggatagggcagcataaattagtgctgtcgaaagcctagagtcgagaaaagtctcagtccactgctgcaagggcgaggaaacccaaaaaagtaaaaattttcagtaaatttttttgaaattttaagtaattttgttaacaaaagtgc

SEQ ID NO: 2351 - DNA, 1303 bp, Heterodera glycines
aaaatttgtgcattactaagattgtagtgatgagtaatttgatactaataaatgtattgaagtctatgattttcgttctcatataaaatatgtgtactatgtaagattaaataaatattgcatatataatctaagaaaaaaacaatccatcacgccccttaaatctcactcccaaaaactttgtaaagataacaaatttaaaaccataaacataaaaaatctttacaattttaggcatcatattgatgaaaaaaaaagaaattttcttgttttttttttaatattgtactattgcgagaaaaaagagtatagcaggactttaaaagtgttctaaacttggtttgaagcttctaacttacatatatgttatgactttttttgacatttttatacttttgggatttttatcactgttatagtgacttttttcactttataaagcaaaatttgacttctagtgaagaaaaattccgaaaaataagtttaccttcgagacgataccgaaatttcgtattccaataggagtaaagagtggtccaaaccgaaccagcccaacacggccaattgggtgggcagggccaaacaatatttgctcacaaatgaaacaaagtatagcaaaaaattagaaaccaagaatcaagtttttcttatattctgattttcggaagaaaatttctaatatgatcaaatagagctgggatttttaggggtgagatcccaaaatatgggcctaaataagtgaatagcaaagacagggggcacaaaggcaacaacttaacgcaaaatctcatcaaattcatctacataaaccatcgaaactaggaaccactaagtgattttatctgtcaaacacagacgatatgcgtgatcagtagtgacaatgaaaactcctaatgtaaaatttacaaaagttttgaggtgggatagggcagcataaattagtgctgtcgaaagcctagagtcgagaaaagtctcagtccactgctgcaagggcgaggaaacccaaaaaagaaaaaattttcagtaaattttttgaaattttaagcaattttcttaacaaatttgcattaaaatattcaaaaaattttccaggcagcgcctattggcaccgccggacccccattttaccaaattttgaaaaatggaggccaaaatgtcaaaaaatagtaattttttggcgaaaaacggcaaaaatttttgtaaaatacacaccataattcgggatttcaaaaaagcaaaaatacacccccaaaaatcgacttaaaaaagaaaaatacacccctaaaaatcaaattttggactt

SEQ ID NO: 2352 - DNA, 1786 bp, Heterodera glycines
gggtaatttaaaaagtgagtcctttatatattgattttttaattgattggcgccatttcgtcgctcagctgatcagttactccttggcgtcatccgacaaagtaaatcaatgagaattatgatgatgaggccataactaattttcatcgagaccgaaaatttcactaaactctaaatctcgaagagaagctatcaattaatctgggttcgaactttttgcttagctgcctttgacttcggcatgttccgcacgtttgccctacttttagctgtggtcaaagtgtacggagggtaattaatttaattttgaattaatttgagtagagctaaatccttggtcaacctttcagagtctgttctgaatgggataaatgtgaaccgattaatgcaaatgggaaaacgtcaattcaattggatggaaacagtaaaaagtgagtgggcaaaaaaaaattaaattatataattttcatttttcggcacctgatctgttacccgagcaagttggcaaaaaatttcggaaattggaaagccagtggacggttgaaagttgcaaaagtggactaccaggaattaagcaagaaatgtgccgaaagtgacgggccaaaacaggacggcggatggcacggcttaatgctaacgaaacaaagtgacgggcatttggcttttcaatcatccctcaggtgagtagtttccattttttaattatttaatttaattttgttaattttaattatagtgccaatttttccggcatattagatgagcaattctttagcaatgccgagctcaatttcacccaaggtcaatttcaaaccaagttttttttcatctcatgttgggctacagtaaaaatgcatctgacactgtagcttacaattagcaaaaaaaaaatgtcaacgaatttattcactaaaaaatccatagttgttttttaaaggtttggtttggtttttggctacagaaagtgttggtgatacagtagatttggcttattttattttaggaaatttctggttaataaaatgatggaccttttgtaaattaatttacaatatctgtttttaatagagaatttatgacgcattcaccgtttccctgttccagctttgctcaagcaaaatgggcttctttcgccagatgagtttcgagaggcacttcctcttggcgcctttttgtacgattttgatgggatggcattacgtgttgtggcattggaaattaccaacggcatcggaaaaataaacgggacaaaaatttgcaaaataaagtccagcacgtcaagcacttccagcattgattgttctctggacggcatcgacatggcatctcttcccgattttaagcggccctgtgaagagcggtggcccgagttggccccaatttattgctacggcaaaattcttgaagtctgatttaagcagctttgagaaattcaaatgaattgcataataaacagggaacggatttttaggtgtcaaaaatcgcgaaataggcacctaaatagttgctaaaaaactgccaaaatagttgctaataaattgaaaaacgccaaaataattctaaaaaacagaaaaacgccaaaataattataaaaaactaaaaaacgccaaaatagttttggataaacatgtcaataaatgtgtgaattttccaaaattgactcattctttatccttttcggttgcacaattgtaaatcaaacacatttgaagattttcaagcgtaaaaagttttcgatcgtccgccaaatcatggccagaatttttgctttttgaaaaatcgattt

SEQ ID NO: 2353 - DNA, 2192 bp, Heterodera glycines
  unsure (1)..(2192): unsure at all n locations
ctttangggataattttcaattgaaatcgttcctatttttgtaagtgtcaattttattcagcccgttggatcaaggaggacacagaggacaaaaaggacccatggaaattgctcaatttgaggaccactcaaattgtgccggttgacttgaacgcactgatctgtgggaattacaggaagctgtcggaactgttttccaaaattggtcattttaatgtggatcaaatgcgcaaaatctaaaatatttttatatcgttttttaattcttaaatatttttttattgtttaaaaattgattttaatcataaaaacaagcccccggcacatttacggtttcgcatccgaaatttaaaatttttctatcttaagacaacagtgaaaagtcggcatcgtacaacaaaacacattcggaatttcgtaagaattttgtcgccgtgttcaaaagtgatggtggcacgttcaacgattacgaattggacacaaagaaagtgcgcaaaaggacctattatgggagcaccgtggtgccacttttcacggggtgcctaggggacgacaaagatgcggaaaaggcggcaaaacgaatgtttaaaggactgatggagattgacaagaagcatggcattttcaataattacccattcggcgttccgaccaggtccaatttttggggtttgcgagtgcatgaggaggaaaatggggaaattgaaattaattgaggattcggaaaagaattactaagcgttaaatttattttacgcttgagactaatcaatggcatgaaaaaccaattggttaaatatacgcagggttcgcaaatgatgtgaatttatcagcgagtcaaagctgattttttaaaatgctgttttcttgaattttgctgcttttttaaatttgattgtttttgtggtttttagggggaaattaagaaaaaaaattcaaaaaagttttgcttgctttttgtaatagaaaaattttgaatgcttattttttgtcacccaaatactgatttttgaaaaatttcaacggcgcataaagaatgaaaaaaatgtgcccgtttttttctaaaatatccttcctgattttggattggatgtcatttataaaagtgcaaaaaataatatggttttcagctctgtgctcaactccgcacagcagtgggatttcccaaatatttggccggttaatttttcgcctatttggtccgcccaattagtccccttttaagccggtgagtcacatgatggtcgaagcatttcgccggtccggcagcaaacagtaacagaccaaaactgtacttacagtgcaccgagactgttcaaattcatttacagaatgcagaaattcgcatttgataaggcccagcaatggctgtctgccaactataagctgtacaaaagctgccaaaattttatgtggatgaaaatggctgcccaaacgggcacccccggggcaaagggagatttccatgcgcaagtgagtgacagctaagtttcatttggtcgtttcctaaatctgctagattgagcatttttactcaaaaacaatcgttatagctcataaactgtgactaaaaacaaaaaaagggttatatttttcaaaattgttgttattagggacctaatttaaatggacaaaaaaaatctaaaatatgggttatataatatggactaaacaattgcaaaatggacgaaatatggtcaagcgctgaaagatgtacaaaaaatacaaaatatgaacaaaaatgatttgaatttttgaaaaaaattcctaacctaaaatttttaaaaatattttaatattgaattagataattgcataattaagactagggaccggacaagagggtcggccgaactgtttcggttaaaaaccgaaaaaaaccaaaaccgaaaaaaaccgaaaagctcaaaaaattctcggtcgaacggtttcggttaaaaaaaccgaaatcgaaaaaaccgaagaaaatttttcggtttatttcgatttttctgtttttttttgaatttgtttatttttttcaaaaaagcaataaactattctattatgtaatagaaaaagcaaaaatctctagagttcgacctggacctggatccagacctggatttttgctggatccaggtccaggtccaggtcatttttcggcaacctggatttttcctggacctggattttcctggatttttgtccag

SEQ ID NO: 2354 - DNA, 6312 bp, Heterodera glycines
ttttttttgtaaaatttaaattatcagagtagatttttaagggaaaataaaaaatcttaaattcaaagattgtgaattttggcggcccaatcaacaaaaaaatttgttgggaattgtatgggaatattttgcccgctgcaccaaactgatcaaacgctgccattttggctcgcttttatacaccccggggcgcgtgattatggcgccccaatcgccgcgtttgggtgacatccaccaccaccaaatttgttccgccccccccccccgcccaatttgtccacccccaaatttgtccccccgaaattttccatcaactttttcttttcgcgccattaccattcactcaatttgcatcatcatcaaagttttgcagattcaatctcgcaaaaatgtgaaaatttcactgaatttcttcgtcccatttgaccctcggacggaaggggcgatgattttgcacatccaattttttttagtttaaatttccccccccccccccccgtgccaccaaagtgcattcaaattaagcaatttgtaattgctgaaacaaacaaaatcggcaaggcacaagtcgaagcaattaatgaaatgaccttcaaaaaagtcaatgattcgaatttgaaaattcttttgcaaaaaaagcaaaaaaaaaattaaaaattaagaaaacaagaatttaattttataattgcatattttgtgagcaatttcaaatttaataataaaaacagactaacaaatttttttgttcagtatatcaaaattcaacgatttttttttaaatttttatcaaaaaaagcgcgaaaaacatttttgtttttttatcaggaaataggtagtcttttaaagcatttattcgtaatattatatatcctaaattgacatgggttattaatgaagcgaaccaaaactgagtttgagcgagacaactttaagaagccaacatttattttgttgttgtttcttttgtttggaaaaaaaacgaaaaaaattcgctcaatttgcatcattatcattagggacaatatttttgggtgctaaaaactgccaaaataggtaagttttagtcataaaaaccccccaaaaataggtactaaaattggaaaatcggtgccaaaaaagttttaaatttatgggtgtttaaaatggtaaaaatttatccaaaaagcaacaaaattaagtaaaatcagtattgagagatgccgtatattctctaattatctatcctcaccccagaggcattgggggggggggggtaaagtgattggcgacgtaccagcagaggtgtttttgacagtgattgatttcgacactgattggtggtttcgacagtagtttttcaattattttttctatatattttactgtatatatgcattaatatatttaatatacaatttgtataaacaaaatttataattttaagtaaataataaataaaaatttaatgatttttttaatttcaaatgccgggtttgatgagtgccaagatgcaaatctacaagctctttactgtcgaaatcaccactgtaaacagcaccattggagacgggcggataactaggatatacggtacataatttaataatcaaatttttgagatgaatttttaagaaaatttttcgtttcttatgggtgtatttttctgaaaattttgggctcaattcttaggggagccggaaaatccgacaccgatggaaaatccgatatcaactttaaattaaaataaaattagattgtttgagttaatatctctgcctaggcttagcaagttctcgaattgaatttaccgagaattgtttttttttgtgtcggttttttcacgaatttaatcaacttcggttgcctggggaggattaggtccagttgaattctcatgaatttcgccctcttcggaagacattgtgacaaactcagggggtttggtggaaccaaatgattcgagaacagaggacggaatagcatgcaaaatggaggatatccctcatccatatgttaaaaattgttaggcactatttacattctcgtttcccaaggatcacagagattattcgaatttttctgcttgtgtcggattttccagtgccggattttctgcttgtgtcggattttctgcttgtgtcggattttccagtgccggattttctgcttgtgccggattttctgcttgtgtcggattttccagtgccggattttccgcttgtgtcggattttccagtgccggattttctgcttgtgtcggattttccagtgccggattttctgcttgtgtcggattttccagtgccggattttccgcttgtgtcggattttctgcttgtgtcggattttccagtgccggattttctgcttgtgtcggattttccagtgccggattttctgcttgtgtcggattttccagtgccggattttctgcttgtgtcggattttccagtgccggattttctgcttttgtcggattttccgcttgtgtcggattttctgcttttgtcggattttccgcttgtgtcggattttctgcttgtgtcggatctttcgcttaaaccaaaagtttttcgtgcatttaccatcaaaataaagcttcagaaaaaaaatctactaataatcatcatcatcatcatcagattttgcacatttaattttgcaacaaaaaattgaatttgtttcactaatttccgcccatttaattagtgaccctcggggcgatttgtgcgaaacattcggtcttcgcctgagggcgatgatcaattcatatgtcacatccaattttcgtttaaatgttaaaaagtacgagcagccaaattaggaaatgcatatgctgaaagaccacttactctaaatggtttatgttattgaagcggaaaatcggaaatttttttttgtttgtgatgattcaatttaagttcttttgcgtgcatttgtagaaaaagcaaaaagtaaataaataaaatttttaaaataatttaataagaaataacaaagaataattatttttaatttttatttaattaattgcatattttcatcagatatttcacatttaagaaattaaaatttttattgtaatttgtttgaaaattttaagaaactataaatttttatttcttttgccagaaaacaatttaaaaaatttattttttaattattaaatcaaattttttttcattagaaagttcttgacaatctcaattagacagaaatctgcttgcggtacggtaaaaactaattattaaaattaatatgaagtaaccgtgaagaaatattttaaaattttgttttattttatttgatcagctatttaaatatttaaggataaaattattattttgtaaatttttttttgtcattgtggtttgtctgaaaaatccatcttcagacaatggtaatactgttggaaattctaaactggatttataggattgatcttgaaaaattaagagtacttgaaaaaaatataaaaattcaattcttaagcaagccatttaaattcaaaatttaattcagaatagaaaagcagagaaaagaacacaaaaaataaataaataaataccgaaagatgaacacttaaaaacaaatggacatataaacaaatttacaggaaatcatcaagggcattccttgaaaatgcggtaaaattcgagacggactcaagtgtgggactcgagaaaatttccaatttgttttctacacaaatgttaaattagcaaattatgtggcaaattttgccaaaatttaaaaaccgatttaaaaacagtgccagcaacggaacgggccaactccgtctgagccaactttgagtcaatataactcttgaagttattgaccgaatcaaacaatcttgatatcaatcgaaagctcttcacaggctctattagcctactaaaaattacagaaaatttcgaactataaaaaaagatagaaataaaaaactttgaaaattctgccttttttgcggttttaaactgacaacttttttgagagctgattaatcactgagaatagcttataaatatcttctaaacatctagggctttcgaatgataccatgattgtggagtttggccaacaaagaaaaaagttatagctttttgaacattgctgagacggagttgacccctaccggccagcaaagagttaattgaaaaaatagaaaatcagagaaatgaaaaacaaatgccaaaaaatggtttaaaatatataaatataaaaagatagcacttgaaaatgggtaaattgtacagaaaaatagggaataaggacagtccttgaaaaaaatggagagaattttaacccgaaaaaacgatgttatgaagttagtcaaaaaaccgatcaaaataaaaaattatgcttagaaatttgatcaaaagcaaccaaatctaacaattttgatatcattgattttttgagtttctttggccataactttgtttaaaattaaaaaaaaatttttccttttgatggttggttttttgactaacacataccctcacaaatcgggtcggggtcgttttcgcgccggtcgttttcgcgccagcctagtttttgaactataactttttccattgtcaaccaaatctaattttcttgatatcattcgaaagcccttcacatgctctattagcctgcaaaatttcgaaaaatttcgttaaggttcaaaaaagttatggccaaaaaagctgaaaaacccggtttctgatgtacttttggtcataagtttgttgaaaattaacgaaattttttgaaattttgtaggctaatagaggatacttagggctattgaatgatgccaagaaagttggatttggttggcaatgaaaaaacttatagttcaaaaactaggctggcgcgaaaacgacccggtacgaaaacgtcctggcccgccactgggccagagacgctcacattggcttcacattctttataaatgatattgatatagtaaaaaggaaaagcttcatatctcggccagaagcttcattcttgggtaccactcccttgttagtgaagaaaatttaaattatatttacgaaaaaacgccaaatatttacaaaaatattaataaaaattgcagtgcaaaaaataattgactcggcttttctcgagttgagtgagactcgagtcctataattttttaaaattatatttaaaaaccaataaaactaatcaatttgtaaaaattggaaatttcgctgtgtgtaaatgtggcatttattgccgtgttttccccggttgtccatttcacatggcaaattgcattattctcatgtgtttattaaatggaaaaaaagaaatttaaaatttaaacaaaaattgactaaattttaaaagaaaattgacaaaatgtttacaaaattaacaaaattttatatattataacatatttttaatataaaagcaataagagaataatttaaaataaattggcaaaatttttacaaaaattgacaattttttataagaaaattggcaaaatttttacatactctagcatatttttaatataaaagcaataatgaaatagcttataatgtaatttattacatatttggttttataatcattagcgttgtgcgtttgtatgctaaaaaaatgccaaaattataaaaaatatgccccaaaaatttaaaaaatggatttaaacaaaaaaactgcagctgtataaattcaaaattgacctggataaaaaaatcacaaaaatttttttattttataaattaacgtatgaaaagtttgaatgtttttaaatttgtatttaattatctggcaaatgcaattatattgccaaattgagaaagactttcttccgttaaataattttacgagttttttggagcagatttttgaaaattccataacccgaacgaatggaggggcaccgtatccaaaccgaatcgagaaatttcaagttttccattttaaagtttcggtttaccgaccccttgaccggtctatattattaatgacactaattaattataggaaatgtgttattatgctatatctttttattttatcaacgttatagttcatttttttattgcaatttcaagtgcaacgtcaccggtgagttgtttttttactttgccataattccccatttaaatttaataggttgaggacaatgcactgcttgcatttatgaaaagctatggtttgcacaagcagaatgaaattcagaccggtgaatattcggcgcaaaaatacgaagcacaccttggcattgtttattttatgagagagaattggcaatgtgccaaaattgggacaaatttgacgaatttgaccagggagatgccaaaatatcgcaaatatttg

SEQ ID NO: 2355 - DNA, 1657 bp, Heterodera glycines
caatccgatcagatcagatcagatcagatcagcagcattcattcataaatttgatgttgactttcttttccaatcgttggataaagtcatccatcctttttaggatgctatccactttgaagtgttcccttttttccgagtcaattttttcaacaatttttttcagactgttattcttggcatcattttttaccaaagtccacaaaaatgtgcgggacttggcaccaggctcactggttttggccgaagctgaaaatgcgcaataaatctcttcgattatgaaaaatttgaaaccaaaaaatcagtccataaacccttgggacaattttatggcattgatcaaatttatgaactttggtgactagggatgccttttttcaggattttcaagaaaatccttaacaaaaatgcaataaaatatacccctaagaattgaaaaaattttctctaaaatttattcactaaaatattttttttttggtaaaatttttggtttaaaaattgtccttatttgaaaaaaactttaaaatatttaataaaacatttacaattgaattataaaccaaaattaaatttgtttaaatttataaatcgtaataaaatttaatttatgaagcattaaatgtttttcgtaaaaaatgattattatcactgacgaaatcacttctgacgaaatcacatgttaccgctatttcatgttaatcccatttttgaaaaattaaaattaagacgaactttcaattgccgacaaagttccgcttgaacaaaatatccaacagcagccgcaaccatcgaatgtcagcaattgccctgcaaatgacgagggcggcggcggggacggaattggcgacgaattggcccattttttggccggccttccgcccgtggacgaaatgggccaattggtgctgaacaagttcaaatactcgtgcgaatttgctcaacttctctacaccggcggaggccatgtcgactcggtgttctgcaacattttcagcggatatccgcccactttcttcgaagaattggtcgaggcgagtgcattttcaaccccttttagagcccattttgaaaagttttttggctatatgatgccggatttttttaccacatcgtactctgctaaatactttaaattcgaaatctcaaaaaatccccatgggattggataaacgtttcaataaaaatccattaaagctttaagtccctctttttgcatttgccctttgacttatccctaattagctaattagcaattcttaattatgccttctatacagtacgctctcacaacgcatcgtcccgacgcgttggtccgtcgcatttgcgtttggctggccgcagatgagccttggcctgacatggtcaccctttttccctccgctgtccaacgccgcgtcagcaacgaccgcgtgctgtacgaattccaaaacattggcaaaagttgcggccaacagcagcacaaactgtccgaatttgtgcttcgcattcgtgcgccttcgcggccaatgctttttcgggcgatgagcaatttttcgttgagccgaaaatgaaaaatttggcaattttttggccattccctttaatttgtattgtttgtatccaatggcatttcatttgaccgtttttgaacttatttttttcttgccccattgtt

SEQ ID NO: 2356 - DNA, 4527 bp, Heterodera glycines
  unsure (1)..(4527): unsure at all n locations
gaaaaattcaaattttgaaattgaaggccccgataatttatccggtgaattgccttgcccaaaatttcatggttttttaattttggctcaacaccgaatggaagaaaattaaagaactttttctcttggaattatgaaccaaaaattgttgaatgaggaaagattgaattattttgacaacaaacggctaattaacgtgaattattatgacaaaaatcggtcaattaatgaaattattttgaatttggcaattgacgcagggaatgaacgccaaaagaatgaaagtgatttcgaagaaataatttgcagacaatgttttgacaagaacatggaggagatgttaagaaaagcggaagaaagggcaaaagaggaagaagacaaattgttggaagataatcccgaagaatttgaggatgaagaaatagaagaagaagaaggagaaagaaagtttgacgtgcataaaattgtcacgaactcaaaattcgatgacgcaattaattgggtgagtttttttaatacatactagggtaggccgggtcggggtatttaggcaaaaaccgggtccgggtattaccgggtattgaaaagtcgggtaccgggtcgggtattagtttttaaaccgggtgccaggtcgggtattagtttttaaaccgggtatcggctcgggtattagtttttaaaccgggtatcggctcgggtattagtttttaaaccgggtatcggctcgggtattagtttttaaaccgggtatcggctcgggtattagtttttaaaccgggtaccgggtcgggtatggtgtaccaggtgaaatcgggtattgaaaaaatttttaatttttatttccttctaaattattactatacagaaattttttttactgtaataaatgctaaagaaaatagttcaatcaaaaattttcatattattctccaaaatcttcaaaaagcttttcatcgacaatcacttttttctcttaaaatatgtgcataaaataataattattcattttttattttatttcttaaagaagtcaattttagacggatgaagccatttttactgaatttgtgaaaggaaaggcaacaaaacttgagaaattcttctttttgatgaaagcattcccgaaaattattgattacctgaatacgagcgcttttagtttctttaaatttgggtattgtttggctggtcccttaatttggcaattttctcaaaatttggttgattgcttaattttttgaaatttttatcaaatttaatgaaaaattgggcaccagccaagcaaatcattagctaattacccaggtctaatgagcatataaaagagcattttgtgcaaaaaatggaggctgagcttggccttgtgcatttgatgaaggtgaattgggactgtaacaatgtgagaaaggaacaggaaagtgaatgcttaaaatatcgcaaatatttacattatttgaacaattatttattcagaaaatatgtcgaaggtacgattttattcatttctttatgaaaagtaatgcgaattttagtaaaaaatcgcaattagagcttaaacaggaaaaaattcaaaaataggcacaatataagaggaaaattgcaattcagaggatcgatccatttctaaaaaaattttcattaattgaaggatgaattaaagggattgaatgttgtcacattaaaacgatcctttatgactttaaccgttattttaagtgttgattgaatatttataaaaatattgataactcactcaattaagcaaaaaacccggagatggcagcacaattaacaacagtgaagccagtgtttttatatggcgaaaaaattatgagtttatttatcattgtcaaagaattgaattttgttacgaaatgtttttgggaaaaatgcgaaaacaaattggagaatgtggatctaaaaaacgagaagatggaattgctaaatgagaaggaaataaaagaggagaaaaatggaggaaacacaccgaagagaaaagtcaaaaagcaaaaaacaaaaaaaattattgtgccaacaaaaattgaaaaacttcaaaaagaatttgagcaaaaaatggaaaaaatgtgcgaaaatgtaaaagaaaaggcaaaggaagaaaaggcgaaattggaaaaagcgatggtaaaaaatgaaaattacaagaaagaagaagcagaaaacatggaaaaagaatacgagcacaaatttggcactttcaattcgtcgccctttttataacaatgccttcgttcgtttgcctaaaaacggcgaattttccccaattctttcggcttttccttgggaatttctcttgttttttatcttttatttattttttgctttttgttccttaagatttatttgcattttttatgtaagaaaatttatataaaatttctcttggcataaagcctttttaagaattgttgacatgagacggtttttatctttaatctatcacaagctcactcccctatatttttattcgagaccatctcgcccagtctatagaaaaaaaaactatttccatgctattatttattgtcatggcatttttcttcattttctcaaaaattaattctatttttttacattgaaagaaagacaccataataagcaaaataaaaatcttcacaaatacactccctccaccctcagtaaaaatgcaaaattttcagaaatttatcctttatttttatttgacaaaatttggttttttataattttttttactcattttcaagatctgaattattgattttatttaatttaattgaaacatgaaagaaccgtattgttgagtcttttttaggtgctaaaaactagagatcggaccggtcggttttttttcggttttttcggttttcggtttcagttttttaaccgaaaccgacagaccgaaaattttttgagtttttcggtttttttcggtttttataccgaaaccgaccgaccgaaataatcaaaaaaccgaaaaaaccgaccgacttttttcaaaaaccgaatcaaattggagcgatataacctgttaataataataaatttattgcttttttgtgctctttttcattttgaagaattttttgtaaaatattttctgctattttgaaaaaaattattaacaaaaatgcaataaaaacgaaaaatacacccctgagaaatggaaattttatcaaaaattcatattcaaaatttatttatttatttacttgactacatttttgattttaaaatatttatctcatttccattttgattaaagtgaaaaaaggaagatttcgagcatttaaagagaaaatttggtctttttttttgttaaaaaagtttgttgatcactactcgatcggggtccccggcccacgacattttgccccccgaggggtcggggagcaaccctagtttataagaagaaccaggaagctaacaaacgttttttggctgcccttttcaattattttcccaacttatacaccattgatagagcttcaatagctctacaattttactcagaggtgatctttcgctttttctattgataaaaatggtttattgtttttttgggaaaagatttaaaaaattcaaaaaaaccgaaaccgaaacggtataccgaaaattttgcttcggtttttttcgatttcggttttttttggttttttaaccgaaaccgaccgaccgaaaattttttgtgtttttcggttttttttcggtttcggtttttataccgaaaccgaccgaccgaccctcttgtccggtctctactaaaaactgccaaaatagttagttttaggttttaaaaaaaccccccaaaataggtgctaagaatgggaaaatagtttctaaaaactttcaaatttaggggtttaaaataaatcgatattgagataattttaaaatcaaaaattttcgtcaaaaaaaaattttggaaatgattttttgagcaatttgtaatttattaggggtatatttttaaaaattttaggatcagtaggtaaaaatctaaaaattgcatccctaattattattattattattaaagtaaaaaaataaaatccttgatttcttaagttaaaaatggattaattcacctaattaggaccctgatttattcaatccgctgaatgtaacgatcagtttcatgtcgccatcattttgatcggatgtataattgcaaccgtttcatcaattacttcattattgtttattaaggatattcaagaatatactcaaaatgttctgttagtaaattattttttggtttcttttatttcttgtattccaattttggcttcagccagcggggcacccattctcatgttgaggtaaaaaatgttcaaattattctttattcttttaatattcgaaattttagccaaaattatcgcgaggcatacaaaaaattgttgaagcgcaactcaccatcagcagctgttggaccattattcacaaattgagaatttttatttcatattttgattttcaattatttttgtaccacanaaaattctcacgcaataaaattgtgggaaa

SEQ ID NO: 2357 - DNA, 2486 bp, Heterodera glycines
  unsure (1)..(2486): unsure at all n locations
tttttgttagtccgttgatttttcaaagtgcagagaaaaaaacatcactcgttgtggcatgctattttttatcactcacaaacaacacagaaaaaactgaattcatttcgtagtgtttaatttttttttttttttttacttattaaatccgcttcaaattttacatactgatagaaaaaaatcgggatctactatagttatagagcaatttaatctgaaaaatgttggttcgaaaaatttccaaaaaaatttttgaatgcccatatcttatcagcaaatcgctttgtgactcgaagacagaaaatgataaaacagttttaaaaagacaaaaaaaaaaccttttttttcctggttaaaaacggtttatttttgccatttccgtagggaccgatttgttcatattaaattcgccgagcaaaaaatcttgtaggtacatcatttaagtatttaaccatttctaagcgggtgtctgtcgttcactataaacaaacatggatggtcccgttcttaaaacaaagtctaaaacattgtccaaaaaatgcctttcacaatgctcaattgtgagccctgattaattaactaatttttaattattttttttttgtaaaagtgtgtccaaattgtcaacgacttttccgcgtcttgttgttccaacttctattagtggtgttgaacttcgtcttccgtccaaattcaatgcgcctcgatcttttgcaatttttcttcgtgaaaaatttggttatcagactggcttagcgaaggaaattgttaaaactgtcagtgttaattggaaaactttgagcgatgctgaaaaacaggtagcatttattttatttattttttgtctataaaaggaattgtttcccaaactttcttttaatctgtgtttccaatgggtgcacacctaaaacaagtcaagaaattttttttataataatattttaaattaaaaatatgaaaggttttctagcgtttttcggaattttatgatgatttactagtttttaaaaaaaatttccaaaaaatcgctagaaaaaataaaatttctttgaaaaatttttttcaaataaaatacatatcaggaagggggggggatggattactactctttatacaattttgtgaaataattaaatttaattattcgtgaattatttggattactaaagttacggcgaaaaaattttgtcctgtttcggtttccaatcggcaagtggaatgaggatgttgtcgaaaatctttccgaacgaggagagagcgggtgggtggggctaccaccaccacgggtaatctcgatcaactggcccaggaacggctcatgacaaaacgtcgccgggaatacataaatattgcaataaccattttaagttttatgctgacagagcaaagcaaattggcgatgaaaagcgtgagaatttcgagaagctttccgaagagcaaaaacaaaaattgattgagctacacgaggtcaaaacggcaaggcgtcgactatttcgacaaaagaaaatgcttcgcaaggtaatttttagctccatatcaggcccgtatcagggaaggtgttgggagagggcgagattgccacccaggcccgtatctagggggggggggatttttttccaaaagtctgttgacacttttctgaaaataaattctatactcatgtattttccacttattagattttgcaggcttattgctgcatgttctttgacacttcttcaaaataacctatgccctttattcgttcaaaacagcatctttgttgtttcgctttggattgacaagcccgatgataaatagctcgagcgcaaaacgcgtgcatgtttggaaagtatcgttcataccaataattgagggtttatttttaaatgaaattttatgataaaccttattatctcagaagctatttaattgattcggatgtttttatcgcggttaattagagcaacgaaaattggtttgaatcgtgaagtttctaactcacttctcaaaattgttgataaattgcaaatatatattccaaaagtctgttgacactttctgaaaataaattctatactcatgtattttccacttattagattttgcaggcttattgctgcatgttctttgacacttcttcaaaataacctatgccctttattcgttcaaaacacaatctttgttatttcgctttggattgacaagcccgatgataaatagctcgagcgcaaaacgcgtgcatgtttggaaagtatcgttcataccaataattgagggtttatttttaaatgaaattttatgataaaccttattatctcagaagctttttaattgattcggatgtttttatcgcggttaattagagcaccgaaaactggtttgaatcgtgaagtttatcatttctaactcacttctcaaaattgttgataaattgcaaatatatttttccanaaagtctgttgacactttctgaaaataaattctatactcaggtattttccact

SEQ ID NO: 2358 - DNA, 2501 bp, Heterodera glycines
gtaatctcagccaacagtaatataaccctaaacatgaaaatgatggttttaaacgaaaaatgggaaattgaaaaaatttgacaaattcatgtcatcaaaattctacaaagacatgttttacaataatttaaaaaaataaagaaataaatgttaattttttttgtaccaattgccattgtgtggtgacccatatattattttcagccctatgtcaccgagtcgagacacaatttggcaatttacaaccaccaggttgaagaatggaaggaaaaatatgcggatgaaattggtgaatggcgcaaagcgaatatgccgaaaagaaagaaaaagatggcgatgaaaggcatgaaaaacaacaatttttattctaattaaaccaaaaaatcaattttttaatgtgttagggagtccatgtttgacaaattcataggcaaacgcaaaatgaaagcagcgaaaaaggtcggactgaagaagaaggagacgaagttggcaagcgggcagaaaaagggacgaatcgctaaaggcggcggcacttcgacgacaggcgccaaaaagggagacgaagaggcggcgacggaactgcttcactctgcgactttgagcgaaccaattattttgggtgggacgaatttcaaaaatttttttttcgttttcaaaaggcatgaaaacaaagtgtcgacagtagaagggatactcctgtgttaattttcaaaaattttcagcatcgggcgaaaaacaggaaaatttgtggcgttttgcgccaaaaatgacaaattttgctattttggagtcaagttttcaaaaaataataatggtacaatgataggcgacaccatgaaaattttttgtgaatttaattagatatgacaaaaaatagtgtaaaatttcaacaaaaaaaagcttgccaatttcttggaaaatttattccaagtcaagaaaaaacccatggaaacatgtgttcataattttgaaatactaaaaaaaagaatttttttctagcaataaatatatacacatgaatatttttaaaatcttttaattcgtcagtgacgaagggacagcccaaaaagaatgcttcaacgggaaaagccgccaaaaaagtgaaaaaagcggatgtcaaaggagcggttgattgaccaaacaattcttttttgaatgtataattttttcccagtgctcccaagtgtgcagtttttcagatttatgttaaattttaaggatttgagtgtaaaagttgtacgggacctggacacggacaactgagtacctaggtcccggttttttcccggaagttgggagcactgttttttccatatttgcgatcagatagacaataattgtccactcaatgttagtaaatgaagtatgtatgtttaagttggtatgaatataaaacatgttttttcaaagacaaatttttctatattttgtcaatattttgtgcatttctcacactactaaaatgcgataagaaagatttatttgatcggcaatggcggcgacatcaaagctgcaaaaaagtggacgaaagcggttgagatacgattcagaggagtcatctgatgatgatggcattggaggaggtgaatgggatttcaaatttgcaattagtacttgaaaacgggttgacctgaaatttgattgcgctcgttagccaacttttcgctttattgcagttaacacgaccataaaatttggcaagtttattacaccataacattgtgtaaacaccaaaattaaacattcttggtatcattcgatagtcccgagaggtctttattaggcccataattgaaaaactactttttatgactggttgattttcatcagatggggccactgttgcaatcattccgacgccgagcattgatttggtcctgcaaaatttggcaacaaatgcactcgcttctacagcggcgcccgaaatggaggagaatgaagagcagggcgatgccattcaattgggtaataatatctgacgaattttgctttttttttttgggtaaaacgctttttggcattattttcatgattatttgttgggtattatgacgttaatcaaaacccagaaaaaagtgtgtttggtcaaaaaaccatcaaatgaaaaaaaattgttgggttcgatgagagctataggccctagcataagataaaaaatgaattgattgcttactgcatatagacagcagatgaccgagaccatccattacatacattatctgattttaaaatagaaaaaaaaaatttactaaatttcaaattgggtctgcagatggcagtggttccagtgcagcggaagaggaacaccaacaccaccaacaacaaccaaatgggcaaaccgttagcagcggctgctcctccagcagtcgtccgtccactgataaggagggggaacaaaagttgcggagaatgcaagcgcaagcgcgtcgtcagcgtgtgagcaagtggaaaatcagtgagacggcgcaaaagaagaagcaaatgcagaaaagcaaaggcac

SEQ ID NO: 2359 - DNA, 6109 bp, Heterodera glycines
ccccccccccccccccccgcccaagcgctcctcgcatcccctcacaaacaatatgtttttttttgccatcaaattttcttttctataaaatgcctctaaaattattccagctcgtcaggcctcgtcaacaattggtgcaacgataaacgatgttgttgctgcacgatcagttgcaacaaaaccgtcatcatcggcttcatcatcatcgcttgtctcctcatcacggcacacaaccaccaaaattgccgacggtggtgtttctgtttcttcttcctctctttggccgttgtcaacaacaacagtgccaaaaaggaagtttcgcggtgatggcagtggccgaagcattgttggttgttcaacaacaaaaaatggagcaaatcaactgcagcaaattgctgctggtccaaccaccgtgacaaccgtgggacgacagcaggacgatggggacgtggtggtcttggaggatgacagtagtggtgaccaacagcagggagcagaggaggacgacatggatacggatgagcaggggacggcggaggaggctgcgccgttttgtaaaaattgtgccagtgaaattcctctcattttgaagttagtttgcccctcccgcctattgttgtttgcatttttatttttgtcatgttataatcttcggagcaggtcgtgccccccccccccccgccgataaattaaaagagtttttttataagaaaattccaagaaaataaattttgaaaaatttttcagtgatttttcaacttttatgaagttttccgggagggggaacgatccagagagtaacttatatgggatgcactctataatcccccctttcccgtttataggaatttggaccgccttgacaacatggtcacgtcaatgatcgattccgtggagcaaaaaattcaacaacggcggcacccgccgcagcaaccaccaccatcgtatgctgttgttcgtcctcataatgatgctactgttcaattcatgccgtacaatggtagtgccgctggtccatcatcatcattaacaacatttgctccccatttgtcaccagcagaaatcattgccccaaaaaaccaccacaactccatcctgctgggcatgaatggtgggaacgaagcggcgtcgtcctcgtcaacttcggcaccaccaaatgcgaccatgctgcagctcaatgttcagcaagttcaacaacaacatccacaaaaccagcagttgttcatgctcaatcatccaaatggactcgtcgtcaacatcggtgaccacgttcatggcgatggtggtggttatcaacagcagtcaacaagtgcctcctccatgccaatgccgacaaaatttttggacgacgacgacaattcaccgcctccctcggttgacctcggcgattgaacaggacggcgacgaaattgttttatgatgcttttttgtaccttgttttgtttggatctctttgcctgagaaaattcattttaccattctgttgggtaccatttacataaaatgttaatttagaaaatatgtgtgaacttatacaatttgtatttgtgcatatgcattttatttatacattttaaaatttgatattatgtatatgctgaaatcgttcctctcattaccgaaaaaatttaaaaaaatcttttagaatttaaaaaaaaaatttttttttgaaaatttgtctttttattagaaagttaataactttgaaagcaaaatttttctggtgagatggaggggaaggagcgaaaaacagtgtcccattttgctctaattgttgcaatttaagccttgttgtacaattgtgggatcggtttgccatgcgcgtcctctttgccttgccctgccatcattgttttaaaccgttgtttgctccacaatggacgatgatcaccaggttgaattggggttttagttccacgcaaacccacggttttgtacagttttcgtgccgcctctgatgtgccgtcggcggttggcttgccccccgattggttgtcagactcctgtcaattaatccacaaaagccgtttgcccacttatcatttccaggtcaattagtgttttttgtgtttctacacacaaatcattaccaaaagtaaaaaaaaattcggcttaaaattttgttttatacacgtttttgtactatattaaccgcatccatttactcacctaaatctgtttcagaaatcgcttttccgattaccagtgcccagtttggaacactcttgcgaccgatatctatgctctgttggtgctgtgtttggcgaacattcagacgaatttgtggactccaaggaattggtggccgattttctcgatggcactaaaggcggagggccgggtaaaaaacaaaaaattgatcattttaagtgtttaatttttaaatttaatttattcagcgcttcaagccgaactcaaaagatacgcccaacacaataaacatacctcatacatagttagtttttgggggctttttgaatttaaaactatttttgggagtcgggggcgagctgttcacctaaaaacacatattgttattccagtcagaaccatggtttgacatgtatcttcgttcacgcatcccatgccccatcaacttcaacccgttcatgatgtttgcacccgaccctgagcctatctacaacgaccaggtgcagctttttttggaatttatttcgaaaataaaaatttattgcattattttagcttatacgagcaacaaatttggtcatttcctgtggccgcttcaaaaaggcgttggatgctgaattgctgaaacccgaagtattccacatgaatccgctcaaaagtgacaccgaaaaattcgaaaacatttgtcggtcggtttttgtcttttgcgcaagaaattttttggttttaaattatttgcatcgttttcaaaggttcgcccccaatgcaattcgatggcttgtggcagcgttggctttcaaagcgtacccattggacatggtaatttttcatacaatggcaaagcaacatagcttgggacaattttgttaccaaaaatctcgcacaaaaatttaaaaaaattgtgaaatttaaagaaaaaaatactctgataaatcatttgtccatgtaatacattttttaattggctcagagtcaatatcaatcgctgtttggaggttgtcgaattccgcagcgggacaaagatcgtttacatctcaacagaaattcgtaagtcaatttttcagatattttttttctttgacccacaacgttttccgggctaattttttaaaattatggtctctattggcgaaaaacataatgttttaacagtttttcgccgaatgatgaccaatttaaaccgaatttatttaacaaaattgatacaaatttgttcaaaaaatggcacccactttctttgatttttttccccaaataattcgtcaccatcccctggtttttaaggaagcattttgttgtttcacgccatggacatttctacactgtcaagctgtttgatcagaatggttggtttgaataataataattgtcttaaaatgagattttttttcttgtaggcatgcttctcgagcccaaacaaatttttgccagtctttcccatatttgtaaatcgccgccgtcgtcgtctgctagcaaaaccaattttgcgccagcagacgaatgtgttggctcattgaccacattggtttgtgttaaaattcaaacccgaactaataacaaccaccatggtctaaaatttcagtaagaaataaatttgaaaattaagggttttcaaaaaaaaaatcagcagttaattatagttttttttccgaaaaagacatctcatttgctaaagaaaaacaatatttatttaaaagtttaatccattttttattaaattattattattattattgaaattctgatcgtttttttttttgaaaaaaaatcgtgacattatgaaattttattcggaataattgtttttgttttttcaaaggaccgtgacacgtgggcggacattcgttctgaactgattggcaccgactcgagaaaccatgaagcgctgactgcaattgaggatggcctgttcctgttgtgcttggacgagttgcacagcagcgatccggaaagactgatgcattcgctgttgtgcggcgatgacgggagcaacagatggtcagtcagttcagttattgtttaatttcaatggtttaggccaggggagaccctccatttggggggggggtgagatgggagtaaaccggaacaggacaaaacacagccgccgaaacgcagtcgagacataacacagccgggaaaaaattttcaaaaaattttctaacagaatttttcatgaaaaaatgttagaaaatttcttagaaagttcaaagaaaaaaaaatttcaaaaattttccagcgatttttcaaagtttaatgttgaatgttgcattactaagatttacaaaaaaatttcaaaaaaatcgctggaaaattttttgaaaattttttttcctttgaattttctaagaaaaatttttctgagatttttttcatgaaaaatttctgtttgaaaattttttcccggctgtgttatgtctcgactgtgtttcggcggctgtgttttgtcctgttccgcctttttacttgcctatctgtacatatcaaatttaaattggtgcctttgtctccgaacattgcccaatttaataattaaaaaaaagtacgtttattttcagaaaattatccgtgtcgatttgcacaacggaggccaatggacgtgcatcccaacggaacatttggagggcaattgggttttgttggatgttttcttcgacattttgcttgctcaacactcggctcccaaccgtccgcactctttgcatattgccgacagtgccactaacggcgacgacaatgacgccgaacacggtacggtactcattgtcagccaaaatggcattttttaattgtttgtaattgtaaattctgtcagttgcttggcacaaagtggacagcgcatgtcgaagggccgaagttggcagcgcgtgggactggcgaaccgtcgcattcaaacgcgaaggtaattttcatgacaaaatttatcggttctctgataaattgccgtcattaaacagaggacgagcaatacgatggcattctgatgtggcccaacaaagggagacaaagcgatggcgcagaacaaaagaaactgctccctttggtggtcactccccacgggggcccgcattccgtttcgacttgcacgtaacaaatatatcattttgtagagttttttctaattttgttgcccccagatggccccatcgtgcccagcaattgctgctcgagaatggctttgctgtgctgatggtcaattaccacggctccacaggctacggggaccgttttgtgcgttcgttgcccggccgatgtggcgaactcgacctggaggatgttcatgtcagataataaattggataatgaaggggctaattggggaggaaatcgaattgggaacgacaaaagttaaaaataaacatcgaaatgggttttattggataaatggtcgaaaaaaactcaaccaaagtctgcaactaattaattctcattaatttgtgcagtacgctgtcaaaacgacgttggcttctgcacccgaccttctcgacccggcccaagtggtgttgttcggcggttctcacggcggtttcctcgtctcgcatttgatcggccaatatccggtgagaaagtgtgcagttcagcaccagttgacaaagagttttgggtgtttgttcgatttcaacataatatttaatctgtttttgcaggatttctacaaggcatgcgttgcgcttaatcccgtcctcgacatggtttccatgtggtctattactgacatcccggattggtagggccaaaggcagatagtttttttttcttaaaattggcaattttgccataggacgatttacgagggcaccggccgttttcccgactattggccaaccggcgaccgtcgtcgttcgcctgccgaattggccccgtcttttgaagagcgcgaacggatgtacaaagggtcgccaattgcccacgcgcataaggcaataattgggcgtagggagacaattagggggtcaaa

SEQ ID NO: 2360 - DNA, 1176 bp, Heterodera glycines
tattttagacgttgaaagatacggtcaaaaaccgtttcattcatgctggtggaaaggaggggcaagggaattcggaatttgatgcagtcgacgaatttgttcaaaaaatcggtattatttatttattttttattggggcaactcgttcagccccctggtcatcctcccccgattattccttttaatttaaaaaatgggaatttttagttcgtttaatttctttgaattgtcacaagaattaatttttttccggcattgcatttctccaaaatttgtatttgctttattttgatcacaaaatcacaacacagagtggaagttgaacgacagtttgcgcgaaaaaattcgaaatgcgcagaaagtgcaccttgacaacaccagcaaattggactttggcgttgtgctgcacaccgcgatgagcaaagaggacatcaaaagagcaaggctttcgcccggtacaaaattgtgcatttatttttattccaaattcattccttttaaattcattacacacacagacgcaatgatgcaattggcatttcaaatggcattccattccgtgtatcgtgaatttgtgcccacatatgaagttggtgcttttgtttttagacttggcaaaaacccccgtaattgtttttaaaaaaatgtggggaaaacccccgtaattgtatttgcaaaaaatgtggggtgcattaggtcccactattcgccctcatcacgtttttcaaaagtaaaaatcccattttttacattgctactttaaaaaatttctaaaaattggaaaaaaaaatttttttttactggaaacgagcacttcctaaaaatgatgataatttatttatatttatattaattaaattgtttttcattgtcagagttgttcaactgccgccttcctcaagggcagaacagaatgtaatcagtcaatcaaatttcaatttttataaatttaaagaaaatatttttcatgtacttataagaattattcttattgttaggtgttcgttccgcaacttcggcaacacgacatgcggttgaaggtgttgttttgggatacattttgccctccccccccccctcgtcgttcagccgatatttaaataaaatttttagaaaaaaggattttttgtttaaattaaaaaatcttaagaattctagaccttctctggctgtttt

SEQ ID NO: 2361 - DNA, 1218 bp, Heterodera glycines
  unsure (1)..(1218): unsure at all n locations
agattttcgttttgatgctctttaaaaacccaaattattaagtgattgtttgttatgcaaatcaagcaaaaaagcaaaattctctgtgtgtaaataattaatatatttaaataatttatcattagcagctaacagcgaataaaaaggcgcaaaaattgcaattcttgaaaaattttcatttaaataatacaataatctagcgaatcctttaataaaaatatatttaaagataaaaaattctttttcatgtccaaatacacaaaataaggcaaattccaatttggcaaatttatttgaaccatttcatttgcagcattgattttgtattcaaagaaattggggtttgcatagctaaatttagaaaaaggaattgtttaatttttatgaataagctttagcaactgagaccgaagaccacttatagatagggagcgaattatttaggcgagaaaatggtaaaatatgggcaaatttcaatgaaaataaataaaaattgctgtaaatagcgtattattcagcagcaatttttcgtcgcccttttgtcgataaaattccatgtgaatgncaagttgggcaatattttgcgccacttcctcttggacaattttgaattaattaaaaaaagaatataaaatccaattttgattagtttaaaaaattttttaattaaattcgcggtttcttcaccataccatatttagtcatttaaatataactatttgtaataaatagggttaggaatatatgcacatgcatatttttttcttgaactgcggtaggcctgaaacgcacgaaaaacatgtttttagcttggtttgaagcttctaggacgtacttccatatgcatattttggcatttcgtgcatattttatgtgggtatttgagcattttttgaacaaatcctctattaaaacagccccctctattaaagcggccattttgcctctaatgaccaaaaaattttcaaaatatcatttttggagggttttctaataaaaaatgtaacttttttttaaaaattagaaatttatgccaaaaaaaatttttctcaattttattttacttttattttgtatttttgcttctaaaatgcttattcataattatttagctattttgagatttttatgcttaaatttaacaaatttgaagcatttgggaaaattttgccaacaattggaaaaatttatgtgcatatttttcattttttatgtgca

SEQ ID NO: 2362 - DNA, 1541 bp, Heterodera glycines
  unsure (1)..(1541): unsure at all n locations
aaatgaaagttggctaaaaatatgttcaaaatctcaatttttccccgccggcgcgggctatcggcacgccgggaacctaaatttttttttaatttgctcaaaattacaaaattggccattcttgttgacaaatctgttaacaaatgacattaaaaatcaaataaatttcataggttgacggtgaattgttatgcaaatcaagcaaaaaagcaaaattcgttaaataatttatcattagcagttaacagcgaataaagaggcgcaaaaattgcaattcttgaaaaattttcatttaaataatacaatgatctagcgaatcctttaataaaaatatatttaaagataaaaaattctttttcatgtccaaatacacaaaataaggcaaattccaatttggcaaatttatttgaaccatttcatttgcagcattgattttgtattcaaagaaattggggtttgtatagctaaatttagaaaaaggaattgtttaatttttatgaataagctttagcaactgagaccgaagaccacttatagatagggagcgaattatttaggcgagaaaatggtaaaatatgggcaaatttcaatgaaaataaataaaaattgctgtaaatagcgtattattcagcagcaattttaattataaaagaagataaattttatcttttgccctattatgagggcgaaaagttcaaatgaaaaattatgcaaaaaatttaaaaaaaaacataaaatttcgtcgcccttttgtcggtaaaattccatgcaaatgaaaatgttggcaaatattttgcgccacttccttttgaacaatttgcaagcacaaacaaatggccaatgagaagagtaattcaaaacagtcaatgctaacatccggcccaatagccttttgccgcttttgtgccactaatttttgttcatcattttcaatcgaaacaaccaattgaattgtttaatacgaaattcctgaaaagtccaataaattcgaagatttttagtccgtgaaatactagtcaaatttgacgaatttagaatttaaaattttaacatgtgcaatgtaaattaattgcattttattaaatgttttattctttttgctggaatgaatttttcgagcatttaataaaagtttatcaactgaaaaatctttaaaaagacacagaagagaatcaaatacatcacagaaataatcaaaaagttgacaaattaaaaaataaaaattcatttggttgggttcaaaaatcgatttcgtctttttcgaaaaaagttaatttgttccattgatcatcgaatgtccattcaatcgcttccctttcccacttggcccatttgtgctcatctcgtgaaattggacaacgaatcagcaaaaggcgaatctttttactagggagcgaatttgaaataaaaagacaaacgattagtttagacaattttattaggcttttttggctgctctgatccacaactcatcaaaaaattggtcaatgaaataccnaaaaaaccctaatcaccaaaaaagtatatatttatatatcttt

SEQ ID NO: 2363 - DNA, 2462 bp, Heterodera glycines
  unsure (1)..(2462): unsure at all n locations
tgtagcaatcaaattttttattatggattggtttttcctattttaagatgataacatctcgttggagtgtccctgtcgatttctaacccaatgatcatcgcttcaagccgtacaattcgnaantagcaaatggtggtgggacattgattatgtttccttgctaaaagtagaagaacaatttaattatatgattaagtcgaagtggggataaaatggggtcaaattgggtgtcaacatctctatataaataaagaggaagatgcattaacgtatgcataaaaatgtttattgcgccattcactctaattttgtcgggggccactggtagtggcaaaacgcaatggttgatgaaattgttgagaaattacagggaactaatagacccgccgcctgcaaaaattctgtactgctactcggagttgaatgagtcggttcttgatctgatgaagcggggaattgagacgtacaacggtttgccagaccaagcgttgatccagagccaaccaaaaccactgctcctcgtgcttgatgatttaatgttaaatgtgggaagcgattttctggatctgctgttcacacgtggttcacataactggaatatcagcgttatttttgtcacccaaagcctatacgggcgtaacattagaacagcgcgagctaacagccattatttggtgctgacaaggaacccgtctggtcaactccaggtcagaacggttgggtcacaacttttcccaaaacgactcaattactttatggaggcgtacaatgaagcgactagtcaaccgttcagttacttggttataaacatgcacccaaatgctccggaaaatgagcggttgacaagcaaaatattccctggggagagccgtgaggtatatttacctgtagaataagcgtaatgaacgaaacaagtgcgcttaaaaactatttaaggaagggaaatttttttggttcgcaaaatgtacgagttcagtccatacattcgcgcaaattcggatttcttcaaaaaattagcctcaacaaaatcggataaaaggaaaaacgatttgctgaaaggcgcatccgtagaacaaattctcggattggttgagatttgtgcaaatattttaaaatttaactttcgcctcaaccggcgacagaggagacgattggccgtgtacgcagactattaccgagcaattgcacgttcacgtagtgagcgcacagccagacagaggctacaacagggcagcggaatagctttaggagctattttggcgccaattttgagcgttttggctgaacagctggtccagaaaattgttgcaactccatcggcacaacaacaacaaaatgaagcacactaaaaagatgctacttgtaccggagagtgaatatttggcgcttatcaacctgctgaaagggggcgcaggtggaacggactcacttcaagccgaaaaagcagcgatcgatgccagcatccaaaaaaatctaaatgacaataaaacgggtgcggacgtgaaaatgaaacgccactcgtggttgtacaaacagaggcatcagctcaaggacatgattgagaacaaaccacaaaaggtgattgtggaaaacgctacaggcacagcgccacaaaacattgccccgtatatgggcatacagaaaccaaacctcaacaagcttgaagaattgaacgggcaggatggcaaaaaaataaataaataaataggacgaaaatctgtgaaagcttccagaatccaaactcacaatggtgccagctttggtgaagaaacggatacgtctgcgcctgagacagatttgcggctaagcaaaaagagacaacaaaagtttcttgaacttaaaacaagcccagagcattacgataagctacaggaaatgattgaacgaaaccccgaaaagtacggagtagataaatcgtccggtgaaattttaactaacttcaaaaagccggtgattaggtccaactacattgattctttaatgtacctgacaggacagagagcagatgtgccgaaaggtcatcgattttttgttcaaaaaggcggcagtgacccggaaatggcgaaattttttcattcccaacggggagagggtgatagtaatcggagcaagcgcaaaaagttcgttcttgttaaagcaaaagctataaaaacggttggactcagccgaatggagcaaccaaataacacgaagcgtaaattctttaaaccgcttctatgggcaaagctgtagtacaaaaattattggaacaagtgtattacgatcttaggtcaccggcaagttacgctggtattcaaaaagtattgaaggaagcgaagaagcgaaatccgagcattactcttcgtgatgttgaccattttttgcataaacagcgcacctacacattgtttaaaccgcgcaaaaaccgcttccgcagactaaaatatgtgcccagtggactacacacggactggcaatgcgat

SEQ ID NO: 2364 - DNA, 2543 bp, Heterodera glycines
  unsure (1)..(2543): unsure at all n locations
cctgcgctcttaaagtcgaccacttccttcagatttttcgtttttgccggggcgccgtcaaatgttcgtttttgctttccatcaccagcagcactagagagttggaaacgggaaaggccagtcattttgatgatttttaagtaatataaaatctaaatgaaggattttgtgtttatgaaaatgaataaattgatgggaaacaaccgctttaataggtttttaggtcgagaaataaatggggtcaagcgcgtaataggtgccgcttgcaaaattgcaaaatattttttggcatcatgatggttttaaggaaaattagccaaattattcataaattcccaaattagcatttgtaaaatagaggtaattggaaaaaagcagttccatttcataagatattatgtaactaactataaataataaaaataatattaaatcttcgtgtaattaattgcttttaatacggtagcaatttgtgcgattcgttttttaatatggtatcaatatgttcgattcgttgttaatacggtaacaataggtgagactcgacgagccctttggtgctcatttgaaccaacatggggaaacacttcgtcaaatttgtggtccaacaaatttgaaaagtacgtgagcagttagcgaatttgggcgcccgtattgaaaagaaattcgatcagtcccatcagttccacgtaccatagggcactcgcagcgggtacacctgaaaagtgtaatttcaaaataatccagttaaatgttttagtataaatttaaaaagggcagcaaaaatcggggaaaatgcattaataatagaattaaaaatcggaaggcacgaaaatctcaaaaaagaaaagtatgaaaaacggcatttaatttttaaaaagttagggagcaaaaacctaaaacttaatcaaaaagcttaattttcctcatttaaatgtttttaaaaattttataatgtttttcgaaggaaaaattttaaatctaaaaattttatcaagaaaaatgaaatttggagatcaatttttgagtttcaattcttaagggtatattttctaaattttttcagttttagggggtgtatttcccaattttattgcccttttaatggaatttttcgaaaaacgccaaaaaggtaccaaaatggcaaaatggcaaaatgccaaaaaggtatttaaggcataaaaatccttaaagggcaaaaaaagcataataaaaaagtgctaatgcgtttttcatgcttatattcggaactaatgccagaaaaaaagcatatgcttcgaaagtcgaactttaataataagatatttgttcggctaaaatattcatgcttattatttaagtgataatgcaaaatattgcactcgaggtatatttgaaaatatatttttttggattttctttgaattcaaaattatagcaagttcaagccacataattaagattcatttttgtggttcacattactttgacaataatgtatttttatcaattgtaattttgagtctttttctcatttgtgattttgagaggttaatgaggcgataataaaagccaaataatggtacagcatatcccatttttaccatagaattagtttttgggactcagaattttcaaaatgttgctttctgacaaaaaaattcgatgcgattatgaaaggcgaaaacatttcatcaattatattttttctttattaattgaaattggccataaataggcatttttgcctgctaaaataaggatttagaaagagtaaaggcaaaatttgacttaaaaggtaccaactgaatttaaatttggcattttcaatttagaaaatttcattatttctcacttattttgacactcctcacggttttcattcgattgagtccaaagaccggtcacagcatacaattaatggaaccacacattcatcgccgccagatatcttcatcggagaaggccatcacaaaaacgtaaataaacaaaaacatttttaattatggacttaacatttaaacccttttaattatggacttaacatttaataattgattttatttataaattgtgacgataagctagcacaaagatggctttatactgccgtcctttttttgtggaagttcattcttttaactcaaaaaaaagtggtgtaaaatgcagcgtccaacggtttgtatttactccgtttgaattgcttgtggcaaaaaatacaatagacagtggaccaaaccaaatggttggttctggtcggcagcattcggcgaaggtgaaaggatacgggcatactgatttgttataattatttaaattattcatattttaaataacatttattttaaggtgatatctcaatttaataaattcatttgaaagtccgatgcaaaccgagatgattgtggatgaaaaacttcaaaattttagtaaagcaaaaagtcgatgatccattttttatgaacaaaaagcgtggccaattttatgtctactttctttagtttttttttgcgattttaaatagattaagtgaaatagtgatatacaaaagaantaaattcaca

SEQ ID NO: 2365 - DNA, 2039 bp, Heterodera glycines
gcccacacttttaaaccaacgtatcgagaaaatccttggaagcaaagattgcacccccctggtgcggaaaaatgacgctttttaaaatgttcctaatgaacgggatattccaaggaaatttcattcattcagaattatgcataactttcaacaagactgcattgaaaagcatattctctgtggcaaattcgacatttccacgcctttctgtctgtaaggcatattaaaattattatttaaattttatcgtataattgcctccacaaattttagagccgtggataacaccgtgctttcttaggtattcggccgttgtaaatttcttttcacaaagtgtacagccgtatggcgcacttaatcaaaggtgttttttatataaatgtattattactattattaattattattactctctgccatgtacgcgcaaatgcgcaccgagaccacgcttagtaaaatttttttcacagaattggcactggatgagtcctgtgacaaaattaaagaagttcatttgaattattttgagttgttgcctaatggtggggctggcaccgcacgttgcgcgagtgctggagcacccgccgcaggttgtacatgcgcgggtgtgtgatcagccgccattggtagtgcttgaacaaccgccgtaggttgcgcgggtgcttgagcacccgccgcagggggtgggtgcacaaccgcaccaggttgtacaggtgtgcgcaagttttgatttcaaccattattgcggtgtgaaccatttgagaaacatatggttgcttcaaaaaaaaactttgtgatatttaaaatagttgaattatacaatatgtgccaaaacaggaggaagaagctggcgcgaaaaggcatcgaagtcgaatgggcgaaattcaaattgccgttgcataataaaccaattttaaatattattattttaaaaaataacattttaaaggagcagaacggtggaaaaacttaatctttctgttggatttacggtttaaatagcaaaatagtgtagtttatgttcaagaaacatcaaaaagtagtccaaatatggaaaagtttcataaatgatacgacaaatcggtggatttccaaaaatggcccgcccaaatgtcaaacagaaaaaattaacatgtatttttaatttatgatgacaacatatgggggccaaaatgacatgagttttctccaccgcaagaaaaacgaagtccgcgccccgccccgactgccaaaatttattgtcataaaattttcaacatctttctgttgcaccgataaatgactgccgcacaaaaaaaaaagtcgtaaaactgtttttcgacagtgcgcagcaaattacatcgttccatgccccccgcccccaccaaccagtcgccaatttgaaacaaaaagcgagatcaatgctttatgaaatgattcaaaatagaaatggctattaaagtcataaatttaaaaatttgtaatctttggtcactaaaaaattttaaaacctaaatttagatttttatcatttgataaattggtcgttgatcattatgaaatagtatttaagtggtatttaagcaagtcttttttctcaaattaaaagcaaaaattacccataaaatttaattttttattattttccgcttttaaaatccgtttcctatccattatcgatgatgcgacaacgttccaaatctctttctaatataaattctgaaattgttcaaaccccaatttgccgtttatatctgcgctatgttgatgctttatatggcagaaggcgtttatcaactcctcatagaaattttttcccaataaaaatgaatttaggtcttttttcattttaattttttatttttaaacctatttttaattttctagaggcaaaacatgatcggatttttttgaagcggaggaaaaacaatgtttgggtgaaaattcgacgggtacagatcatttgtcttgggttaatttatatatttctgtcatttagtcgacacgcctgctggaaaaaaagaaataatattgataataaagtgaaaatgttttccaat
